United States Patent Application Publication US 2020/0163878 A1 - sequence listing, part 39

SEQ ID NO: 144583 - RNA, 1413 nt, Artificial Sequence
  derived and/or modified CDS sequence (opt3) from neuraminidase__InfluenzaA__ACI32768
augaaccccaaucagaagaucauuaccauaggcagcaucuccauugccaucgggauuaucucucugaugucacaaauaggaaacaucauuaguaucugggcuagccacuccauucagacagguucucagaaucauacuggcaucugcaaccagagaauaauuacguacgaaaauucgaccugggugaaccacacauaugucaauaucaacaauacuaacguuguggcagggaaagacaagaccucaguaacacucgccggaaauagcagucuuuguuccauuucuggcugggcgaucuacaccaaagauaacagcaucaggauugguuccaagggggacguguucgucauacgggagccuuuuaucucaugcagucaucuggagugucgcacuuucuuuuugacacaaggagcuuuacugaaugauaaacacagcaacggcaccgugaaggaccgaucuccauaucgugcccuaauguccugcccgcucggcgaagcacccucaccuuacaauagcaaguucgagaguguugccuggucugcuuccgcaugucaugaugggaugggauggcugacgauugguaucagcggcccagacaacggggccguggcuguccuuaaauauaacggaauaauuacugaaaccaucaagucguggaaaaagagaauccugaggacacaggagucugagugcguguguguaaauggcuccugcuuuacuauuaugaccgauggucccucaaacggggccgcgaguuacaaaaucuucaagauugaaaagggaaaaguuacaaagagcauagaguugaaugcaccuaacuuucacuaugaagaguguuccugcuacccagacaccggcacggugaugugugucugccgggauaauuggcacggcucuaaccgccccugggugagcuucaaucagaaccucgacuaccagaucggguauauuugcucaggaguguuuggugauaauccuagaccaaaagacggcaaggggaguuguaacccggucacuguugauggagccgacggcgugaaagguuucuccuacaaguaugggaauggcguauggaucggaaggacaaaaagcaaccggcugcgcaagggcuuugagaugaucugggaccccaauggguggaccgauacugacucugauuucucagugaagcaagacgucguggcuauuacagauuggaguggauacagcgguuccuuuguucagcauccugaacugaccggccucgacugcauacgaccauguuucuggguggaguuagucagagggcugcccagggaaaacacgaccaucuggacaucuggaucgagcauuuccuucugcggcguggauucagacacugccaauuggaguuggccugauggugcagagcuuccauuuaccaucgacaaauga

SEQ ID NO: 144584 - RNA, 1413 nt, Artificial Sequence
  derived and/or modified CDS sequence (opt3) from neuraminidase__InfluenzaA__ACI32769
augaaccccaaucagaagaucauuaccauaggcagcaucuccauugccaucgggauuaucucucugaugcuccaaauaggaaacaucauuucaaucugggcuagucacagcauucagacagguucccagaaucauacuggcaucugcaaccagagaauaauuacguacgaaaauucuaccugggugaaccacacauaugucaauaucaacaauacuaacguuguggcagggaaagacaagauuucgguaacccuugccggaaauucaagccuguguaguaucuccggcugggcgaucuacacaaaagauaacucuauuaggauagguagcaagggggacguguucgucauccgggagccuuuuauuuccugcucacauuuggagugucgcaccuucuuuuuaacucaaggagcucugcuaaaugauaaacacaguaacggcacagugaaggaccgaagcccauaucgugcccucaugucuugcccgcugggcgaagcacccuccccuuacaauucaaaguucgagagcguugccuggagugcuucugcaugucaugaugggaugggauggcuuaccaucgguauauccggcccagacaacggggccguggcuguccugaaauauaacggaauuaucacggaaacuaucaagagcuggaaaaagagaauuuugaggacccaggagucggagugcguguguguaaauggcucuugcuuuacaaucaugacugauggucccuccaacggggccgcgucauacaaaauuuucaagauagaaaagggaaaaguuaccaagaguaucgagcucaaugcaccuaacuuucacuaugaagaguguagcugcuacccagacacaggcaccgugaugugugucugccgggauaauuggcacggcuccaaccgccccugggugucuuucaaucagaaccuggacuaccagauuggguauaucugcagcggaguguuuggugauaauccuagaccaaaagacggcaaggggucauguaacccggucacgguugauggagccgacggcgugaaagguuucaguuacaaguaugggaauggcguauggaucggaaggacuaaauccaaccggcugcgcaagggcuuugagaugauuugggaccccaauggguggacagauaccgacagcgauuucucugugaagcaagacgucguggcuauaacugauuggucaggauacagugguagcuuuguucagcauccugaacucacaggcuuagacugcauccgaccauguuucuggguggagcuggucagagggcuucccagggaaaacaccacgauuuggaccuccggaucuucgaucagcuucugcggcguggauuccgacacagccaauuggucauggccugauggugcagaguugccauuuacuauugacaaauga

SEQ ID NO: 144585 - RNA, 1413 nt, Artificial Sequence; identical to SEQ ID NO: 142434
  derived and/or modified CDS sequence (opt3) from neuraminidase__InfluenzaA__ACI32770

SEQ ID NO: 144586 - RNA, 1413 nt, Artificial Sequence
  derived and/or modified CDS sequence (opt3) from neuraminidase__InfluenzaA__ACI32771
augaaccccaaucagaagaucauuaccauaggcagcaucuccauugccaucgggauuaucucucugaugcuccaaauaggaaacaucauuucaaucugggcuagucacagcauucagacagguucccagaaucauacuggcaucugcaaccagagaauaauuacguacaaaaauucuaccugggugaaccacacauaugucaauaucaacaauacuaacguuguggcagggaagggaaaaaccucgguaacacuugccggcaauucaagccuguguaguauuuccgguugggcgaucuacaccaaggacaacucuaucaggauugggagcaaaggagauguguucgucauacgggagccuuuuaucuccugcucacauuuggaaugucgcacuuucuuuuuaacacaaggcgcucugcuaaaugacaagcacaguaacggcaccgugaaggaucgaagcccauaucgugcccucaugucuugcccgcugggggaggcacccuccccuuacaauucaaaauucgaaagcguugccuggagugcuucugcaugucaugacggaauggguuggcuuacgauuggcaucuccgggccagauaacggagccguggcuguccugaaguauaacggcauaauuacugagaccaucaaaagcuggaagaaaagaaucuugaggacacaggaaucggagugcguguguguaaaugguucuugcuuuacuauuaugaccgacgggcccuccaacggagccgcgucauacaagaucuucaagauugagaaaggcaagguuacaaaaaguauagaacucaaugcaccuaacuuucacuaugaggaauguagcugcuacccagauaccggcacggugaugugugucugccgggacaauuggcacggguccaaccgccccugggugucuuucaaucagaaccuggauuaccagaucggauauauuugcagcgguguguuuggcgacaauccuagaccaaaggaugggaaaggaucauguaacccggucacuguugacggcgccgauggugugaagggguucaguuacaaauauggcaauggaguauggaucggcaggacaaaguccaaccggcugcgcaagggguuugagaugaucugggaccccaauggauggaccgacacugauagcgacuucucugugaaacaagaugucguggcuauuacagacuggucagguuacaguggcagcuuuguucagcauccugagcucaccggguuagauugcauacgaccauguuucuggguggaacuggucagaggacuucccagggagaacacgaccaucuggacauccgguucuucgauuagcuucugcggcguggacuccgauacugccaauuggucauggccugacggggcagaauugccauuuaccaucgauaaguga

SEQ ID NO: 144587 - RNA, 1413 nt, Artificial Sequence; identical to SEQ ID NO: 142434
  derived and/or modified CDS sequence (opt3) from neuraminidase__InfluenzaA__ACI32772

SEQ ID NO: 144588 - RNA, 1413 nt, Artificial Sequence; identical to SEQ ID NO: 142434
  derived and/or modified CDS sequence (opt3) from neuraminidase__InfluenzaA__ACI32773

SEQ ID NO: 144589 - RNA, 1413 nt, Artificial Sequence; identical to SEQ ID NO: 142434
  derived and/or modified CDS sequence (opt3) from neuraminidase__InfluenzaA__ACI32774

SEQ ID NO: 144590 - RNA, 1413 nt, Artificial Sequence; identical to SEQ ID NO: 142434
  derived and/or modified CDS sequence (opt3) from neuraminidase__InfluenzaA__ACI32775

SEQ ID NO: 144591 - RNA, 1413 nt, Artificial Sequence
  derived and/or modified CDS sequence (opt3) from neuraminidase__InfluenzaA__ACI32776
augaaccccaaucagaagaucauuaccauaggcagcaucuccauugccaucgggauuaucucucugaugcuccaaauaggaaacaucauuucaaucugggcuagucacagcauucagacagguucccagaaucauacuggcaucugcaaccagagaauaauuacguacaaaaauucuaccugggugaaccacacauaugucaauaucaacaauacuaacguuguggcagggaaggacaaaaccucgguaacacuugccggaaauucaagccuguguaguauuuccggcugggcgaucuacaccaaggauaacucuaucaggauugguagcaaaggggacguguucgucauacgggagccuuuuaucuccugcucacauuuggaaugucgcacuuucuuuuuaacacaaggagcucugcuaaaugauaagcacaguaacggcaccgugaaggaccgaagcccauaucgugcccucaugucuugcccgcugggcgaggcacccuccccuuacaauucaaaauucgaaagcguugccuggagugcuucugcaugucaugaugggaugggauggcuuacgauugguaucuccggcccagacaacggggccguggcuguccugaaguauaacggaauaauuacugagaccaucaaaagcuggaagaaaagaaucuugaggacacaggaaucggagugcguguguguaaauggcucuugcuuuacuauuaugaccgauggucccuccaacggggccgcgucauacaagaucuucaagauugagaaaggaaagguuacaaaaaguauagaacucaaugcaccuaacuuucacuaugaggaauguagcugcuacccagacaccggcacggugaugugugucugccgggauaauuggcacggcuccaaccgccccugggugucuuucaaucagaaccuggacuaccagaucggguauauuugcagcggaguguuuggugauaauccuagaccaaaggacggcaaagggucauguaacccggucacuguugauggagccgacggcgugaaggguuucaguuacaaauaugggaauggcguauggaucggaaggacaaaguccaaccggcugcgcaagggcuuugagaugaucugggaccccaauggguggaccgauacugacagcgauuucucugugaaacaagacgucguggcuauuacagauuggucaggauacagugguagcuuuguucagcauccugagcucaccggcuuagacugcauacgaccauguuucuggguggaacuggucagagggcuucccagggagaacacgaccaucuggacauccggaucuucgauuagcuucugcggcguggauuccgacacugccaauuggucauggccugauggugcagaauugccauuuaccaucgacaaguga

SEQ ID NO: 144592 - RNA, 1413 nt, Artificial Sequence
  derived and/or modified CDS sequence (opt3) from neuraminidase__InfluenzaA__ACI32777
augaaccccaaucagaagaucauuaccauaggcagcaucuccauugccaucgggauuaucucucugaugcuccaaauaggaaacaucauuucaaucugggcuagucacagcauucagacagguucccagaaucauacuggcaucugcaaccagagaauaauuacguacaaaaauucuaccugggugaaccacacauaugucaauaucaacaauacuaacguuguggcagggaaggacaaaaccucgguaacacuugccggaaauucaagccuguguaguauuuccggcugggcgaucuacaccaaggauaacucuaucaggauugguagcaaaggggacguguucgucauacgggagccuuuuaucuccugcucacauuuggaaugucgcacuuucuuuuuaacacaaggagcucugcuaaaugauaagcacaguaacggcaccgugaaggaccgaagcccauaucgugcccucaugucuugcccgcugggcgaggcacccuccccuuacaauucaaaauucgaaagcguugccuggagugcuucugcaugucaugaugggaugggauggcuuacgauugguaucuccggcccagacaacggggccguggcuguccugaaguauaacggaauaauuacugagaccaucaaaagcuggaagaaaagaaucuugaggacacaggaaucggagugcguguguguaaauggcucuugcuuuacuauuaugaccgauggucccuccaacggggccgcgucauacaagaucuucaagauugagaaaggaaagguuacaaaaaguauagaacucaaugcaccuaacuuucacuaugaggaauguagcugcuacccagacaccggcacggugaugugugucugccgggauaauuggcacggcuccaaccgccccugggugucuuucaaucagaaccuggacuaccagaucggguauauuugcagcggaguguuuggugauaauccuagaccaaaggacggcaaagggucauguaacccggucacuguugauggagccgacggcgugaaggguuucaguuacaaauaugggaauggcguauggaucggaaggacaaaguccaaccggcugcgcaagggcuuugagaugaucugggaccccaauggguggaccgauacugacagcgauuucucugugaaacaagacgucguggcuauuacagauuggucaggauacagugguagcuuuguucagcauccugagcucaccggcuuagacugcauacgaccauguuucuggguggaacuggucagagggcuucccagggagaacacgaccaucuggacauccggaucuucgauuagcuucugcggcguggauuccgacacugccaauuggucauggccugauggugcagaauugccauuugcuaucgacaaguga

SEQ ID NO: 144593 - RNA, 1413 nt, Artificial Sequence; identical to SEQ ID NO: 142434
  derived and/or modified CDS sequence (opt3) from neuraminidase__InfluenzaA__ACI32778

SEQ ID NO: 144594 - RNA, 1413 nt, Artificial Sequence; identical to SEQ ID NO: 142434
  derived and/or modified CDS sequence (opt3) from neuraminidase__InfluenzaA__ACI32779

SEQ ID NO: 144595 - RNA, 1413 nt, Artificial Sequence; identical to SEQ ID NO: 142434
  derived and/or modified CDS sequence (opt3) from neuraminidase__InfluenzaA__ACI32780

SEQ ID NO: 144596 - RNA, 1413 nt, Artificial Sequence; identical to SEQ ID NO: 142434
  derived and/or modified CDS sequence (opt3) from neuraminidase__InfluenzaA__ACI32781

SEQ ID NO: 144597 - RNA, 1413 nt, Artificial Sequence
  derived and/or modified CDS sequence (opt3) from neuraminidase__InfluenzaA__ACI32782
augaaccccaaucagaagaucauuaccauaggcagcaucuccauugccaucgggauuaucucucugaugcuccaaauaggaaacaucauuucaaucugggcuagucacagcauucagacagguucccagaaucauacuggcaucugcaaccagagaauaauuacguacgaaaauucuaccugggugaaccacacauaugucaauaucaacaauacuaacguuguggcagggaaagacaagaccucgguaacacuugccggaaauucaagccuguguaguauuuccggcugggcgaucuacaccaaagauaacucuaucaggauugguagcaagggggacguguucgucauacgggagccuuuuaucuccugcucacauuuggagugucgcacuuucuuuuuaacacaaggagcucugcuaaaugauaaacacaguaacggcaccgugaaggaccgaagcccauaucgugcccucaugucuugcccgcugggcgaagcacccuccccuuacaauucaaaguucgagagcguugccuggagugcuucugcaugucaugaugggaugggauggcuuacgauugguaucuccggcccagacaacggggccguggcuguccugaaauauaacggaauaauuacuggcaccaucaagagcuggaaaaagcagaucuugagaacacaggaaucggagugcguguguaugaaugguucuugcuuuacuauuaugaccgaugggcccuccaacggagccgcgucauacaaaaucuucaagauugagaagggcaaagcaacaaagaguauagaacucaaugccccuaacuuucacuaugaggaauguagcugcuacccagacaccggcacgguaauguguguuugcagggauaauuggcacggguccaaccggcccugggugucuuucaaucagaaccuggacuaccaaaucggauauauuugcagcggugucuuuggcgauaauccucgcccaaaagacagaaaggggucauguaacccggugacuguggauggagcugacggcgucaaagguuucaguuacaaguaugggaauggcguuuggaucggaaggacaaaauccaaccggcugcgcaagggcuuugagaugaucugggaccccaauggguggaccaacacugauagcgacuucucugugaagcaggauguaguggccauuacagacuggucaggauacagugguagcuuuguccagcauccugagcucaccggcuuagauugcauacgaccauguuucuggguggaacugguuagagggcuucccagggagaauacgaccaucuggacauccggaucuucgauuagcuucugcggcgugaacuccgacacugcaaacuggucauggccugauggugcugaauugccauuuaccaucgacaaauga

SEQ ID NO: 144598 - RNA, 1413 nt, Artificial Sequence
  derived and/or modified CDS sequence (opt3) from neuraminidase__InfluenzaA__ACI32783
augaaccccaaucagaagaucauuaccauaggcagcaucuccauugccaucgggauuaucucucugaugcuccaaauaggaaacaucauuucaaucugggcuagucacagcauucagacagguucccagaaucauacuggcaucugcaaccagagaauaauuacguacgaaaauucuaccugggugaaccacacauaugucaauaucaacaauacuaacguuguggcagggaaagacaagaccucgguaacacuugccggaaauucaagccuguguaguauuuccggcugggcgaucuacaccaaagauaacucuaucaggauugguagcaagggggacguguucgucauacgggagccuuuuaucuccugcucacauuuggagugucgcacuuucuuuuuaacacaaggagcucugcuaaaugauaaacacaguaacggcaccgugaaggaccgaagcccauaucgugcccucaugucuugcccgcugggcgaagcacccuccccuuacaauucaaaguucgagagcguugccuggagugcuucugcaugucaugaugggaugggauggcuuacgauugguaucuccggcccagacaacggggccguggcuguccugaaauauaacggaauaauuacugaaaccaucaagagcuggaaaaagcagaucuugagaacacaggagucggagugcguguguguaaauggcucuugcuuuacuauuaugaccgauggucccuccaacggggccgcgucauacaaaaucuucaagauugaaaagggaaaaguuacaaagaguauagagcucaaugcaccuaacuuucacuaugaagaguguagcugcuacccagacaccggcacggugaugugugucugcagggauaauuggcacggcuccaaccggcccuggcugucuuucaaucagaaccuggacuaccaaaucggguauauuugcagcggagugaucggugauaauccucgcccaaaagacggcaaggggucauguaacccggugacugucgauggagccgacggcguuaaagguuuuaguuacaaguaugggaauggcguguggaucggaagaacaaaauccaacaggcuccggaagggcuucgagaugauuugggaccccaauggguggaccgauacugacagcgauuuuucuguaaagcaggacguggucgcuauaacagauuggucaggauacagugguagcuucgugcagcauccugaauuaaccggccuggacugcauccgcccauguuuuuggguugagcuugugcgaggguugcccagagaaaacacgaccauuuggacauccggaucuucgaucagcuucugcggcgucgauggugacacugccaauugguccuggccugauggggcagagcugccauucaccauugacaaauga

SEQ ID NO: 144599 - RNA, 1413 nt, Artificial Sequence
  derived and/or modified CDS sequence (opt3) from neuraminidase__InfluenzaA__ACI32784
augaaccccaaucagaagaucauuaccauaggcagcaucuccauugccaucgggauuaucucucugaugcuccaaauaggaaacaucauuucaaucugggcuagucacagcauucagacagguucccagaaucauacuggcaucugcaaccagagaauaauuacguacgaaaauucuaccugggugaaccacacauaugucaauaucaacaauacuaacguuguggcagggaaagacaagaccucgguaacacuugccggaaauucaagccuguguaguauuuccggcugggcgaucuacaccaaagauaacucuaucaggauugguagcaagggggacguguucgucauacgggagccuuuuaucuccugcucacauuuggagugucgcacuuucuuuuuaacacaaggagcucugcuaaaugauaaacacaguaacggcaccgugaaggaccgaagcccauaucgugcccucaugucuugcccgcugggcgaagcacccuccccuuacaauucaaaguucgagagcguugccuggagugcuucugcaugucaugaugggaugggauggcuuacgauugguaucuccggcccagacaacggggccguggcuguccugaaauauaacggaauaauuacuggcaccaucaagagcuggaaaaagcagaucuugagaacacaggaaucggagugcguguguaugaaugguucuugcuuuacuauuaugaccgaugggcccuccaacggagccgcgucauacaaaaucuucaagauugagaagggcaaagcaacaaagaguauagaacucaaugccccuaacuuucacuaugaggaauguagcugcuacccagacaccggcacgguaauguguguuugcagggauaauuggcacggguccaaccggcccugggugucuuucaaucagaaccuggacuaccaaaucggauauauuugcagcggugucuuuggcgauaauccucgcccaaaagacagagaggggucauguaacccggugacuguggauggagcugacggcgucaaggguuucaguuacaaauaugggaauggcguuuggaucggaaggacaaaguccaaccggcugcgcaaaggcuuugagaugaucugggaccccaauggguggaccaacacugauagcgacuucucugugaagcaggauguaguggccauuacagacuggucaggauacagugguagcuuuguccagcauccugaacucaccggcuuagauugcauacgaccauguuucuggguggagcugguuagagggcuucccagggaaaauacgaccaucuggacauccggaucuucgauuagcuucugcggcgugaacuccgacacugcaaacuggucauggccugauggugcugaguugccauuuaccaucgacaaguga

SEQ ID NO: 144600 - RNA, 1413 nt, Artificial Sequence
  derived and/or modified CDS sequence (opt3) from neuraminidase__InfluenzaA__ACI32785
augaaccccaaucagaagaucauuaccauaggcagcaucuccauugccaucgggauuaucucucugaugcuccaaauaggaaacaucauuucaaucugggcuagucacagcauucagacagguucccagaaucauacuggcaugugcaaccagagaaucauaacguacgaaaauucuaccugggugaaccacacauaugucaauauuaacaauacuaacguuguggcagagaaagacaagaccucgguaacacuugccggaaauucaagccuguguaguaucuccggaugggcgauuuacaccaaagauaacucuaucaggaucggcagcaagggugacguguucgucauucgggagccuuuuauauccugcucacauuuggaaugucgcacuuucuuuuuaacacaaggggcucugcuaaaugauaaacacaguaacggaaccgugaaggaccgaagcccauaucgugcccucaugucuugcccgcugggcgaggcacccuccccuuacaauucaaaguucgaaagcguugccuggagugcuucugcaugucaugauggcaugggguggcuuacgaucggaauuuccgguccagacaacggcgccguggcuguccugaaauauaacgggaucauaacugagaccauuaagagcuggaaaaagagaaucuugaggacacaggagucggaaugcguguguguaaauggaucuugcuuuacuaucaugaccgauggccccuccaacggugccgcgucauacaaaauuuucaagaucgagaaggggaaaguuacaaagaguauugaacucaaugcaccuaacuuucacuaugaggaguguagcugcuacccagacaccggaacggugaugugugucugccgggauaauuggcacggcuccaaccgccccugggugucuuucaaucagaaccuggacuaccagauaggcuauaucugcagcgggguguuuggagauaauccuagaccaaaagacgguaagggcucauguaacccggucacuguugauggggccgacggagugaaaggcuucaguuacaaguaugguaaugggguauggauuggcaggacaaaauccaaccggcugcgcaagggauuugaaaugaucugggaccccaauggcugggcugauaccgacagcgauuucucugugaagcaagacgucguggccaucacugauuggucaggguacagugggagcuuuguucagcauccugagcucacagguuuaaacugcauucgaccauguuucuggguggaacuggucagaggccuucccagggagaauaccacgauauggaccuccgggucuucgaucagcuucugcggaguggacuccgauacagcaaacuggucauggccugacggcgcugaauugccauuuacuauugauaaauga

SEQ ID NO: 144601 - RNA, 1413 nt, Artificial Sequence
  derived and/or modified CDS sequence (opt3) from neuraminidase__InfluenzaA__ACI32787
augaaccccaaucagaagaucauuaccauaggcagcaucuccauugccaucgggauuaucucucugauacuccaaaucggaaacauuaucucaauuugggcuagucacagcauccagacagguucccagaaucauacuggcauaugcaaccagagaauuaucacguacgaaaauucuaccugggugaacaauacauaugucaacauuaauaacacuaauguuguggcagagaaagacaagaccucgguaacacuugccgggaacucaagccuguguaguaucuccggaugggcgaucuacaccaaagauaauucuauuaggauaggcagcaagggugacguguucgucauccgggagccuuuuauuuccugcucacacuuggaaugucgcacuuucuuuuuaacacaaggggcucugcuaaacgauaaacauaguaauggaaccgugaaggaccgaagcccauaucgugcccucaugucuugcccgcugggcgaggcacccuccccuuacaacucaagauucgaaagcguugccuggagugcuucugcaugucacgauggcaugggguggcuuacgaucggaauauccgguccagacaacggcgccguggcuguccugaaguauaaugggauuaucacugagaccaucaaaagcuggaagaaaaggauuuugcggacacaggagucggaaugcguguguaugaacggaucuugcuuuacuaucaugaccgauggccccuccaauggugccgcgucauacaagauuuucaaaauagagaaggggaagguaacaaaaaccaucgaacucaacgcaccuaauuuucauuaugaggaguguaguugcuacccagacacgggaacuguuaugugugugugccgcgauaacuggcacggcagcaauagacccugggucuccuucaaccagaaucuggacuaccagauuggcuauaucugcucugggguguuuggagauaacccuaggccaaaggacggugaaggcagcuguaauccggugacagucgauggggccgacggaguuaaaggcuucucauacaaguaugguaacgggguguggaucggccggaccaaaaguaaucgccugcgaaagggauuugagaugauuugggaccccaacggcuggacuaauacagauuccgacuucagcguaaaacaagauguggucgcuauaaccgacuggucuggguacucaggaaguuuugugcagcacccugaacucacggguuuagauugcaucagaccauguuucuggguugagcuggugaggggccuuccccgggaaaacaccacaauuuggacuagcggguccucuaucucguucugcggagucaacggcgguaccgccgacuggagcuggccugauggggcagaguugccauuuacaauugacaaguga

SEQ ID NO: 144602 - RNA, 1413 nt, Artificial Sequence
  derived and/or modified CDS sequence (opt3) from neuraminidase__InfluenzaA__ACI32788
augaaccccaaucagaagaucauuaccauaggcagcaucuccauugccaucgggauuaucucucugaugcuccaaauaggaaacaucauuucaaucugggcuagucacagcauucagacagguucccagaaucauacuggcacgugcaaccagagaaucauaaccuacgagaauaacacaugggugaaucacacuugugucaacauuaauaacaccaauguuguggcagggaaagacaagacaucuguaacccuugugggaaacucgucacugugcagcaucaguggcugggccauuuauacuaaagauaauuccaucaggaucgguucuaagggggacgucuucgugauucgggaaccuuuuauaagcuguucccauuuggagugccgcacauucuuuuuaacccaaggagcgcugcuaaacgauaaacacucaaauggcacgguuaaggaccgaaguccauaccgugcucucaugagcuguccgcugggcgaagcccccucuccuuauaacuccaaguucgagucaguggcauggagcgccagugcuugccaugaugggaaaggauggcuuacuaucgguauuucuggcccagacaacggggcagucgccgugcugaaguacaauggaaucauaaccgaaacaauuaaauccuggaagaaaagaaucuugaggacucaggagagcgaguguguaugcguuaacggcucguguuuuaccaucaugacagauggucccucuaauggggcugccuccuauaagauuuucaagaucgaaaaaggaaaggugaccaaaucaauugagcucaacgcgccuaauuuucacuacgaagagugcaguuguuauccagacacgggcacugucaugugcgugugccgggauaacuggcacggcagcaaucgccccuggguguccuucaaccagaaucuggacuaccagauaggguacaucuguucuggagucuuuggugauaacccuagaccaaaggacggcaaagggagcugcaauccgaugacaguugauggagcagacggcgugaaggguuucucauauaaauacgggaacggcguauggauuggaaggaccaagaguaaucggcugcgcaagggcuuugagaugaucugggaccccaacggguggacugauacagacuccgauuucagcgugaaacaagacgucguggccaucaccgauuggucuggauauucagguaguuuuguucagcauccugaacucacgggcuuagacuguauucgaccaugcuucuggguggagcuggucagagggcuucccagggaaaauaccacaauauggacuagcggauccucuaucucguucuguggcguggauagcgacaccgcuaacugguccuggccugauggugccgaguugccauuuacaauugacaaguga

SEQ ID NO: 144603 - RNA, 1410 nt, Artificial Sequence
  derived and/or modified CDS sequence (opt3) from neuraminidase__InfluenzaA__ACI32790
augaaccccaaucagaagaucauuaccauaggcagcgugucccugacaaucgccacuauuugcuuccucacgcaaaucgcuauucuugucaccacaguuacucugcacuuuaaacaguacgaguguaacucuccuccaaauaaccaggugauguugugcgaaccgaccaucauagagagaaauaucacagaaauuguauauuuaaccaacacuacaaucgagaaggaaauuugucccaaacuggcagaguacaggaauuggucaaagccucagugcaacaucaccggguucgccccauuuaguaaagacaauagcauacggcuauccgcgggaggugauauuugggugacgcgcgagcccuaugucucuugugacccugauaagugcuaccaauucgcucucggccaggggacuacccugaacaauggacauucgaacgacacagugcacgaucgaacuccauaucguacccuucugaugaaugaauugggcguucccuuucaucucgguacaaaacagguguguaucgccuggucaagcaguuccugccacgacgggaaagcauggcugcaugucugugugaccggagaugacaagaacgccacggcuucuuucauuuacaauggcagacugguagauagcaucggcuccuggucaaagaagauccucaggacucaggagagugaaugcguuuguauuaacgggacaugcaccguggucaugacugacggaagcgcaucugguaaagccgauacaaagauauuauuuaucgaggagggcaagauugugcacaccucccugcuuucagggagcgcucaacacguggaagagugcaguuguuauccucgguacccaggaguccgcugcguuuguagagacaacuggaaaggcucuaauaggccgaucguggauauaaacguaaaggacuacuccauugugagcucguaugucugcucugguuuggugggggacacgccccggaaaaaugauuccucaaguagcucccauugucuggacccuaacaaugaagagggaggccacggcguuaaggggugggccuucgaugacggaaacgauguguggaugggucgcaccaucucugaaaaacuacgaagcggcuacgagacauuuaaggucaucgagggguggucaaaaccaaauaguaagcuccagauuaacagacaggugaucguagacaggggaaaucgguccggcuauagcgguauuuucucuguugaagggaagucaugcauaaaccguuguuuuuacguggagcugauccgcggcagaaaucaggaaacugagguccuuuggaccaguaacagcauuguggucuucugcggaacauccggcacuuaugggaccggaucuuggcccgauggugcggacaucaaucugaugccuaucuga

SEQ ID NO: 144604 - RNA, 1410 nt, Artificial Sequence; identical to SEQ ID NO: 142430
  derived and/or modified CDS sequence (opt3) from neuraminidase__InfluenzaA__ACI32791

SEQ ID NO: 144605 - RNA, 1410 nt, Artificial Sequence; identical to SEQ ID NO: 142430
  derived and/or modified CDS sequence (opt3) from neuraminidase__InfluenzaA__ACI32793

SEQ ID NO: 144606 - RNA, 1410 nt, Artificial Sequence; identical to SEQ ID NO: 142430
  derived and/or modified CDS sequence (opt3) from neuraminidase__InfluenzaA__ACI32794

SEQ ID NO: 144607 - RNA, 1410 nt, Artificial Sequence; identical to SEQ ID NO: 142760
  derived and/or modified CDS sequence (opt3) from neuraminidase__InfluenzaA__ACI32795

SEQ ID NO: 144608 - RNA, 1410 nt, Artificial Sequence
  derived and/or modified CDS sequence (opt3) from neuraminidase__InfluenzaA__ACI32796
augaaccccaaucagaagaucauuaccauaggcagcgugucccugacaaucucuacuauuugcuucuuuaugcaaaucgccauucucaucacgaccgucacacuucacuucaaacaguacgaguuuaacucaccuccaaauaaccagguuaugcugugugaaccgacuauaaucgagagaaauauuaccgaaaucguguauuugacaaacaccacuauugagaaggaaaucugccccaaauuagcugaguacaggaauuggaguaagccucaguguagcauaacaggguucgcaccauuuuccaaagacaacucuauucggcugucggccggaggugauaucuggguaacccgcgagcccuaugugucaugcgacccugauaaguguuaccaauucgcgcuaggccaggggacgacucucaauaacguccauagcaaugacaccgugcacgaucgaacaccauaucguacucugcuuaugaacgaacugggaguucccuuucauuugggcaccaaacaggugugcauugcuuggaguuccucuagcugucacgacgguaaggccuggcuccaugucugcgugacaggggaugacaagaaugcaaccgccuccuucaucuacaacggaagacugguagauucaaucguuaguuggagcaaagagauucugaggacgcaggaaucugagugugugugcauaaauggcacuuguacagucgugaugaccgacggcuccgcuucagggaaggcagauacuaaaauccucuuuauugaggaaggaaagaucgugcacacaagcaccuuaagugguucugcccaacacgucgaggaaugcuccugcuauccucgguacccaggcguucgcugugugugcagagacaacuggaaggggagcaacaggccgauaguagauauuaauaucaaagacuacucgaucgugucuuccuaugucuguucaggacuggugggcgacacgccccggaagaacgauaguagcuccucuagccauugccuugacccuaauaacgaggaaggugggcacggaguuaaaggcugggcuuucgaugacggcaaugauguguggauggggcgcaccauuucagagaagagucgauccggauacgagacauuuaaagucaucgaagguuggagcaacccaaauucuaaguugcagauuaacagacaggugauaguagacaggggcaaucggucaggguauaguggaaucuucagcguugagggcaaauccuguauuaaccguugcuuuuacguggaacugauccgcgguagaaaggaggaaacugagguccuauggaccucuaauucgaucguggucuucugugggacaagcggcacuuauggaaccggcuccuggcccgauggggccgacauuaaccucaugccuauauga

SEQ ID NO: 144609 - RNA, 1410 nt, Artificial Sequence
  derived and/or modified CDS sequence (opt3) from neuraminidase__InfluenzaA__ACI32797
augaaccccaaucagaugaucauuaccauaggcagcgugucccugacaaucucuacuauuugcuucuuuaugcaaaucgccauucucaucacgaccgucacacuucacuucaagcaguacgaguuuaacucaccuccaaauaaccagguuaugcugugugaaccgacuauaaucgagagaaauauuaccgaaaucguguauuugacaaacaccacuauugagaaagaaaucugccccaaguuagcugaguacaggaauuggaguaaaccucaguguagcauaacaggguucgcaccauuuuccaaggacaacucuauucggcugucggccggaggugauaucuggguaacccgcgagcccuaugugucaugcgacccugauaaauguuaccaauucgcgcuaggccaggggacgacucucaauaacguccauagcaaugacaccgugcacgaucgaacaccauaucguacucugcuuaugaacgaacugggaguucccuuucauuugggcaccaaacaggugugcauugcuuggaguuccucuagcugucacgacgguaaggccuggcuccaugucugcgugacaggggaugacaagaaugcaaccgccuccuucaucuacaacggaagacugguagauucaaucguuaguuggagcaaggagauucugaggacgcaggaaucugagugugugugcauaaauggcacuuguacagucgugaugaccgacggcuccgcuucagggaaagcagauacuaagauccucuuuauugaggaaggaaaaaucgugcacacaagcaccuuaagugguucugcccaacacgucgaggaaugcuccugcuauccucgguacccaggcguucgcugugugugcagagacaacuggaaggggagcaacaggccgauaguagauauuaauaucaaggacuacucgaucgugucuuccuaugucuguucaggacuggugggcgacacgccccggaaaaacgauaguagcuccucuagccauugccuugacccuaauaacgaggaaggugggcacggaguuaagggcugggcuuucgaugacggcaaugauguguggauggggcgcaccauuucagagaaaagucgauccggauacgagacauuuaaggucaucgaagguuggagcaacccaaauucuaaauugcagauuaacagacaggugauaguagacaggggcaaucggucaggguauaguggaaucuucagcguugagggcaaguccuguauuaaccguugcuuuuacguggaacugauccgcgguagaaaagaggaaacugagguccuauggaccucuaauucgaucguggucuucugugggacaagcggcacuuauggaaccggcuccuggcccgauggggccgacauuaaccucaugccuauauga

SEQ ID NO: 144610 - RNA, 1410 nt, Artificial Sequence
  derived and/or modified CDS sequence (opt3) from neuraminidase__InfluenzaA__ACI32798
augaaccccaaucagaagaucauuaccauaggcagcgugucccugacaaucucuacuauuugcuucuuuaugcaaaucgccauucucaucacgaccgucacacuucacuucaaacaguacgaguuuaacucaccuccaaauaaccagguuaugcugugugaaccgacuauaaucgagagaaauauuaccgaaaucguguauuugacaaacaccacuauugagaaggaaaucugccccaaauuagcugaguacaggaauuggaguaagccucaguguaacauaacaggguucgcaccauuuagcaaagacaauuccauucggcugucugccggaggugauaucuggguaacccgcgagcccuaugugucgugcgacccugauaaguguuaccaauucgcgcuaggccaggggacgacucucaacaauguccauucaaacgacaccgugcacgaucgaacaccauaucguacucugcuuaugaaugaacugggaguucccuuucauuugggcaccaaacaggugugcauugcuuggagcaguuccucuugucacgacgguaaggccuggcuccaugucugcgugacaggggaugacaagaacgcaaccgccagcuucaucuacaauggaagacugguagauuccaucguuucauggaguaacgagauucugaggacgcaggaaagcgagugugugugcauaaacggcacuuguacagucgugaugaccgacggcucugcuuccgggaaagcagauacuaagauccucuuuauugaggaaggaaaaaucgugcacacaucaaccuuaagcgguagugcccaacacgucgaggaaugcucuugcuauccucgguacccaggcguucgcugugugugcagagacaauuggaagggguccaacaggccgauaguagauauuaauaucaaggacuacagcaucgugucgucuuaugucuguuccggacuggugggcgacacgccccggaaaaacgauucaaguagcuccucucauugccuugacccuaauaacgaggaaggugggcacggaguuaagggcugggcuuucgaugacggcaaugauguguggauggggcgcaccauuagcgagaaauugcgaucaggauacgagacauuuaaggucaucgaagguuggaguaacccaaauuccaaacugcagauuaacagacaggugauaguagacaggggcaaucggagcggguauucuggaaucuucucaguugagggcaagaguuguauuaaccguugcuuuuacguggaacuaauccgcgguagaaaagaggaaacugagguccucuggaccagcaauuccaucguggucuucugugggacaucuggcacuuauggaaccggcucguggcccgauggggccgacauuaaccugaugccuauauga

SEQ ID NO: 144611 - RNA, 1410 nt, Artificial Sequence
  derived and/or modified CDS sequence (opt3) from neuraminidase__InfluenzaA__ACI32799
augaaccccaaucagagaaucauuaccauaggcagcgugucccugacaaucucuacuauuugcuucuuuaugcaaaucgccauucucaucacgaccgucacacuucacuucaagcaguacgaguuuaacucaccuccaaauaaccagguuaugcugugugaaccgacuauaaucgagaggaauauuaccgaaaucguguauuugacaaacaccacuauugagaaagaaaucugccccaaguuagcugaguaccggaauuggaguaaaccucagugugacauaacaggguucgcaccauuuagcaaggauaacuccauucgccugucugccggaggugacaucuggguaacccgagagcccuaugugucgugcgauccugacaaauguuaccaauucgcgcuaggccaggggacgacucucaauaacguccauucaaaugauaccgugcacgaccguacaccauauagaacucugcuuaugaacgaacugggaguucccuuucauuugggcaccaaacaggugugcauugcuuggagcaguuccucuugucacgaugguaaggccuggcuccaugucugcgugacaggggacgauaagaaugcaaccgccagcuucaucuacaacggaaggcugguagacuccguugugucauggaguaaggauauccugcggacgcaggagagcgaaugugucugcauuaauggcacuuguacaguggugaugaccgacggcucugcuuccgggaaagcaaacacuaagauacucuuuaucgaggagggaaaaauuguccacacaucaaccuuaagcgguagugcccaacacguugaagagugcucuugcuauccucgcuacccaggcgugagauguguaugcagggauaacuggaagggguccaaucggccgaucguggacauaaacauuaagaauuacagcaucgucucgucuuauguguguuccggacugguuggcgacacgccccgcaaaaccgauucaaguagcuccucucauugccuugacccuaacaaugaagagggugggcacggagugaagggcugggcuuucgaugacggcaacgaugucuggauggggcgaacaaucagcgaaaaauugagacugggauacgagacuuuuaaggugauugaggguuggucaaauccaaacaguaaacuacagaucaauaggcagguaauuguugaccggggcaaccguuccggguauagcggaauauucucuguggaaggcaagucauguaucaaucgcugcuuuuacgucgagcucauuagagguaggaaagaagagaccgaagugcuguggacaaguaacagcaucgucguguucugugggacuuccggcaccuauggaacaggcucuuggcccgauggggccgacaucaaucuuaugccuauuuga

SEQ ID NO: 144612 - RNA, 1410 nt, Artificial Sequence
  derived and/or modified CDS sequence (opt3) from neuraminidase__InfluenzaA__ACI32800
augaaccccaaucagaagaucauuaccauaggcagcgugucccugacaaucucuacuauuugcuucuuuaugcaaaucgccauucucaucacgaccgucacacuucacuucaaacaguacgaguuuaacucaccuccaaauaaccagguuaugcugugugaaccgacuauaaucgagagaaauauuaccgaaaucguguauuugacaaacaccacuauugagaaggaaaucugccccaaauuagcugaguacaggaauuggaguaagccucaguguaacauaacaggguucgcaccauuuagcaaagacaauuccauucggcugucugccggaggugauaucuggguaacccgcgagcccuaugugucgugcgacccugauaaguguuaccaauucgcgcuaggccaggggacgacucucaacaauguccauucaaacgacaccgugcacgaucgaacaccauaucguacucugcuuaugaaugaacugggaguucccuuucauuugggcaccaaacaggugugcauugcuuggagcaguuccucuugucacgacgguaaggccuggcuccaugucugcgugacaggggaugacaagaacgcaaccgccagcuucaucuacaauggaagacugguagauuccaucguuucauggaguaaagagauucugaggacgcaggaaagcgagugugugugcauaaacggcacuuguacagucgugaugaccgacggcucugcuuccgggaaggcagauacuaaaauccucuuuauugaggaaggaaagaucgugcacacaucaaccuuaagcgguagugcccaacacgucgaggaaugcucuugcuauccucgguacccaggcguucgcugugugugcagagacaacuggaagggguccaauaggccgauaguagauauuaacaucaaagacuacagcaucgugucgucuuaugucuguuccggacuggugggcgacacgccccggaagaaugauucaaguagcuccucucauugccuugacccuaacaaugaggaaggugggcacggaguuaaaggcugggcuuucgaugacggcaacgauguguggauggggcgcaccauuagcgagaaguugcgaucaggauacgagacauuuaaagucaucgaagguuggaguaauccaaacuccaagcugcagacuaauagacaggugauuguagacaggggcaaccggagcggguauucuggaauauucucaguugagggcaaaaguuguaucaaucguugcuuuuacguggaacuaauucgcgguagaaaggaggaaaccgagguccucuggacaagcaacuccaucguggucuucugugggacuucuggcaccuauggaacaggcucguggcccgauggggccgacaucaaucugaugccuauuuga

SEQ ID NO: 144613 - RNA, 1410 nt, Artificial Sequence; identical to SEQ ID NO: 144612
  derived and/or modified CDS sequence (opt3) from neuraminidase__InfluenzaA__ACI32802

SEQ ID NO: 144614 - RNA, 1410 nt, Artificial Sequence; identical to SEQ ID NO: 144612
  derived and/or modified CDS sequence (opt3) from neuraminidase__InfluenzaA__ACI32803

SEQ ID NO: 144615 - RNA, 1410 nt, Artificial Sequence; identical to SEQ ID NO: 143755
  derived and/or modified CDS sequence (opt3) from neuraminidase__InfluenzaA__ACI32804

SEQ ID NO: 144616 - RNA, 1410 nt, Artificial Sequence
  derived and/or modified CDS sequence (opt3) from neuraminidase__InfluenzaA__ACI32805
augaaccccaaucagaagaucauuaccauaggcagcgugucccugacaaucucuacuauuugcuucuuuaugcaaaucgccauucucaucacgaccgucacacuucacuucaaacaguacgaguuuaacucaccuccaaauaaccagguuaugcugugugaaccgacuauaaucgagagaaauauuaccgaaaucguguauuugacaaacaccacuauugagaaggaaaucugccccaaauuagcugaguacaggaauuggaguaagccucaguguaacauaacaggguucgcaccauuuagcaaagacaauuccauucggcugucugccggaggugauaucuggguaacccgcgagcccuaugugucgugcgacccugauaaguguuaccaauucgcgcuaggccaggggacgacucucaacaauguccauucaaacgacaccgugcacgaucgaacaccauaucguacucugcuuaugaaugaacugggaguucccuuucauuugggcaccaaacaggugugcauugcuuggagcaguuccucuugucacgacgguaaggccuggcuccaugucugcgugacaggggaugacaagaacgcaaccgccagcuucaucuacaauggaagacugguagauuccaucguuucauggaguaaagagauucugaggacgcaggaaagcgagugugugugcauaaacggcacuuguacagucgugaugaccgacggcucugcuuccgggaaggcagugacuaaaauccucuuuauugaggaaggaaagaucguccacacaucaaccuuaagcgguagugcccaacacguugaggaaugcucuugcuauccucgguacccaggcgugcgcuguguaugcagagauaacuggaagggguccaauaggccgauaguggacauuaacaucaaagauuacagcaucgucucgucuuauguguguuccggacugguuggcgacacgccccggaagaaugaccgcucaaguagcucccauugccuugauccuaacaaugaggaaggugggcacggagugaaaggcugggcuuucgacgauggcaacgacgucuggauggggcgaaccauuucugaaaagagcagaucaggauacgagacauuuaaagugaucgaggguuggaguaauccaaacuccaaguugcagacuaauaggcagguaauuguugaucggggcaaccguagcggguauucuggaauauucucaguggagggcaaaaguuguaucaaucgcugcuuuuacgucgaacugauuagagguaggaaggaggaaaccgaggugcuauggacaagcaacuccaucgucguguucugugggacuucuggcaccuauggaacaggcucguggcccgacggggccgauaucaaucucaugccuauuuga

SEQ ID NO: 144617 - RNA, 1410 nt, Artificial Sequence; identical to SEQ ID NO: 142760
  derived and/or modified CDS sequence (opt3) from neuraminidase__InfluenzaA__ACI32806

SEQ ID NO: 144618 - RNA, 1410 nt, Artificial Sequence
  derived and/or modified CDS sequence (opt3) from neuraminidase__InfluenzaA__ACI32807
augaaccccaaucagaagaucauuaccauaggcagcgugucccugacaaucucuacuauuugcuucuuuaugcagaucgccauucucaucacgaccgucacacuucacuucaaacaguacgaguuuaacucaccuccaaauaaccagguuaugcugugugaaccgacuauaaucgagagaaauauuaccgaaaucguguauuugacaaacaccacuauugagaaggaaguaugccccaaauuagcugaguacaggaauuggaguaagccucagugugacaucacaggguucgcaccauuuagcaaagauaacuccauacggcugucugccggaggugacauuugggugacccgcgagcccuaugucucgugcgauccugacaaguguuaccaauucgcgcuaggccaggggacgacucucaauaacgugcauucaaaugauaccguucgagaccguacaccauauagaacucugcuuaugaacgaacugggagugcccuuucacuugggcaccaagcaggucugcaucgcuuggagcaguuccucuugucaugaugguaaagccuggcuccacgugugcauuacaggggacgauaagaaugcaaccgccagcuucaucuacaacggaaggcugguagacuccaucguuucauggaguaaagagauucugcggacgcaggaaagcgagugugugugcauaaauggcacuuguacagucgugaugaccgauggcucugcuuccgggaaggcagacacuaaaauccucuuuauugaggaaggaaagaucgugcauacaucaaccuuaagcgguagugcccaacacgucgaggaaugcucuugcuauccucgcuacccaggcguuagaugugugugcagggauaacuggaagggguccaaccggccgauaguagacauuaauaucaaagaccacagcaucgugucgucuuacgucuguuccggacuggugggcgauacgccccgcaagaacgacucaaguagcuccucucauugccuugauccuaauaacgaggaaggugggcacggaguuaaaggcugggcuuucgacgauggcaaugacguguggauggggcgaaccauuagcgagaagucaagauugggauaugagacauuuaaagucaucgaagguuggaguaacccaaauuccaagcugcagauuaacaggcaagugauaguagaucggggcaaucguagcggguacucuggaaucuucucaguugagggcaaaaguuguauuaaccgcugcuuuuauguggaacuaaucagagguaggaaggaggaaacugagguccucuggaccagcaauuccaucguggucuucugugggacaucuggcacuuacggaaccggcucguggcccgacggggccgauauuaaccugaugccuauauga

SEQ ID NO: 144619 - RNA, 1410 nt, Artificial Sequence
  derived and/or modified CDS sequence (opt3) from neuraminidase__InfluenzaA__ACI32808
augaaccccaaucagaagaucauuaccauaggcagcgugucccugacaaucucuacuauuugcuucuuuaugcaaaucgccauucucaucacgaccgucacacuucacuucaaacaguacgaguuuaacucaccuccaaauaaccagguuaugcugugugaaccgacuauaaucgagagaaauauuaccgaaaucguguauuugacaaacaccacuauugagaaggaaaucugccccaaauuagcugaguacaggaauuggaguaagccucagugugacauaacaggguucgcaccauuuagcaaagauaacuccauucggcugucugccggaggugacaucuggguaacccgcgagcccuaugugucgugcgauccugacaaguguuaccaauucgcgcuaggccaggggacgacucucaauaacguccauucaaaugauaccgugcacgaccgaacaccauaucguacucugcuuaugaacgaacugggaguucccuuucauuugggcaccaaacaggugugcauugcuuggagcaguuccucuugucacgaugguaaggccuggcuccaugucugcgugacaggggacgauaagaaugcaaccgccagcuucaucuacaacggaagacugguagacuccguugugucauggaguaaagauauccugaggacgcaggagagcgaaugugucugcauuaauggcacuuguacaguggugaugaccgacggcucugcuuccgggaaggcagauacuaaaauacucuuuaucgaggagggaaagauuguccacacaucaaccuuaagcgguagugcccaacacguugaagagugcucuugcuauccucgguacccaggcgugcgcuguguaugcagagacaacuggaagggguccaacaggccgaucguggacauaaauauuaaaaacuacagcaucgucucgucuuauguguguuccggacugguuggcgauacgccccggaagaccgacucaaguagcuccucucauugccuugauccuaauaacgaagagggugggcacggagugaaaggcugggcuuucgacgauggcaaugacgucuggauggggcgcacaaucagcgaaaaguugcgacugggauacgagacuuuuaaagugauugaggguuggucaaacccaaauaguaagcuacagaucaacagacagguaauuguugauaggggcaaucgguccggguauagcggaauauucucuguggaaggcaaaucauguaucaaccguugcuuuuacgucgagcucauucgcgguagaaaggaaaagaccgaggugcuguggacaaguaauagcaucgucguguucugugggacuuccggcaccuauggaacaggcucuuggcccgacggggccgauaucaaccuuaugccuauuuga

SEQ ID NO: 144620 - RNA, 1410 nt, Artificial Sequence; identical to SEQ ID NO: 143755
  derived and/or modified CDS sequence (opt3) from neuraminidase__InfluenzaA__ACI32809

SEQ ID NO: 144621 - RNA, 1410 nt, Artificial Sequence
  derived and/or modified CDS sequence (opt3) from neuraminidase__InfluenzaA__ACI32810
augaaccccaaucagaagaucauuaccauaggcagcgugucccugacaaucucuacuauuugcuucuuuaugcaaaucgccauucucaucacgaccgucacacuucacuucaaacaguacgaguuuaacucaccuccaaauaaccagguuaugcugugugaaccgacuauaaucgagagaaauauuaccgaaaucguguauuugacaaacaccacuauugagaaggaaaucugccccaaauuagcugaguacaggaauuggaguaagccucagugugacauaacaggguucgcaccauuuagcaaagauaacuccauucggcugucugccggaggugacaucuggguaacccgcgagcccuaugugucgugcgauccugacaaguguuaccaauucgcgcuaggccaggggacgacucucaauaacguccauucaaaugauaccgugcacgaccgaacaccacaucguacucugcuuaugaacgaacugggaguucccuuucacuugggcaccaaacaggugugcauugcuuggagcaguuccucuugucaugaugguaaggccuggcuccacgucugcgugacaggggacgauaagaaugcaaccgccagcuucaucuauaacggaagacugguagacuccguugugucauggaguaaagauauccugaggacgcaggagagcgaaugugucugcauuaauggcacuuguacaguggugaugaccgacggcucugcuuccgggaaggcagauacuaaaauacucuuuaucgaggagggaaagauuguccacacaucaaccuuaagcgguagugcccaacauguugaagagugcucuugcuacccucgguauccaggcgugcgcuguguaugcagagacaacuggaagggguccaacaggccgaucguggacauaaauauuaaaaacuacagcaucgucucgucuuacguguguuccggacugguuggcgauacgccccggaagaccgacucaaguagcuccucucacugccuugauccuaauaacgaagagggugggcauggagugaaaggcugggcuuucgacgauggcaaugacgucuggauggggcgcacaaucagcgaaaaguugcgacugggauaugagacuuuuaaagugauugaggguuggucaaacccaaauaguaagcuacagaucaacagacagguaauuguugauaggggcaaucgguccggguacagcggaauauucucuguggaaggcaaaucauguaucaaccguugcuuuuaugucgagcucauucgcgguagaaaggaagagaccgaagugcuguggacaaguaauagcaucgucguguucugugggacuuccggcaccuacggaacaggcucuuggcccgacggggccgauaucaaccuuaugccuauuuga

SEQ ID NO: 144622 - RNA, 1410 nt, Artificial Sequence
  derived and/or modified CDS sequence (opt3) from neuraminidase__InfluenzaA__ACI32811
augaaccccaaucagaagaucauuaccauaggcagcgugucccugacaaucucuacuauuugcuucuuuaugcaaaucgccauucucaucacgaccgucacacuucacuucaaacaguacgaguuuaacucaccuccaaauaaccagguuaugcugugugaaccgacuauaaucgagagaaauauuaccgaaaucguguauuugacaaacaccacuauugagaaggaaaucugccccaaauuagcugaguacaggaauuggaguaagccucaguguaacauaacaggguucgcaccauuuagcaaagacaauuccauucggcugucugccggaggugauaucuggguaacccgcgagcccuaugugucgugcgacccugauaaguguuaccaauucgcgcuaggccaggggacgacucucaacaauguccauucaaacgacaccgugcacgaucgaacaccauaucguacucugcuuaugaaugaacugggaguucccuuucauuugggcaccaaacaggugugcauugcuuggagcaguuccucuugucacgacgguaaggccuggcuccaugucugcgugacaggggaugacaagaacgcaaccgccagcuucaucuacaauggaagacugguagauuccaucguuucauggaguaaagagauucugaggacgcaggaaagcgagugugugugcauaaacggcacuuguacagucgugaugaccgacggcucugcuuccgggaaggcagauacuaaaauccucuuuauugaggaaggaaagaucgugcacacaucaaccuuaagcgguagugcccaacacgucgaggaaugcucuugcuauccucgguacccaggcguucgcugugugugcagagacaacuggaagggguccaauaggccgauaguagauauuaacaucaaagacuacagcaucgugucgucuuaugucuguuccggacuggugggcgacacgccccggaagaaugauucaaguagcuccucucauugccuugacccuaacaaugaggaaggugggcacggaguuaaaggcugggcuuucgaugacggcaacgauguguggauggggcgcaccauuagcgagaaguugcgaucaggauacgagacauuuaaagucaucgaagguuggaguaauccaaaguccaaacugcagauuaacagacaggugauaguagacaggggcaaucggagcggguauucuggaaucuucucaguugagggcaagaguuguauuaaccguugcuuuuacguggaacuaauccgcgguagaaaggaggaaacugagguccucuggaccagcaauuccaucguggucuucugugggacaucuggcacuuauggaaccggcucguggcccgauggggccgacauuaaccugaugccuauauga

SEQ ID NO: 144623 - RNA, 1410 nt, Artificial Sequence
  derived and/or modified CDS sequence (opt3) from neuraminidase__InfluenzaA__ACI32812
augaaccccaaucagaagaucauuaccauaggcagcgugucccugacaaucucuacuauuugcuucuuuaugcaaaucgccauucucaucacgaccgucacacuucacuucaaacaguacgaguuuaacucaccuccaaauaaccagguuaugcugugugaaccgacuauaaucgagagaaauauuaccgaaaucguguauuugacaaacaccacuauugagaaggaaaucugccccaaauuagcugaguacaggaauuggaguaagccucagugugacauaacaggguucgcaccauuuagcaaagauaacuccauucggcugucugccggaggugacaucuggguaacccgcgagcccuaugugucgugcgauccugacaaguguuaccaauucgcgcuaggccaggggacgacucucaauaacguccauucaaaugauaccgugcacgaccgaacaccauaucguacucugcuuaugaacgaacugggaguucccuuucauuugggcaccaaacaggugugcauugcuuggagcaguuccucuugucacgaugguaaggccuggcuccaugucugcgugacaggggacgauaagaaugcaaccgccagcuucaucuacaacggaagacugguagacuccguugugucauggaguaaagauauccugaggacgcaggagagcgaaugugucugcauuaauggcacuuguacaguggugaugaccgacggcucugcuuccgggaaggcaaacacuaaaauacucuuuaucgaggagggaaagauuguccacacaucaaccuuaagcgguagugcccaacacguugaagagugcucuugcuauccucgguacccaggcgugcgcuguguaugcagagauaacuggaagggguccaauaggccgaucguggacauaaacauuaaaaauuacagcaucgucucgucuuauguguguuccggacugguuggcgacacgccccggaagaccgauucaaguagcuccucucauugccuugacccuaacaaugaagagggugggcacggagugaaaggcugggcuuucgaugacggcaacgaugucuggauggggcgcacaaucagcgaaaaguugcgacugggauacgagacuuuuaaagugauugaggguuggucaaauccaaacaguaagcuacagaucaauagacagguaauuguugacaggggcaaccgguccggguauagcggaauauucucuguggaaggcaaaucauguaucaaucguugcuuuuacgucgagcucauucgcgguagaaaggaagagaccgaagugcuguggacaaguaacagcaucgucguguucugugggacuuccggcaccuauggaacaggcucuuggcccgauggggccgacaucaaucuuaugccuauuuga

SEQ ID NO: 144624 - RNA, 1410 nt, Artificial Sequence; identical to SEQ ID NO: 142847
  derived and/or modified CDS sequence (opt3) from neuraminidase__InfluenzaA__ACI32814

SEQ ID NO: 144625 - RNA, 1350 nt, Artificial Sequence
  derived and/or modified CDS sequence (opt3) from neuraminidase__InfluenzaA__ACJ53848
augaaccccaaucagaagaucauuaccauaggcagcaucugcauggugauugggaucgucucccugaugcuccaaauuggaaacaugaucucuauauggguuucacacaguauccagacagguaaucagugucaggccgagccuauuagcaacacuaaauuccuuacggaaaaggcuguggcauccguaacccuggccggcaauucuucguugugcccaaucucagggugggcgguguacagcaaagacaacaguauuagaaucggauccaggggcgaugucuuugugauacgggagccguucauuucuuguagccauuuagaaugccgcacauuuuuccugacucaaggugcucuacucaaugacaagcacuccaacgggaccguuaaagaucgaucaccccaucguacacugaugaguuguccugugggagaggccccaagccccuauaauucuagauuugaauccgucgcauggucagccagcgcuugccacgacggcaccaguuggcuuacuaucggcauuucugggccugauaacggagcaguggccguacugaaguacaaugguaucaucacagacaccauuaaguccuggaggaacaauauauugcggacgcaggagagcgagugugcuugcguuaacggcucguguuucacugugaugaccgaugggccaucuuccggacaggccucauauaaaaucuuuaagauggaaaaaggcaaggucgugaaaaguguggagcucgacgcgcccaauuaccauuaugaagagugcagcuguuacccugaugccggugagauuacaugcgucugccgcgacaacuggcacggguccaacagaccauggguuucuuucaaucagaaccuggaauaucaaaucggauacauauguagcggcguguuuggcgauaauccgaggcccaacgacgggacuggaucaugcgguccuguaaguccaaauggcgcauacggggugaagggauucuccuuuaaguauggcaacggugucuggauugggcggaccaaaagcacaaauucucgcucaggcuucgagaugaucugggaucccaacggauggaccggcacggacaguagcuuuuccgugaagcaggacaucguugcuauuacugauuggucuggguacucgggauccuucgugcagcacccugaacugacaggucucgacuguauccgaccaugcuucugggucgaguuaauuagaggcaggcccaaagaauccaccauauggacuucagggaguucuaucagcuuuuguggagugaauagcgauacaguaucauggagcuggccggacggcgccgagcugccuuucaccauugauaaguga

SEQ ID NO: 144626 - RNA, 1350 nt, Artificial Sequence
  derived and/or modified CDS sequence (opt3) from neuraminidase__InfluenzaA__ACJ53849
augaaccccaaucagaagaucauuaccauaggcagcaucugcauggugauugggaucgucucccugaugcuccaaauuggaaacaugaucucuauauggguuucacacaguauccagacagguaaucagugucaggccgagccuauuagcaacacuaaauuccuuacggaaaaggcuguggcauccguaacccuggccggcaauucuucguugugcccaaucucagggugggcgguguacagcaaagacaacaguauuagaaucggauccaggggcgaugucuuugugauacgggagccguucauuucuuguagccauuuagaaugccgcacauuuuuccugacucaaggugcucuacucaaugacaagcacuccaacgggaccguuaaagaucgaucaccccaucguacacugaugaguuguccugugggagaggccccaagccccuauaauucuagauuugaauccgucgcauggucagccagcgcuugccacgacggcaccaguuggcuuacuaucggcauuucugggccugauaacggagcaguggccguacugaaguacaaugguaucaucacagacaccauuaaguccuggaggaacaauauauugcggacgcaggagagcgagugugcuugcguuaacggcucguguuucacugugaugaccgaugggccaucuuccggacaggccucauauaaaaucuuuaagauggaaaaaggcaaggucgugaaaaguguggagcucgacgcgcccaauuaccauuaugaagagugcagcuguuacccugaugccggugagauuacaugcgucugccgcgacaacuggcacggguccaacagaccauggguuucuuucaaucagaaccuggaauaucaaaucggauacauauguagcggcguguuuggcgauaauccgaggcccaacgacgggacuggaucaugcaguccuguauccccaaauggugcauacggcgugaagggguucagcuuuaaguauggaaacggcgucuggauuggucggaccaaaucuacaaauucacgcaguggguucgagaugaucugggaucccaacggcuggaccggaacggacagcuccuuuucugugaagcaggacaucguugcuauuacugauuggucgggcuacagcggguccuucgugcagcacccugaacugacaggacucgacuguauccgaccaugcuucugggucgaguuaauuagagguaggcccaaagaaucaaccauauggacuucaggcucuagcaucuccuuuuguggggugaauagugauacaguaagcuggucuuggccggacggagccgagcugccuuucaccauugauaaguga

SEQ ID NO: 144627 - RNA, 1350 nt, Artificial Sequence
  derived and/or modified CDS sequence (opt3) from neuraminidase__InfluenzaA__ACJ53853
augaaccccaaucagaagaucauuaccauaggcagcaucugcauggugauugggaucgucucccugaugcuccaaauuggaaacaugaucucuauauggguuucacacaguauccagacagguaaucagugucaggacgagccuauuagcaacacuaaauuccuuacggaaaaggccguggcuuccguaacccuggcaggcaauucuucguugugcccaaucucagggugggccguguacagcaaagauaacaguauuagaaucggauccaggggcgacgucuuugugauacgggagccguucauuucuuguagccauuuagaaugccgcacauuuuuccugacucaaggugcgcuacucaaugauaagcacuccaacgggaccguuaaagaccgaucaccccaucguacacugaugaguuguccugugggagaggcuccaagccccuauaauucuagauuugaauccgucgccuggucagcaagcgccugccacgauggcaccaguuggcuuacuaucggcauuucugggccugacaacggagcuguggcaguacugaaguacaaugguaucaucacagauaccauuaaguccuggaggaacaauauauugcggacgcaggagagcgagugugccugcguuaacggcucguguuucacugugaugaccgacgggccaucuuccggacaggcuucauauaaaaucuuuaagauggaaaaaggcaaggucgugaaaaguguggagcucgaugcccccaauuaccauuaugaagagugcagcuguuacccugacgcgggugagauuacaugcgucugccgcgauaacuggcacggguccaacagaccauggguuucuuucaaucagaaccuggaauaucaaaucggauacauauguagcggcguguuuggcgacaauccgaggcccaacgaugggacuggaucaugcgguccuguauucccaaauggcgcauacggggugaagggauuuaguuucaaguauggcaacggugucuggauugggcggaccaaauccacaaauagccgcucuggcuuugagaugaucugggaccccaacggauggaccggcacggacucaaguuucagcgugaagcaggauaucguugccauuacugacugguccggguacucuggaucguucgugcagcacccugaacugacaggucucgauuguauccgaccaugcuuuugggucgaguuaauuagaggcaggcccaaagaaagcaccauauggacuuccgggucaaguaucucuuucuguggagugaauagcgacacaguauccuggucauggccggauggcgcugagcugccuuuuaccauugacaaguga

SEQ ID NO: 144628 - RNA, 1350 nt, Artificial Sequence; identical to SEQ ID NO: 144627
  derived and/or modified CDS sequence (opt3) from neuraminidase__InfluenzaA__ACJ53866

SEQ ID NO: 144629 - RNA, 1350 nt, Artificial Sequence
  derived and/or modified CDS sequence (opt3) from neuraminidase__InfluenzaA__ACJ53867
augaaccccaaucagaagaucauuaccauaggcagcaucugcauggccauugggaucgugucccugaugcuccaaauuggaaacaugaucucucuuugggucucacacaguauacagacagguaaucagugucaggcugagccuaucagcaacacuaaauuccugacggaaaaggcaguugccuccgugaccuuggcgggcaauucuucguuaugcccaauuucagggugggcuguauacagcaaagacaacaguaucagaauuggauccaggggcgauguguuugucauccgggagccguucauaucuuguagccaucuggaaugccgcacauuuuuccuaacucaaggugcccuccugaaugacaagcacuccaacgggaccgugaaagaucgaucaccccaucguacacuuaugaguuguccuguuggagaggcaccaagccccuauaauucuagauuugaauccguggccuggucagcuagcgcaugccacgacggcaccaguuggcugacuauuggcaucucugggccugauaacggagccgucgcuguguugaaguacaaugguauuaucacagacaccaucaaguccuggaggaacaauauucuccggacgcaggagagcgagugugccugcguaaacggcucguguuucacuguuaugaccgaugggccaucuuccggacaggcgucauauaaaauauuuaagauggaaaaaggcaagguggucaaaaguguggagcuggacgcacccaauuaccauuaugaagagugcagcuguuacccugaugccggugagaucacaugcgugugccgcgacaacuggcacggguccaacagaccaugggucucuuucaaucagaaccuggaauaucaaauuggauacaucuguagcggcguuuuuggcgauaauccgaggcccaacgacgggacuggaucaugcgguccugugaguccaaauggcgcuuacgggguaaagggauucuccuuuaaguauggcaacgguguguggauagggcggaccaaaagcacaaauucucgcucaggcuucgagaugauuugggaucccaacggauggaccggcacggacaguagcuuuuccgucaagcaggacaucguggccaucacugauuggucuggguacucggguagcuucguucagcacccugaacucacaggauuagacuguauucgaccaugcuucuggguggagcugaucagaggcaggcccaaagaauccaccauuuggacuucagggaguucuaucagcuuuuguggagucaauuccgauacagugucauggagcuggccggacggcgcagagcuuccuuucaccauagauaaguga

SEQ ID NO: 144630 - RNA, 1350 nt, Artificial Sequence
  derived and/or modified CDS sequence (opt3) from neuraminidase__InfluenzaA__ACJ53875
augaaccccaaucagaagaucauuaccauaggcagcaucugcauggugauugggaucgucucccugaugcuccaaauuggaaacaugaucucuauauggguuucacacaguauccagacagguaaucagugucaggccgagccuauuagcaacacuaaauuccuuacggaaaaggcuguggcauccguaacccuggccggcaauucuucguugugcccaaucucagggugggcgguguacagcaaagacaacaguauuagaaucggauccaggggcgaugucuuugugauacgggagccguucauuucuuguagccauuuagaaugccgcacauuuuuccugacucaaggugcucuacucaaugacaagcacuccaacgggaccguuaaagaucgaucaccccaucguacacugaugaguuguccugugggagaggccccaagccccuauaauucuagauuugaauccgucgcauggucagccagcgcuugccacgacggcaucaguuggcuuaccauuggcaucucugggccugauaacggagcaguggccguacugaaguacaaugguaucauuacugacacaauaaaguccuggaggaacaauaucuugcggacccaggagagcgagugugcuugcguuaacggcucguguuucacggugaugacugaugggccaucuuccggacaggccucauauaaaauuuuuaagauggaaaaaggcaaggucgugaaaaguguggagcucgaagcgcccaauuaccauuaugaggagugcagcuguuacccugacgccggugaaauaaccugcgucugccgcgauaacuggcacggguccaacagaccauggguuucuuucaaucagaaccuggaguaucaaaucggauacauuuguagcggcguguuuggcgacaauccgaggcccaacgaugggacaggaucaugcgguccuguaaguccaaauggcgcauacggggugaagggauucuccuuuaaguauggcaacggugucuggaucgggcggacuaaaagcaccaauucucgcucaggcuucgaaaugaucugggaccccaacggauggacaggcaccgauaguagcuuuuccgugaagcaggacauuguugcuaucacggacuggucuggguacucgggauccuucgugcagcacccugagcugacuggucucgauuguauucgaccaugcuucugggucgaauuaauaagaggcaggcccaaagaguccacaaucuggaccucagggaguucuauuagcuuuuguggagugaauagcgacacuguaucauggagcuggccggauggcgccgagcugccuuucacaaucgacaaguga

SEQ ID NO: 144631 - RNA, 1350 nt, Artificial Sequence
  derived and/or modified CDS sequence (opt3) from neuraminidase__InfluenzaA__ACJ53876
augaaccccaaucagaagaucauuaccauaggcagcaucugcauggugauugggaucgucucccugaugcuccaaauuggaaacaucauaucuaucuggguuucacacaguauucagacagguaaucagugucaggccgagccuaucagcaacacuaaauuccuuacggaaaaggcuguggcauccguaacccuggccggcaauucuucguugugcccaauuucagggugggcgguguacagcaaagacaacaguaucagaauaggauccaggggcgaugucuuugugauucgggagccguucaucucuuguagccauuuagaaugccgcacauuuuuccugacucaaggugcucuacucaaugacaagcacuccaacgggaccguuaaagaucgaucaccccaucguacacugaugaguuguccugugggagaggccccaagccccuauaauucuagauuugaauccgucgcauggucagccagcgcuugccacgacggcaccaguuggcuuacuauuggcaucucugggccugauaacggagcaguggccguacugaaguacaaugguaucauuacagacaccauaaaguccuggaggaacaauaucuugcggacgcaggagagcgagugugcuugcguuaacggcucguguuucacugugaugaccgaugggccaucuuccggacaggccucauauaaaauuuuuaagauggaaaaaggcaaggucgugaaaaguguggagcucgacgcgcccaauuaccauuaugaagagugcagcuguuacccugaugccggugagaucacaugcgucugccgcgacaacuggcacggguccaacagaccauggguuucuuucaaucagaaccuggaauaucaaauaggauacauuuguagcggcguguuuggcgauaauccgaggcccaacgacgggacuggaucaugcgguccuguaaguccaaauggcgcauacggggugaagggauucuccuuuaaguauggcaacggugucuggaucgggcggaccaaaagcacaaauucucgcucaggcuucgagaugaucugggaucccaacggauggaccggcacggacaguagcuuuuccgugaagcaggacauuguugcuaucacugauuggucuggguacucgggauccuucgugcagcacccugaacugacaggucucgacuguauucgaccaugcuucugggucgaguuaauaagaggcaggcccaaagaauccaccaucuggacuucagggaguucuauuagcuuuuguggagugaauagcgauacaguaggcuggucauggccggacggugccgagcugccuuucaccaucgauaaguga

SEQ ID NO: 144632 - RNA, 1404 nt, Artificial Sequence
  derived and/or modified CDS sequence (opt3) from neuraminidase__InfluenzaA__ACJ67535
augaaccccaaucagaagaucauugcccugggcagcguguccauaaccaucgcuacaauuugccucaucaugcaaauugcaguccuugccacuacgaugacccugcacuucaacgaguguacaaauccuucuaacaaucaggcgaugccaugcgaaccgaucauaaucgagagaaacaugacugaaauuguucauuugaauaacaccacaaucgagaaagaaucaugucccaagguggcugaguacaaaaauuggaguaagccucagugccagauuaccggguuugccccauucagcaaagacaacuccaucagguuaucugcaggaggugauauauggguaacucgggagcccuaugugucguguggccuggggaauugcuaccaauuugcccuaggacagggcacaacccucaacaauaagcacucaaacgacacgauucaugaucgcagcccucaccgaacucugcuuaugaaugaacugggugucccauuccauuuggggaccaaacagguguguaucgcuuggaguuccucuagcugccacgacggaaaggcauggcuccacguuugugugacaggcgaugaccguaacgccacugcuuccauuaucuaugauggcaugcugaccgacucaaucgggaguuggagcaagaacauucugagaacacaggagucugaaugcgucuguauaaauggaaccugcacggugguaaugacugaugguuccgccucaggcagggcggacacaaaaauccucuuuauucgggaggggaagaucguucauauaagccccuuaaguggaucugcacaacacguggaggaaugcuccuguuacccucgcuauccagaggucagaugcguguguagggauaacuggaaaggcagcaaucggccggugcuguacauuaacgucgccgacuauucgguugauucuuccuacgugugcucaggucuuguaggggacacuccccgcaaugacgauaguagcuccucuagcaacugucgagacccuaauaacgaaagaggaggcccaggcgugaaggggugggcuuucgauaauggaaacgacgucuggauggguaggaccaucaagaaagauucacggaguggcuacgagacauuucgugugguugggggauggaccacggccaauuccaagagccagaucaaccgccaggugauugucgacucugauaauuggucaggcuauagugguaucuucagcguggaagggaaaaccugcauuaacagauguuuuuacguagaguugauaaggggccggccccaggagacacgaguuugguggacuuccaauucuaucauuguguucugcggaaccucgggcacauaugggacuggaagcuggccugacggugcaaacaucaacuuuauguccaucuga

SEQ ID NO: 144633 - RNA, 1410 nt, Artificial Sequence
  derived and/or modified CDS sequence (opt3) from neuraminidase__InfluenzaA__ACK99424
augaaccccaaucagaagaucauuaccauaggcagcgugucccugacaaucgccacuauuugcuuccucaugcaaaucgcuauucuugucacgaccguuacacugcacuuuaaacaguacgaguguucuucaccuccaaacaaucaggugaucccgugccagcccacuauaaucgaaagaaacauuaccgagaucguauauuugacaaauaccacuauugaaaaggagaucuguccuaaauuaguggaauacaggaacuggaguaagccacaaugcaaaauaacaggguucgcacccuuuagcaaggacaauuccauucggcugucugccggaggugauaucugggucacccgcgagccuuaugugucgugugacccaucaaagugcuaccaguucgcgcuaggccaggggacgacucucaacaaucgacauagcaacgauaccguucacgaccguacacccuauagaacucugcuuaugaaugagcugggagugccuuuucauuugggcaccaaacaggucuguauugcuuggaguuccucuagcugccacgaugguaaggccuggcuccauguguguguaacagggcacgacgaaaacgcaaccgccuccuucaucuacgauggaaggcugguugacucaaucggcaguuggagcaaaaauauucugcggacgcaagagucugaaugcguguguauaaacggcacuugcacagucgugaugaccgauggguccgcuucagagcgcgcagacacuaagauccucuuuauugaggaaggaaaagugguccacaucagcccauuaagugguucugcccagcauguugaggaaugcuccuguuauccgagauaccccggcgugaggugcguaugucgggauaauuggaaggggagcaaccgcccuauaguggacauuaacgucaaggauuacucgaucgugucuuccuauguuugcucaggacuggugggcgacacaccacgaaagaaugacaguagcuccucuagcuacuguagaaaccccaauaacgagaaagguucacacggggucaaaggaugggcuuucgaugacggcaaugauguguggaugggcaggaccaucagugaggaacuucgguccggguaugagacguuuaagguaauuggagguuggagcaccccuaacucuaaauugcagaucaaucgucagguuauuguggacucaggcaaccgcaguggguacagcggaauauucuccgucgaaggcaagucuugcaucaauagauguuuuuauguggagcugauuaggggucggaaacaagaaacaaaggucugguggacuucgaacagcaucgugguuuucugcgggaccuccggcacauacggaacuggcucauggccagauggggccgacaucaaucuaaugcccauuuga

SEQ ID NO: 144634 - RNA, 1410 nt, Artificial Sequence; identical to SEQ ID NO: 144453
  derived and/or modified CDS sequence (opt3) from neuraminidase__InfluenzaA__ACK99435

SEQ ID NO: 144635 - RNA, 1413 nt, Artificial Sequence
  derived and/or modified CDS sequence (opt3) from neuraminidase__InfluenzaA__ACK99446
augaaccccaaucagaagaucauuaccauaggcagcaucuccauggccauugggaucauuucucugacacuccaaaucggaaacauaaucucaauuugggugagucacagcauccagacugguucccagaaucauacgggcauuugcaaccagagaaucauaaccuacgaaaauucuacaugggucaaccaaacuuauguuaauauuaacaauaccaacgugguagcugggaaagacaagacaucggugacccuugcaggaaauucaagccuguguccuaucaggggcugggccauuuacacuaaagauaacaguauccggaucgguuccaagggggacgucuucgugauucgcgagccauuuauaucuugcagccacuuggagugucgaacauucuuuuuaacccagggagcgcugcuaaaugauaaacauuccaacggcacgguuaaggaccguucaccgcacagagcucucaugaguugcccccugggcgaagccccuagcccauauaauucuagguucgaguccguggcauggucagccagcgcuugucaugaugggaugggauggcuuacuaucgguauuaguggccccgacgauggggcagucgccgugcugaaguacaacggaaucauaaccgaaacaauuaaaucuuggaagaaacggaucuugcgcacucaggaguccgagugcguauguguuaacggcagcugcuuuaccaucaugacagacgguccuucgaauggggcugccucuuauagaauuuucaagaucgaaaaaggaaaggugaccaaguccauugagcucgaugcgccaaacucacacuacgaagaguguaguugcuaucccgacacgggcacugucaugugugugugcagggauaauuggcacggcagcaaccggccuuggguguccuuuaaucagaaccuggacuaccaaauaggguacaucugcucuggagucuucggugauaauccacgcccgaaagacggcaaggggagcuguaaccccguuacaguggacggagcagauggcguaaaagguuuuucauaucgauacgggaauggcguguggauuggaagaaccaagaguaacagguuccggaaaggcuuugagaugaucugggacccuaauggguggacugauacagacuccgauuucagcgucaagcaggacgugguugccaugaccgauuggucuggauauucagguaguuuugugcagcauccagaacugacgggccucgacugcaugcgucccuguuucugggucgaguuagugcgcgggagaccuagggaaaacaccacaaucuggacuagcggauccucuauuucguucugcggcguaaauagcgauaccgcuaacugguccuggccagacggugccgagcugcccuuuacaauagauaaauga

SEQ ID NO: 144636 - RNA, 1410 nt, Artificial Sequence
  derived and/or modified CDS sequence (opt3) from neuraminidase__InfluenzaA__ACK99457
augaaccccaaucagaagaucauuaccauaggcagcgugucccugacaaucgccacuauuugcuuccucaugcaaaucgcuauucuugucacgaccguuacacugcacuuuaaacagcaugaguguaacucuccuccaaauaaccaggugaugccgugcgaacccacuaucauagagagaaauaucaccgaaauuguauacuugacaaacaccacuaucgagaaggaaauuuguccuaaauuaguggaguauaggaauuggucaaagccacagugcaaaaucacaggguucgcacccuuuaguaaggacaacagcauacggcuguccgccggaggugauauuugggucacccgcgagccuuacgugucuugugacccaggcaagugcuaucaauucgcgcuagggcagggaacgacucucaauaaccgacacucgaaugauaccguucaugaccguacacccuacagaacucugcuuaugaacgaacugggcgugccuuuucacuuggguaccaaacaggucuguaucgcuuggucaagcaguuccugccaugaugggaaggccuggcuccacguguguguaacaggacacgacgagaaugcaaccgccucuuucauuuaugauggcaggcugguugacagcaucguguccuggaguaaaaacauccugcggacgcaggaaucagagugcgucuguauuaauggcacuugcacaguggugaugaccgaugggagcgcuucugagcgcgcagacacuaagauacucuuuaucgaagagggaaaaauuguccauaucuccccauuaucagguagcgcccaacacguugaagagugcaguuguuacccgagauaucccggcgugaggugcguaugucgggauaacuggaaggggucuaaccgcccuauaguggacauuaaugucaaggauuacuccaucgugagcucguacguuugcucuggacuggugggcgacacaccacgaaagaacgacuccucaaguagcuccuauuguagaaaucccaacaaugaaaaagguucucauggggucaaaggaugggcuuucgaugacggcaacgauguguggaugggcaggaccaucggggaggagcuucggagcggauacgaaacguuuaagguaauugguggcuggucaaccccuaauaguaaauugcagacaaaccgucagguuaucguggaccgcgggaauagauccggauauagcggcauuuucucugucgaggguaagucaugcauaaacagguguuuuuacguggaacugauccgggggcgaaaacaggagacuaaggucugguggaccaguaauagcauugugguuuucugcggcacauccggaacuuauggcaccgggucuuggccagauggagccgacaucaaccuaaugcccaucuga

SEQ ID NO: 144637 - RNA, 1413 nt, Artificial Sequence
  derived and/or modified CDS sequence (opt3) from neuraminidase__InfluenzaA__ACK99468
augaaccccaaucagaagaucauuaccauaggcagcaucuccauugccaucgggauuaucucucugauacuccaaaucggaaacauuaucucaauuugggcuagucacagcauccagacagguucccagaaucauacuggcauaugcaaccagagaauuaucacguacgaaaauucuaccugggugaaccaaacauaugucaauauuaacaauacuaacguuguggcagggaaagacaagaccucgaugacacuugccggaaauucaagccuguguccuaucaggggcugggcgaucuacaccaaagauaacaguauucggauagguuccaagggggacguauucgugauccgcgagccauuuauuucuugcagccacuuggagugucgaacuuucuuuuuaacacagggagcucugcuaaaugauaaacauuccaacggcaccgucaaggaccguucaccguauagagcccucaugaguugcccccugggcgaagcaccuagcccauacaauucuagguucgaguccguggccuggucagcuagcgcaugucacgaugggcuuggauggcugacgaucgguauaaguggccccgacaacggggccguugcuguguugaaguauaacggaauuaucacugaaaccaucaaaucuuggaagaaacggauucuccgcacacaggaguccgagugcgucuguaugaauagcucgugcuuuacuaucaugaccgauggcccuucuaacggugccgcguccuacagaauuuucaagauagaaaaagggagggugacaaagucaaucgagcuggacgcaccaaauuaucauuacgaagaguguaguugcuaccccgauaccggaacgguaauguguguuugccgggacaacuggcacggcagcaaucgcccuuggguguccuuuaaccagaaucuggauuaucaaauuggcuacaucugcucuggggucuucggagacaacccacgaccgaaggauggugagggcagcuguaaucccgugacuguggacggggccgacggagucaaaggcuuuucauauagauacgguaacgggguuuggaucggcaggacaaagaguaaucggcuccguaaaggauucgaaaugauuugggauccuaacggcuggaccgacacugauuccgacuuuagcaugaagcaggauauaguggcuaugacagacuggucuggguauucaggaaguuucguacagcacccagaguuaaccggucuggauugcaugcgccccuguuuuuggguggaacuugucagaggcuugccuagggagaauacgaccaucuggacaagcggguccucuauuucguucugcggagugaacagcgacacugccaauugguccuggccagauggcgcagaacugcccuucaccaucgacaaauga

SEQ ID NO: 144638 - RNA, 1410 nt, Artificial Sequence
  derived and/or modified CDS sequence (opt3) from neuraminidase__InfluenzaA__ACK99479
augaaccccaaucagaagaucauuaccauaggcagcgugucccugacaaucgccacuauuugcuuccucaugcaaaucgcuauucuugucacgaccguuacacugcacuuuaaacaguacgaguguaacucuccuccaaauaaccaggugauguugugcgaaccgacuaucauagagagaaauaucaccgaaauuguauauuuaacaaacaccacuaucgagaaggaaauuugucccaaacuggcagaguacaggaauuggucaaagccucagugcaaaaucacaggguucgccccauuuaguaaggacaacagcauacggcuauccgcgggaggugauauuugggugacccgcgagcccuaugucucuugugacccugauaagugcuaccaauucgcucucggccaggggacgacucugaauaaccgacauucgaaugacaccgugcacgaucguacaccauauagaacucuucugaugaacgaauugggaguucccuuucaucucggcaccaaacagguguguaucgccuggucaagcaguuccugccacgacgguaaggcauggcugcaugucugugugacagggcacgaugagaaugccaccgcuucuuucauuuacgacggaaggcugguagauagcaucggcuccuggaguaaaaagauccuccggacgcaggaaucagagugcguuuguauuaacggcacuugcacaguggucaugaccgacgggagcgcaucuggacgcgccgauacuaaaauauuauuuaucgaggaagguaagauugugcacaucuccccucugcuuggcucagcucaacauguggaggaaugcagcuguuauccaagauacccgggggucaggugcguuugucgggacaauuggaagggaaguaaccgccccauaguggauauuaacguaaaagacuacucuaucguguccagcuaugucugcucgggcuuggugggugacacaccucgaaagaaugauucuuccucaaguagccacugucugaacccaaauaacgaggaagggggacauggcguuaaaggcugggccuucgacgaugggaaugacguguggaugggaagaaccaucuccgagaagcuaaggucugguuacgagacguuuaaagucauugaaggcuggagcaagcccaacucaaaacuccagaucaaucgucaggugauuguagaucgggggaaccgcaguggauauuccggcauauucagcguugaggguaagucuugcaucaauagauguuuuuacguggaacugauuagggggcggaagcaggagaccgaagucugguggacaucaaacaguaucguggucuucugcggcacuagcggaaccuauggcacaggguccuggccugacggagcgaauaucaaccuuaugccaauuuga

SEQ ID NO: 144639 - RNA, 1413 nt, Artificial Sequence; identical to SEQ ID NO: 144332
  derived and/or modified CDS sequence (opt3) from neuraminidase__InfluenzaA__ACL12066

SEQ ID NO: 144640 - RNA, 1410 nt, Artificial Sequence; identical to SEQ ID NO: 143233
  derived and/or modified CDS sequence (opt3) from neuraminidase__InfluenzaA__ACL12132

SEQ ID NO: 144641 - RNA, 1413 nt, Artificial Sequence; identical to SEQ ID NO: 144566
  derived and/or modified CDS sequence (opt3) from neuraminidase__InfluenzaA__ACL12154

SEQ ID NO: 144642 - RNA, 1410 nt, Artificial Sequence; identical to SEQ ID NO: 144560
  derived and/or modified CDS sequence (opt3) from neuraminidase__InfluenzaA__ACL12165

SEQ ID NO: 144643 - RNA, 1410 nt, Artificial Sequence; identical to SEQ ID NO: 144560
  derived and/or modified CDS sequence (opt3) from neuraminidase__InfluenzaA__ACL12176

SEQ ID NO: 144644 - RNA, 1410 nt, Artificial Sequence
  derived and/or modified CDS sequence (opt3) from neuraminidase__InfluenzaA__ACL12198
augaaccccaaucagaagaucauuaccauaggcagcgugucccugacaaucucuacuauuugcuucuuuaugcagaucgccauucucaucacgaccgucacacuucacuucaaacaguacgaguuuaacucaacuccuaauaaccagguuaugcugugugaaccaaccauaaucgagagaaauauuacagaaaucguguauuugaccaacacuacaauugagaaggaaaucugcccgaaauuagcugaguacaggaauuggaguaagccccagugugacauaaccggguucgcaccuuuuagcaaagauaacuccauucggcugucugccggaggugacaucuggguaacgcgcgagccauaugugucgugcgaucccgacaaguguuaccaauucgcgcuaggccaggggacuacccucaauaacguccauucaaaugauacagugcgagaccguacuccuuauagaacccugcuuaugaacgaacugggaguuccauuucacuugggcacaaaacaggugugcauugcuuggagcaguuccucuugucaugaugguaaggccuggcuccacgucugcaucaccggggacgauaagaaugcaacggccagcuucaucuacaacggaaggcugguggacuccguaguuucauggaguaaagagauucugcggacucaggaaagcgagugugugugcauaaauggcacauguaccgucgugaugacugauggcucugcuuccgggaaggcagacacaaaaauccucuuuauugaggaaggaaagaucgugcauaccucaacguuaagcgguagugcccaacacgucgaggaaugcucuugcuauccccgcuacccuggcguuagaugugugugcagggauaacuggaagggguccaaccggccaauaguagacauuaauaucaaagaccacagcaucgugucgucuuacgucuguuccggacuggugggcgauaccccgcgcaagaacgacucaaguagcuccucucauugccuugaucccaauaacgaggaaggugggcacggaguuaaaggcugggcuuucgacgauggcaaugacguguggauggggcgaacaauuagcgagaagucaagauugggauaugagacuuuuaaagucaucgaagguuggaguaacccuaaguccaaacugcagauuaauaggcaagugauaguagaucggggcaaccguagcggguacucuggaaucuucucaguugagggcaagaguuguauuaaucgcugcuuuuauguggaacuaaucagagguaggaaggaggaaaccgagguccucuggacaagcaacuccaucguggucuucugugggacuucuggcaccuacggaacaggcucguggccagacggggccgauauuaaucugaugcccauauga

SEQ ID NO: 144645 - RNA, 1410 nt, Artificial Sequence; identical to SEQ ID NO: 144138
  derived and/or modified CDS sequence (opt3) from neuraminidase__InfluenzaA__ACL12209

SEQ ID NO: 144646 - RNA, 1410 nt, Artificial Sequence; identical to SEQ ID NO: 144560
  derived and/or modified CDS sequence (opt3) from neuraminidase__InfluenzaA__ACL12220

SEQ ID NO: 144647 - RNA, 1410 nt, Artificial Sequence
  derived and/or modified CDS sequence (opt3) from neuraminidase__InfluenzaA__ACL12242
augaaccccaaucagaagaucauuaccauaggcagcgugucccugacaaucucuacuauuugcuucuuuaugcagaucgccauucucaucacgaccgucacacuucacuucaaacaguacgaguuuaacucaccuccaaauaaccagguuaugcugugugaaccgacuauaaucgagagaaauauuaccgaaaucguguauuugacaaacaccacuauugagaaggaaaucugccccaaauuagcugaguacaggaauuggaguaagccucagugugacauaacaggguucgcaccauuuagcaaagauaacuccauucggcugucugccggaggugacaucuggguaacccgcgagcccuaugugucgugcgauccugacaaguguuaccaauucgcgcuaggccaggggacgacucucaauaacguccauucaaauaacaccgugcgagaucguacaccauauagaacucugcuuaugaaugaacugggaguucccuuucacuugggcaccaaacaggugugcauugcuuggagcaguuccucuugucaugacgguaaggccuggcuccacgucugcaucacaggggaugacaagaacgcaaccgccagcuucaucuacaauggaaggcugguggauuccguaguuucauggaguaaagagauucugcggacgcaggaaagcgagugugugugcauaaacggcacuuguacagucgugaugaccgacggcucugcuuccgggaaggcagauacuaaaauccucuuuauugaggaaggaaagaucgugcauacaucaaccuuaagcgguagugcccaacacgucgaggaaugcucuugcuauccucgcuacccaggcguuagaugugugugcagggacaacuggaagggguccaaucggccgauaguagauauuaacaucaaagaccacagcaucgugucgucuuacgucuguuccggacuggugggcgacacgccccgcaagaaugauucaaguagcuccucucauugccuugacccuaacaaugaggaaggugggcacggaguuaaaggcugggcuuucgaugacggcaacgauguguggauggggcgaaccauuagcgagaagucaagauugggauaugagacauuuaaagucaucgaagguuggaguaauccaaaguccaaacugcagauuaacaggcaagugauaguagaccggggcaaucguagcggguacucuggaaucuucucaguugagggcaagaguuguauuaaccgcugcuuuuauguggaacuaaucagagguaggaaggaggaaacugagguccucuggaccagcaauuccaucguggucuucugugggacaucuggcacuuacggaaccggcucguggcccgauggggccgacauuaaccugaugccuauauga

SEQ ID NO: 144648 - RNA, 1413 nt, Artificial Sequence
  derived and/or modified CDS sequence (opt3) from neuraminidase__InfluenzaA__ACL12264
augaaccccaaucagaagaucauuaccauaggcagcaucuccauggccauugggaucauuucucugauccuccaaauagugaacaucauuucaaucugggucagucacagcauucagacaggaucccagaaucauacugguaucugcaaccagagaauaauuacguacgaaaauucuaccuggguuaaccaaacauaugugaauaucaacaauacuaacguaguggcuggcaaagacaagaccucggucacacuugcaggaaauucaagccuguguccuauuagggggugggccaucuacaccaaagauaacaguauccggauuggcuccaagggugacguguucguuauacgcgagccauuuaucucuugcagccacuuggagugucgaacuuucuuuuuaacacagggggcgcugcuaaaugauaaacauuccaacggaaccgugaaggaccguucaccguauagagcucucaugaguugcccccugggcgaagccccuagcccauacaauucuagguucgaguccgucgcauggucagccagcgcuugucacgauggcaugggguggcuuacgauuggaaucaguggucccgacgauggcgcaguggccguacugaaguauaacgggauaauuacugaaaccaucaaaucuuggaagaaacggaucuugcgcacacaggaguccgagugcguuugugugaacggaagcugcuuuacuauuaugaccgacggcccuucgaauggugcugccucuuacagaaucuucaagauugaaaaagggaaggucacaaaguccauagagcucgaugcgccaaacucacauuaugaagaguguaguugcuaccccgacaccggaacggugaugugugugugcagggauaauuggcacggcagcaaccggccuugggucuccuuuaaucagaaccuggacuaccaaaucggcuauauuugcucugggguuuucggagauaauccacgcccgaaagacgguaagggcagcugugaccccgugacuguagauggggcagacggagugaaaggcuuuucauaccgauaugguaacggggucuggaucggcagaacaaagaguaauagguuccggaaaggauuugagaugaucugggauccuaacggcuggaccgacacugauuccgacuucagcgugaagcaggauguuguggccaugacagacuggucuggguacucaggaaguuuuguccagcacccagaacugaccggucucgauugcaugcgucccuguuucuggguggaguuaguacgcggcagaccuagggaaaauacgaccauuuggacaagcggguccucuauaucguucugcggaguuaacagcgacacugcuaauugguccuggccagauggcgccgagcugcccuuuaccaucgacaaauga

SEQ ID NO: 144649 - RNA, 1410 nt, Artificial Sequence; identical to SEQ ID NO: 144453
  derived and/or modified CDS sequence (opt3) from neuraminidase__InfluenzaA__ACN32275

SEQ ID NO: 144650 - RNA, 1410 nt, Artificial Sequence
  derived and/or modified CDS sequence (opt3) from neuraminidase__InfluenzaA__ACN32286
augaaccccaauaagaaaaucauuaccauaggcagcgugucccugacaaucucuacuauuugcuucuuuaugcagaucgccauucucaucacgaccgucacacuucacuucaagcaauacgaguuuaacucaccuccaaauaaccagguuaugcugugugaaccgacuauaaucgagagaaauauuaccgaaaucguguauuugacaaacaccacuauugagaaagaaaucugccccaaguuagcugaguacaggaauuggaguaaaccucagugugacauaacaggguucgcaccauuuagcaaggauaacuccauucggcugucugccggaggugacaucuggguaacccgcgagcccuaugugucgugcgauccugacaaguguuaccaguucgcgcuaggccaagggacgacucucaauaacguccauucaaaugauaccgugcgagaccguacaccauauagaacucugcuuaugaacgaacugggaguucccuuucacuugggcaccaaacaggugugcauugcuuggagcaguuccucuugucaugaugguaaggccuggcuccacgucugcaucacaggggacgauaaaaaugcaaccgccagcuucaucuacaacggaaggcugguggacuccauuguaucauggaguaaggagauacugcggacgcaggaaagcgaguguguuugcaucaauggcacuuguacaguggucaugaccgauggcucugcuuccgggaaagcagacacuaagauucucuuuaucgaggaaggaaagauagugcauacaucaaccuuacuggguagcgcccagcacguggaggaaugcaguugcuauccucgcuacccaggcgucagauguguuugcagggauaacuggaaagggucuaaccggccgauuguggacaucaauaucaaggaccacuccauuguaagcucguacguguguucuggacuugucggcgauacgccccgcaaaaacgacuccucaaguagcggucauugcuuggauccuaauaacgaggaagggggacacggcgugaagggcugggcuuucgacgaugggaaugacguuuggaugggacgaaccaucuccgagaaaucuagacuggguuaugagacauuuaaggugauugaaggcuggagcaacccaaaaucaaagcuacaaauaaauaggcaggucaucguggaucgggggaaccguaguggauacuccggcauuuucagcguagaggguaagucuuguaucaaucgcugcuuuuauguugaacucaucagagggaggaaagaggaaacugaggugcuguggaccucaaacaguauugucguguucuguggcacaagcggaacuuacggcaccggguccuggcccgacggagccgauauaaaucuuaugccuaucuga

SEQ ID NO: 144651 - RNA, 1410 nt, Artificial Sequence
  derived and/or modified CDS sequence (opt3) from neuraminidase__InfluenzaA__ACN32493
augaaccccaaucagaagaucauuaccauaggcagcgugucccugacaaucucuacuauuugcuucuuuaugcaaaucgccauucucaucacgaccgucacacuucacuucaaacaguacgaguuuaacucaaguccuaauaaccagguuaugcugugugaaccaacuauaaucgagagaaauauuaccgaaaucguguauuugacaaacaccacuauugagaaggaaaucugcccgaaauuagcugaguacaggaauuggagcaagccccagugugacauaacaggguucgcaccuuuuuccaaagauaacucuauucggcugucggccggaggugacaucuggguaacccgcgagccauaugugucaugcgaucccgacaaguguuaccaauucgcgcuaggccaggggacgacucucaauaacguccauagcaauaacaccgugcgagaucguacaccuuauagaacucugcuuaugaaugaacugggaguuccauuucacuugggcaccaaacaggugugcauugcuuggaguuccucuagcugucaugacgguaaggccuggcuccacgucugcaucacaggggaugacaagaacgcaaccgccuccuucaucuacaauggaaggcugguggauucaauuguaaguuggagcaaagagauacugcggacgcaggaaucugaguguguuugcaucaacggcacuuguacaguggucaugaccgacggcuccgcuucagggaaggcagauacuaaaauucucuuuaucgaggaaggaaagauagugcauacaagcaccuuaagugguucugcccaacacguggaggaaugcuccugcuauccccgcuacccuggcgucagauguguuugcagggacaacuggaaggggagcaaucggccaauuguggauaucaacaucaaagaccacucgauuguaucuuccuacguguguucaggacuggucggcgacacgccgcgcaagaaugauaguagcuccucuagccauugccuugaccccaacaaugaggaaggugggcacggagugaaaggcugggcuuucgaugacggcaacgauguuuggauggggcgaaccaucucagagaagaguagauugggauaugagacauuuaaagugauugaagguugguccaauccuaagagcaaacugcagauaaacaggcaggucaucguggaccggggcaaucguucuggguacucaggaauuuucaguguagagggcaagagcuguaucaaccgcugcuuuuauguugaacuaaucagagguaggaaggaggaaacugaggugcucuggaccuccaauucuauugucguguucugugggacaucgggcacuuacggaaccggcagcuggccagauggggccgacauaaaccugaugcccaucuga

SEQ ID NO: 144652 - RNA, 1410 nt, Artificial Sequence; identical to SEQ ID NO: 142202
  derived and/or modified CDS sequence (opt3) from neuraminidase__InfluenzaA__ACN32526

SEQ ID NO: 144653 - RNA, 1410 nt, Artificial Sequence
  derived and/or modified CDS sequence (opt3) from neuraminidase__InfluenzaA__ACN32537
augaaccccaaucagaagaucauuaccauaggcagcgugucccugacaaucgccacuauuugcuuccucaugcaaaucgcuauucuugucacgaccguuacacugcacuuuaaacaguacgaguguaacucuccuccaaauaaccaggugauguugugcgaaccgacuaucauagagagaaauaucaccgaaauuguauauuuaacaaacaccacuaucgagaaggaaauuugucccaaacuggcagaguacaggaauuggucaaagccucagugcaacaucacaggguucgccccauuuaguaaagacaauagcauacggcuauccgcgggaggugauauuugggugacccgcgagcccuaugucucuugugacccugauaagugcuaccaauucgcucucggccaggggacgacucugaacaauggacauucgaacgacaccgugcacgaucgaacaccauaucguacucuucugaugaaugaauugggcguucccuuucaucucgguaccagacagguguguaucgccuggucaagcaguuccugccacgacgggaaggcauggcugcaugucugugugacaggagaugacgagaacgccaccgcuucuuucauuuacaauggcaggcugguagauagcaucggcuccuggaguaaaaagauccuccggacgcaggaaucagagugcguuuguauuaacgggacuugcacaguggucaugaccgacggaagcgcaucugguaaagccgauacuaagauauuauuuaucgaggaaggcaaaauugugcacaucuccacacugucagggagcgcucaacacguggaggaaugcaguuguuauccucgcuacccagacgucagaugcguuuguagggauaacuggaagggaucuaaucggccgauaguggacauuaacguaaaggacuacuccaucgugagcucguaugucugcucuggccuugugggugauacccccaggaaaaaugacuccuucucaaguagccauuguuuggauccuaacaaugaggaagggggacacggcguuaagggcugggccuuugacgaugggaacgacguguggaugggacgaacgaucuccgagaaacugagaucugguuacgagaccuucaaggucauugauggcuggagcaaaccaaauucaaagcuacagaucaaccgccaggugauuguagaacgggggaaucguaguggauauuccggcauauuuagcguugaggguaaaucuugcaucaaccgcuguuucuacguggaacucauuagagggaggaaggaggaaacagaggucugguggacuucaaauaguaucguggucuuuugcggcaccagcggaacauauggcacuggguccuggcccgacggagcggauaucaaccugaugccuauuuga

SEQ ID NO: 144654 - RNA, 1413 nt, Artificial Sequence; identical to SEQ ID NO: 144130
  derived and/or modified CDS sequence (opt3) from neuraminidase__InfluenzaA__ACN32807

SEQ ID NO: 144655 - RNA, 1413 nt, Artificial Sequence; identical to SEQ ID NO: 144078
  derived and/or modified CDS sequence (opt3) from neuraminidase__InfluenzaA__ACN32818

SEQ ID NO: 144656 - RNA, 1413 nt, Artificial Sequence; identical to SEQ ID NO: 144078
  derived and/or modified CDS sequence (opt3) from neuraminidase__InfluenzaA__ACN32829

SEQ ID NO: 144657 - RNA, 1413 nt, Artificial Sequence
  derived and/or modified CDS sequence (opt3) from neuraminidase__InfluenzaA__ACN32840
augaaccccaaucagaagaucauuaccauaggcagcaucuccauugccaucgggauuaucucucugaugcuccaaauaggaaacaucauuucaaucugggcuagucacagcauucagacagguucccagaaucauacuggcaucugcaaccagagaauaauuacguacgaaaauucuaccugggugaaccacacauaugucucgaucaauaacacuaauguuguggcagggaaagacaagaccucaguaacacuugccggaaacagcagucuguguuccauuucuggcugggcgaucuacaccaaagauaauagcaucaggauugguuccaagggggacguguucgucauacgggagccuuuuaucucaugcagucauuuggagugucgcacuuucuuuuuaacacaaggagcucugcuaaacgauaaacacagcaauggcaccgugaaggaccgaucuccauaucgugcccucauguccugcccgcugggcgaagcacccucaccuuacaacagcaaguucgagaguguugccuggucugcuuccgcaugucaugaugggaugggauggcuuacgauugguaucagcggcccagacaauggggccguggcuguccugaaauauaacggaauaauuacugaaaccaucaagucguggaaaaagagaaucuugaggacacaggagucugagugcguguguguaaacggcuccugcuuuacuauuaugaccgauggucccucaaauggggccgcgaguuacaaaaucuucaagauugaaaagggaaaaguuacaaagagcauagagcucaacgcaccuaauuuucacuaugaagaguguuccugcuacccagacaccggcacggugaugugugucugccgggauaacuggcacggcucuaaucgccccugggugagcuucaaccagaaucuggacuaccagaucggguauauuugcucaggaguguuuggugauaacccuagaccaaaagacggcaaggggaguuguaauccggucacuguugauggagccgacggcgugaaagguuucuccuacaaguaugggaacggcguauggaucggaaggacaaaaagcaaucggcugcgcaagggcuuugagaugaucugggaccccaacggguggaccgauacugacucugauuucucagugaagcaagacgucguggcuauuacagauuggaguggauacagcgguuccuuuguucagcauccugaacucaccggcuuagacugcauacgaccauguuucuggguggagcuggucagagggcuucccagggaaaauacgaccaucuggacaucuggaucgagcauuuccuucugcggcguggauucagacacuguaaacuggaguuggccugauggugccgaguugccauuuaccaucgacaaauga

SEQ ID NO: 144658 - RNA, 1410 nt, Artificial Sequence; identical to SEQ ID NO: 144560
  derived and/or modified CDS sequence (opt3) from neuraminidase__InfluenzaA__ACN32851

SEQ ID NO: 144659 - RNA, 1410 nt, Artificial Sequence; identical to SEQ ID NO: 144647
  derived and/or modified CDS sequence (opt3) from neuraminidase__InfluenzaA__ACN32862

SEQ ID NO: 144660 - RNA, 1410 nt, Artificial Sequence; identical to SEQ ID NO: 144651
  derived and/or modified CDS sequence (opt3) from neuraminidase__InfluenzaA__ACN32873

SEQ ID NO: 144661 - RNA, 1410 nt, Artificial Sequence; identical to SEQ ID NO: 144647
  derived and/or modified CDS sequence (opt3) from neuraminidase__InfluenzaA__ACN32884

SEQ ID NO: 144662 - RNA, 1410 nt, Artificial Sequence; identical to SEQ ID NO: 144651
  derived and/or modified CDS sequence (opt3) from neuraminidase__InfluenzaA__ACN32895

SEQ ID NO: 144663 - RNA, 1410 nt, Artificial Sequence; identical to SEQ ID NO: 144560
  derived and/or modified CDS sequence (opt3) from neuraminidase__InfluenzaA__ACN32906

SEQ ID NO: 144664 - RNA, 1410 nt, Artificial Sequence
  derived and/or modified CDS sequence (opt3) from neuraminidase__InfluenzaA__ACN32917
augaaccccaaucagaagaucauuaccauaggcagcgugucccugacaaucucuacuauuugcuucuuuaugcaaaucgccauucucaucacgaccgucacacuucacuucaaacaguacgaguuuaacucaccuccaaauaaccagguuaugcuguguaagccgacuauaaucgaaagaaauauuaccgagaucguguauuugacaaacaccacuauugaaaaagagaucugccccaaguuagcugaauacaggaauuggaguaaaccucagugugacauaacaggguucgcaccauuuagcaaggauaacuccauucggcugucugccggaggugacaucuggguaacccgcgagcccuaugugucgugcgauccugacaaguguuaccaauucgcgcuaggccaggggacgacucucaauaacguccauucaaauaacaccgugcgagaucguacaccauauagaacucugcuuaugaaugagcugggaguucccuuucacuugggcaccaaacaggugugcauugcuuggagcaguuccucuugucaugacgguaaggccuggcuccacgucugcaucacaggggaugacaaaaacgcaaccgccagcuucaucuacaauggaaggcugguggauuccguaguuucauggaguaaggaaauucugcggacgcaggagagcgaaugugugugcauaaacggcacuuguacagucgugaugaccgacggcucugcuuccgggaaagcagauacuaagauccucuuuauugaggagggaaagaucgugcauacaucaaccuuaagcgguagugcccaacacgucgaagagugcucuugcuauccucgcuacccaggcguuagaugugugugcagggacaacuggaaaggguccaaucggccgauaguagauauuaacaucacggaccacagcaucgugucgucuuacgucuguuccggacuggugggcgacacccccaggaagaaugauucaaguagcuccucucauugccuugacccuaacaaugaagagggugggcacggaguuaaaggcugggcuuucgaugacggcaacgauguguggauggggcgaacaauuagcgaaaagucaagauugggauaugagacuuuuaaagucaucgaggguuggaguaauccaaaguccaaacugcagauuaaccgccaggugauaguagaccggggcaaucguagcggguacucuggaaucuucucaguugaaggcaagaguuguauuaaccgcugcuuuuauguggagcuaaucagagguaggaaggaagagaccgaaguccucuggacaagcaauuccaucguggucuucugugggacuucuggcaccuacggaacaggcucguggcccgauggggccgacauuaaccugaugccuauauga

SEQ ID NO: 144665 - RNA, 1410 nt, Artificial Sequence
  derived and/or modified CDS sequence (opt3) from neuraminidase__InfluenzaA__ACN32928
augaaccccaaucagaagaucauuaccauaggcagcgugucccugacaaucucuacuauuugcuucuuuaugcaaaucgccauucucaucacgaccgucacacuucacuucaaacaguacgaguuuaacucaccuccaaauaaccagguuaugcugugugaaccgacuauaaucgagagaaauauuaccgaaaucguguauuugacaaacaccacuauugagaaggaaaucugccccaaauuagcugaguacaggaauuggaguaagccucagugugacauaacaggguucgcaccauuuagcaaagauaacuccauucggcugucugccggaggugacaucuggguaacccgcgagcccuaugugucgugcgauccugacaaguguuaccaauucgcgcuaggccaggggacgacucucaauaacguccauucaaauaacaccgugcgagaucguacaccauauagaacucugcuuaugaaugaacugggaguucccuuucacuugggcaccaaacaggugugcauugcuuggagcaguuccucuugucaugacgguaaggccuggcuccacgucugcaucacaggggaugacaagaacgcaaccgccagcuucaucuacaauggaaggcugguggauuccguaguuucauggaguaaagagauucugcggacgcaggaaagcgagugugugugcauaaacggcacuuguacagucgugaugaccgacggcucugcuuccgggaaggcagauacuaaaauccucuuuauugaggaaggaaagaucgugcauacaucaaccuuaagcgguagugcccaacacgucgaggaaugcucuugcuauccucgcuacccaggcguuagaugugugugcagggacaacuggaagggguccaaucggccgauaguagauauuaacaucacggaccacagcaucgugucgucuuacgucuguuccggacuggugggcgacacccccaggaaaaaugauucaaguagcuccucucauugccuugacccuaacaaugaggaaggugggcacggaguuaagggcugggcuuucgaugacggcaacgauguguggauggggcgaacaauuagcgagaaaucaagauugggauaugagacuuuuaaggucaucgaagguuggaguaauccaaaauccaagcugcagauuaaccgccaggugauaguagaccggggcaaucguagcggguacucuggaaucuucucaguugagggcaaaaguuguauuaaccgcugcuuuuauguggaacuaaucagagguaggaaggaggaaaccgagguccucuggacaagcaauuccaucguggucuucugugggacuucuggcaccuacggaacaggcucguggcccgauggggccgacauuaaccugaugccuauauga

SEQ ID NO: 144666 - RNA, 1410 nt, Artificial Sequence; identical to SEQ ID NO: 144651
  derived and/or modified CDS sequence (opt3) from neuraminidase__InfluenzaA__ACN32939

SEQ ID NO: 144667 - RNA, 1410 nt, Artificial Sequence; identical to SEQ ID NO: 144560
  derived and/or modified CDS sequence (opt3) from neuraminidase__InfluenzaA__ACN32950

SEQ ID NO: 144668 - RNA, 1410 nt, Artificial Sequence
  derived and/or modified CDS sequence (opt3) from neuraminidase__InfluenzaA__ACN32961
augaaccccaaucagaagaucauuaccauaggcagcgugucccugacaaucucuacuauuugcuucuuuaugcaaaucgccauucucaucacgaccgucacacuucacuucaaacaguacgaguuuaacucaccuccaaauaaccagguuaugcugugugaaccgacuauaaucgagagaaauauuaccgaaaucguguauuugacaaacaccacuauugagaaggaaaucugccccaaauuagcugaguacaggaauuggaguaagccucagugugacauaacaggguucgcaccauuuagcaaagauaacuccauucggcugucugccggaggugacaucuggguaacccgcgagcccuaugugucgugcgauccugacaaguguuaccaauucgcgcuaggccaggggacgacucucaauaacguccauucaaauaacaccgugcgagaucguacaccauauagaacucugcuuaugaaugaacugggaguucccuuucacuugggcaccaaacaggugugcauugcuuggagcaguuccucuugucaugacgguaaggccuggcuccacgucugcaucacaggggaugacaagaacgcaaccgccagcuucaucuacaauggaaggcugguggauuccguaguuucauggaguaaagagauucugcggacgcaggaaagcgagugugugugcauaaacggcacuuguacagucgugaugaccgacggcucugcuuccgggaaggcagauacuaaaauccucuuuauugaggaaggaaagaucgugcauacaucaaccuuaagcgguagugcccaacacgucgaggaaugcucuugcuauccucgcuacccaggcguuagaugugugugcagggacaacuggaagggguccaaucggccgauaguagauauuaacaucacggaccacagcaucgugucgucuuacgucuguuccggacuggugggcgacacccccaggaaaaaugauucaaguagcuccucucauugccuugacccuaacaaugaggaaggugggcacggaguuaagggcugggcuuucgaugacggcaacgauguguggauggggcgaacaauuagcgagaaaucaagauugggauaugagacuuuuaaggucaucgaagguuggaguaauccaaaauccaagcugcagauuaaccgccaggugauaguagaccggggcaaucguagcggguacucuggaaucuucucaguugagggcaaaaguuguauuaaccgcugcuuuuauguggaacuaaucagagguaggaaggaggaaaccgagguccucuggacaagcaauuccaucguggucuucugugggacuucuggcaccuacggaacaggcucguggcccgauggggccgacauuaacauaaugccuaucuga

SEQ ID NO: 144669 - RNA, 1410 nt, Artificial Sequence; identical to SEQ ID NO: 144647
  derived and/or modified CDS sequence (opt3) from neuraminidase__InfluenzaA__ACN32972

SEQ ID NO: 144670 - RNA, 1410 nt, Artificial Sequence; identical to SEQ ID NO: 144647
  derived and/or modified CDS sequence (opt3) from neuraminidase__InfluenzaA__ACN32994

SEQ ID NO: 144671 - RNA, 1410 nt, Artificial Sequence
  derived and/or modified CDS sequence (opt3) from neuraminidase__InfluenzaA__ACN33005
augaaccccaaucagaagaucauuaccauaggcagcgugucccugacaaucucuacuauuugcuucuuuaugcagaucgccauucucaucacgaccgucacacuucacuucaaacaguacgaguuuaacucaccuccaaauaaccagguuaugcugugugaaccgacuauaaucgagagaaauauuaccgaaaucguguauuugacaaacaccacuauugagaaggaaaucugccccaaauuagcugaguacaggaauuggaguaagccucagugugacauaacaggguucgcaccauuuagcaaagauaacuccauucggcugucugccggaggugacaucuggguaacccgcgagcccuaugugucgugcgauccugacaaguguuaccaauucgcgcuaggccaggggacgacucucaauaacguccauucaaaugauaccgugcgagaccguacaccauauagaacucugcuuaugaacgaacugggaguucccuuucacuugggcaccaaacaggugugcauugcuuggagcaguuccucuugucaugaugguaaggccuggcuccacgucugcaucacaggggacgauaagaaugcaaccgccagcuucaucuacaacggaaggcugguggacuccguaguuucauggaguaaagagauucugcggacgcaggaaagcgagugugugugcauaaauggcacuuguacagucgugaugaccgauggcucugcuuccgggaaggcagacacuaaaauccucuuuauugaggaaggaaagaucgugcauacaucaaccuuaagcgguagugcccaacacgucgaggaaugcucuugcuauccucgcuacccaggcguuagaugugugugcagggauaacuggaagggguccaaccggccgauaguagacauuaauaucaaagaccacagcaucgugucgucuuacgucuguuccggacuggugggcgauacgccccgcaagaacgacucaaguagcuccucucauugccuugauccuaauaacgaggaaggugggcacggaguuaaaggcugggcuuucgacgauggcaaugacguguggauggggcgaaccauuagcgagaagucaagauugggauaugagacauuuaaagucaucgaagguuggaguaacccaaaguccaaacugcagauuaauaggcaagugauaguagaucggggcaaccguagcggguacucuggaaucuucucaguugagggcgaaaguuguauuaaucgcugcuuuuauguggagcuaaucagagguaggaaggaagagacugagguccucuggaccagcaacuccaucguggucuucugugggacaucuggcacuuacggaaccggcucguggcccgacggggccgauauuaaucugaugccuauauga

SEQ ID NO: 144672 - RNA, 1410 nt, Artificial Sequence; identical to SEQ ID NO: 144647
  derived and/or modified CDS sequence (opt3) from neuraminidase__InfluenzaA__ACN33016

SEQ ID NO: 144673 - RNA, 1410 nt, Artificial Sequence; identical to SEQ ID NO: 144647
  derived and/or modified CDS sequence (opt3) from neuraminidase__InfluenzaA__ACN33049

SEQ ID NO: 144674 - RNA, 1410 nt, Artificial Sequence; identical to SEQ ID NO: 144647
  derived and/or modified CDS sequence (opt3) from neuraminidase__InfluenzaA__ACN33060

SEQ ID NO: 144675 - RNA, 1410 nt, Artificial Sequence; identical to SEQ ID NO: 144651
  derived and/or modified CDS sequence (opt3) from neuraminidase__InfluenzaA__ACN33082

SEQ ID NO: 144676 - RNA, 1413 nt, Artificial Sequence; identical to SEQ ID NO: 144117
  derived and/or modified CDS sequence (opt3) from neuraminidase__InfluenzaA__ACN33093

SEQ ID NO: 144677 - RNA, 1413 nt, Artificial Sequence; identical to SEQ ID NO: 144078
  derived and/or modified CDS sequence (opt3) from neuraminidase__InfluenzaA__ACN33104

SEQ ID NO: 144678 - RNA, 1410 nt, Artificial Sequence; identical to SEQ ID NO: 144651
  derived and/or modified CDS sequence (opt3) from neuraminidase__InfluenzaA__ACN33115

SEQ ID NO: 144679 - RNA, 1413 nt, Artificial Sequence
  derived and/or modified CDS sequence (opt3) from neuraminidase__InfluenzaA__ACN33126
augaaccccaaucagaagaucauuaccauaggcagcaucuccauugccaucgggauuaucucucugaugcuccaaauaggaaacaucauuucaaucugggcuagucacagcauucagacagguucccagaauaacacuggcaucugcaaucagagaauaauuacguacgagaacucuaccugggugaaucauacauaugucaacaucaauaacacuaauguuguggcaggggaagacaaaaccucgguaacacuugccggaucaagcagucuguguuccauuucuggcugggcgaucuacaccaaggauaacagcaucaggauugguuccaaaggggacguguucgucauacgggagccuuuuaucucaugcagucacuuggaaugucgcacuuucuuuuuaacacaaggagcucugcuaaaugauaagcauagcaacggcaccgugaaagaccgaucuccauaucgugcccucauguccugcccgcugggcgaggcacccucaccuuacaauagcaaguucgaaaguguugccuggucugcuuccgcaugucacgaugggaugggauggcuuacgauugguaucagcggcccagacaacggggccguggcuguccugaaguauaacggaauaauuacuggcaccaucaaaucguggaagaaacagaucuugagaacacaggagucugagugcguguguaugaaugguuccugcuuuacuauuaugaccgaugggcccucaaacaaggccgcgaguuacaaaaucuucaagauugaaaagggaaaaguaacaaagagcauagagcucaaugcaccuaacuuucauuaugaagaguguuccugcuacccagacaccggcaucguuaugugugugugcagggauaauuggcacggcucuaaccggcccugggucagcuucaaucagaaccuggacuaccaaauuggguauaucugcucaggaguguuuggugauaauccucgcccagaggacggcgaagggaguuguaacccggugacggucgauggagccaauggcguuaaagguuucuccuacaaguaugacaacgggguguggaucggcagaacuaaaagcaauaggcugcggaagggauuugagaugauuugggaccccaacggcuggacaaauaccgauucugacuucucaguaaaacaggauguggucgcuauaacugacuggaguggguacagcggauccuuugugcagcacccugaacucacagguuuagauugcauccgcccauguuucuggguugagcuggugcgaggccuucccagagaaaacaccacgauuuggaccucugggucgagcaucuccuucugcggagucaacucagacacagccaauuggaguuggccugauggcgcagaguugccauuuacuauugacaaguga

SEQ ID NO: 144680 - RNA, 1413 nt, Artificial Sequence
  derived and/or modified CDS sequence (opt3) from neuraminidase__InfluenzaA__ACN33148
augaaccccaaucagaagaucauuaccauaggcagcaucuccauugccaucgggauuaucucucugaugcuccaaauaggaaacaucauuucaaucugggcuagucacagcauucagacagguucccagaauaacacuggcaucugcaaucagagaauaauuacguacgagaacucuaccugggugaaucauacauaugucaacaucaauaacacuaauguuguggcaggggaagacaaaaccucgguaacacuugccggaaacucaagccuguguaguauuuccggcugggcgaucuacaccaaggauaauucuaucaggauugguagcaaaggggacguguucgucauacgggagccuuuuaucuccugcucacacuuggaaugucgcacuuucuuuuuaacacaaggagcucugcuaaacgauaagcauaguaauggcaccgugaaagaccgaagcccauaucgugcccucaugucuugcccgcugggcgaggcacccuccccuuacaacucaaaguucgaaagcguugccuggagugcuucugcaugucacgaugggaugggauggcuuacgauugguaucuccggcccagacaacggggccguggcuguccugaaguauaauggaauaauuacuggcaccaucaaaagcuggaagaaacagaucuugagaacacaggagucggagugcguguguaugaacgguucuugcuuuacuauuaugaccgaugggcccuccaauaaggccgcgucauacaaaaucuucaagauugaaaagggaaaaguaacaaagaguauagagcucaacgcaccuaauuuucauuaugaagaguguagcugcuacccagacaccggcaucguuaugugugugugcagggauaacuggcacggcuccaaucggcccugggucucuuucaaccagaaucuggacuaccaaauuggguauaucugcagcggaguguuuggugauaacccucgcccagaggacggcgaagggucauguaauccggugacggucgauggagccaacggcguuaaagguuucaguuacaaguaugacaaugggguguggaucggcagaacuaaauccaacaggcugcggaagggauuugagaugauuugggaccccaauggcuggacaaacaccgauagcgacuucucuguaaaacaggauguggucgcuauaacugacuggucaggguacagugguagcuuugugcagcacccugaacucacaggauuagauugcauccgcccauguuucuggguugagcuggugcgaggccuucccagagaaaacaccacgauuuggaccuccgggucuucgaucagcuucugcggagucaauuccgacacagccaacuggucauggccugauggcgcagaguugccauuuacuauugacaaguga

SEQ ID NO: 144681 - RNA, 1410 nt, Artificial Sequence
  derived and/or modified CDS sequence (opt3) from neuraminidase__InfluenzaA__ACN33159
augaaccccaaucagaagaucauuaccauaggcagcgugucccugacaaucucuacuauuugcuucuuuaugcagaucgccauucucaucacgaccgucacacuucacuucaaacaguacgaguuuaacucaccuccaaauaaccagguuaugcugugugaaccgacuauaaucgagagaaauauuaccgaaaucguguauuugacaaacaccacuauugagaaggaaaaaugccccaaguuagcugaguacaggaauuggaguaaaccucagugugacaucacaggguucgcaccauuuagcaaggauaacuccauacggcugucugccggaggugacauuuggguaacccgcgagcccuaugugucgugcgauccugacaaguguuaccaauucgcgcuaggccaggggacgacucucaauaacguccauucaaauaacaccgugcgagaucguacaccauauagaacucugcuuaugaaugaacugggaguucccuuucacuugggcaccaaacaggugugcaucgcuuggagcaguuccucuugucaugacgguaaggccuggcuccacgucugcauuacaggggaugacaaaaacgcaaccgccagcuucaucuacaauggaaggcugguggauuccguaguuucauggaguaaggagauccugcggacgcaggaaagcgagugugugugcauuaacggcacuuguacagucgugaugaccgacggcucugcuuccgggaaagcagauacuaagauacucuuuaucgaggaaggaaagauugugcauacaucaaccuuaagcgguagugcccaacacgucgaggaaugcucuugcuauccucgcuacccaggcguuagaugugugugcagggacaacuggaaaggguccaaucggccgaucguagauauaaacauuaaggaccacagcaucgugucgucuuacgucuguuccggacuggugggcgacacgccccgcaaaaaugauucaaguagcuccucucauugccuugacccuaacaaugaggaaggugggcacggaguuaagggcugggcuuucgaugacggcaacgauguguggauggggcgaaccaucagcgagaaaucaagauugggauaugagacauuuaaggucauugaagguuggaguaauccaaaauccaagcugcagaucaacaggcaagugauuguagaccggggcaaucguagcggguacucuggaauauucucaguugagggcaagaguuguaucaaccgcugcuuuuauguggaacuaauuagagguaggaaagaggaaacugagguccucuggaccagcaauuccaucguggucuucugugggacaucuggcacuuacggaaccggcucguggcccgauggggccgacaucaaccugaugccuauuuga

SEQ ID NO: 144682 - RNA, 1410 nt, Artificial Sequence; identical to SEQ ID NO: 144560
  derived and/or modified CDS sequence (opt3) from neuraminidase__InfluenzaA__ACN33170

SEQ ID NO: 144683 - RNA, 1410 nt, Artificial Sequence; identical to SEQ ID NO: 144651
  derived and/or modified CDS sequence (opt3) from neuraminidase__InfluenzaA__ACN33181

SEQ ID NO: 144684 - RNA, 1410 nt, Artificial Sequence; identical to SEQ ID NO: 144651
  derived and/or modified CDS sequence (opt3) from neuraminidase__InfluenzaA__ACN33203

SEQ ID NO: 144685 - RNA, 1410 nt, Artificial Sequence
  derived and/or modified CDS sequence (opt3) from neuraminidase__InfluenzaA__ACN33214
augaaccccaaucagaagaucauuaccauaggcagcgugucccugacaaucucuacuauuugcuucuuuaugcaaaucgccauucucaucacgaccgucacacuucacuucaaacaguacgaguuuaacucaccuccaaauaaccagguuaugcugugugaaccgacuauaaucgagagaaauauuaccgaaacaguguauuugaccaacacuacaaucgagaaggaaauuugccccaaauuagcugaguacaggaauuggaguaagccucagugugacaucaccggguucgcaccauuuagcaaagauaacuccauacggcugucugccggaggugacauuuggguaacgcgcgagcccuaugugucgugcgauccugacaaguguuaccaauucgcgcuaggccaggggacuacccucaauaacguccauucaaauaacacagugcgagaucguacuccauauagaacccugcuuaugaaugaacugggaguucccuuucacuugggcacaaaacaggugugcaucgcuuggagcaguuccucuugucaugacgguaaggccuggcuccacgucugcauuaccggggaugacaagaacgcaacggccagcuucaucuacaauggaaggcugguggauuccguaguuucauggaguaaagagauccugcggacucaggaaagcgagugugugugcauuaacggcacauguaccgucgugaugacugacggcucugcuuccgggaaggcagauacaaaaauacucuuuaucgaggaaggaaagauugugcauaccucaacguuaagcgguagugcccaacacgucgaggaaugcucuugcuauccucgcuacccaggcguuagaugugugugcagggacaacuggaagggguccaaucggccgaucguagauauaaacauuaaagaccacagcaucgugucgucuuacgucuguuccggacuggugggcgacacccccaggaagaaugauucaaguagcuccucucauugccuugacccuaacaaugaggaaggugggcacggaguuaaaggcugggcuuucgaugacggcaacgauguguggauggggcgaacaaucagcgagaagucaagauugggauaugagacuuuuaaagucauugaagguuggaguaauccaaaguccaaacugcagaucaaccgccaggugauuguagaccggggcaaucguagcggguacucuggaauauucucaguugagggcaagaguuguaucaaccgcugcuuuuauguggaacuaauuagagguaggaaggaggaaaccgagguccucuggacaagcaauuccaucguggucuucugugggacuucuggcaccuacggaacaggcucguggcccgauggggccgacaucaaccugaugccuauuuga

SEQ ID NO: 144686 - RNA, 1413 nt, Artificial Sequence; identical to SEQ ID NO: 144119
  derived and/or modified CDS sequence (opt3) from neuraminidase__InfluenzaA__ACN42984

SEQ ID NO: 144687 - RNA, 1413 nt, Artificial Sequence; identical to SEQ ID NO: 144119
  derived and/or modified CDS sequence (opt3) from neuraminidase__InfluenzaA__ACN42995

SEQ ID NO: 144688 - RNA, 1410 nt, Artificial Sequence
  derived and/or modified CDS sequence (opt3) from neuraminidase__InfluenzaA__ACN43006
augaaccccaaucagaagaucauuaccauaggcagcgugucccugacaaucucuacuauuugcuucuuuaugcaaaucgccauucucaucacgaccgucacacuucacuucaaacaguacgaguuuaacucaccuccaaauaacagaguuaugcugugugaaccgacuauaaucgagaggaauauuaccgaaaucguguauuugacaaacaccacuauugagaaggaaaucugccccaaauuagcugaguaccggaauuggaguaagccucagugugacauaacaggguucgcaccauuuagcaaagauaacuccauucgccugucugccggaggugacaucuggguaacccgagagcccuaugugucgugcgauccugacaaguguuaccaguucgcgcuaggccaagggacgacucucaauaacguccauucaaauaacaccgugcgugauagaacaccauauaggacucugcuuaugaaugaacugggaguucccuuucacuugggcaccaaacaggugugcauugcuuggagcaguuccucuugucaugacgguaaggccuggcuccacgucugcaucacaggggaugacaagaacgcaaccgccagcuucaucuacaauggacggcugguggauuccguaguuucauggaguaaagagauucugcgcacgcaggaaagcgagugugugugcauaaacggcacuuguacagucgugaugaccgacggcucugcuuccgggaaggcagauacuaaaauccucuuuauugaggaaggaaagaucgugcauacaucaaccuuaagcgguagugcccagcacgucgaggaaugcucuugcuauccuagauacccaggcguuaggugugugugccgggacaacuggaagggguccaaucgcccgauaguagauauuaacaucaaagaccacagcaucgugucgucuuacgucuguuccggacuggugggcgacacgccccgaaagaaugauucaaguagcuccucucauugccuugacccuaacaaugaggaaggugggcacggaguuaaaggcugggcuuucgaugacggcaacgauguguggauggggagaaccauuagcgagaagucaagguugggauaugagacauuuaaagucaucgaagguuggaguaauccaaaguccaaacugcaaauuaaccgucaggugauaguagaccggggcaaucgcagcggguacucuggaaucuucucaguugagggcaagaguuguauuaacagaugcuuuuauguggaacuaaucaggggucggaaggaggaaacugagguccucuggaccagcaauuccaucguggucuucugugggacaucuggcacuuacggaaccggcucguggcccgauggggccgacauuaaccugaugccuauauga

SEQ ID NO: 144689 - RNA, 1410 nt, Artificial Sequence; identical to SEQ ID NO: 144651
  derived and/or modified CDS sequence (opt3) from neuraminidase__InfluenzaA__ACN43017

SEQ ID NO: 144690 - RNA, 1410 nt, Artificial Sequence; identical to SEQ ID NO: 144647
  derived and/or modified CDS sequence (opt3) from neuraminidase__InfluenzaA__ACN43028

SEQ ID NO: 144691 - RNA, 1410 nt, Artificial Sequence
  derived and/or modified CDS sequence (opt3) from neuraminidase__InfluenzaA__ACN43039
augaaccccaaucagaagaucauuaccauaggcagcgugucccugacaaucucuacuauuugcuucuuuaugcagaucgccauucucaucacgaccgucacacuucacuucaaacaguacgaguuuaacucaccuccaaauaaccagguuaugcugugugaaccgacuauaaucgagagaaauauuaccgaaaucguguauuugacaaacaccacuauugagaaggaaaucugccccaaauuagcugaguacaggaauuggaguaagccucagugugacauaacaggguucgcaccauuuagcaaagauaacuccauucggcugucugccggaggugacaucuggguaacccgcgagcccuaugugucgugcgauccugacaaguguuaccaauucgcgcuaggccaggggacgacucucaauaacguccauucaaaugauaccgugcgagaccguacaccauauagaacucugcuuaugaacgaacugggaguucccuuucacuuggagaccaaacaggugugcauugcuuggagcaguuccucuugucaugauggcaaggccuggcuccacgucugcaucacaggugacgauaagaaugcaaccgccagcuucaucuacaacgggaggcugguggacuccguaguuucauggaguaaagaaauucugcggacgcaggagagcgagugugugugcauaaauggaacuuguacagucgugaugaccgauggcucugcuuccggcaaggcagacacuaaaauccucuuuauugaagaggggaagaucgugcauacaucaaccuuaagcggaagugcccaacacgucgaagagugcucuugcuauccucgcuacccagguguuagaugugugugcagggauaacuggaagggcuccaaccggccgauaguagacauuaauaucaaagaccacagcaucgugucgucuuacgucuguuccgggcuggugggagauacgccccgcaagaacgacucaaguagcuccucucauugccuugauccuaauaacgaagagggcggucacgggguuaaaggaugggcuuucgacgauggcaaugacguguggaugggccgaaccauuagcgagaagucaagauugggguaugaaacauuuaaagucaucgagggauggaguaacccaaaguccaaacugcagauuaauaggcaagugauaguagaucgggguaaccguagcggcuacucugggaucuucucaguugaaggaaagaguuguauuaaucgcugcuuuuauguggagcuaaucagaggcaggaaggaagagacugagguccucuggaccagcaacuccaucguggucuucugugguacaucugggacuuacggcaccggaucguggcccgacggcgccgauauuaaucugaugccuauauga

SEQ ID NO: 144692 - RNA, 1410 nt, Artificial Sequence; identical to SEQ ID NO: 144560
  derived and/or modified CDS sequence (opt3) from neuraminidase__InfluenzaA__ACN43050

SEQ ID NO: 144693 - RNA, 1410 nt, Artificial Sequence; identical to SEQ ID NO: 144647
  derived and/or modified CDS sequence (opt3) from neuraminidase__InfluenzaA__ACN43061

SEQ ID NO: 144694 - RNA, 1410 nt, Artificial Sequence
  derived and/or modified CDS sequence (opt3) from neuraminidase__InfluenzaA__ACN43072
augaaccccaaucagaagaucauuaccauaggcagcgugucccugacaaucucuacuauuugcuucuuuaugcagaucgccauucucaucacgaccgucacacuucacuucaaacaguacgaguuuaacucaccuccaaauaaccagguuaugcugugugaaccgacuauaaucgagagaaauauuaccgaaaucguguauuugacaaacaccacuauugagaaggaaaucugccccaaauuagcugaguacaggaauuggaguaagccucagugugacauaacaggguucgcaccauuuagcaaagauaacuccauucggcugucugccggaggugacaucuggguaacccgcgagcccuaugugucgugcgauccugacaaguguuaccaauucgcgcuaggccaggggacgacucucaauaacguccauucaaauaacaccgugcgagaucguacaccauauagaacucugcuuaugaaugaacugggaguucccuuucacuugggcaccaaacaggugugcauugcuuggagcaguuccucuugucaugacgguaaggccuggcuccacgucugcaucacaggggaugacaagaacgcaaccgccagcuucaucuacaauggaaggcugguggauuccguaguuucauggaguaaagagauucugcggacgcaggaaagcgagugugugugcauaaacggcacuuguacagucgugaugaccgacggcucugcuuccgggaaggcagauacuaaaauccucuuuauugaggaaggaaagaucgugcauacaucaaccuuaagcgguagugcccaacacgucgaggaaugcucuugcuauccucgcuacccaggcguuagaugugugugcagggacaacuggaagggguccaaucggccgauaguagauauuaacaucaaagaccacagcaucgugucgucuuacgucuguuccggacuggugggcgacacgccccgcaagaaugauucaaguagcuccucucauugccuugacccuaacaaugaggaaggugggcacggaguuaaaggcugggcuuucgaugacggcaacgauguguggauggggcgaaccauuagcgagaagucaagauugggauaugagacauuuaaagucaucgaagguuggaguaauccaaaguccaaacugcagauuaacaggcaagugauaguagaccggggcaaucguagcggguacucuggaaucuucucaguugagggcaagaguuguauuaaccgcugcuuuuauguggaacuaaucagagguaggaaggaggaaacugagguccucuggaccagcaauuccguggucguguucugugggacaucuggcacuuacggaaccggcucguggcccgauggggccgacaucaaccugaugccuauuuga

SEQ ID NO: 144695 - RNA, 1410 nt, Artificial Sequence
  derived and/or modified CDS sequence (opt3) from neuraminidase__InfluenzaA__ACN43083
augaaccccaaucagaagaucauuaccauaggcagcgugucccugacaaucucuacuauuugcuucuuuaugcaaaucgccauucucaucacgaccgucacacuucacuucaaacaguacgaguuuaacucaaguccuaauaaccagguuaugcugugugaaccaacuauaaucgagagaaauauuaccgaaaucguguauuugacaaacaccacuauugagaaggaaaucugcccgaaauuagcugaguacaggaauuggagcaagccccagugugacauaacaggguucgcaccuuuuuccaaagauaacucuauucggcugucggccggaggugacaucuggguaacccgcgagccauaugugucaugcgaucccgacaaguguuaccaauucgcgcuaggccaggggacgacucucaauaacguccauagcaauaacaccgugcgagaucguacaccuuauagaacucugcuuaugaaugaacugggaguuccauuucacuugggcaccaaacaggugugcauugcuuggaguuccucuagcugucaugacgguaaggccuggcuccacgucugcaucacaggggaugacaagaacgcaaccgccuccuucaucuacaauggaaggcugguggauucaauuguaaguuggagcaacgagauacugcggacgcaggaaucugaguguguuugcaucaacggcacuuguacaguggucaugaccgacggcuccgcuucagggaaagcagauacuaagauucucuuuaucgaggaaggaaaaauagugcauacaagcaccuuaagugguucugcccaacacguggaggaaugcuccugcuauccccgcuacccuggcgucagauguguuugcagggacaauuggaaggggagcaaccggccaauuguggauaucaauaucaaggaccacucgauuguaucuuccuacguguguucaggacuggucggcgacacgccgcgcaaaaacgauaguagcuccucuagccauugccuugaccccaauaacgaggaaggugggcacggagugaagggcugggcuuucgaugacggcaaugauguuuggauggggcgaaccaucucagagaaaaguagauugggauaugagacauuuaaggugauugaagguugguccaacccuaaaagcaagcugcagauaaauaggcaggucaucguggaccggggcaaccguucuggguacucaggaauuuucaguguagagggcaaaagcuguaucaaucgcugcuuuuauguugaacuaaucagagguaggaaggaggaaacugaggugcucuggaccuccaacucuauugucguguucugugggacaucgggcacuuacggaaccggcagcuggccagauggggccgacauaaaucugaugcccaucuga

SEQ ID NO: 144696 - RNA, 1410 nt, Artificial Sequence; identical to SEQ ID NO: 142375
  derived and/or modified CDS sequence (opt3) from neuraminidase__InfluenzaA__ACN50231

SEQ ID NO: 144697 - RNA, 1410 nt, Artificial Sequence
  derived and/or modified CDS sequence (opt3) from neuraminidase__InfluenzaA__ACN50233
augaaccccaaucagaagaucauuaccauaggcagcgugucccugacaaucucuacuauuugcuucuuuaugcaaaucgccauucucaucacgaccgucacacuucacuucaaacaguacgaguuuaacucaccuccaaauaaccagguuaugcugugugaaccgacuauaaucgagagaaauauuaccgaaaucguguauuugacaaacaccacuauugagaaggaaaucugccccaaauuagcugaguacaggaauuggaguaagccucagugugacauaacaggguucgcaccauuuagcaaagauaacuccauucggcugucugccggaggugacaucuggguaacccgcgagcccuaugugucgugcgauccugacaaguguuaccaauucgcgcuaggccaggggacgacucucaauaacguccauucaaaugauaccgugcacgaccgaacaccauaucguacucugcuuaugaacgaacugggaguucccuuucauuugggcaccaaacaggugugcauugcuuggagcaguuccucuugucacgaugguaaggccuggcuccaugucugcgugacaggggacgauaagaaugcaaccgccagcuucaucuacaacggaagacugguagacuccaucguuucauggaguaaagagauucugaggacgcaggaaagcgagugugugugcauaaauggcacuuguacagucgugcucaccgauggcucugcuuccgggaaggcagacacuaaaaucuuauuuauugaggaaggaaagaucgugcacacaucaaagcugagcgguagugcccaacacgucgaggaaugcucuugcuauccucgguacccaggcguucgcugugugugcagagauaacuggaaaggguccaacaggccgauaguagacauuaauaucaaggacuacagcaucgugucgucuuaugucuguuccggacuugugggcgauacuccccggaaaaacgacucaaguagcuccggucauugcuuggauccuaauaacgaggaagggggacacggcguuaagggcugggcuuucgacgaugggaaugacguguggaugggacgcacgauuucugagaaacugcgaagcgguuacgagaccuuuaaggucaucgaaggcuggucaaacccaaauaguaaacuacagauuaacagacaggugauaguagauagggggaaucgguccggauauagcggcaucuucucuguugaggguaagucauguauuaaccguugcuuuuacguggaacucauccgcgggagaaaggaggaaacagagguccuguggaccaguaauagcaucguggucuucuguggcaccuccggaacauauggcacugggucuuggcccgacggagccgauauuaaccuuaugccuauauga

SEQ ID NO: 144698 - RNA, 1410 nt, Artificial Sequence
  derived and/or modified CDS sequence (opt3) from neuraminidase__InfluenzaA__ACN50245
augaaccccaaucagaagaucauuaccauaggcagcgugucccugacaaucucuacuauuugcuucuuuaugcagaucgccauucucaucacgaccgucacacuucacuucaaacaguacgaguuuaacucaccuccaaauaaccagguugugcugugugaaccgacuauaaucgagagaaauauuaccgaaaucguauauuugacaaacaccacuauugagaaggaaaucugccccaaauuagcugaguacaggaauuggaguaagccucagugugacauaacaggguucgcaccauuuagcaaagauaacuccauucggcugucugccggaggugacaucugggugacccgcgagcccuaugucucgugcgauccugacaaguguuaccaauucgcgcuaggccaggggacgacucucaauaacgugcauucaaaugauaccguucgagaccguacaccauauagaacucugcuuaugaacgaacugggagugcccuuucacuugggcaccaagcaggucugcauugcuuggagcaguuccucuugucaugaugguaaagccuggcuccacgugugcaucacaggggacgauaagaaugcaaccgccagcuucaucuacaacggaaggcugguagacuccauuguuucauggaguaaagagauacugcggacgcaggaaagcgagugugugugcaucaauggcacuuguacagucgugaugaccgauggcucugcuuccgggaaggcagacacuaaaauucucuuuaucgaggaaggaaagauagugcauacaucaaccuuaagcgguagugcccaacacgucgaggaaugcucuugcuauccucgcuacccaggcguuagaugugugugcagggauaacuggaagggguccaaccggccgauuguagacaucaauaucaaagaccacagcauugugucgucuuacgucuguuccggacuggugggcgauacgccccgcaagaacgacucaaguagcuccucucauugccuugauccuaauaacgaggaaggugggcacggaguuaaaggcugggcuuucgacgauggcaaugacguguggauggggcgaaccaucagcgagaagucaagauugggauaugagacauuuaaagucauugaagguuggaguaacccaaaguccaaacugcagauaaauaggcaagugaucguagaucggggcgaccguagcggguacucuggaauuuucucaguugagggcaagaguuguaucaaccgcugcuuuuauguggaacuaaucagagguaggaaggaggaaacugagguccucuggaccagcaauuccauuguggucuucugugggacaucuggcacuuacggaaccggcucguggcccgauggggccgacauaaaccugaugccuaucuga

SEQ ID NO: 144699 - RNA, 1413 nt, Artificial Sequence
  derived and/or modified CDS sequence (opt3) from neuraminidase__InfluenzaA__ACN72609
augaaccccaaucagaagaucauuaccauaggcagcaucuccauugccaucgggauuaucucucugaugcuccaaauaggaaacaucauuucaaucugggcuagucacagcauucagacagguucccagaauaacacuggcaucugcaaucagagaauaauuacguacgagaacucuaccugggugaaucauacauaugucaacaucaauaacacuaauguuguggcaggggaagacaaaaccucgguaacacuugccggaaacucaagccuguguaguauuuccggcugggcgaucuacaccaaggauaauucuaucaggauugguagcaaaggggacguguucgucauacgggagccuuuuaucuccugcucacacuuggaaugucgcacuuucuuuuuaacacaaggagcucugcuaaacgauaagcauaguaauggcaccgugaaagaccgaagcccauaucgugcccucaugucuugcccgcugggcgaggcacccuccccuuacaacucaaaguucgaaagcguugccuggagugcuucugcaugucacgaugggaugggauggcuuacgauugguaucuccggcccagacaacggggccguggcuguccugaaguauaauggaauaauuacuggcaccaucaaaagcuggaagaaacagaucuugagaacacaggagucggagugcguguguaugaacgguucuugcuuuacuauuaugaccgaugggcccuccaauaaggccgcgucauacaaaaucuucaagauugaaaagggaaaaguaacaaagaguauagagcucaacgcaccuaauuuucauuaugaagaguguagcugcuacccagacaccggcaucguuaugugugugugcagggauaacuggcacggcuccaaucggcccugggucucuuucaaccagaaucuggacuacaaaauuggguauaucugcagcggaguguuuggugauaacccucgcccagaggacggcgaagggucauguaauccggugacggucgauggagccaacggcguuaaggguuucaguuacaaauaugacaaugggguguggaucggcagaacuaaguccaacaggcugcggaaaggauuugagaugauuugggaccccaauggcuggacaaacaccgauagcgacuucucuguaaagcaagauguggucgcuauaacugacuggucaggguacagugguagcuuugugcagcacccugaacucacaggauuagauugcauccgcccauguuucuggguugagcuggugcgaggccuucccagagaaaacaccacgauuuggaccuccgggucuucgaucagcuucugcggagucaauuccgacacagccaacuggucauggccugauggcgcagaguugccauuuacuauugacaaguga

SEQ ID NO: 144700 - RNA, 1410 nt, Artificial Sequence
  derived and/or modified CDS sequence (opt3) from neuraminidase__InfluenzaA__ACN72621
augaaccccaaucagaagaucauuauaaucagcuccauuugcaugaccaacggcaucgccucucugauucuccaaaucgggaauauaaucucaauuuggaucagucacagcauucagacaggaaaccagaaucagacugagacguguaaccaauccgugaucauauacgaaaauaacaccugggucaaucagacauauguuaacauuucuaauaacaauuucguggcugagcagacuguagugccugucaaacuuguggguucgucaccacugugcccgguuagcggcugggcaaucuacaguaaggacaacuccgugagaauugggucuaaaggagaugucuuugugaucagggaacccuucaucagcuguucccauuuggagugccggaccuuuuucuuaacacagggcgcccugcuaaaugacaagcacucaaacgguaccguaaaagaucgcaguccuuaucgaacucucaugagcuguccaauuggggaaguucccucuccuuacaacucccguuuugagucaguggcguggagcgcuagugccugccaugacggaucuuccuggcugacaauaggcaucagcggcccagauaauggggcagucgccgugcuuaaguauaacgacauuaucaccgauacgauaaagucguggaaaaauaacauucugagaacucaagagucugaaugugcuugcuugaauggauccuguuucaccgugaugacagacggucccucaaacggccaggcaaguuacaagaucuuuaaaaucgagaaggggaaagucguuaagagcguggaacucaaugccccuaacuaucacuacgaggagugcuccuguuacccagauucuggagaaauuaucugcguaugcagggacaauuggcauggcagcaaccggccgugggugucauucaaucagaaccuggaguaucagauugguuacauauguagugggguccugggagauaauccccgcccuaacgacagaacuggcaauugcggcccaguguccagccacggggcuaacggaguuaaggguuuuucuuucaaauauggcgaugggaucuggauuggaaggaccaagucaacaaguagccgguccggcuuugaaaugaucugggaccccaacgguuggaccgggacggacaauaacuucucugugaaacaagauaucgucggcauuacugacuggacaggauacucgggcagcuuugugcagcacccugagcucaccggguuagauuguauacgcccaugcuucuggguagaacugauccgaggaagacccaaggagaauacuauuuggacauccgguucaaguaucucuuucuguggcguuaacagcgacaccguggggugguccuggccggauggagccgagcuuccuuuuacgauugacaaauga

SEQ ID NO: 144701 - RNA, 1410 nt, Artificial Sequence; identical to SEQ ID NO: 144560
  derived and/or modified CDS sequence (opt3) from neuraminidase__InfluenzaA__ACN76503

SEQ ID NO: 144702 - RNA, 1410 nt, Artificial Sequence
  derived and/or modified CDS sequence (opt3) from neuraminidase__InfluenzaA__ACO36345
augaaccccaaucagaagaucauuaccauaggcagcgugucccugacaaucucuacuauuugcuucuuuaugcaaaucgccauucucaucacgaccgucacacuucacuucaaacaguacgaguuuaacucaaguccuaauaaccagguuaugcagugugaaccaacuauaaucgagagaaauauuaccgaaaucguguaucugacaaacaccacuauugagaaggaaaucugcccgaaauuggcugaguacaggaauuggagcaagccccaaugugacauaacaggguucgcaccuuuuuccaaagauaacucuauucgguuaucggccggaggugacaucuggguaacccgcgagccauaugugucaugcgaucccgacaaguguuaccaguucgcgcugggccaggggacgacucuaaauaacguccauagcaauaacaccgugcgagaucguacaccuuauagaacucuccugaugaaugaacuuggaguuccauuucaccugggcaccaaacaggugugcauugcuuggaguuccucuagcugucaugacgguaaggccugguugcacgucugcaucacaggggaugacaagaacgcaaccgccuccuucaucuacaauggaaggcucguggauucaauuguaaguuggagcaaagagauacugcggacgcaagaaucugaguguguuugcaucaacggcacuuguacaguggucaugaccgacggcuccgcuucagggaaggcagauacuaaaauucuguuuaucgaggaaggaaagauagugcauacaagcacccucagugguucugcccagcacguggaggaaugcuccugcuauccccgcuacccuggcgucagauguguuugcagggacaacuggaaggggagcaaucggccaauuguggauaucaacaucaaagaccacucgauuguaucuuccuacguguguucaggauuagucggcgacacgccgcgcaagaaugauaguagcuccucuagccauugccuggaccccaacaaugaggaaggugggcacggagugaaaggcugggcuuucgaugacggcaacgauguuuggauggggcgaaccaucucagagaagaguagacuuggauaugagacauuuaaagugauugaagguugguccaauccuaagagcaaauugcagauaaacaggcaggucaucguggaccggggcaaucguucuggguacucaggaauuuucaguguagagggcaagagcuguaucaaccgcugcuuuuauguugaacugaucagagguaggaaggaggaaacugaggugcuauggaccuccaauucuauugucguguucugugggacaucgggcacuuacggaaccggcagcuggccagauggggccgacauaaaccucaugcccaucuga

SEQ ID NO: 144703 - RNA, 1410 nt, Artificial Sequence; identical to SEQ ID NO: 143028
  derived and/or modified CDS sequence (opt3) from neuraminidase__InfluenzaA__ACO36356

SEQ ID NO: 144704 - RNA, 1410 nt, Artificial Sequence
  derived and/or modified CDS sequence (opt3) from neuraminidase__InfluenzaA__ACO36367
augaaccccaaucagaagaucauuaccauaggcagcgugucccugaucauuucuacaaucugcuucuuuaugcaaacugccauucucaucacgaccgucacacuucacuucaaacaguacgaguuuaacucaccuccaaauaaccagguuaugcugugugaaccgacuauaaucgagagaaauauuaccgaaaucguguauuugacaaacaccacuauugagaaggaaaucugccccaaauuagcugaguacaggaauuggaguaagccucagugugacauaacaggguucgcaccauuuagcaaagauaacuccauucggcugucugccggaggugacaucuggguaacccgcgagcccuaugugucgugcgauccugacaaguguuaccaauucgcgcuaggccaggggacgacucucaauaacguccauucaaaugauaccgugcgaaaccguacaccauauagaacucugcuuaugaaugaacugggaguucccuuucacuugggcaccaaacaggugugcauugcuuggagcaguuccucuugucaugacgguaaggccuggcuccacgucugcaucacaggggaugacaagaacgcaaccgccagcuucaucuacaauggaaggcugguggauuccauuguaucauggaguaaagagauacugcggacgcaggaaagcgaguguguuugcaucaacggcacuuguacaguggucaugaccgacggcucugcuuccgggaaggcagauacuaaaauucucuuuaucgaggaaggaaagauagugcauacaucaaccuuaagcgguagugcccaacacguggaggaaugcucuugcuauccucgcuacccaggcgucagauguguuugcagggacaacuggaagggguccaaucggccgauuguggauaucaacaucaaagaccacagcauuguaucgucuuacguguguuccggacuggucggcgacacgccccgcaagaaugauucaaguagcuccucucauugccuugacccuaacaaugaggaaggugggcacggagugaaaggcugggcuuucgaugacggcaacgauguuuggauggggcgaaccaucagcgagaagucaagauugggauaugagacauuuaaagugauugaagguuggaguaauccaaaguccaaacugcagauaaacaggcaggucaucguggaccggggcaaucguagcggguacucuggaauuuucucaguagagggcaagaguuguaucaaccgcugcuuuuauguugaacuaaucagagguaggaaggaggaaacugaggugcucuggaccagcaauuccauugucguguucugugggacaucuggcacuuucggaaccggcucguggcccgauggggccgacauaaaccugaugccuaucuga

SEQ ID NO: 144705 - RNA, 1413 nt, Artificial Sequence; identical to SEQ ID NO: 144680
  derived and/or modified CDS sequence (opt3) from neuraminidase__InfluenzaA__ACO36400

SEQ ID NO: 144706 - RNA, 1410 nt, Artificial Sequence
  derived and/or modified CDS sequence (opt3) from neuraminidase__InfluenzaA__ACO36411
augaaccccaaucagaagaucauuaccauaggcagcgugucccugacaaucucuacuauuggguucuuuaugcaaacggccauccucauuaccacagucacucuucacuucaaacaguacgaguuuaacucaccuccaaauaaccagguuaugcugugcgaaccgaccaucauagagagaaauaucacagaaauuguguauuugaccaacacuacaaucgagaaggaaauuugucccaaauuagcugaguacaggaauuggaguaagccucagugcgacaucaccggauucgcaccauuuagcaaagauaacuccauacggcugucugccgguggcgacauuuggguaacgcgcgagcccuaugugucgugugauccugacaagugcuaccaauucgcgcuagggcagggaacuacccucaauaacguccauucaaaugauacagugcgaggccguacuccauauagaacccugcuuaugaacgaacuggguguucccuuucacuuggggacaaaacagguguguaucgcuuggagcaguuccucuugccaugacggaaaggccuggcuccacgucuguauuaccggcgaugacaagaaugcaacggccagcuucaucuacaacggcaggcugguggauuccaucguaucauggaguaaagagauucugcggacucaggaaagcgagugcguuuguauaaaugggacaugcaccguggucaugacugacggaucugcuuccgguaaggcagauacaaaaauccucuuuauugaggaaggcaagaucgugcauaccucaacguuaagcgggagugcccaacacguggaggaauguucuugcuauccucgcuacccaggagucagaugcguuuguagggacaacuggaagggcuccaaccggccgauaguggauauuaauaucaaagaccacagcaucguaucgucuuacgugugcuccggucuggucggggacacaccccgcaagaacgauucaaguagcuccucucauugucuugacccuaauaacgaggaaggaggccacggcgugaaagggugggcuuucgaugacggaaaugauguuuggaugggucgaaccauuagcgagaagucaagauugggcuaugagacuuuuaaagugaucgaaggguggaguaacccaaaguccaaacugcagauuaauaggcaggucauaguggaccggggaaaccguagcggcuacucugguaucuucucaguagaggggaagaguugcauuaaucgcuguuuuuauguugaacuaaucagaggcaggaaggaggaaaccgaggugcucuggacaagcaacuccaucgucguguucugcggaacuucuggcaccuacgggacaggaucguggcccgauggugccgacauuaaucugaugccuauauga

SEQ ID NO: 144707 - RNA, 1410 nt, Artificial Sequence
  derived and/or modified CDS sequence (opt3) from neuraminidase__InfluenzaA__ACO36422
augaaccccaaucagaagaucauuaccauaggcagcgugucccugaucauuucuacaaucugcuucuuuaugcaaacugccauucucaucacgaccgucacacuucacuucaaacaguacgaguuuaacucaccuccaaauaaccagguuaugcugugugaaccgacuauaaucgagagaaauauuaccgaaaucguguauuugacaaacaccacuauugagaaggaaaucugccccaaauuagcugaguacaggaauuggaguaagccucagugugacauaacaggguucgcaccauuuagcaaagauaacuccauucggcugucugccggaggugacaucuggguaacccgcgagcccuaugugucgugcgauccugacaaguguuaccaauucgcgcuaggccaggggacgacucucaauaacguccauucaaaugauaccgugcgaggacguacaccauauagaacucugcuuaugaacgaacugggcguucccuuucacuuggguaccaaacaggugugcauugcuuggagcaguuccucuugucaugacgggaaggccuggcuccacgucugcaucacaggagaugacaagaaugcaaccgccagcuucaucuacaacggcaggcugguggauuccauuguaucauggaguaaagagauacugcggacgcaggaaagcgaguguguuugcaucaauggcacuuguacaguggucaugaccgacgggucugcuuccggaaaggcagauacuaaaauucucuuuaucgaggaagguaagauagugcauacaucaaccuuaagcggcagugcccaacacguggaggaaugcucuugcuauccucgcuacccaggggucagauguguuugcagggacaacuggaagggauccaaccggccgauuguggauaucaauaucaaagaccacagcauuguaucgucuuacguguguuccggccuggucggugacacgccccgcaagaacgauucaaguagcuccucucauugccuugacccuaauaacgaggaagggggacacggcgugaaaggcugggcuuucgaugacgggaaugauguuuggaugggacgaaccaucagcgagaagucaagauuggguuaugagacauuuaaagugauugaaggcuggaguaacccaaaguccaaacugcagauaaauaggcaggucaucguggaccgggggaaccguagcggauacucuggcauuuucucaguagaggguaagaguuguaucaaucgcugcuuuuauguugaacuaaucagagggaggaaggaggaaacugaggugcucuggaccagcaacuccauugucguguucuguggcacaucuggaacuuacggcaccgggucguggcccgauggagccgacauaaaucugaugccuaucuga

SEQ ID NO: 144708 - RNA, 1410 nt, Artificial Sequence; identical to SEQ ID NO: 144464
  derived and/or modified CDS sequence (opt3) from neuraminidase__InfluenzaA__ACO36433

SEQ ID NO: 144709 - RNA, 1410 nt, Artificial Sequence
  derived and/or modified CDS sequence (opt3) from neuraminidase__InfluenzaA__ACO36444
augaaccccaaucagaagaucauuaccauaggcagcgugucccugacaaucgccacuauuugcuuccucaugcaaaucgcuauucuugucacgaccguuacacugcacuuuaaacagcaugaguguaacucuccuccaaauaaccaggugauguugugcgaaccgacuaucauagagagaaauaucaccgaaauuguauacuuaacaaacaccacuaucgagaaggaaaaaugucccaagcuggcagaguauaggaauuggucaaaaccucagugcaacauuacaggguucgccccauuuaguaaggacaauagcauccggcuauccgcgggaggugauauaugggugacccgcgagcccuacgucucuugugacccugauaagugcuaucaauucgcucucggccaggggacgacucugaacaauggacacucgaacaauaccgugcaugaccgaacaccauaccguacucuucugaugaacgaauugggcguucccuuucaccucgguaccagacagguguguauugccuggucaagcaguuccugccaugaugggaaagcauggcugcacgucugugugacaggagacgauaagaaugccaccgcuucuuucaucuauaacggcaggcugguagacagcauuggcuccuggaguaaaaagauccuccggacgcaggagucagaaugcguuuguaucaacgggacuugcacaguggucaugaccgauggaagcgcaucugagaaagccgacacuaagauuuuauuuauagaggaagguaagaucgugcacauuuccacacugucaggcagcgcucaacauguggaggaaugcaguuguuacccucgcuauccaggggucagaugcguuuguagggauaauuggaaaggaucuaaccggccgaucguggacauaaauguaaaggauuacuccauugugagcucguacgucugcucuggccuugugggugacacccccaggaaaaacgacuccuucucaaguagccacuguuuggauccuaauaacgaggaagggggacauggcguuaagggcugggccuuugacgaugggaaugacguguggaugggacgaacgaucuccgagaaacugagaucugguuaugagaccuucaaggucaucgaaggcuggagcaaaccaaacucaaagcuacagauuaaucgccaggugaucguagagcgggggaaccguaguggauacuccggcauuuuuagcguugaagguaagucuugcauaaaucgcuguuucuauguggagcucaucagagggaggaaagaagagacagaggucugguggacuucaaacaguauuguggucuuuugcggcaccagcggaacauacggcacuggguccuggcccgauggagcggacaucaaucugaugccuaucuga

SEQ ID NO: 144710 - RNA, 1410 nt, Artificial Sequence
  derived and/or modified CDS sequence (opt3) from neuraminidase__InfluenzaA__ACO36466
augaaccccaaucagaagaucauuaccauaggcagcgugucccugacaaucucuacuauuugcuucuuuaugcaaaucgccauucucaucacgaccgucacacuucacuucaaacaguacgaguuuaacucaccuccaaauaaccagguuaugcugugugaaccgacuauaaucgagagaaauauuaccgaaaucgcuuauuugacaaacaccacuauugagaaggaaaucugccccaaauuagcagaguacaggaauuggaguaagccucaguguaacauaacaggguucgccccauuuagcaaagacaauuccauucggcugucugcgggaggugauaucugggugacccgcgagcccuauguaucgugcgacccugauaaguguuaccaauucgcucuaggccaggggacgacucucaacaaugugcauucaaacgacaccguccacgaucgaacaccauaucguacucugcuuaugaaugaacugggagugcccuuucauuugggcaccaagcagguuugcauugccuggagcaguuccucuugucacgacgguaaagcauggcuccaugugugcgucacaggggaugacgagaacgccaccgcuagcuucaucuacaauggaagacugguggauuccguaguuucauggaguaagaaaauccugaggacgcaggaaagcgagugugugugcauuaacggcacuuguacagucgugaugaccgacggcucugcauccgggaaggccgauacuaaaauacucuuuaucgaggaaggaaagauugugcacacaucaaccuuaagcgguagugcucaacacgucgaggaaugcucuugcuauccucgguacccaggcguucgcugugugugcagagacaacuggaagggguccaauaggccgaucguagauauaaacauuaaagacuacagcaucgugucgucuuaugucuguuccggacuggugggcgacacgccccggaagaaugauucaaguagcuccucucauugccuugacccuaacaaugaggaaggugggcacggaguuaaaggcugggccuucgaugacggcaacgauguguggauggggcgcaccaucagcgagaaguugcgaucaggauacgagacauuuaaagucauugaagguuggaguaauccaaacuccaagcugcagaucaauagacaggugauuguagacaggggcaaccggagcggguauucuggaauauucucaguugagggcaaaaguuguaucaaucguugcuuuuacguggaacuaauucgcgguagaaaccaggagacugaaguccucuggaccagcaauuccaucguggucuucugugggacaucuggcacuuauggaaccggcucguggcccgauggggcggacaucaaccugaugccuauuuga

SEQ ID NO: 144711 - RNA, 1410 nt, Artificial Sequence
  derived and/or modified CDS sequence (opt3) from neuraminidase__InfluenzaA__ACO36477
augaaccccaaucagaagaucauuaccauaggcagcgugucccugacaaucgccacuauuugcuuccucaugcaaaucgcuauucuugucacgaccguuacacugcacuuuaaacagcaugaguguaacucuccuccaaauaaccaggugauguugugcgaaccgacuaucauagagagaaauaucaccgaaauuguauacuuaacaaacaccacuaucgagaaggaaauuugucccaaacuggcagaguauaggaauuggucaaagccucagugcaacaucacaggguucgccccauuuaguaaagacaauagcauacggcuauccgcgggaggugauauuugggugacccgcgagcccuacgucucuugugacccugauaagugcuaucaauucgcucucggccaggggacgacucugaacaauggacacucgaacgacaccgugcaugaucgaacaccauaccguacucuucugaugaaugaauugggcguucccuuucaccucgguaccagacagguguguaucgccuggucaagcaguuccugccaugacgggaaggcauggcugcacgucugugugacaggagaugacaaaaacgccaccgcuucuuucauuuauaauggcaggcugguagauagcaucggcuccuggucaaagaacauccuccggacgcaggagagugaaugcguuuguauuaacgggacuugcacaguggucaugaccgacggaagcgcaucugguaaagccgauacuaagauauuauuuaucgaggagggcaaaauugugcacaucuccacacugucagggagcgcucaacauguggaagagugcaguuguuacccucgcuauccaggagucagaugcguuuguagggacaauuggaagggcucuaaccggccgauaguggauauuaauguaaaggacuacuccaucgugagcucguacgucugcucuggucuugugggggacacccccaggaaaaacgauuccuucucaaguagccacuguuuggacccuaauaacgaagagggaggccauggcguuaaggggugggccuuugaugacggaaaugauguguggaugggucgaacgaucuccgaaaaacugagaucuggcuaugagaccuucaaggucauugagggguggagcaaaccaaacucaaagcuacagaucaaucgccaggugauuguagaacggggaaaccguaguggcuacuccgguauauuuagcguugaggggaaaucuugcaucaaucgcuguuucuauguggaacucauuagaggcaggaaggaggaaacagaggucugguggacuucaaacaguaucguggucuuuugcggaaccagcggcacauacgggacuggauccuggcccgacggugcggauaucaaucugaugccuauuuga

SEQ ID NO: 144712 - RNA, 1410 nt, Artificial Sequence
  derived and/or modified CDS sequence (opt3) from neuraminidase__InfluenzaA__ACO36499
augaaccccaaucagaagaucauuaccauaggcagcgugucccugacaaucucuacuauuugcuucuuuaugcaaaucgccauucucaucacgaccgucacacuucacuucaaacaguacgaguuuaacucaccuccaaauaaccagguuaugcugugugaaccgacuauaaucgagagaaauauuaccgaaaucguguauuugacaaacaccacuauugagaaggaaaucugccccaaauuagcugaguacaggaauuggaguaagccucaguguaacauaacaggguucgcaccauuuagcaaagacaauuccauucggcugucugccggaggugauaucuggguaacccgcgagcccuaugugucgugcgacccugauaaguguuaccaauucgcgcuaggccaggggacgacucucaacaauguccauucaaacgacaccgugcacgaucgaacaccauaucguacucugcuuaugaaugaacugggaguucccuuucauuugggcaccaaacaggugugcauugcuuggagcaguuccucuugucacgacgguaaggccuggcuccaugucugcgugacaggggaugacaagaacgcaaccgccagcuucaucuacaauggaagacugguagauuccguugugucauggaguaaaaagauccugaggacgcaggagagcgaaugugucugcauuaacggcacuuguacaguggugaugaccgacggcucugcuuccgggaaagcagauacuaagauacucuuuaucgaggagggaaagauuguccacacaucaaccuuaagcgguagugcccaacacguugaagagugcucuugcuauccucgguacccaggcgugcgcuguguaugcagagacaacuggaaaggguccaauaggccgaucguggauauaaacauuaaggacuacagcaucgucucgucuuauguguguuccggacugguuggcgacacgccccggaaaaaugauucaaguagcuccucucauugccuugacccuaacaaugaagagggugggcacggagugaagggcugggcuuucgaugacggcaacgaugucuggauggggcgcaccaucagcgaaaaauugcgaucaggauacgagacauuuaaggugauugaggguuggaguaauccaaacuccaaacugcagaucaauagacagguaauuguugacaggggcaaccggagcggguauucuggaauauucucaguggaaggcaagaguuguaucaaucguugcuuuuacgucgagcuaauucgcgguagaaaccaggaaacugaggugcucuggaccagcaauuccaucgucguguucugugggacaucuggcacuuauggaaccggcucguggcccgauggggccgacaucaaccugaugccuauuuga

SEQ ID NO: 144713 - RNA, 1410 nt, Artificial Sequence; identical to SEQ ID NO: 142375
  derived and/or modified CDS sequence (opt3) from neuraminidase__InfluenzaA__ACO36510

SEQ ID NO: 144714 - RNA, 1410 nt, Artificial Sequence; identical to SEQ ID NO: 142375
  derived and/or modified CDS sequence (opt3) from neuraminidase__InfluenzaA__ACO36543

SEQ ID NO: 144715 - RNA, 1410 nt, Artificial Sequence; identical to SEQ ID NO: 142375
  derived and/or modified CDS sequence (opt3) from neuraminidase__InfluenzaA__ACO36554

SEQ ID NO: 144716 - RNA, 1410 nt, Artificial Sequence; identical to SEQ ID NO: 142375
  derived and/or modified CDS sequence (opt3) from neuraminidase__InfluenzaA__ACO36565

SEQ ID NO: 144717 - RNA, 1410 nt, Artificial Sequence
  derived and/or modified CDS sequence (opt3) from neuraminidase__InfluenzaA__ACO36576
augaaccccaaucagaagaucauuaccauaggcagcgugucccugacaaucucuacuauuugcuucuuuaugcaaaucgccauucucaucacgaccgucacacuucacuucaaacaguacgaguuuaacucaccuccaaauaaccagguuaugcugugugaaccgacuauaaucgagagaaauauuaccgaaaucguguauuugacaaacaccacuauugagaaggaaaucugccccaaauuagcugaguacaggaauuggaguaagccucagugugacauaacaggguucgcaccauuuagcaaagauaacuccauucggcugucugccggaggugacaucuggguaacccgcgagcccuaugugucgugcgauccugacaaguguuaccaauucgcgcuaggccaggggacgacucucaauaacguccauucaaaugauaccgugcacgaccgaacaccauaucguacucugcuuaugaacgaacugggaguucccuuucauuugggcaccaaacaggugugcauugcuuggagcaguuccucuugucacgaugguaaggccuggcuccaugucugcgugacaggggacgauaagaaugcaaccgccagcuucaucuacaacggaagacugguagacuccaucguuucauggaguaaagagauucugaggacgcaggaaagcgagugugugugcauaaauggcacuuguacagucgugaugaccgauggcucugcuuccgggaaggcagacacuaaaauccucuuuauugaggaaggaaagaucgugcacacaucaaccuuaagcgguagugcccaacacgucgaggaaugcucuugcuauccucgguacccaggcguucgcugugugugcagagauaacuggaagggguccaacaggccgauaguagacauuaauaucaaagacuacagcaucgugucgucuuaugucuguuccggacuggugggcgauacgccccggaagaacgacucaaguagcuccucucauugccuugauccuaauaacgaggaaggugggcacggaguuaaaggcugggcuuucgacgauggcaaugacguguggauggggcgcaccauuagcgagaaguugcgaucaggauacgagacauuuaaagucaucgaagguuggaguaacccaaauuccaagcugcagauuaacagacaggugauaguaggcagggggaaucggagcggauauucuggcaucuucucaguugaggguaaaaguuguauuaaccguugcuuuuacguggaacuaauccgcgggagaaaggaggaaacugagguccucuggaccagcaauuccaucguggucuucuguggcacaucuggaacuuauggcaccgggucguggcccgauggagccgacauuaaccugaugccuauauga

SEQ ID NO: 144718 - RNA, 1410 nt, Artificial Sequence; identical to SEQ ID NO: 142375
  derived and/or modified CDS sequence (opt3) from neuraminidase__InfluenzaA__ACO36587

SEQ ID NO: 144719 - RNA, 1410 nt, Artificial Sequence; identical to SEQ ID NO: 142760
  derived and/or modified CDS sequence (opt3) from neuraminidase__InfluenzaA__ACO36609

SEQ ID NO: 144720 - RNA, 1410 nt, Artificial Sequence
  derived and/or modified CDS sequence (opt3) from neuraminidase__InfluenzaA__ACO36620
augaaccccaaucagaagaucauuaccauaggcagcgugucccugacaaucucuacuauuugcuucuuuaugcaaaucgccauucucaucacgaccgucacacuucacuucaaacaguacgaguuuaacucaccuccaaauaaccagguuaugcugugugaaccgacuauaaucgagagaaauauuaccgaaaucguguauuugacaaacaccacuauugagaaggaaaucugccccaaauuagcugaguacaggaauuggaguaagccucaguguaacauaacaggguucgcaccauuuagcaaagacaauuccauucggcugucugccggaggugauaucuggguaacccgcgagcccuaugugucgugcgacccugauaaguguuaccaauucgcgcuaggccaggggacgacucucaacaauguccauucaaacgacaccgugcacgaucgaacaccauaucguacucugcuuaugaaugaacugggaguucccuuucauuugggcaccaaacaggugugcauugcuuggagcaguuccucuugucacgacgguaaggccuggcuccaugucugcgugacaggggaugacaagaacgcaaccgccagcuucaucuacaauggaagacugguagauuccaucguuucauggaguaaagagauucugaggacgcaggaaagcgagugugugugcauaaacggcacuuguacagucgugaugaccgacggcucugcuuccgggaaggcagauacuaaaauccucuuuauugaggaaggaaagaucgugcacacaucaaccuuaagcgguagugcccaacacgucgaggaaugcucuugcuauccucgguacccaggcguucgcugugugugcagagacaacuggaagggguccaauaggccgauaguagauauuaacaucaaagacuacagcaucgugucgucuuaugucuguuccggacuggugggcgacacgccccggaagaaugauucaaguagcuccucucauugccuugacccuaacaaugaggaaggugggcacggaguuaaaggcugggcuuucgaugacggcaacgauguguggauggggcgcaccauuagcgagaaguugcgaucaggauacgagacauuuaaagucaucgaagguuggaguaauccaaacuccaagcuacaggugaauagacagguaauuguugacaggggcaaccggagcggguauucuggaauauucucaguggagggcaaaaguuguaucaaucguugcuuuuacgucgaacugauucgcgguagaaaggaggaaacugaggugcucuggaccagcaacuccaucgucguguucugugggacaucuggcacuuauggaaccggcucguggcccgauggggccgacaucaaucugaugccuauuuga

SEQ ID NO: 144721 - RNA, 1410 nt, Artificial Sequence; identical to SEQ ID NO: 142760
  derived and/or modified CDS sequence (opt3) from neuraminidase__InfluenzaA__ACO36631

SEQ ID NO: 144722 - RNA, 1410 nt, Artificial Sequence; identical to SEQ ID NO: 142760
  derived and/or modified CDS sequence (opt3) from neuraminidase__InfluenzaA__ACO36653

SEQ ID NO: 144723 - RNA, 1410 nt, Artificial Sequence
  derived and/or modified CDS sequence (opt3) from neuraminidase__InfluenzaA__ACO36675
augaaccccaaucagaagaucauuaccauaggcagcgugucccugacaaucucuacuauuugccucuucaugcaaaucgccauucuuaucacgaccgucacacugcacuuuaaacaguacgaguucaacucaccuccaaauaaccagguuauguugugugaaccgacuauaaucgagagaaauauuaccgaaaucguguauuuaacaaacaccacuauugagaaggaaaucugccccaaacuggcugaguacaggaauuggaguaagccucaguguaacauaacaggguuugcaccauucagcaaagacaauuccauucggcuaucugccggaggugauaucuggguaacccgcgagcccuaugugucgugcgacccugauaaguguuaccaauuugcgcucggccaggggacgacucugaacaauguccauucaaacgacaccgugcacgaucgaacaccauaucguacucuucugaugaaugaauugggaguucccuuccaucucggcaccaaacaggugugcauugcuuggagcaguuccucuugucacgacgguaaggccuggcugcaugucugcgugacaggggaugacaagaacgcaaccgccagcuuuaucuacaauggaagacugguagauuccaucguuucauggaguaaagagauucucaggacgcaggaaagcgagugugugugcauaaacggcacuuguacagucgugaugaccgacggcucugcuuccgggaaggcagauacuaaaaucuuauucauugaggaaggaaagaucgugcacacaucaacccugagcgguagugcccaacacgucgaggaaugcucuugcuauccucgguacccaggcguucgcugugugugcagagacaacuggaagggguccaauaggccgauaguagauauuaacaucaaagacuacagcaucgugucgucuuaugucuguuccggacuugugggcgacacgccccggaagaaugauucaaguagcuccucucauugcuuggacccuaacaaugaggaaggugggcacggaguuaaaggcugggcuuuugaugacggcaacgauguguggauggggcgcaccauuagcgagaagcugcgaucaggauacgagacauucaaagucaucgaagguuggaguaauccaaacuccaagcuacagauuaauagacaggugauaguagacaggggcaaccggagcggguauucuggaaucuuuucaguugagggcaaaaguuguauuaaucguugcuucuacguggaacucauccgcgguagaaaggaggaaacugagguccuguggaccagcaacuccaucguggucuuuugugggacaucuggcacuuauggaaccggcucguggcccgauggggccgacauuaaucuuaugccuauauga

SEQ ID NO: 144724 - RNA, 1410 nt, Artificial Sequence
  derived and/or modified CDS sequence (opt3) from neuraminidase__InfluenzaA__ACO36686
augaaccccaaucagaagaucauuaccauaggcagcgugucccugacaaucucuacuauuugcuucuuuaugcaaaucgccauucucaucacgaccgucacacuucacuucaaacaguacgaguuuaacucaccuccaaauaaccagguuaugcugugugaaccgacuauaaucgagagaaauauuaccgaaaucguguauuugacaaacaccacuauugagaaggaaaucugccccaaauuagcugaguacaggaauuggaguaagccucaguguaacauaacaggguucgcaccauuuagcaaagacaauuccauucggcugucugccggaggugauaucuggguaacccgcgagcccuaugugucgugcgaccaugauaaguguuaccaauucgcgcuaggccaggggacgacucucaacaauguccacucaaacgacaccgugcaugaucgaacaccuuaucguacucugcuuaugaaugaacugggaguuccauuucacuugggcaccaaacaggugugcauugcuuggagcaguuccucuugucaugacgguaaggccuggcuccacgucugcgugacaggggaugacaagaacgcaaccgccagcuucaucuacaauggaagacugguagauuccaucguuucauggaguaaagagauucugaggacgcaggaaagcgagugugugugcauaaacggcacuuguacagucgugaugaccgacggcucugcuuccgggaaggcagauacuaaaauccucuuuauugaggaaggaaagaucgugcacacaucaaccuuaagcgguagugcccaacaugucgaggaaugcucuugcuauccccgguacccuggcguucgcugugugugcagagacaacuggaagggguccaauaggccaauaguagauauuaacaucaaagacuacagcaucgugucgucuuaugucuguuccggacuggugggcgacacgccgcggaagaaugauucaaguagcuccucucacugccuugaccccaacaaugaggaaggugggcauggaguuaaaggcugggcuuucgaugacggcaacgauguguggauggggcgcaccauuagcgagaaguugcgaucaggauacgagacauuuaaagucaucgaagguuggaguaauccuaacuccaagcugcagauuaauagacaggugauaguagacaggggcaaccggagcggguauucuggaaucuucucaguugagggcaaaaguuguauuaaucguugcuuuuacguggaacuaauccgcgguagaaaggaggaaacugagguccucuggaccagcaacuccaucguggucuucugugggacaucuggcacuuauggaaccggcucguggccagauggggccgacauuaaucugaugcccauauga

SEQ ID NO: 144725 - RNA, 1410 nt, Artificial Sequence
  derived and/or modified CDS sequence (opt3) from neuraminidase__InfluenzaA__ACO37125
augaaccccaaucagaagaucauuaccauaggcagcgugucccugacaaucucuacuauuugcuucuuuaugcaaaucgccauucucaucacgaccgucacacuucacuucaaacaguacgaguuuaacucaccuccaaauaaccagguuaugcugugugaaccgacuauaaucgagagaaauauuaccgaaaucguguauuugacaaacaccacuauugagaaggaaaucugccccaaauuagcugaguacaggaauuggaguaagccucagugugacauaacaggguucgcaccauuuagcaaagauaacuccauucggcugucugccggaggugacaucuggguaacccgcgagcccuaugugucgugcgauccugacaaguguuaccaauucgcgcuaggccaggggacgacucucaauaacguccauucaaaugauaccgugcacgaccgaacaccauaucguacucugcuuaugaacgaacugggaguucccuuucauuugggcaccaaacaggugugcauugcuuggagcaguuccucuugucacgaugguaaggccuggcuccaugucugcgugacaggggacgauaagaaugcaaccgccagcuucaucuacaacggaaugcugguagacuccaucguuucauggaguaaagagauucugagaacgcaggaaagcgagugugugugcauaaauggcacuuguacagucgugaugaccgauggcucugcuuccgggaaggcagacacuaaaauccucuuuauugaggaaggaaagaucgugcacacaucaaccuuaagcgguagugcccaacacgucgaggaaugcucuugcuauccuagguacccaggcguucggugugugugccgcgauaacuggaagggguccaacagaccgauaguagacauuaauaucaaagacuacagcaucgugucgucuuaugucuguuccggacuggugggcgauacgcccaggaagaacgacucaaguagcuccucucauugccuugauccuaauaacgaggaaggugggcacggaguuaaaggcugggcuuucgacgauggcaaugacguguggauggggcggaccauuagcgagaaguugcgcucaggauacgagacauuuaaagucaucgaagguuggaguaacccaaauuccaagcugcagauuaaccgacaggugauaguagauagaggcaauaggagcggguauucuggaaucuucucaguugagggcaaaaguuguauuaaccggugcuuuuacguggaacuaauccguggucgcaaggaggaaacugagguccucuggaccagcaauuccaucguggucuucugugggacaucuggcacuuauggaaccggcucguggcccgacggggccgauauuaaccugaugccuauauga

SEQ ID NO: 144726 - RNA, 1410 nt, Artificial Sequence
  derived and/or modified CDS sequence (opt3) from neuraminidase__InfluenzaA__ACO94511
augaaccccaaucagaagaucauuaccauaggcagcgugucccugacaaucucuacuauuugcuucuuuaugcagaucgccauucucaucacgaccgucacacuucacuucaaacaguacgaguuuaacucaccuccaaauaaccagguuaugcugugugaaccgacuauaaucgagagaaauauuaccgaaaucguguauuugacaaacaccacuauugagaaggaaaucugccccaaauuagcugaguacaggaauuggaguaagccucagugugacauaacaggguucgcaccauuuagcaaagauaacuccauucggcugucugccggaggugacaucuggguaacccgcgagcccuaugugucgugcgauccugacaaguguuaccaauucgcgcuaggccaggggacgacucucaauaacguccauucaaaugauaccgugcgagaccguacaccauauagaacucugcuuaugaacgaacugggaguucccuuucacuugggcaccaaacaggugugcauugcuuggagcaguuccucuugucaugaugguaaggccuggcuccacgucugcaucacaggggacgauaagaaugcaaccgccagcuucaucuacaacggaaggcugguggacuccguaguuucauggaguaaagagauucugcggacgcaggaaagcgagugugugugcauaaauggcacuuguacagucgugaugaccgauggcucugcuuccgggaaggcagacacuaaaauccucuuuauugaggaaggaaagaucgugcauacaucaaccuuaagcgguagugcccaacacgucgaggaaugcucuugcuauccucgcuacccaggcguuagaugugugugcagggauaacuggaagggguccaaccggccgauaguagacauuaauaucaaagaccacagcaucgugucgucuuacgucuguuccggacuggugggcgauacgccccgcaagaacgacucaaguagcuccucuaauugccuugauccuaacaaugaggaaggugggcauggaguuaaaggcugggcuuucgacgauggcaacgacguguggauggggcgaaccauuagcgagaagucaagauugggauaugagacauuuaaagucaucgaagguuggaguaauccaaaguccaaacugcagauuaacaggcaagugauaguagaucggggcaaucguagcggguacucuggaaucuucucaguugagggcaagaguuguauuaaccgcugcuuuuauguggaacuaaucagagguaggaaggaggaaacugagguccucuggaccagcaauuccaucguggucuucugugggacaucuggcacuuacggaaccggcucguggcccgacggggccgauauuaaccugaugccuauauga

SEQ ID NO: 144727 - RNA, 1410 nt, Artificial Sequence; identical to SEQ ID NO: 144560
  derived and/or modified CDS sequence (opt3) from neuraminidase__InfluenzaA__ACO94512

SEQ ID NO: 144728 - RNA, 1410 nt, Artificial Sequence; identical to SEQ ID NO: 144647
  derived and/or modified CDS sequence (opt3) from neuraminidase__InfluenzaA__ACO94513

SEQ ID NO: 144729 - RNA, 1410 nt, Artificial Sequence
  derived and/or modified CDS sequence (opt3) from neuraminidase__InfluenzaA__ACO94675
augaaccccaaucagaagaucauuaccauaggcagcgugucccugacaaucucuacuauuugcuucuuuaugcagaucgccauucucaucacgaccgucacacuucacuucaaacaguacgaguuuaacucaccuccaaauaaccagguuaugcugugugaaccgacuauaaucgagagaaauauuaccgaaaucguguauuugacaaacaccacuauugagaaggaaaucugccccaaauuagcugaguacaggaauuggaguaagccucagugugacauaacaggguucgcaccauuuagcaaagauaacuccauucggcugucugccggaggugacaucuggguaacccgcgagcccuaugugucgugcgauccugacaaguguuaccaauucgcgcuaggccaggggacgacucucaauaacguccauucaaaugauaccgugcgagaccguacaccauauagaacucugcuuaugaacgaacugggaguucccuuucacuugggcaccaaacaggugugcauugcuuggagcaguuccucuugucaugaugguaaggccuggcuccacgucugcaucacaggggacgauaagaaugcaaccgccagcuucaucuacaacggaaggcugguggacuccguaguuucauggaguaaagagauucugcggacgcaggaaagcgagugugugugcauaaauggcacuuguacagucgugaugaccgauggcucugcuuccgggaaggcagacacuaaaauccucuuuauugaggaaggaaagaucgugcauacaucaaccuuaagcgguagugcccaacacgucgaggaaugcucuugcuauccucgcuacccaggcguuagaugugugugcagggauaacuggaagggguccaaccggccgauaguagacauuaauaucaaaaaccacagcaucgugucgucuuacgucuguuccggacuggugggcgacacgccccgcaagaaugauucaaguagcuccucucauugccuugacccuaacaaugaggaaggugggcacggaguuaaaggcugggcuuucgaugacggcaacgauguguggauggggcgaaccauuagcgagaagucaagauugggauaugagacauuuaaagucaucgaagguuggaguaauccaaaguccaaacugcagauuaacaggcaagugauaguagaccggggcaaucguagcggguacucuggaaucuucucaguugagggcaagaguuguauuaaccgcugcuuuuauguggaacuaaucagagguaggaaggaggaaacugagguccucuggaccagcaauuccaucguggucuucugugggacaucuggcacuuacggaaccggcucguggcccgauggggccgacauuaaccugaugccuauauga

SEQ ID NO: 144730 - RNA, 1410 nt, Artificial Sequence
  derived and/or modified CDS sequence (opt3) from neuraminidase__InfluenzaA__ACO94686
augaaccccaaucagaagaucauuaccauaggcagcgugucccugacaaucucuacuauuugcuucuuuaugcaaaucgccauucucaucacgaccgucacacuucacuucaaacaguacgaguuuaacucaccuccaaauaaccagguuaugcugugugaaccgacuaccauagagagaaauaucacagaaauuguguauuugaccaacacuacaaucgagaaggaaauuugccccaaauuagcugaguacaggaauuggaguaagccucagugugacaucaccggguucgcaccauuuagcaaagauaacuccauacggcugucugccggaggugacauuuggguaacgcgcgagcccuaugugucgugcgauccugacaaguguuaccaauucgcgcuaggccaggggacuacccucaauaacguccauucaaaugauacagugcgagaccguacuccauauagaacccugcuuaugaacgaacugggaguucccuuucacuugggcacaaaacaggugugcaucgcuuggagcaguuccucuugucaugaugguaaggccuggcuccacgucugcauuaccggggacgauaagaaugcaacggccagcuucaucuacaacggaaggcugguggacuccaucguaucauggaguaaagauauucugcggacucaggagagcgaauguguuugcauaaauggcacauguaccguggucaugacugacggcucugcuuccgggaaggcagauacaaaaauccucuuuauugaggagggaaagaucgugcauaccucaacguuaagcgguagugcccaacacguggaagagugcucuugcuauccucgcuacccaggcgucagauguguuugcagggacaacuggaagggguccaaccggccgauaguggacauuaauaucaaagaucacagcaucguaucgucuuacguguguuccggacuggucggcgacacaccccgcaagaacgauucaaguagcuccggucauugccuugacccuaauaacgaagagggagggcacggcgugaaaggcugggcuuucgaugacgggaaugauguuuggaugggacgaaccauuucugaaaagagcagauuggguuaugagacuuuuaaagugaucgagggcuggucaaacccaaagaguaaacugcagauuaauaggcaggucauaguggaccgggggaaccguuccggauacagcggcaucuucucuguagaagguaagucauguauuaaucgcugcuuuuauguugagcuaaucagagggaggaaggaagagaccgaagugcucuggacaaguaacagcaucgucguguucuguggcacuuccggaaccuacggcacagggucuuggcccgauggagccgagauuaaucugaugccuauauga

SEQ ID NO: 144731 - RNA, 1410 nt, Artificial Sequence; identical to SEQ ID NO: 144647
  derived and/or modified CDS sequence (opt3) from neuraminidase__InfluenzaA__ACO94697

SEQ ID NO: 144732 - RNA, 1413 nt, Artificial Sequence; identical to SEQ ID NO: 144680
  derived and/or modified CDS sequence (opt3) from neuraminidase__InfluenzaA__ACO94708

SEQ ID NO: 144733 - RNA, 1410 nt, Artificial Sequence
  derived and/or modified CDS sequence (opt3) from neuraminidase__InfluenzaA__ACO94719
augaaccccaaucagaagaucauuaccauaggcagcgugucccugacaaucucuacuauuugcuucuuuaugcaaaucgccauucucaucacgaccgucacacuucacuucaaacaguacgaguuuaacucaccuccaaauaaccagguuaugcugugugaaccgacuauaaucgagagaaauauuaccgaaaucguguauuugacaaacaccacuauugagaaggaaaucugccccaaauuagcugaguacaggaauuggaguaagccucagugugacauaacaggguucgcaccauuuagcaaagauaacuccauucggcugucugccggaggugacaucuggguaacccgcgagcccuaugugucgugcgauccugacaaguguuaccaauucgcgcuaggccaggggacgacucucaauaacguccauucaaaugauaccgugcgagaccguacaccauauagaacucugcuuaugaacgaacugggaguucccuuucacuugggcaccaaacaggugugcauugcuuggagcaguuccucuugucaugaugguaaggccuggcuccacgucugcaucacaggggacgauaagaaugcaaccgccagcuucaucuacaacggaaggcugguggacuccauuguaucauggaguaaagauauacugcggacgcaggagagcgaauguguuugcaucaauggcacuuguacaguggucaugaccgacggcucugcuuccgggaaggcagauacuaaaauucucuuuaucgaggagggaaagauagugcauacaucaaccuuaagcgguagugcccaacacguggaagagugcucuugcuauccucgcuacccaggcgucagauguguuugcagggacaacuggaagggguccaaccggccgauuguggacaucaauaucaaagaucacagcauuguaucgucuuacguguguuccggacuggucggcgacacgccccgcaagaacgauucaaguagcuccggucauugccuugacccuaauaacgaagagggagggcacggcgugaaaggcugggcuuucgaugacgggaaugauguuuggaugggacgaaccaucucugaaaagagcagauuggguuaugagacauuuaaagugauugagggcuggucaaacccaaagaguaaacugcagauaaauaggcaggucaucguggaccgggggaaccguuccggauacagcggcauuuucucuguagaagguaagucauguaucaaucgcugcuuuuauguugagcuaaucagagggaggaaggaagagacugaagugcucuggaccaguaacagcauugucguguucuguggcacauccggaacuuacggcaccgggucuuggcccgauggagccgagauaaaucugaugccuaucuga

SEQ ID NO: 144734 - RNA, 1410 nt, Artificial Sequence
  derived and/or modified CDS sequence (opt3) from neuraminidase__InfluenzaA__ACO94741
augaaccccaaucagaagaucauuaccauaggcagcgugucccugacaaucucuacuauuugcuucuuuaugcaaaucgccauucucaucacgaccgucacacuucacuucaaacaguacgaguuuaacucaaguccuaauaaccagguuaugcugugugaaccaacuauaaucgagagaaauauuaccgaaaucguguauuugacaaacaccacuauugagaaggaaaucugcccgaaauuagcugaguacaggaauuggagcaagccccagugugacauaacaggguucgcaccuuuuuccaaagauaacucuauucggcugucggccggaggugacaucuggguaacccgcgagccauaugugucaugcgaucccgacaaguguuaccaauucgcgcuaggccaggggacgacucucaauaacguccauagcaauaacaccgugcgagaucguacaccuuauagaacucugcuuaugaaugaacugggaguuccauuucacuugggcaccaaacaggugugcauugcuuggaguuccucuagcugucaugacgguaaggccuggcuccacgucugcaucacaggggaugacaagaacgcaaccgccuccuucaucuacaauggaaggcugguggauucaauuguaaguuggagcaaagagauacugcggacgcaggaaucugaguguguuugcaucaacggcacuuguacaguggucaugaccgacggcuccgcuucagggaaggcagauacuaaaauucucuuuaucgaggaaggaaagauagugcauacaagcaccuuaagugguucugcccaacacguggaggaaugcuccugcuauccccgcuacccuggcgucagauguguuugcagggacaacuggaaggggagcaaucggccaauuguggauaucaacaucaaagaccacucgauuguaucuuccuacguguguucaggacuggucggcgacacgccgcgcaagaaugauaguagcuccucuagccauugccuugaccccaacaaugaggaaggugggcacggagugaaaggcugggcuuucgaugacggcaacgauguuuggauggggcgaaccaucucagagaagaguagauugggauaugagacauuuaaagugauugaagguugguccaauccuaagagcaaacugcagauaaacaggcaggucaucguggaccggggcaaucguucuggguacucaggaauuuucaguguagagagcaaguccuguaucaaccgcugcuuuuauguugaacuaaucagaggcaggaaggaggaaacugaggugcucuggaccucuaauucgauugucguguucugugguacaagcgggacuuacggcaccggauccuggccagauggcgccgacauaaaccugaugcccaucuga

SEQ ID NO: 144735 - RNA, 1410 nt, Artificial Sequence; identical to SEQ ID NO: 144651
  derived and/or modified CDS sequence (opt3) from neuraminidase__InfluenzaA__ACO94763

SEQ ID NO: 144736 - RNA, 1410 nt, Artificial Sequence
  derived and/or modified CDS sequence (opt3) from neuraminidase__InfluenzaA__ACO94774
augaaccccaaucagaagaucauuaccauaggcagcgugucccugacaaucucuacuauuugcuucuuuaugcaaaucgccauucucaucacgaccgucacacuucacuucaaacaguacgaguuuaacucaccuccaaauaaccagguuaugcugugugaaccgacuauaaucgagagaaauauuaccgaaaucguguauuugacaaacaccacuauugagaaggaaaucugccccaaauuagcugaguacaggaauuggaguaagccucagugugacauaacaggguucgcaccauuuagcaaagauaacuccauucggcugucugccggaggugacaucuggguaacccgcgagcccuaugugucgugcgauccugacaaguguuaccaauucgcgcuaggccaggggacgacucucaauaacguccauucaaauaacaccgugcgagaucguacaccauauagaacucugcuuaugaaugaacugggaguucccuuucacuugggcaccaaacaggugugcauggcuuggagcaguuccucuugucaugacgguagggccuggcuccacgucugcauuacaggggaugacaagaacgcaaccgccagcuucaucuacaauggacggcugguggauuccguaguuucauggaguaaggagauccugcgcacgcaggaaagcgagugugugugcauuaacggcacuuguacagucgugaugaccgacggcucugcuuccgggaaagcagauacuaagauacucuuuaucgaggaaggaaaaauugugcauacaucaaccuuaagcgguagugcccaacacgucgaggaaugcucuugcuauccuagauacccaggcguuaggugugugugccgggacaacuggaagggguccaaucgcccgaucguagauauaaacauuaaggaccacagcaucgugucgucuuacgucuguuccggacuggugggcgacacgccccggaaaaaugauucaaguagcuccucucauugccuugacccuaacaaugaggaaggugggcacggaguuaagggcugggcuuucgaugacggcaacgauguguggauggggagaaccaucagcgagaaaucaagguugggauaugagacauuuaaggucauugaagguuggaguaauccaaaauccaagcugcagaucaaccgacaggugauuguagaccguggcaaucgcagcggguacucuggaauauucucaguugagggcaaaaguuguaucaacagaugcuuuuauguggaacuaauuaggggucggaaggaggaaacugagguccucuggaccagcaauuccaucguggucuucugugggacaucuggcacuuacggaaccggcucguggcccgauggggccgacaucaaccugaugccuauuuga

SEQ ID NO: 144737 - RNA, 1410 nt, Artificial Sequence
  derived and/or modified CDS sequence (opt3) from neuraminidase__InfluenzaA__ACO94785
augaaccccaaucagaagaucauuaccauaggcagcgugucccugacaaucucuacuauuugcuucuuuaugcagaucgccauucucaucacgaccgucacacuucacuucaaacaguacgaguuuaacucaccuccaaauaaccagguuaugcuguguaagccgacuauaaucgaaagaaauauuaccgagaucguguauuugacaaacaccacuauugaaaaagagaucugccccaaguuagcugaauacaggaauuggaguaaaccucagugugacauaacaggguucgcaccauuuagcaaggauaacuccauucggcugucugccggaggugacaucuggguaacccgcgagcccuaugugucgugcgauccugacaaguguuaccaauucgcgcuaggccaggggacgacucucaauaacguccauucaaauaacaccgugcgagaucguacaccauauagaacucugcuuaugaaugagcugggaguucccuuucacuugggcaccaaacaggugugcauugcuuggagcaguuccucuugucaugacgguaaggccuggcuccacgucugcaucacaggggaugacaaaaacgcaaccgccagcuucaucuacaauggaaggcugguggauuccguaguuucauggaguaaggaaauucugcggacgcaggagagcgaaugugugugcauaaacggcacuuguacagucgugaugaccgacggcucugcuuccgggaaagcagauacuaagauccucuuuauugaggagggaaagaucgugcauacaucaaccuuaagcgguagugcccaacacgucgaagagugcucuugcuauccucgcuacccaggcguuagaugugugugcagggacaacuggaaaggguccaaucggccgauaguagauauuaacaucaaggaccacagcaucgugucgucuuacgucuguuccggacuggugggcgacacgccccgcaaaaaugauucaaguagcuccucucauugccuugacccuaacaaugaagagggugggcacggaguuaagggcugggcuuucgaugacggcaacgauguguggauggggcgaaccauuagcgaaaaaucaagauugggauaugagacauuuaaggucaucgaggguuggaguaauccaaaauccaagcugcagauuaacaggcaagugauaguagaccggggcaaucguagcggguacucuggaaucuucucaguugaaggcaagaguuguauuaaccgcugcuuuuauguggagcuaaucagagguaggaaagaagagacugaaguccucuggaccagcaauuccaucguggucuucugugggacaucuggcacuuacggaaccggcucguggcccgauggggccgacauuaaccugaugccuauauga

SEQ ID NO: 144738 - RNA, 1410 nt, Artificial Sequence; identical to SEQ ID NO: 144647
  derived and/or modified CDS sequence (opt3) from neuraminidase__InfluenzaA__ACO94796

SEQ ID NO: 144739 - RNA, 1413 nt, Artificial Sequence
  derived and/or modified CDS sequence (opt3) from neuraminidase__InfluenzaA__ACO94807
augaaccccaaucagaagaucauuaccauaggcagcaucuccauugccaucgggauuaucucucugauacuccaaaucggaaacauuaucucaauuugggcuagucacagcauccagacagguucccagaaucauacuggcauaugcaaccagagaauuaucacguacgaaaauucuaccugggugaacaauacauaugucaacauuaauaacacuaauguuguggcagagaaagacaagaccucgguaacacuugccgggaacucaagccuguguaguaucuccggaugggcgaucuacaccaaagauaauucuauuaggauaggcagcaagggugacguguucgucauccgggagccuuuuauuuccugcucacacuuggaaugucgcacuuucuuuuuaacacaaggggcucugcuaaacgauaaacauaguaauggaaccgugaaggaccgaagcccauaucgugcccucaugucuugcccgcugggcgaggcacccuccccuuacaacucaagauucgaaagcguugccuggagugcuucugcaugucacgauggcaugggguggcuuacgaucggaauauccgguccagacaacggcgccguggcuguccugaaguauaaugggauuaucacugagaccaucaaaagcuggaagaaaaggauuuugcggacacaggagucggaaugcguguguaugaacggaucuugcuuuacuaucaugaccgauggccccuccaaugguacagccucauacaagauuuucaaaauagagaaggggaagguaaccaaaacgaucgaacucaacgcgccuaauuuucauuaugaggaguguaguugcuacccagacacuggaacaguuaugugugugugccgcgauaacuggcacggcagcaauagacccugggucuccuucaaccagaaucuggacuaccagauuggcuauaucugcucugggguguuuggagauaacccuaggccaaaggacggugaaggcagcuguaauccggugaccgucgauggggcagacggaguuaaaggcuucucauacaaguaugguaacgggguguggaucggccggacuaaaaguaaucgccugcgaaagggauuugagaugauuugggaccccaacggcuggacaaauaccgauuccgacuucagcguaaaacaagauguggucgccauaacggacuggucuggguacucaggaaguuuugugcagcacccugaacucaccgguuuagauugcaucagaccauguuucuggguugagcuggugaggggccuuccccgggaaaacacaacuauuuggaccagcggguccucuaucucguucugcggagucaacagcggcacagcuaauugguccuggccugacggugccgaguugccauuuacuauugauaaguga

SEQ ID NO: 144740 - RNA, 1410 nt, Artificial Sequence; identical to SEQ ID NO: 144462
  derived and/or modified CDS sequence (opt3) from neuraminidase__InfluenzaA__ACO94818

SEQ ID NO: 144741 - RNA, 1365 nt, Artificial Sequence; identical to SEQ ID NO: 143767
  derived and/or modified CDS sequence (opt3) from neuraminidase__InfluenzaA__ACO94829

SEQ ID NO: 144742 - RNA, 1365 nt, Artificial Sequence; identical to SEQ ID NO: 143767
  derived and/or modified CDS sequence (opt3) from neuraminidase__InfluenzaA__ACO94840

SEQ ID NO: 144743 - RNA, 1410 nt, Artificial Sequence
  derived and/or modified CDS sequence (opt3) from neuraminidase__InfluenzaA__ACO94851
augaaccccaaucagaagaucauuaccauaggcagcgugucccugacaaucucuacuauuugcuucuuuaugcaaacggccauccucauuaccacagucacucuucacuucaaacaguacgaguuuaacucaccuccaaauaaccagguuaugcugugugaaccgaccaucauagagagaaauaucacagaaauuguguauuugaccaacacuacaaucgagaaggaaauuugccccaaauuagcugaguacaggaauuggaguaagccucagugugacaucaccggguucgcaccauuuagcaaagauaacuccauacggcugucugccggaggugacauuuggguaacgcgcgagcccuaugugucgugcgauccugacaaguguuaccaauucgcgcuaggccaggggacuacccucaauaacguccauucaaaugauaucgugcgagaccguacaccauauagaacucugcuuaugaacgaacugggaguucccuuucacuugggcaccaaacaggugugcauugcuuggagcaguuccucuugucaugaugguaaggccuggcuccacgucugcaucacaggggacgauaagaaugcaaccgccagcuucaucuacaacggaaggcugguggacuccauuguaucauggaguaaagagauacugcggacgcaggaaagcgaguguguuugcaucaauggcacuuguacaguggucaugaccgauggcucugcuuccgggaaggcagacacuaaaauucucuuuaucgaggaaggaaagauagugcauacaucaaccuuaagcgguagugcccaacacguggaggaaugcucuugcuauccucgcuacccaggcgucagauguguuugcagggauaacuggaagggguccaaccggccgauuguggacaucaauaucaaagaccacagcauuguaucgucuuacguguguuccggacuggucggcgauacgccccgcaagaacgacucaaguagcuccucucauugccuugauccuaauaacgaggaaggugggcacggagugaaaggcugggcuuucgacgauggcaaugacguuuggauggggcgaaccaucagcgagaagucaagauugggauaugagacauuuaaagugauugaagguuggaguaacccaaaguccaaacugcagauaaauaggcaggucaucguggaucggggcaaccguagcggguacucuggaauuuucucaguagagggcaagaguuguaucaaucgcugcuuuuauguugaacuaaucagagguaggaaggaggaaacugaggugcucuggaccagcaacuccauugucguguucugugggacaucuggcacuuacggaaccggcucguggcccgacggggccgauauaaaucugaugccuaucuga

SEQ ID NO: 144744 - RNA, 1413 nt, Artificial Sequence; identical to SEQ ID NO: 144680
  derived and/or modified CDS sequence (opt3) from neuraminidase__InfluenzaA__ACO94873

SEQ ID NO: 144745 - RNA, 1410 nt, Artificial Sequence
  derived and/or modified CDS sequence (opt3) from neuraminidase__InfluenzaA__ACO94884
augaaccccaaucagaagaucauuaccauaggcagcgugucccugacaaucgccacuauuugcuuccucaugcaaaucgcuauucuugucacgaccguuacacugcacuuuaaacagcaugaguguaacucuccuccaaauaaccaggugauguugugcgaaccgacuaucauagagagaaauaucaccgaaauuguauacuuaacaaacaccacuaucgagaaggaaaugugucccaaacuggcagaguauaggaauuggucaaagccucagugcaacauuacaggguucgccccauuuaguaaagacaauagcauccggcuauccgcgggaggugauauaugggugacccgcgagcccuacgucucuugugacccugauaagugcuaucaauucgcucucggccaggggacgacucugaacaauggacacucgaacgacaccgugcaugaucgaacaccauaccguacucuucugaugaaugaauugggcguucccuuucaccucgguaccagacagguguguauugccuggucaagcaguuccugccaugacgggaaggcauggcugcacgucugugugacaggagaugacaaaaacgccaccgcuucuuucaucuauaauggcaggcugguagauagcauuggcuccuggucaaagaaaauccuccggacgcaggagagugaaugcguuuguaucaacgggacuugcacaguggucaugaccgacggaagcgcaucugguaaggccgauacuaaaauuuuauuuauagaggagggcaagaucgugcacauuuccacacugucagggagcgcucaacauguggaagagugcaguuguuacccucgcuauccaggagucagaugcguuuguagggacaacuggaagggcucuaaucggccgaucguggauauaaacguaaaagacuacuccauugugagcucguacgucugcucuggucuugugggggacacccccaggaagaaugauuccuucucaaguagccacuguuuggacccuaacaaugaagagggaggccauggcguuaaagggugggccuuugaugacggaaacgauguguggaugggucgaacgaucuccgaaaagcugagaucuggcuaugagaccuucaaagucaucgagggguggagcaagccaaauucaaaacuacagauuaaccgccaggugaucguagaacggggaaaucguaguggcuacuccgguauuuuuagcguugaggggaagucuugcauaaaccgcuguuucuauguggaacucaucagaggcaggaaggaggaaacagaggucugguggacuucaaauaguauuguggucuuuugcggaaccagcggcacauacgggacuggauccuggcccgacggugcggauaucaaccugaugccuaucuga

SEQ ID NO: 144746 - RNA, 1410 nt, Artificial Sequence; identical to SEQ ID NO: 142762
  derived and/or modified CDS sequence (opt3) from neuraminidase__InfluenzaA__ACO94906

SEQ ID NO: 144747 - RNA, 1410 nt, Artificial Sequence; identical to SEQ ID NO: 142193
  derived and/or modified CDS sequence (opt3) from neuraminidase__InfluenzaA__ACO94917

SEQ ID NO: 144748 - RNA, 1410 nt, Artificial Sequence; identical to SEQ ID NO: 142762
  derived and/or modified CDS sequence (opt3) from neuraminidase__InfluenzaA__ACO94928

SEQ ID NO: 144749 - RNA, 1410 nt, Artificial Sequence; identical to SEQ ID NO: 142193
  derived and/or modified CDS sequence (opt3) from neuraminidase__InfluenzaA__ACO94939

SEQ ID NO: 144750 - RNA, 1410 nt, Artificial Sequence
  derived and/or modified CDS sequence (opt3) from neuraminidase__InfluenzaA__ACO94950
augaaccccaaucagaagaucauuaccauaggcagcgugucccugacaaucucuacuauuugcuuccucaugcaaaucgccauucuuaucacgaccgucacacugcacuuuaaacaguacgaguucaacucaccuccaaauaaccagguuauguugugugaaccgacuauaaucgagagaaauauuaccgaaaucguguauuuaacaaacaccacuauugagaaggaaaucugccccaaacuggcugaguacaggaauuggaguaagccucagugugacauaacaggguuugcaccauucagcaaagauaacuccauucggcuaucugccggaggugacaucuggguaacccgcgagcccuaugugucgugcgauccugacaaguguuaccaauuugcgcucggccaggggacgacucugaauaacguccauucaaaugauaccgugcacgaccgaacaccauaucguacucuucugaugaacgaauugggaguucccuuccaucucggcaccaaacaggugugcauugcuuggagcaguuccucuugucacgaugguaaggccuggcugcaugucugcgugacaggggacgauaagaaugcaaccgccagcuuuaucuacaacggaagacugguagacuccaucguuucauggaguaaaaagauucucaggacgcaggagagcgaaugugugugcauaaauggcacuuguacagucgugaugaccgauggcucugcuuccgggaaagcagacacuaagaucuuauucauugaggagggaaagaucgugcacacaucaacccugagcgguagugcccaacacgucgaagagugcucuugcuauccucgguacccaggcguucgcugugugugcagagauaacuggaaaggguccaacaggccgauaguagacauuaauaucaaggacuacagcaucgugucgucuuaugucuguuccggacuugugggcgauacgccccggaaaaacgacucaaguagcuccucucauugcuuggauccuaauaacgaagagggugggcacggaguuaagggcugggcuuuugacgauggcaaugacguguggauggggcgcaccauuagcgaaaaacugcgaucaggauacgagacauucaaggucaucgaggguuggaguaacccaaauuccaaacuacagauuaacagacaggugauaguagauaggggcaaucggagcggguauucuggaaucuuuucaguugaaggcaagaguuguauuaaccguugcuucuacguggagcucauccgcgguagaaaggaagagacugaaguccuguggaccagcaauuccaucguggucuuuugugggacaucuggcacuuauggaaccggcucguggcccgacggggccgauauuaaccuuaugccuauauga

SEQ ID NO: 144751 - RNA, 1410 nt, Artificial Sequence
  derived and/or modified CDS sequence (opt3) from neuraminidase__InfluenzaA__ACO94961
augaaccccaaucagaagaucauuaccauaggcagcgugucccugacaaucucuacuauuugcuucuuuaugcaaaucgccauucucaucacgaccgucacacuucacuucaaacaguacgaguuuaacucaccuccaaauaaccagguuaugcugugugaaccgacuauaaucgagagaaauauuaccgaaaucguguauuugacaaacaccacuauugagaaggaauuaugccccaaacuggcugaguacaggaauuggaguaagccucagugugacaucacaggguucgcaccauuuagcaaagauaacuccauacggcuaucugccggaggugacauuuggguaacccgcgagcccuaugugucgugcgauccugacaaguguuaccaauucgcgcucggccaggggacgacucugaauaacguccauucaaaugauaccgugcacgaccgaacaccauaucguacucuucugaugaacgaauugggaguucccuuucaucucggcaccaaacaggugugcaucgcuuggagcaguuccucuugucacgaugguaaggccuggcugcaugucugcgugacaggggacgauaagaaugcaaccgccagcuucauuuacaacggaagacugguagacuccaucguuucauggaguaaaaagauccucaggacgcaggagagcgaaugugugugcauuaauggcacuuguacagucgugaugaccgauggcucugcuuccgggaaagcagacacuaagauauuauuuaucgaggagggaaagauugugcacacaucaacccugagcgguagugcccaacacgucgaagagugcucuugcuauccucgguacccaggcguucgcugugugugcagagauaacuggaaaggguccaacaggccgaucguagacauaaauauuaaggacuacagcaucgugucgucuuaugucuguuccggacuugugggcgauacgccccggaaaaacgacucaaguagcuccucucauugcuuggauccuaauaacgaagagggugggcacggaguuaagggcugggcuuucgacgauggcaaugacguguggauggggcgcaccaucagcgaaaaacugcgaucaggauacgagacauuuaaggucauugaggguuggaguaacccaaauuccaaacuacagaucaacagacaggugauuguagauaggggcaaucggagcggguauucuggaauauucucaguugaaggcaagaguuguaucaaccguugcuuuuacguggagcucauucgcgguagaaaggaagagacugaaguccuguggaccagcaauuccaucguggucuucugugggacaucuggcacuuauggaaccggcucguggcccgacggggccgauaucaaccuuaugccuauuuga

SEQ ID NO: 144752 - RNA, 1410 nt, Artificial Sequence
  derived and/or modified CDS sequence (opt3) from neuraminidase__InfluenzaA__ACO94972
augaaccccaaucagaagaucauuaccauaggcagcgugucccugacaaucucuacuauuugcuucuuuaugcaaaucgccauucucaucacgaccgucacacuucacuucaaacaguacgaguuuaacucaccuccaaauaaccagguuaugcugugugaaccgacuauaaucgagagaaauauuaccgaaaucguguauuugacaaacaccacuauugagaaggaaaucugccccaaauuagcugaguacaggaauuggaguaagccucaguguaacauaacaggguucgcaccauuuagcaaagacaauuccauucggcugucugccggaggugauaucuggguaacccgcgagcccuaugugucgugcgacccugauaaguguuaccaauucgcgcuaggccaggggacgacucucaacaauguccauucaaacgacaccgugcacgaucgaacaccauaucguacucugcuuaugaaugaacugggaguucccuuucauuugggcaccaaacaggugugcauugcuuggagcaguuccucuugucacgacgguaaggccuggcuccaugucugcgugacaggggaugacgagaacgcaaccgccagcuucaucuacaauggaagacugguagauuccguugugucauggaguaagaaaauccugaggacgcaggaaagcgagugugucugcauuaacggcacuuguacaguggugaugaccgacggcucugcuuccgggaaggcagauacuaaaauacucuuuaucgaggaaggaaagauuguccacacaucaaccuuaagcgguagugcccaacacguugaggaaugcucuugcuauccucgguacccaggcgugcgcuguguaugcagagacaacuggaagggguccaauaggccgaucguggauauaaacauuaaagacuacagcaucgucucgucuuauguguguuccggacugguuggcgacacgccccggaagaaugauucaaguagcuccucucauugccuugacccuaacaaugaggaaggugggcacggagugaaaggcugggcuuucgaugacggcaacgaugucuggauggggcgcaccaucagcgagaaguugcgaucaggauacgagacauuuaaagugauugaagguuggaguaauccaaacuccaagcugcagaucaauagacagguaauuguugacaggggcaaccggagcggguauucuggaauauucucaguggagggcaaaaguuguaucaaucguugcuuuuacgucgaacuaauucgcgguagaaaccaggagacugaagugcucuggaccagcaauuccaucgucguguucugugggacaucuggcacuuauggaaccggcucguggcccgauggggccgacaucaaccugaugccuauuuga

SEQ ID NO: 144753 - RNA, 1410 nt, Artificial Sequence
  derived and/or modified CDS sequence (opt3) from neuraminidase__InfluenzaA__ACO95156
augaaccccaaucagaagaucauuaccauaggcagcgugucccugacaaucucuacuauuugcuucuuuaugcaaaucgccauucucaucacgaccgucacacuucacuucaaacaguacgaguuuaacucaccuccaaauaaccagguuaugcugugugaaccgacuauaaucgagagaaauauuaccgaaaucguguauuugacaaacaccacuauugagaaggaaacaugccccaaauuagcugaguacaggaauuggaguaagccucaguguaacaucaccggguucgcaccauuuagcaaagacaauuccauacggcugucugccggaggugauauuuggguaacgcgcgagcccuaugugucgugcgacccugauaaguguuaccaauucgcgcuaggccaggggacuacccucaacaauguccauucaaacgacacagugcacgaucgaacuccauaucguacccugcuuaugaaugaacugggaguucccuuucauuugggcacaaaacaggugugcaucgcuuggagcaguuccucuugucacgacgguaaggccuggcuccaugucugcauuaccggggaugacaagaacgcaacggccagcuucaucuacaauggaagacugguggauuccguaguuucauggaguaaaaagauccugaggacucaggagagcgaaugugugugcauuaacggcacauguaccgucgugaugacugacggcucugcuuccgggaaagcagauacaaagauacucuuuaucgaggagggaaagauugugcacaccucaacguuaagcgguagugcccaacacgucgaagagugcucuugcuauccucgguacccaggcguucgcugugugugcagagacaacuggaaaggguccaauaggccgaucguagauauaaacauuaaggacuacagcaucgugucgucuuaugucuguuccggacuggugggcgacacaccccggaaaaaugauucaaguagcuccucucauugccuugacccuaacaaugaagagggugggcacggaguuaagggcugggcuuucgaugacggcaacgauguguggauggggcgcaccaucagcgaaaaauugcgaucaggauacgagacuuuuaaggucauugaggguuggaguaauccaaacuccaaacugcagaucaauagacaggugauuguagacaggggcaaccggagcggguauucuggaauauucucaguugaaggcaagaguuguaucaaucguugcuuuuacguggagcuaauucgcgguagaaaccaggaaaccgagguccucuggacaagcaauuccaucguggucuucugugggacuucuggcaccuauggaacaggcucguggcccgauggggccgacaucaaccugaugccuauuuga

SEQ ID NO: 144754 - RNA, 1410 nt, Artificial Sequence; identical to SEQ ID NO: 142375
  derived and/or modified CDS sequence (opt3) from neuraminidase__InfluenzaA__ACO95174

SEQ ID NO: 144755 - RNA, 1410 nt, Artificial Sequence; identical to SEQ ID NO: 142375
  derived and/or modified CDS sequence (opt3) from neuraminidase__InfluenzaA__ACO95185

SEQ ID NO: 144756 - RNA, 1410 nt, Artificial Sequence
  derived and/or modified CDS sequence (opt3) from neuraminidase__InfluenzaA__ACO95196
augaaccccaaucagaagaucauuaccauaggcagcgugucccugacaaucucuacuauuugcuucuuuaugcaaaucgccauucucaucacgaccgucacacuucacuucaaacaguacgaguuuaacucaccuccaaauaaccagguuaugcugugugaaccgacuauaaucgagagaaauauuaccgaaaucguguauuugacaaacaccacuauugagaaggaaaucugccccaaauuagcugaguacaggaauuggaguaagccucaguguaacauaacaggguucgcaccauuuagcaaagacaauuccauucggcugucugccggaggugauaucuggguaacccgcgagcccuaugugucgugcgacccugauaaguguuaccaauucgcgcuaggccaggggacgacucucaacaauguccauucaaacgacaccauucacgaucgaacaccauaucguacucugcuuaugaaugaacugggagugcccuuucauuugggcaccaagcagguuugcaucgcuuggagcaguuccucuugucacgacgguaaagccuggcuccaugugugcgucacaggggaugacaagaacgcaaccgccagcuucaucuacaauggaagacugguggauuccguaguuucauggaguaaaaagauucugaggacgcaggagagcgaaugugugugcauaaacggcacuuguacagucgugaugaccgacggcucugcuuccgggaaagcagauacuaagauccucuuuauugaggagggaaagaucgugcacacaucaaccuuaagcgguagugcccaacacgucgaagagugcucuugcuauccucgguacccaggcguucgcugugugugcagagacaacuggaaaggguccaauaggccgauaguagauauuaacaucaaggacuacagcaucgugucgucuuaugucuguuccggacuggugggcgacacgccccggaaaaaugauucaaguagcuccucucauugccuugacccuaacaaugaagagggugggcacggaguuaagggcugggcuuucgaugacggcaacgauguguggauggggcgcaccauuagcgaaaaauugcgaucaggauacgagacauuuaaggucaucgaggguuggaguaauccaaacuccaaacugcagauuaauagacaggugauaguagacaggggcaaccggagcggguauucuggaaucuucucaguugaaggcaagaguuguauuaaucguugcuuuuacguggagcuaauccgcgguagaaaccaggaaacugagguccucuggaccagcaauuccaucguggucuucugugggacaucuggcacuuauggaaccggcucguggcccgauggggccgacauuaaccugaugccuauauga

SEQ ID NO: 144757 - RNA, 1410 nt, Artificial Sequence; identical to SEQ ID NO: 142375
  derived and/or modified CDS sequence (opt3) from neuraminidase__InfluenzaA__ACO95207

SEQ ID NO: 144758 - RNA, 1410 nt, Artificial Sequence; identical to SEQ ID NO: 142375
  derived and/or modified CDS sequence (opt3) from neuraminidase__InfluenzaA__ACO95218

SEQ ID NO: 144759 - RNA, 1410 nt, Artificial Sequence; identical to SEQ ID NO: 142378
  derived and/or modified CDS sequence (opt3) from neuraminidase__InfluenzaA__ACO95229

SEQ ID NO: 144760 - RNA, 1410 nt, Artificial Sequence; identical to SEQ ID NO: 142760
  derived and/or modified CDS sequence (opt3) from neuraminidase__InfluenzaA__ACO95240

SEQ ID NO: 144761 - RNA, 1410 nt, Artificial Sequence; identical to SEQ ID NO: 142621
  derived and/or modified CDS sequence (opt3) from neuraminidase__InfluenzaA__ACO95262

SEQ ID NO: 144762 - RNA, 1410 nt, Artificial Sequence; identical to SEQ ID NO: 144559
  derived and/or modified CDS sequence (opt3) from neuraminidase__InfluenzaA__ACO95273

SEQ ID NO: 144763 - RNA, 1410 nt, Artificial Sequence; identical to SEQ ID NO: 144651
  derived and/or modified CDS sequence (opt3) from neuraminidase__InfluenzaA__ACO95306

SEQ ID NO: 144764 - RNA, 1413 nt, Artificial Sequence
  derived and/or modified CDS sequence (opt3) from neuraminidase__InfluenzaA__ACO95385
augaaccccaaucagaagaucauuaccauaggcagcaucuccauugccaucgggauuaucucucugaugcuccaaauaggaaacaucauuucaaucugggcuagucacagcauucagacagguucccagaauaacacuggcaucugcaaucagagaauaauuacguacgagaacucuaccugggugaaucauacauaugucaacaucaauaacacuaauguuguggcaggggaagacaaaaccucgguaacacuugccggaaacucaagccuguguaguauuuccggcugggcgaucuacaccaaggauaauucuaucaggauugguagcaaaggggacguguucgucauacgggagccuuuuaucuccugcucacacuuggaaugucgcacuuucuuuuuaacacaaggagcucugcuaaacgauaagcauaguaauggcaccgugaaagaccgaagcccauaucgugcccucaugucuugcccgcugggcgaggcacccuccccuuacaacucaaaguucgaaagcguugccuggagugcuucugcaugucacgaugggaugggauggcuuacgauugguaucuccggcccagacaacggggccguggcuguccugaaguauaauggaauaauuacuggcaccaucaaaagcuggaagaaacagaucuugagaacacaggagucggagugcguguguaugaacgguucuugcuuuacuauuaugaccgaugggcccuccgacaaggccgcgucauacaaaaucuucaagauugaaaagggaaaaguaacaaagaguauagagcucaaugcaccuaacuuucauuaugaagaguguagcugcuacccagauaccggcaucguuaugugugugugcagggacaauuggcacggcuccaaccggcccugggucucuuucaaucagaaccuggauuaccaaauuggguauaucugcagcggaguguuuggugacaauccucgcccagaggauggcgaagggucauguaacccggugacggucgacggagccaauggcguuaaagguuucaguuacaaguaugacaacgggguguggaucggcagaacuaaauccaauaggcugcggaagggauuugagaugauuugggaucccaacggcuggacaaauaccgacagcgauuucucuguaaaacaggacguggucgcuauaacugauuggucaggguacagugguagcuuugugcagcacccugaacucacaggauuagacugcauccgcccauguuucuggguugagcuggugcgaggccuucccagagaaaacaccacgauuuggaccuccgggucuucgaucagcuucugcggagucaacuccgauacagccaauuggucauggccugacggcgcagaguugccauuuacuauugauaaguga

SEQ ID NO: 144765 - RNA, 1413 nt, Artificial Sequence; identical to SEQ ID NO: 144680
  derived and/or modified CDS sequence (opt3) from neuraminidase__InfluenzaA__ACO95407

SEQ ID NO: 144766 - RNA, 1413 nt, Artificial Sequence; identical to SEQ ID NO: 144680
  derived and/or modified CDS sequence (opt3) from neuraminidase__InfluenzaA__ACO95418

SEQ ID NO: 144767 - RNA, 1410 nt, Artificial Sequence; identical to SEQ ID NO: 142193
  derived and/or modified CDS sequence (opt3) from neuraminidase__InfluenzaA__ACO95429

SEQ ID NO: 144768 - RNA, 1410 nt, Artificial Sequence; identical to SEQ ID NO: 142762
  derived and/or modified CDS sequence (opt3) from neuraminidase__InfluenzaA__ACO95440

SEQ ID NO: 144769 - RNA, 1410 nt, Artificial Sequence
  derived and/or modified CDS sequence (opt3) from neuraminidase__InfluenzaA__ACO95462
augaaccccaaucagaagaucauuaccauaggcagcgugucccugacaaucucuacuauuugcuucuuuaugcaaaucgccauucucaucacgaccgucacacuucacuucaaacaguacgaguuuaacucaccuccaaauaaccagguuaugcugugugaaccgacuauaaucgagagaaauauuaccgaaaucguguauuugacaaacaccacuauugagaaggaaaucugccccaaauuagcugaguacaggaauuggaguaagccucaguguaacauaacaggguucgcaccauuuagcaaagacaauuccauucggcugucugccggaggugauaucuggguaacccgcgagcccuaugugucgugcgacccugauaaguguuaccaauucgcgcuaggccaggggacgacucucaacaauguccauucaaacgacaccgugcacgaucgaacaccauaucguacucugcuuaugaaugaacugggaguucccuuucauuugggcaccaaacaggugugcauugcuuggagcaguuccucuugucacgacgguaaggccuggcuccaugucugcgugacaggggaugacaagaacgcaaccgccagcuucaucuacaauggaagacugguagauuccaucguuucauggaguaaagagauucugaggacgcaggaaagcgagugugugugcauaaacggcacuuguacagucgugaugaccgacggcucugcuuccgggaaggcagauacuaaaauccucuuuauugaggaaggaaagaucgugcacacaucaaccuuaagcgguagugcccaacacgucgaggaaugcucuugcuauccucgguacccaggcguucgcugugugugcagagacaacuggaagggguccaauaggccgauaguagauauuaacaucaaagacuacagcaucgugucgucuuaugucuguuccggacuggugggcgacacgccccggaagaaugauucaaguagcuccucucauugccuugacccuaacaaugaggaaggugggcacggaguuaaaggcugggcuuucgaugacggcaacgauguguggauggggcgcaccauuagcgagaaguugcgaucaggauacgagacauuuaaagucaucgaagguuggaguaauccaaacuccaagcugcagauuaauagacaggugauaguagacaggggcaaccggagcggguauucuggaaucuucucaguugagggcaaaaguuguauuaaucguugcuuuuacguggaacuaauccgcgguagaaaggaggaaacugagguccucuggaccagcaacuccaucguggucuucugugggacaucuggcacuuauggaaccggcucguggcccgauggggccgacauuaaucugaugcuuauauga

SEQ ID NO: 144770 - RNA, 1410 nt, Artificial Sequence; identical to SEQ ID NO: 142760
  derived and/or modified CDS sequence (opt3) from neuraminidase__InfluenzaA__ACO95484

SEQ ID NO: 144771 - RNA, 1410 nt, Artificial Sequence; identical to SEQ ID NO: 142760
  derived and/or modified CDS sequence (opt3) from neuraminidase__InfluenzaA__ACO95495

SEQ ID NO: 144772 - RNA, 1410 nt, Artificial Sequence; identical to SEQ ID NO: 142760
  derived and/or modified CDS sequence (opt3) from neuraminidase__InfluenzaA__ACO95506

SEQ ID NO: 144773 - RNA, 1410 nt, Artificial Sequence
  derived and/or modified CDS sequence (opt3) from neuraminidase__InfluenzaA__ACO95517
augaaccccaaucagaagaucauuaccauaggcagcgugucccugacaaucucuacuauuugcuucuuuaugcaaaucgccauucucaucacgaccgucacacuucacuucaaacaguacgaguuuaacucaccuccaaauaaccagguuaugcugugugaaccgacuauaaucgagagaaauauuaccgaaaucguguauuugacaaacaccacuauugagaaggaaaucugccccaaauuagcugaguacaggaauuggaguaagccucaguguaacauaacaggguucgcaccauuuagcaaagacaauuccauucggcugucugccggaggugauaucuggguaacccgcgagcccuaugugucgugcgacccugauaaguguuaccaauucgcgcuaggccaggggacgacucucaacaauguccauucaaacgacaccgugcacgaucgaacaccauaucguacucugcuuaugaaugaacugggaguucccuuucauuugggcaccaaacaggugugcauugcuuggagcaguuccucuugucacgacgguaaggccuggcuccaugucugcgugacaggggaugacaagaacgcaaccgccagcuucaucuacaauggaagacugguagauuccaucguuucauggaguaaagagauucugaggacgcaggaaagcgagugugugugcauaaacggcacuuguacagucgugaugaccgacggcucugcuuccgggaaggcagauacuaaaauccucuuuauugaggaaggaaagaucgugcacacaucaaccuuaagcgguagugcccaacacgucgaggaaugcucuugcuauccucgguacccaggcguucgcugugugugcagagacaacuggaagggguccaauaggccgauaguagauauuaacaucaaagacuacagcaucgugucgucuuaugucuguuccggacuggugggcgacacgccccggaagaaugauucaaguagcuccucucauugccuugacccuaacaaugaggaaggugggcacggaguuaaaggcugggcuuucgaugacggcaacgauguguggauggggcgcaccauuagcgagaaguugcgacugggauacgagacauuuaaagucaucgaagguuggucaaauccaaacaguaagcuacagauuaauagacaggugauaguagacaggggcaaccgguccggguauagcggaaucuucucuguugagggcaaaucauguauuaaucguugcuuuuacguggaacucauccgcgguagaaaggaggaaacugagguccuguggaccaguaacagcaucguggucuucugugggacauccggcacuuauggaaccggcucuuggcccgauggggccgacauuaaucuuaugccuauauga

SEQ ID NO: 144774 - RNA, 1410 nt, Artificial Sequence
  derived and/or modified CDS sequence (opt3) from neuraminidase__InfluenzaA__ACO95539
augaaccccaaucagaagaucauuaccauaggcagcgugucccugacaaucucuacuauuugcuucuuuaugcaaaucgccauucucaucacgaccgucacacuucacuucaaacaguacgaguuuaacucaccuccaaauaaccagguuaugcugugugaaccgacuauaaucgagagaaauauuaccgaaaucguguauuugacaaacaccacuauugagaaggaaaucugccccaaauuagcugaguacaggaauuggaguaagccucaguguaacauaacaggguucgcaccauuuagcaaagacaauuccauucggcugucugccggaggugauaucuggguaacccgcgagcccuaugugucgugcgacccugauaaguguuaccaauucgcgcuaggccaggggacgacucucaacaauguccauucaaacgacaccgugcacgaucgaacaccauaucguacucugcuuaugaaugaacugggaguucccuuucauuugggcaccaaacaggugugcauugcuuggagcaguuccucuugucacgacgguaaggccuggcuccaugucugcgugacaggggaugacaagaacgcaaccgccagcuucaucuacaauggaagacugguagauuccaucguuucauggaguaaagagauucugaggacgcaggaaagcgagugugugugcauaaacggcacuuguacagucgugaugaccgacggcucugcuuccgggaaggcaaacacuaaaauccucuuuauugaggaaggaaagaucgugcacacaucaaccuuaagcgguagugcccaacacgucgaggaaugcucuugcuauccucgguacccaggcguucgcugugugugcagagauaauuggaagggguccaacaggccgauaguagacauuaauaucaaagauuacagcaucgugucgucuuaugucuguuccggacuggugggcgacacgccccggaagaacgacucaaguagcuccucucauugccuugauccuaauaacgaggaaggugggcacggaguuaaaggcugggcuuucgacgauggcaaugacguguggauggggcgcaccauuagcgagaaguugcgaucaggauacgagacauuuaaagucaucgaagguuggaguaacccaaauuccaagcugcagauuaacagacaggugauaguagauaggggcaaucggagcggguauucuggaaucuucucaguugagggcaaaaguuguauuaaccguugcuuuuacguggaacuaauccgcgguagaaaggaggaaacugagguccucuggaccagcaauuccaucguggucuucugugggacaucuggcacuuauggaaccggcucguggcccgacggggccgauauuaaccugaugccuauauga

SEQ ID NO: 144775 - RNA, 1413 nt, Artificial Sequence
  derived and/or modified CDS sequence (opt3) from neuraminidase__InfluenzaA__ACP20223
augaaccccaaucagaagaucauuaccauaggcagcaucuccauugccaucgggauuaucucucugaugcuccaaauaggaaacaucauuucaaucugggcuagucacagcauucagacagguucccagaauaacacuggcaucugcaaucagagaauaauuacguacgagaacucuaccugggugaaucauacauaugucaacaucaauaacacuaauguuguggcaggggaagacaaaaccucgguaacacuugccggaaacucaagccuguguaguauuuccggcugggcgaucuacaccaaggauaauucuaucaggauugguagcaaaggggacguguucgucauacgggagccuuuuaucuccugcucacacuuggaaugucgcacuuucuuuuuaacacaaggagcucugcuaaacgauaagcauaguaauggcaccgugaaagaccgaagcccauaucgugcccucaugucuugcccgcugggcgaggcacccuccccuuacaacucaaaguucgaaagcguugccuggagugcuucugcaugucacgaugggaugggauggcuuacgauugguaucuccggcccagacaacggggccguggcuguccugaaguauaauggaauaauuacuggcaccaucaaaagcuggaagaaacagaucuugagaacacaggagucggagugcguguguaugaacgguucuugcuuuacuauuaugaccgaugggcccuccaauaaggccgcgucauacaaaaucuucaagauugaaaagggaaaaguaacaaagaguauagagcucaacgcaccuaauuuucauuaugaagaguguagcugcuacccagacaccggcaucguuaugugugugugcagggauaacuggcacggcuccaaucggcccugggucucuuucaaccagaaucuggacuaccaaauuggguauaucugcagcggaguguuuggugauaacccucgcccagaggacggcgaagggucauguaauccggugacggucgauggagccaacggcguuaaagguuucaguuacaaguaugacaaugggguguggaucggcagaacuaaauccaacaggcugcggaagggauuugagaugauuugggaccccaauggcuggacaaacaccgauagcgacuucucuguaaaacaggauguggucgcugugacugacuggucaggguacaguggauccuuuguucagcacccugaacucacagguuuagauugcauacgcccauguuucuggguggagcugguccgaggccuucccagagaaaacaccacgaucuggaccuccgggucuucgauuagcuucugcggagugaauagcgacacagccaacuggucauggccugauggcgcagaguugccauuuacuaucgacaaguga

SEQ ID NO: 144776 - RNA, 1410 nt, Artificial Sequence
  derived and/or modified CDS sequence (opt3) from neuraminidase__InfluenzaA__ACP41952
augaaccccaaucagaagaucauuaccauaggcagcgugugcaugacaaucgggauggccaaccugauucuccaaaucggaaauauuaucuccauauggaucucucacucaauucagcuugguaaccagaaucagaucgagacuuguaaccaaagugucauuacguacgaaaauaacaccuggguuaaucagacauaugugaacaucagcaauacuaacuucgcugcaggccaguccguagugucugucaaacuggccggaaauucgucauugugcccugugagcggaugggcgauauacaguaaggacaacuccguuagaauuggcucuaaaggugauguguuugucaucagggagccauucauuagcuguuccccguuagaaugccggaccuuuuuccugacacagggggcucuacucaaugacaagcauucaaacggaaccaucaaagaucgcagucccuaucgaacucugaugagcuguccuaucggcgaggugccaucucccuacaacucccguuuugaaucaguagccuggagcgcaagugccugccacgacggcauuaauuggcuuacaauagggaucucuggaccugauaacggugcuguugcagugcugaaguauaauggcauuaucaccgacacgauaaaguccuggagaaacaauauuuugaggacucaagagagcgagugugccugcgucaacgggucguguuucaccgugaugacagauggaccaucuaauggccaggcuuccuacaaaaucuuucggaucgaaaaggguaaaauugugaagucagucgagaugaacgcccccaauuaucauuacgaagagugcaguuguuacccugacagcuccgagaucacuugcguuugccgcgauaacuggcacgggucuaauagaccaugggugagcuucaaccagaaucucgaauaucagauuggauacauauguucaggcaucuuuggcgacaacccgaggcccaaugauaaaaccgggaguugcggaccuguauccagcaacggugcgaacggcgugaagggguucucuuuuaaguauggaaauggcgucuggauuggucggacaaaaucaaucaguagccgcaacggguucgagaugaucugggacccaaauggcuggaccggaacggauaacaauuuuuccauuaagcaagacauagugggcaucaacgaauggucuggguacucggggagcuucguucagcaucccgagcugacuggucuggacuguauucgaccuugcuucuggguggaacucaucagaggcaggccaaaagagaauacaauuuggaccuccgggucaaguaucucuuuuuguggagucaacagcgauacugugggcugguccuggcccgacggugcagaguuaccguucacaauagauaaguga

SEQ ID NO: 144777 - RNA, 1410 nt, Artificial Sequence; identical to SEQ ID NO: 144776
  derived and/or modified CDS sequence (opt3) from neuraminidase__InfluenzaA__ACP44158

SEQ ID NO: 144778 - RNA, 1413 nt, Artificial Sequence
  derived and/or modified CDS sequence (opt3) from neuraminidase__InfluenzaA__ACP44195
augaaccccaaucagaagaucauuaccauaggcagcaucuccauugccaucgggauuaucucucugaugcuccaaauaggaaacaucauuucaaucugggcuagucacagcauucagacagguucccagaauaacacuggcaucugcaaucagagaauaauuacguacgagaacucuaccugggugaaucauacauaugucaacaucaauaacacuaauguuguggcaggggaagacaaaaccucgguaacacuugccggaaacucaagccuguguaguauuuccggcugggcgaucuacaccaaggauaauucuaucaggauugguagcaaaggggacguguucgucauacgggagccuuuuaucuccugcucacacuuggaaugucgcacuuucuuuuuaacacaaggagcucugcuaaacgauaagcauaguaauggcaccgugaaagaccgaagcccauaucgugcccucaugucuugcccgcugggcgaggcacccuccccuuacaacucaaaguucgaaagcguugccuggagugcuucugcaugucacgaugggaugggauggcuuacgauugguaucuccggcccagacaacggggccguggcuguccugaaguauaauggaauaauuacuggcaccaucaaaagcuggaagaaacagaucuugagaacacaggagucggagugcguguguaugaacgguucuugcuuuacuauuaugaccgaugggcccuccgacaaggccgcgucauacaaaaucuucaagauugaaaagggaaaaguaacaaagaguauagagcucaaugcaccuaacuuucauuaugaagaguguagcugcuacccagauaccggcaucguuaugugugugugcagggacaauuggcacggcuccaaccggcccugggucucuuucaaucagaaccuggauuaccaaauuggguauaucugcagcggaguguuuggugacaauccucgcccagaggauggcgaagggucauguaacccggugacggucgacggagccaauggcguuaaagguuucaguuacaaguaugacaacgggguguggaucggcagaacuaaauccaauaggcugcggaagggauuugagaugauuugggaucccaacggcuggacaaauaccgacagcgauuucucuguaaaacaggacguggucgcuauaacugauuggucaggguacagugguagcuuugugcagcacccugaacucacaggauuaaacugcauccgcccauguuucuggguugagcuggugcgaggccuucccagagaaaacaccacgauuuggaccuccgggucuucgaucagcuucugcggagucaauuccgacacagccaacuggucauggccugauggcgcagaguugccauuuacuauugacaaguga

SEQ ID NO: 144779 - RNA, 1413 nt, Artificial Sequence; identical to SEQ ID NO: 144680
  derived and/or modified CDS sequence (opt3) from neuraminidase__InfluenzaA__ACP44217

SEQ ID NO: 144780 - RNA, 1413 nt, Artificial Sequence; identical to SEQ ID NO: 144680
  derived and/or modified CDS sequence (opt3) from neuraminidase__InfluenzaA__ACP44228

SEQ ID NO: 144781 - RNA, 1410 nt, Artificial Sequence; identical to SEQ ID NO: 142762
  derived and/or modified CDS sequence (opt3) from neuraminidase__InfluenzaA__ACP44239

SEQ ID NO: 144782 - RNA, 1410 nt, Artificial Sequence
  derived and/or modified CDS sequence (opt3) from neuraminidase__InfluenzaA__ACP44250
augaaccccaaucagaagaucauuaccauaggcagcgugucccugacaaucucuacuauuugcuucuuuaugcaaaucgccauucucaugacgaccgucacacuucacuucaaacaguacgaguuuaacucaccuccaaauaaccagguuaugcugugugaaccgacuaucauagagagaaauaucaccgaaauuguguauuugacaaacaccacuaucgagaaggaaauuugccccaaauuagcugaguacaggaauuggaguaagccucagugugacaucacaggguucgcaccauuuagcaaagauaacuccauacggcugucugccggaggugacauuuggguaacccgcgagcccuaugugucgugcgauccugacaaguguuaccaauucgcgcuaggccaggggacgacucucaauaacguccauucaaaugauaccgugcacgaccgaacaccauaucguacucugcuuaugaacgaacugggaguucccuuucauuugggcaccaaacaggugugcaucgcuuggagcaguuccucuugucacgaugguaaggccuggcuccaugucugcgugacaggggacgauaagaaugcaaccgccagcuucauuuacaacggaagacugguagacuccaucguuucauggaguaaagagauccugaggacgcaggaaagcgagugugugugcauuaauggcacuuguacagucgugaugaccgauggcucugcuuccgggaaggcagacacuaaaauacucuuuaucgaggaaggaaagauugugcacacaucaaccuuaagcgguagugcccaacacgucgaggaaugcucuugcuauccucgguacccaggcguucgcugugugugcagagauaacuggaagggguccaacaggccgaucguagacauaaauauuaaagacuacagcaucgugucgucuuaugucuguuccggacuggugggcgauacgccccggaagaacgacucaaguagcuccucucauugccuugauccuaauaacgaggaaggugggcacggaguuaaaggcugggcuuucgacgauggcaaugacguguggauggggcgcaccaucagcgagaaguugcgaucaggauacgagacauuuaaagucauugaagguuggaguaacccaaauuccaagcugcagaucaacagacaggugauuguagauaggggcaaucggagcggguauucuggaauauucucaguugagggcaaaaguuguaucaaccguugcuuuuacguggaacuaauucgcgguagaaaggaggaaacugagguccucuggaccagcaauuccaucguggucuucugugggacaucuggcacuuauggaaccggcucguggcccgacggggccgauaucaaccugaugccuauuuga

SEQ ID NO: 144783 - RNA, 1410 nt, Artificial Sequence
  derived and/or modified CDS sequence (opt3) from neuraminidase__InfluenzaA__ACP44261
augaaccccaaucagaagaucauuaccauaggcagcgugucccugacaaucucuacuauuugcuucuuuaugcaaaucgccauucucaucacgaccgucacacuucacuucaaacaguacgaguuuaacucaccuccaaauaaccagguuaugcugugugaaccgacuauaaucgagagaaauauuaccgaaaucguguauuugacaaacaccacuauugagaaggaaaucugccccaaauuagcugaguacaggaauuggaguaagccucaguguaacauaacaggguucgcaccauuuagcaaagacaauuccauucggcugucugccggaggugauaucuggguaacccgcgagcccuaugugucgugcgacccugauaaguguuaccaauucgcgcuaggccaggggacgacucucaacaauaugcauucaaacgacaccguccacgaucgaacaccauaucguacucugcuuaugaaugaacugggagugcccuuucauuugggcaccaagcagguuugcauugcuuggagcaguuccucuugucacgacgguaaagccuggcuccaugugugcgucacaggggaugacaagaacgcaaccgccagcuucaucuacaauggaagacugguggauuccaucguaucauggaguaaagagauucugaggacgcaggaaagcgaguguguuugcauaaacggcacuuguacaguggucaugaccgacggcucugcuuccgggaaggcagauacuaaaauccucuuuauugaggaaggaaagaucgugcacacaucaaccuuaagcgguagugcccaacacguggaggaaugcucuugcuauccucgguacccaggcguccgcuguguuugcagagacaacuggaagggguccaauaggccgauaguggauauuaacaucaaagacuacagcaucguaucgucuuauguguguuccggacuggucggcgacacgccccggaagaaugauucaaguagcuccucucauugccuugacccuaacaaugaggaaggugggcacggagugaaaggcugggcuuucgaugacggcaacgauguuuggauggggcgcaccauuagcgagaaguugcgaucaggauacgagacauuuaaagugaucgaagguuggaguaauccaaacuccaagcugcagauuaauagacaggucauaguggacaggggcaaccggagcggguauucuggaaucuucucaguagagggcaaaaguuguauuaaucguugcuuuuacguugaacuaauccgcgguagaaaggaggaaacugaggugcucuggaccagcaacuccaucgucguguucugugggacaucuggcacuuauggaaccggcucguggcccgauggggccgacauuaaucugaugccuauauga

SEQ ID NO: 144784 - RNA, 1410 nt, Artificial Sequence
  derived and/or modified CDS sequence (opt3) from neuraminidase__InfluenzaA__ACP44272
augaaccccaaucagaagaucauuaccauaggcagcgugucccugacaaucucuacuauuugcuucuuuaugcaaaucgccauucucaucacgaccgucacacuucacuucaaacaguacgaguuuaacucaccuccaaauaaccagguuaugcugugugaaccgacuauaaucgagagaaauauuaccgaaaucguguauuugacaaacaccacuauugagaaggaaaucugccccaaauuagcugaguacaggaauuggaguaagccucaguguaacauaacaggguucgcaccauuuagcaaagacaauuccauucggcugucugccggaggugauaucuggguaacccgcgagcccuaugugucgugcgacccugauaaguguuaccaauucgcgcuaggccaggggacgacucucaacaauguccauucaaacgacaccgugcacgaucgaacaccauaucguacucugcuuaugaaugaacugggaguucccuuucauuugggcaccaaacaggugugcauugcuuggagcaguuccucuugucacgacgguaaggccuggcuccaugucugcgugacaggggaugacaagaacgcaaccgccagcuucaucuacaauggaagacugguagauuccaucguuucauggaguaaagagauucugaggacgcaggaaagcgagugugugugcauaaacggcacuuguacagucaucaugaccgacggcucugcuuccgggaaggcagauacuaaaauucucuuuaucgaggaaggaaagauagugcacacaucaaccuuaagcgguagugcccaacacguggaggaaugcucuugcuauccucgguacccaggcguccgcuguguuugcagagacaacuggaagggguccaauaggccgauuguggauaucaacaucaaagacuacagcauuguaucgucuuauguguguuccggacuggucggcgacacgccccggaagaaugauucaaguagcuccucucauugccuugacccuaacaaugaggaaggugggcacggagugaaaggcugggcuuucgaugacggcaacgauguuuggauggggcgcaccaucagcgagaaguugcgaucaggauacgagacauuuaaagugauugaagguuggaguaauccaaacuccaagcugcagauaaauagacaggucaucguggacaggggcaaccggagcggguauucuggaauuuucucaguagagggcaaaaguuguaucaaucguugcuuuuacguugaacuaauccgcgguagaaaggaggaaacugaggugcucuggaccagcaacuccauugucguguucugugggacaucuggcacuuauggaaccggcucguggcccgauggggccgacauaaaucugaugccuaucuga

SEQ ID NO: 144785 - RNA, 1410 nt, Artificial Sequence; identical to SEQ ID NO: 144776
  derived and/or modified CDS sequence (opt3) from neuraminidase__InfluenzaA__ACQ55360

SEQ ID NO: 144786 - RNA, 1410 nt, Artificial Sequence
  derived and/or modified CDS sequence (opt3) from neuraminidase__InfluenzaA__ACQ63236
augaaccccaaucagaagaucauuaccauaggcagcgugugcaugacaaucgggauggccaaccugauucuccaaaucggaaauauuaucuccauauggaucucucacucaauucagcuugguaaccagaaucagaucgagacuuguaaccaaagugucauuacguacgaaaauaacaccuggguuaaucagacauaugugaacaucagcaauacuaacuucgcugcaggccaguccguagugucugucaaacuggccggaaauucgucauugugcccugugagcggaugggcgauauacaguaaggacaacuccauuagaaucggcucuaaaggugauguuuuugugauuagggagccauucaucagcuguuccccguuagaaugccggaccuuuuuccugacacagggggcucuacucaaugacaagcauucaaacggaaccaucaaagaucgcagucccuaucgaacucugaugagcuguccuauuggcgaggucccaucucccuacaacucccguuuugaaucaguggccuggagcgcaagugccugccacgacggcauaaauuggcuuacaaucgggauuucuggaccugauaacggugcuguagcaguucugaaguauaauggcaucauaaccgacacgauuaaguccuggagaaacaauaucuugaggacucaagagagcgagugugccugcgugaacgggucguguuucaccgucaugacagauggaccaucugacggccaggcuuccuacaaaaucuuucggauugaaaaggguaaaaucgugaagucaguggagaugaaugcccccaacuaucauuacgaagagugcaguuguuacccugauagcuccgagauuacuugcgucugccgcgacaauuggcacgggucuaacagaccauggguuagcuucaaucagaaccucgaauaucagauaggauacaucuguucaggcauuuuuggcgauaauccgaggcccaacgacaaaaccgggaguugcggaccuguguccagcaauggugcgaacggcguaaagggguucucuuuuaaguauggaaacggcguguggaucggucggacaaaaucaaucaguagccgcaauggguucgagaugauuugggauccaaacggcuggaccggaacggacaauaacuuuuccauaaagcaagacaucgucggcauuaaugaauggucuggguacucggggagcuucgugcagcaucccgagcugacuggucuggauuguauccgaccuugcuucuggguugaacucauuagaggcaggccaaaagagaacacaaucuggaccuccgggucaaguauaucuuuuuguggagugaauagcgacacugucggcugguccuggcccgauggugcagaguuaccguucacaaucgacaaguga

SEQ ID NO: 144787 - RNA, 1410 nt, Artificial Sequence; identical to SEQ ID NO: 144786
  derived and/or modified CDS sequence (opt3) from neuraminidase__InfluenzaA__ACQ63242

SEQ ID NO: 144788 - RNA, 1410 nt, Artificial Sequence; identical to SEQ ID NO: 144786
  derived and/or modified CDS sequence (opt3) from neuraminidase__InfluenzaA__ACQ63253

SEQ ID NO: 144789 - RNA, 1410 nt, Artificial Sequence; identical to SEQ ID NO: 144786
  derived and/or modified CDS sequence (opt3) from neuraminidase__InfluenzaA__ACQ63262

SEQ ID NO: 144790 - RNA, 1410 nt, Artificial Sequence
  derived and/or modified CDS sequence (opt3) from neuraminidase__InfluenzaA__ACQ65694
augaaccccaaucagaagaucauuaccauaggcagcgugucccugacaaucucuacuauuugcuucuuuaugcaaaucgccauucucaucacgaccgucacacuucacuucaaacaguacgaguuuaacucaccuccaaauaaccagguuaugcugugugaaccgacuauaaucgagagaaauauuaccgaaaucguguauuugacaaacaccacuauugagaaggaaaucugccccaaauuagcugaguacaggaaguggaguaaaccucaguguaauauaacaggguucgcaccauuuagcaaggacaacuccauucggcugucugccggaggugauaucuggguaacccgcgagcccuaugugucgugcgacccugauaaguguuaccaauucgcgcuaggccaggggacgacucucaauaacguccauucaaaugacaccgugcgagaucguacaccauauagaacucugcuuaugaacgaacugggaguucccuuucacuugggcaccaaacaggugugcauugcuuggagcaguuccucuugucaugacgguaaggccuggcuccacgucugcgugacaggggaugacaaaaaugcaaccgccagcuucaucuacaacggaaggcugguagauuccaucguuucauggaguaaggacauucugcggacgcaggagagcgaaugugugugcauaaauggcacuuguacagucgugaugaccgauggcucugcuuccgggaaagcagacacuaagauccucuuuauugaggagggaaagaucgugcauacaucaaccuuaagcgguagugcccaacacgucgaagagugcucuugcuauccucgcuacccaggcguuagaugugugugcagggauaacuggcggggguccaaccgcccgauaguagacauuaauaugaaagacuacagcaucgugucgucuuaugucuguuccggacuggugggcgauacgccccgaaagaacgacucaaguagcuccggucacugccuugauccuaauaacgaagaagggggacauggcguuaaaggcugggcuuucgacgaugggaaugacguguggaugggaagaaccaucucugagaaguugaggagcgguuacgagacauuuaaagucauugagggcuggucaaacccaaauaguaagcugcagaucaaccgucaggugauuguagaucgggggaaucgcuccggauauagcggcauauucucuguugaagguaaaucauguaucaacagaugcuuuuacguggagcuaauuagggggcggaaggaagagacugaaguccucuggaccaguaauagcaucguggucuucuguggcacauccggaacuuauggcaccgggucuuggcccgacggagccgauaucaaccugaugccuauuuga

SEQ ID NO: 144791 - RNA, 1410 nt, Artificial Sequence
  derived and/or modified CDS sequence (opt3) from neuraminidase__InfluenzaA__ACQ65705
augaaccccaaucagaagaucauuaccauaggcagcgugucccugacaaucucuacuauuugcuucuuuaugcaaaucgccauucucaucacgaccgucacacuucacuucaaacaguacgaguuuaacucaccuccaaauaaccagguuaugcugugugaaccgacuauaaucgagagaaauauuaccgaaaucguguauuugacaaacaccacuauugagaaggaaaucugccccaaauuagcugaguacaggaaguggaguaaaccucaguguaauauaacaggguucgcaccauuuagcaaggacaacuccauucggcugucugccggaggugauaucuggguaacccgcgagcccuaugugucgugcgacccugauaaguguuaccaauucgcgcuaggccaggggacgacucucaauaacguccauucaaaugacaccgugcgagaucguacaccauauagaacucugcuuaugaacgaacugggaguucccuuucacuugggcaccaaacaggugugcauugcuuggagcaguuccucuugucaugacgguaaggccuggcuccacgucugcgugacaggggaugacaaaaaugcaaccgccagcuucaucuacaacggaaggcugguagauuccaucguuucauggaguaaggagauucugcggacgcaggaaagcgagugugugugcauaaauggcacuuguacagucgugaugaccgacggcucugcuuccgggaaagcagauacuaagauccucuuuauugaggaaggaaagaucgugcauacaucaaccuuaagcgguagugcccaacacgucgaggaaugcucuugcuauccucgcuacccaggcguuagaugugugugcagggacaacuggcggggguccaaccgcccgauaguagauauuaauaugaaagacuacagcaucgugucgucuuaugucuguuccggacuggugggcgacacgccccgaaagaacgauucaaguagcuccggucacugccuugacccuaauaacgaggaagggggacauggcguuaaaggcugggcuuucgaugacgggaaugauguguggaugggaagaaccaucucugagaaguugaggagcgguuacgagacauuuaaagucauugaaggcuggucaaacccaaauaguaagcugcagaucaaccgucaggugauuguagaccgggggaaucgcuccggauauagcggcauauucucuguugaggguaaaucauguaucaacagaugcuuuuacguggaacuaauuagggggcggaaggaggaaacugagguccucuggaccaguaauagcaucguggucuucuguggcacauccggaacuuauggcaccgggucuuggcccgauggagccgacaucaaccugaugccuauuuga

SEQ ID NO: 144792 - RNA, 1410 nt, Artificial Sequence; identical to SEQ ID NO: 144560
  derived and/or modified CDS sequence (opt3) from neuraminidase__InfluenzaA__ACQ65716

SEQ ID NO: 144793 - RNA, 1410 nt, Artificial Sequence; identical to SEQ ID NO: 144560
  derived and/or modified CDS sequence (opt3) from neuraminidase__InfluenzaA__ACQ65727

SEQ ID NO: 144794 - RNA, 1410 nt, Artificial Sequence; identical to SEQ ID NO: 144647
  derived and/or modified CDS sequence (opt3) from neuraminidase__InfluenzaA__ACQ65739

SEQ ID NO: 144795 - RNA, 1410 nt, Artificial Sequence
  derived and/or modified CDS sequence (opt3) from neuraminidase__InfluenzaA__ACQ65750
augaaccccaaucagaagaucauuaccauaggcagcgugucccugacaaucucuacuauuugcuucuuuaugcaaacggccauccucauuaccacagucacucuucacuucaaacaguacgaguuuaacucaccuccaaauaaccagguuaugcugugugaaccgaccaucauagagagaaauaucacagaaauuguguauuugaccaacacuacaaucgagaaggaaauuugccccaaauuagcugaguacaggaauuggaguaagccucagugugacaucaccggguucgcaccauuuagcaaagauaacuccauacggcugucugccggaggugacauuuggguaacgcgcgagcccuaugugucgugcgauccugacaaguguuaccaauucgcgcuaggccaggggacuacccucaauaacguccauucaaaugauacagugcgaaaccguacuccauauagaacccugcuuaugaaugaacugggaguucccuuucacuugggcacaaaacaggugugcaucgcuuggagcaguuccucuugucaugacgguaaggccuggcuccacgucugcauuaccggggaugacaagaacgcaacggccagcuucaucuacaauggaaggcugguggauuccaucguaucauggaguaaagagauucugcggacucaggaaagcgaguguguuugcauaaacggcacauguaccguggucaugacugacggcucugcuuccgggaaggcagauacaaaaauccucuuuauugaggaaggaaagaucgugcauaccucaacguuaagcgguagugcccaacacguggaggaaugcucuugcuauccucgcuacccaggcgucagauguguuugcagggacaacuggaagggguccaaucggccgauaguggauauuaacaucaaagaccacagcaucguaucgucuuacguguguuccggacuggucggcgacacaccccgcaagaaugauucaaguagcuccucucauugccuugacccuaacaaugaggaaggugggcacggagugaaaggcugggcuuucgaugacggcaacgauguuuggauggggcgaaccauuagcgagaagucaagauugggauaugagacuuuuaaagugaucgaagguuggaguaauccaaaguccaaacugcagauuaacaggcaggucauaguggaccggggcaaucguagcggguacucuggaaucuucucaguagagggcaagaguuguauuaaccgcugcuuuuauguugaacuaaucagagguaggaaggaggaaaccgaggugcucuggacaagcaauuccaucgucguguucugugggacuucuggcaccuacggaacaggcucguggcccgauggggccgacauuaaccugaugccuauauga

SEQ ID NO: 144796 - RNA, 1413 nt, Artificial Sequence; identical to SEQ ID NO: 144680
  derived and/or modified CDS sequence (opt3) from neuraminidase__InfluenzaA__ACQ65761

SEQ ID NO: 144797 - RNA, 1410 nt, Artificial Sequence; identical to SEQ ID NO: 144776
  derived and/or modified CDS sequence (opt3) from neuraminidase__InfluenzaA__ACQ73394

SEQ ID NO: 144798 - RNA, 1410 nt, Artificial Sequence; identical to SEQ ID NO: 144776
  derived and/or modified CDS sequence (opt3) from neuraminidase__InfluenzaA__ACQ73395

SEQ ID NO: 144799 - RNA, 1410 nt, Artificial Sequence; identical to SEQ ID NO: 144786
  derived and/or modified CDS sequence (opt3) from neuraminidase__InfluenzaA__ACQ73396

SEQ ID NO: 144800 - RNA, 1410 nt, Artificial Sequence; identical to SEQ ID NO: 144786
  derived and/or modified CDS sequence (opt3) from neuraminidase__InfluenzaA__ACQ76291

SEQ ID NO: 144801 - RNA, 1410 nt, Artificial Sequence
  derived and/or modified CDS sequence (opt3) from neuraminidase__InfluenzaA__ACQ76298
augaaccccaaucagaagaucauuaccauaggcagcgugugcaugacaaucgggauggccaaccugauucuccaaaucggaaauauuaucuccauauggaucucucacucaauucagcuugguaaccagaaucagaucgagacuuguaaccaaagugucauuacguacgaaaauaacaccuggguuaaucagacauaugugaacaucagcaauacuaacuucgcugcaggccaguccguagugucugucaaacuggccggaaauucgucauugugcccugugagcggaugggcgauauacaguaaggacaacuccguuagaauuggcucuaaaggugauguguuugucaucagggagccauucauuagcuguuccccguuagaaugccggaccuuuuuccugacacagggggcucuacucaaugacaagcauucaaacggaaccaucaaagaucgcagucccuaucgaacucugaugagcuguccuaucggcgaggugccaucucccuacaacucccguuuugaaucaguagccuggagcgcaagugccugccacgacggcauuaauuggcuuacaauagggaucucuggaccugauaacggugcuguugcagugcugaaguauaauggcauuaucaccgacacgauaaaguccuggagaaacaauauuuugaggacucaagagagcgagugugccugcgucaacgggucguguuucaccaucaugacagauggaccaucuaauggccaggcuuccuacaaaaucuuucggauugaaaaggguaaaaucgugaagucaguggagaugaacgcccccaauuaucauuacgaagagugcaguuguuacccugacagcuccgagauuacuugcgucugccgcgauaacuggcacgggucuaauagaccauggguuagcuucaaccagaaucucgaauaucagauaggauacaucuguucaggcauuuuuggcgacaacccgaggcccaaugauaaaaccgggaguugcggaccuguguccagcaacggugcgaacggcguaaagggguucucuuuuaaguauggaaauggcguguggaucggucggacaaaaucaaucaguagccgcaacggguucgagaugauuugggacccaaauggcuggaccggaacggauaacaauuuuuccauaaagcaagacaucgucggcauuaacgaauggucuggguacucggggagcuucgugcagcaucccgagcugacuggucuggacuguauccgaccuugcuucuggguugaacucauuagaggcaggccaaaagagaauacaaucuggaccuccgggucaaguauaucuuuuuguggagugaacagcgauacugucggcugguccuggcccgacggugcagaguuaccguucacaaucgauaaguga

SEQ ID NO: 144802 - RNA, 1410 nt, Artificial Sequence; identical to SEQ ID NO: 144786
  derived and/or modified CDS sequence (opt3) from neuraminidase__InfluenzaA__ACQ76308

SEQ ID NO: 144803 - RNA, 1410 nt, Artificial Sequence; identical to SEQ ID NO: 144786
  derived and/or modified CDS sequence (opt3) from neuraminidase__InfluenzaA__ACQ76316

SEQ ID NO: 144804 - RNA, 1410 nt, Artificial Sequence; identical to SEQ ID NO: 144776
  derived and/or modified CDS sequence (opt3) from neuraminidase__InfluenzaA__ACQ76322

SEQ ID NO: 144805 - RNA, 1410 nt, Artificial Sequence; identical to SEQ ID NO: 144776
  derived and/or modified CDS sequence (opt3) from neuraminidase__InfluenzaA__ACQ76328

SEQ ID NO: 144806 - RNA, 1410 nt, Artificial Sequence; identical to SEQ ID NO: 144776
  derived and/or modified CDS sequence (opt3) from neuraminidase__InfluenzaA__ACQ76335

SEQ ID NO: 144807 - RNA, 1410 nt, Artificial Sequence; identical to SEQ ID NO: 144776
  derived and/or modified CDS sequence (opt3) from neuraminidase__InfluenzaA__ACQ76342

SEQ ID NO: 144808 - RNA, 1410 nt, Artificial Sequence; identical to SEQ ID NO: 144776
  derived and/or modified CDS sequence (opt3) from neuraminidase__InfluenzaA__ACQ76351

SEQ ID NO: 144809 - RNA, 1410 nt, Artificial Sequence; identical to SEQ ID NO: 144776
  derived and/or modified CDS sequence (opt3) from neuraminidase__InfluenzaA__ACQ76359

SEQ ID NO: 144810 - RNA, 1410 nt, Artificial Sequence; identical to SEQ ID NO: 144786
  derived and/or modified CDS sequence (opt3) from neuraminidase__InfluenzaA__ACQ76364

SEQ ID NO: 144811 - RNA, 1410 nt, Artificial Sequence; identical to SEQ ID NO: 144786
  derived and/or modified CDS sequence (opt3) from neuraminidase__InfluenzaA__ACQ76367

SEQ ID NO: 144812 - RNA, 1410 nt, Artificial Sequence
  derived and/or modified CDS sequence (opt3) from neuraminidase__InfluenzaA__ACQ76379
augaaccccaaucagaagaucauuaccauaggcagcgugugcaugacaaucgggauggccaaccugauucuccaaaucggaaauauuaucuccauauggaucucucacucaauucagcuugguaaccagaaucagaucgagacuuguaaccaaagugucauuacguacaaaaauaacaccuggguuaaucagacauaugugaacaucagcaauacuaacuucgcugcaggccaguccguagugucugucaagcuggccggaaauucgucauugugcccugugagcggaugggcgauauacaguaaagacaacuccguuagaauuggcucuaagggugauguguuugucaucagggaaccauucauuagcuguuccccguuagagugccggaccuuuuuccugacacagggggcucuacucaaugacaaacauucaaacggaaccaucaaggaucgcagucccuaucgaacucugaugagcuguccuaucggcgaagugccaucucccuacaacucccguuuugagucaguagccuggagcgcaagugccugccacgacggcauuaauuggcuuacaauagggaucucuggaccugauaacggugcuguugcagugcugaaguauaauggcauuaucaccgacacgauaaaauccuggagaaacaauauuuugaggacucaagaaagcgagugugccugcgucaacgggucguguuucaccgugaugacagauggaccaucuaauggccaggcuuccuacaagaucuuucggaucgagaaagguaagauugugaaaucagucgaaaugaacgcccccaauuaucauuacgaggaaugcaguuguuacccugacagcuccgagaucacuugcguuugccgcgauaacuggcacgggucuaauagaccaugggugagcuucaaccagaaucucgaguaucagauuggauacauauguucaggcaucuuuggcgacaacccgaggcccaaugauaagaccgggaguugcggaccuguauccagcaacggugcgaacggcgugaagggguucucuuuuaaauauggaaauggcgucuggauuggucggacaaagucaaucaguagccgcaacggguucgaaaugaucugggacccaaauggcuggaccggaacggauaacaauuuuuccauuaaacaagacauagugggcaucaacgaguggucuggguacucggggagcuucguucagcaucccgaacugacuggucuggacuguauucgaccuugcuucuggguggagcucaucagaggcaggccaaaggaaaauacaauuuggaccuccgggucaaguaucucuuuuuguggagucaacagcgauacugugggcugguccuggcccgacggugcagaguuaccguucacaauagauaaauga

SEQ ID NO: 144813 - RNA, 1410 nt, Artificial Sequence; identical to SEQ ID NO: 144786
  derived and/or modified CDS sequence (opt3) from neuraminidase__InfluenzaA__ACQ76385

SEQ ID NO: 144814 - RNA, 1410 nt, Artificial Sequence; identical to SEQ ID NO: 144786
  derived and/or modified CDS sequence (opt3) from neuraminidase__InfluenzaA__ACQ76388

SEQ ID NO: 144815 - RNA, 1410 nt, Artificial Sequence; identical to SEQ ID NO: 144786
  derived and/or modified CDS sequence (opt3) from neuraminidase__InfluenzaA__ACQ76403

SEQ ID NO: 144816 - RNA, 1410 nt, Artificial Sequence
  derived and/or modified CDS sequence (opt3) from neuraminidase__InfluenzaA__ACQ76407
augaaccccaaucagaagaucauuaccauaggcagcgugugcaugacaaucgggauggccaaccugauucuccaaaucggaaauauuaucuccauauggaucucucacucaauucagcuugguaaccagaaucagaucgagacuuguaaccaaagugucauuacguacgaaaauaacaccuggguuaaucagacauaugugaacaucagcaauacuaacuucgcugcaggccaguccguagugucugucaaacuggccgggaacucgucauugugcccugugggaggcugggcgauauacagcaaggacaauaguguuagaauugguuccaaaggggauguguuugucaucagggagccauucauuucuuguagcccguuagaaugccggaccuuuuuccugacacagggagcucuacucaaugacaagcauuccaacggcaccaucaaagaucgcucacccuaucgaacucugaugaguuguccuaucggcgaggugccaagccccuacaacucucguuuugaauccguagccuggucagcaagcgccugccacgacgggauuaauuggcuuacaauaggaaucagugguccugauaacggcgcuguugcagugcugaaguauaaugggauuaucaccgacacgauaaagucuuggagaaacaauauuuugaggacucaagaguccgagugugccugcgucaacggaagcuguuucaccgugaugacagauggcccaucgaauggucaggcuucuuacaaaaucuuucggaucgaaaaggggaaaauugugaaguccgucgagaugaacgcccccaauuaucauuacgaagagugcucauguuacccugacaguagcgagaucacuugcguuugccgcgauaacuggcacggauccaauagaccaugggugucuuucaaccagaaucucgaauaucagauuggcuacauauguagcggcaucuuuggggacaacccgaggcccaaugauaaaaccggaucaugcgguccuguaaguuccaacggcgcgaacggggugaagggauucagcuuuaaguauggcaauggugucuggauugggcggacaaaaucuaucucaagucgcaacggcuucgagaugaucugggacccaaauggauggaccggcacggauaacaauuuuagcauuaagcaagacauaguggggaucaacgaaugguccggauacucugguucguucguucagcaucccgagcugacuggccuggacuguauucgaccuugcuucuggguggaacucaucagagggaggccaaaagagaauacaauuuggaccagcggauccucaaucaguuuuuguggcgucaacucugauacuguggguuggagcuggcccgacggggcagaguuaccguucacaauagauaaguga

SEQ ID NO: 144817 - RNA, 1410 nt, Artificial Sequence
  derived and/or modified CDS sequence (opt3) from neuraminidase__InfluenzaA__ACQ77603
augaaccccaaucagaagaucauuaccauaggcagcgugucccugacaaucgccacuauuugcuuccucaugcaaaucgcuauucuugucacgaccguuacacugcacuuuaaacaguacgaguguaacucuccuccaaauaaccaggugauguugugcgaaccgacuaucauagagagaaauaucaccgaaauuguauauuuaacaaacaccacuaucgagaaggaaauuugucccaaacuggcagaguacaggaauuggucaaagccucagugcaacaucacaggguucgccccauuuaguaaagacaauagcauacggcuauccgcgggaggugauauuugggugacccgcgagcccuaugucucuugugacccugauaagugcuaccaauucgcucucggccaggggacgacucugaacaauggacauucgaacgacaccgugcacgaucgaacaccauaucguacucuucugaugaaugaauugggcguucccuuucaucucgguaccaaacagguguguaucgccuggucaagcaguuccugccacgacgggaaggcauggcugcaugucugugugacaggagaugacgagaacgccaccgcuucuuucauuuacaauggcagacugguagauagcaucggcuccuggucaaagaaaauccucaggacgcaggaaagugagugcguuuguauuaacgggacuugcacaguggucaugaccgacggaagcgcaucugguaaggccgauacuaaaauauuauuuaucgaggaaggcaagauugugcacacauccccucugucagggagcgcucaacacguggaggaaugcaguuguuauccacgguacccgggaguccgcugcguuuguagagacaacuggaagggcucuaauaggcccaucguggauauaaacguaaaagacuacuccauugugagcucguaugucugcucuggucuugugggggacaccccucggaagaaugauuccucaaguagcucccauuguuuggacccaaacaaugaggaaggaggccacggcguuaaagggugggccuucgaugacggaaacgauguguggaugggucgcacgaucucugaaaagagccgaucaggcuacgagaccuuuaaagucaucgagggguggaguaagcccaauuccaaacugcagauuaacagacaggugaucguagacaggggaaaucggagcggcuauucugguauuuucucaguugaggggaagaguugcauaaaccguuguuuuuacguggaacuaauccgcggcagaaagcaggagacagaaguccucuggacuagcaauuccauuguggucuucugcggaaccucuggcacauaugggacuggaucguggccugauggugcggacaucaaccugaugccaaucuga

SEQ ID NO: 144818 - RNA, 1410 nt, Artificial Sequence; identical to SEQ ID NO: 144776
  derived and/or modified CDS sequence (opt3) from neuraminidase__InfluenzaA__ACQ83309

SEQ ID NO: 144819 - RNA, 1410 nt, Artificial Sequence; identical to SEQ ID NO: 144776
  derived and/or modified CDS sequence (opt3) from neuraminidase__InfluenzaA__ACQ84460

SEQ ID NO: 144820 - RNA, 1410 nt, Artificial Sequence; identical to SEQ ID NO: 144776
  derived and/or modified CDS sequence (opt3) from neuraminidase__InfluenzaA__ACQ84470

SEQ ID NO: 144821 - RNA, 1410 nt, Artificial Sequence
  derived and/or modified CDS sequence (opt3) from neuraminidase__InfluenzaA__ACQ84480
augaacaccaaucagagaaucauuacaauaggcacugugugccugaucgucgggauuguuagccuccuucugcaaaucggaaacauuguguccuuguggaucucucacucaauaaagacgggugagaaaaaucauagugaaaucuguaaccagaauauuaucaccuacgagaacaagacauggguaaaucagacuuaugugaacauuagcaauaccaacaucgccgacggccagggggucacauccauaauuuuagcuggaaauucuucgcugugccccaucucaggcugggcaauuuacagcaaagauaacaguaucaggaucgguuccaagggggacauuuucgugauacgggaaccuuuuaucucuuguagccaccuagagugccgcaccuucuuucucacucaaggagcccugcuuaaugaucgacauuccaacggcacaguuaaagaccguucaccauauagaacccugaugaguuguccgacgggcgaagcgcccagcccuuacaauucuagguucgaguccguggcuuggucagccagcgcaugccacgaugggaugggaugguugacuauugguaucaguggcccagacaacggggccgucgcugugcucaaguauaacggaauaauuaccgauacaaucaagucuuggcggaauaaaauccugcgcacucaggaguccgaauguguaugcauuaacggcagcuguuuuaccaucaugacagacggucccucgaaugggcaggcaucuuacaagauuuucaaaauggagaagggaaaaauaaucaaguccguugaacuggaugccccuaacuaucauuacgaggagugcucauguuacccagacaccggcaagguggucugcgugugcagagauaauuggcacgcuaguaacaggcccugggugagcuuugaccagaaucucgauuaucaaauuggcuacaucuguuccggggucuucggagacaacccucggucuaaugacgguaaaggcaacugcgggccaguuuuaagcaauggagccaacggcgugaaggguuuuucauuccgcuaugggaauggcguauggaucggacgaacgaaaaguauuuccagcagaucuggcuuugaaaugauaugggauccgaacggguggacugagacagacucaaguuucagcaucaagcaggauauuaucgcgcugaccgacugguccggauacucugguucguuugugcagcaccccgaacuuacuggcaugaauuguauuaggccuugcuucugggucgaguugauccgggggcagccaaaagaaagcacaauauggaccuccggaucaaguaucucuuucuguggcguggauagcgagacggcauccuggucauggcccgacggugccgaucugccuuuuaccauugacaaguga

SEQ ID NO: 144822 - RNA, 1410 nt, Artificial Sequence
  derived and/or modified CDS sequence (opt3) from neuraminidase__InfluenzaA__ACQ89891
augaaccccaaucagaagaucauuaccauaggcagcgugugcaugacaaucgggauggccaaccugauucuccaaaucggaaauauuaucuccauauggaucucucacucaauucagcuugguaaccagaaucagaucgagacuuguaaccaaagugucauuacguacgaaaauaacaccuggguuaaucagacauaugugaacaucagcaauacuaacuucgcugcaggccaguccguagugucugucaaacuggccggaaauucgucauugugcccugugagcgggugggcgauauacaguaaggacaacuccauuagaaucggcucuaaaggugauguuuuugugauuagggagccauucaucagcuguuccccguuagaaugccggaccuuuuuccugacacagggggcucuacucaaugacaagcauucaaacggaaccaucaaagaucgcagucccuaucgaacucugaugagcuguccuauuggcgaggucccaucucccuacaacucccguuuugaaucaguggccuggagcgcaagugccugccacgacggcauaaauuggcuuacaaucgggauuucuggaccugauaacggugcuguagcaguucugaaguauaauggcaucauaaccgacacgauuaaguccuggagaaacaauaucuugaggacucaagagagcgagugugccugcgugaacgggucguguuucaccgucaugacagauggaccaucuaauggccaggcuuccuacaaaaucuuucggauugaaaaggguaaaaucgugaagucaguggagaugaacgcccccaauuaucauuacgaagagugcaguuguuacccugacagcuccgagauuacuugcgucugccgcgauaacuggcacgggucuaauagaccauggguuagcuucaaccagaaucucgaauaucagauaggauacaucuguaggggcauuuuuggcgacaacccgcggcccaaugauaaaaccgggucaugcggaccugugaguuccaacggugcgaacggcguaaagggguucagcuuuaaguauggaaauggcguguggaucggucgcacaaaaucuaucucaagucgaaacggguucgagaugauuugggacccaaauggcuggaccggaacggauaacaauuuuagcauaaagcaagacaucgucggcauuaacgaaugguccggguacucuggaucguucgugcagcaucccgagcugacuggucuggacuguaucagaccuugcuucuggguugaacucauuaggggccggccaaaagagaauacaaucuggaccagcggguccucaauaaguuuuuguggagugaacucugauacugucggcuggagcuggcccgacggugcagaguuaccguucacaaucgauaaguga

SEQ ID NO: 144823 - RNA, 1410 nt, Artificial Sequence; identical to SEQ ID NO: 144776
  derived and/or modified CDS sequence (opt3) from neuraminidase__InfluenzaA__ACQ89918

SEQ ID NO: 144824 - RNA, 1410 nt, Artificial Sequence
  derived and/or modified CDS sequence (opt3) from neuraminidase__InfluenzaA__ACQ89919
augaaccccaaucagaagaucauuaccauaggcagcgugugcaugacaaucgggauggccaaccugauucuccaaaucggaaauauuaucuccauauggaucucuagaucaauucagcuugguaaccagaaucagaucgagacuuguaaccaaagugucauuacguacgaaaauaacaccuggguuaaucagacauaugugaacaucagcaauacuaacuucgcugcaggccaguccguagugucugucaaacuggccggaaauucgucauugugcccugugagcggaugggcgauauacaguaaggacaacuccguuaggauuggcucuaaaggugauguguuugucauccgggagccauucauuagcuguuccccguuagaaugccgcaccuuuuuccugacacagggggcucuacucaaugacaagcacucaaacggaaccaucaaagaucgaagucccuaucguacucugaugagcuguccuaucggcgaggugccaucucccuacaacuccagauuugaaucaguagccuggagcgcaagugccugccaugacggcauuaauuggcuuacaauagggaucucuggaccugauaacggugcuguugcagugcugaaguauaauggcauuaucaccgacacgauaaaguccuggaggaacaauauuuugcggacucaagagagcgagugugccugcgucaacgggucguguuucaccgugaugacagauggaccaucuaauggccaggcuuccuacaaaaucuuucgcaucgaaaaggguaaaauugugaagucagucgagaugaacgcccccaauuaucacuacgaagagugcaguuguuacccugacagcuccgagaucacuugcguuugcagagauaacuggcaugggucuaauaggccaugggugagcuucaaccagaaucucgaauaucagauuggauacauauguucaggcaucuuuggcgacaacccgcggcccaaugauaaaaccgggaguugcggaccuguauccagcaacggugcgaacggcgugaagggguucucuuuuaaguauggaaauggcgucuggauuggucgcacaaaaucaaucaguagccgaaacggguucgagaugaucugggacccaaauggcuggaccggaacggauaacaauuuuuccauuaagcaagacauagugggcaucaacgaauggucuggguacucggggagcuucguucagcaccccgagcugacuggucuggacuguauuagaccuugcuucuggguggaacucaucaggggccggccaaaagagaauacaauuuggaccuccgggucaaguaucucuuuuuguggagucaacagcgauacugugggcugguccuggcccgacggugcagaguuaccguucacaauagauaaguga

SEQ ID NO: 144825 - RNA, 1410 nt, Artificial Sequence; identical to SEQ ID NO: 144786
  derived and/or modified CDS sequence (opt3) from neuraminidase__InfluenzaA__ACQ89920

SEQ ID NO: 144826 - RNA, 1410 nt, Artificial Sequence; identical to SEQ ID NO: 144786
  derived and/or modified CDS sequence (opt3) from neuraminidase__InfluenzaA__ACQ89921

SEQ ID NO: 144827 - RNA, 1410 nt, Artificial Sequence; identical to SEQ ID NO: 144776
  derived and/or modified CDS sequence (opt3) from neuraminidase__InfluenzaA__ACQ89922

SEQ ID NO: 144828 - RNA, 1410 nt, Artificial Sequence; identical to SEQ ID NO: 144786
  derived and/or modified CDS sequence (opt3) from neuraminidase__InfluenzaA__ACQ89923

SEQ ID NO: 144829 - RNA, 1410 nt, Artificial Sequence; identical to SEQ ID NO: 144776
  derived and/or modified CDS sequence (opt3) from neuraminidase__InfluenzaA__ACQ99623

SEQ ID NO: 144830 - RNA, 1410 nt, Artificial Sequence; identical to SEQ ID NO: 144786
  derived and/or modified CDS sequence (opt3) from neuraminidase__InfluenzaA__ACQ99624

SEQ ID NO: 144831 - RNA, 1410 nt, Artificial Sequence; identical to SEQ ID NO: 144776
  derived and/or modified CDS sequence (opt3) from neuraminidase__InfluenzaA__ACQ99626

SEQ ID NO: 144832 - RNA, 1410 nt, Artificial Sequence; identical to SEQ ID NO: 144776
  derived and/or modified CDS sequence (opt3) from neuraminidase__InfluenzaA__ACQ99627

SEQ ID NO: 144833 - RNA, 1410 nt, Artificial Sequence; identical to SEQ ID NO: 144776
  derived and/or modified CDS sequence (opt3) from neuraminidase__InfluenzaA__ACQ99628

SEQ ID NO: 144834 - RNA, 1410 nt, Artificial Sequence; identical to SEQ ID NO: 144776
  derived and/or modified CDS sequence (opt3) from neuraminidase__InfluenzaA__ACQ99629

SEQ ID NO: 144835 - RNA, 1410 nt, Artificial Sequence; identical to SEQ ID NO: 144776
  derived and/or modified CDS sequence (opt3) from neuraminidase__InfluenzaA__ACQ99630

SEQ ID NO: 144836 - RNA, 1410 nt, Artificial Sequence; identical to SEQ ID NO: 144786
  derived and/or modified CDS sequence (opt3) from neuraminidase__InfluenzaA__ACQ99632

SEQ ID NO: 144837 - RNA, 1410 nt, Artificial Sequence; identical to SEQ ID NO: 144786
  derived and/or modified CDS sequence (opt3) from neuraminidase__InfluenzaA__ACQ99633

SEQ ID NO: 144838 - RNA, 1410 nt, Artificial Sequence; identical to SEQ ID NO: 144776
  derived and/or modified CDS sequence (opt3) from neuraminidase__InfluenzaA__ACQ99635

SEQ ID NO: 144839 - RNA, 1410 nt, Artificial Sequence; identical to SEQ ID NO: 144776
  derived and/or modified CDS sequence (opt3) from neuraminidase__InfluenzaA__ACQ99636

SEQ ID NO: 144840 - RNA, 1410 nt, Artificial Sequence
  derived and/or modified CDS sequence (opt3) from neuraminidase__InfluenzaA__ACQ99684
augaaccccaaucagaagaucauuaccauaggcagcgugugcaugacaaucgggauggccaaccugauucuccaaaucggaaauauuaucuccauauggaucucucacucaauucagcuugguaaccagaaucagaucgagacuuguaaccaaagugucauuacguacgaaaauaacaccuggguuaaucagacauaugugaacaucagcaauacuaacuucgcugcaggccaguccguagugucugucaaacuggccggaaauucgucauugugcccugugagcgggugggcgauauacaguaaggacaacuccauuagaaucggcucuaaaggugauguuuuugugauuagggagccauucaucagcuguuccccguuagaaugccggaccuuuuuccugacacagggggcucuacucaaugacaagcauucaaacggaaccaucaaagaucgcagucccuaucgaacucugaugagcuguccuauuggcgaggucccaucucccuacaacucccguuuugaaucaguggccuggagcgcaagugccugccacgacggcauaaauuggcuuacaaucgggauuucuggaccugauaacggugcuguagcaguucugaaguauaauggcaucauaaccgacacgauuaaguccuggagaaacaauaucuugaggacucaagagagcgagugugccugcgugaacgggucguguuucaccgucaugacagauggaccaucugacgaacaggcuuccuacaaaaucuuucggauugagaagggcaaaaucgugaagucaguggaaaugaaugcccccaacuaucauuacgaggagugcaguuguuacccugauagcuccgaaauuacuugcgucugccgcgacaauuggcacgguucuaacagaccauggguuagcuucaaucagaaccucgaguaucagauaggguacaucuguucaggaauuuuuggcgauaauccgaggcccaacgacaaaaccggcaguugcgggccuguguccagcaauggagcgaacgguguaaagggcuucucuuuuaaguaugggaacggaguguggaucggccggacaaaaucaaucaguagccgcaaugguuucgaaaugauuugggauccaaacggguggaccggcacggacaauaacuuuuccauaaagcaagacaucgucggaauuaaugaguggucuggcuacucggggagcuucgugcagcaucccgaacugacuggacuggauuguauccgaccuugcuucuggguugagcucauuagagguaggccaaaagagaacacaaucuggaccuccggcucaaguauaucuuuuuguggggugaauagcgacacugucggaugguccuggcccgauggcgcagaauuaccguucacaaucgacaaguga

SEQ ID NO: 144841 - RNA, 1410 nt, Artificial Sequence
  derived and/or modified CDS sequence (opt3) from neuraminidase__InfluenzaA__ACQ99824
augaacaccaaucagagaaucauuacaauaggcacuaucugccugauuguggggaucauuagccuccuucugcaaaucggaaacauaaucuuguuauggaugucccacucuauucagacgggugagaagucacaucccaaaguguguaaucagaguguuaucaccuacgaaaacaauacaugggugaaccagacuuauguaaauauuagcaacaccaauaucgccgcuggccaaggggugacaccuauaauucuggcaggaaacuccucucuaugcccaaucucgggcugggccauuuacucaaaggacaauagcaucaggaucgguaguaaaggggauauuuucgucaugcgggagccguuuauauccuguucucaccucgaaugccgcaccuucuuucugacucagggagcgcuucugaacgaccgacauagcaauggcacagugaaggaucguucccccuauagaaccuugaugucauguccuaucggcgaggcuccaagucccuacaacagcagguucgaaucuguugccugguccgcaucagccugccacgacgggaugggauggcucacgauugguaucagcggcccugauaauggggcuguggcaguccugaaauauaacggaauaauuacugacaccaucaagaguuggcggaacaagauccugcgcacacaggagucugagugugugugcauuaauggcuccuguuuuacuaucaugaccgaugguccaagcaacgggcaggccucguacaaacucuucaagauggaaaaaggaaagauuauaaaaucuaucgaguuagacgcucccaauuaucauuacgaagagugcuccuguuacccugauacaggcaagguaguuugcgugugcagagacaacuggcacgccucaaauaggccaugggucaguuuugaucaaaaccuggacuaucagauuggcuacaucuguagcgggguguucggagauaauccgcgguccaacgacgguaagggcaauugcgggcccgugcuuucuaacggagcgaauggcgucaaagguuuuagcuuccgcuaugggaacggcguuuggaucggacgaaccaagucaauuaguuccagaagcggcuuugagaugauaugggacccuaauggguggacggaaacugauucuucauucaguaugaaacaggacaucauugcauugacagauuggagcggauacuccgguucuuuugugcagcacccagagcugaccggcaugaacuguaucaggcccugcuucuggguagaacuaauucgggggcaaccuaaggagucgacuaucuggacaagcggauccucaauaaguuucuguggcgucaauucugguaccgccagcugguccuggccagacggggcugaucuccccuuuacgaucgacaaauga

SEQ ID NO: 144842 - RNA, 1410 nt, Artificial Sequence; identical to SEQ ID NO: 144786
  derived and/or modified CDS sequence (opt3) from neuraminidase__InfluenzaA__ACR01015

SEQ ID NO: 144843 - RNA, 1410 nt, Artificial Sequence; identical to SEQ ID NO: 144786
  derived and/or modified CDS sequence (opt3) from neuraminidase__InfluenzaA__ACR08422

SEQ ID NO: 144844 - RNA, 1410 nt, Artificial Sequence; identical to SEQ ID NO: 144786
  derived and/or modified CDS sequence (opt3) from neuraminidase__InfluenzaA__ACR08432

SEQ ID NO: 144845 - RNA, 1410 nt, Artificial Sequence; identical to SEQ ID NO: 144786
  derived and/or modified CDS sequence (opt3) from neuraminidase__InfluenzaA__ACR08442

SEQ ID NO: 144846 - RNA, 1410 nt, Artificial Sequence; identical to SEQ ID NO: 144786
  derived and/or modified CDS sequence (opt3) from neuraminidase__InfluenzaA__ACR08452

SEQ ID NO: 144847 - RNA, 1410 nt, Artificial Sequence
  derived and/or modified CDS sequence (opt3) from neuraminidase__InfluenzaA__ACR08462
augagccccaaccagaagaucauuaccauaggcuccgugugcaugacaaucgggauggccaaucugauucuccaaaucggaaacauuaucucuauauggaucucacacaguauucagcuugguaaucagaaccagaucgagacuuguaaucaaagcgucauuacguacgaaaacaauaccuggguuaaccagacauaugugaauaucuccaacacuaauuucgcugcaggccagucuguagugucggucaaacuggccgggaacagcucauugugcccugugaguggaugggcgauauacuccaaggacaauucuguuagaauuggcagcaaaggugauguguuugucaucagggagccauucauuuccuguucaccguuagaaugccggaccuuuuuccugacacagggggcucuacucaacgacaagcauaguaauggaaccaucaaagaucgcagccccuaucgaacucugaugucuuguccuaucggcgaggugccaucccccuacaacucacguuuugaaagcguagccuggagugcaucugccugccacgacggcauuaacuggcuuacaauagggaucuccggaccugauaauggugcuguugcagugcugaaguauaacggcauuaucaccgacacgauaaagagcuggagaaauaacauuuugaggacucaagagucggagugugccugcgucaaugggucuuguuucaccgugaugacagauggaccauccaacggccaggcuucauacaaaaucuuucggaucgaaaaggguaaaauugugaagagugucgagaugaaugcccccaacuaucauuacgaagagugcagcuguuacccugacuccucugagaucacuugcguuugccgcgauaauuggcacgggagcaacagaccaugggugucauucaaucagaaccucgaauaucagauuggauacauauguaguggcaucuuuggcgacaauccgaggcccaacgauaaaaccggguccugcggaccuguaagcucuaauggugcgaacggcgugaagggguucucauuuaaguauggaaacggcgucuggauuggucggacaaaaaguaucagcucccgcaauggguucgagaugaucugggacccaaacggcuggaccggaacggauaauaacuuuucuauuaagcaagacauagugggcaucaaugaauggucgggguacagcggauccuucguucagcaucccgagcugacuggucuggacuguauucgaccuugcuucuggguggaacucaucagaggcaggccaaaagagaacacaauuuggaccucagggaguucuaucagcuuuuguggagucaauuccgauacugugggcuggucauggcccgacggugcagaguuaccguucacaauagauaaguga

SEQ ID NO: 144848 - RNA, 1410 nt, Artificial Sequence
  derived and/or modified CDS sequence (opt3) from neuraminidase__InfluenzaA__ACR08565
augaaccccaaucagaagaucauuaccauaggcagcgugugcaugacaaucgggauggccaaccugauucuccaaaucggaaauauuaucuccauauggaucucucacucaauucagcuugguaaccagaaucagaucgagacuuguaaccaaagugucauuacguacgaaaauaacaccuggguuaaucagacauaugugaacaucagcaauacuaacuucgcugcaggccaguccguagugccugucaaacuggccggaaauucuucguugugcccagugucagggugggcgauauacagcaaggacaacaguguuagaauuggcuccaaaggugauguguuugucaucagggagccguucauuucuuguagccccuuagaaugccggaccuuuuuccugacacagggggcucuacucaaugacaagcauuccaacggaaccaucaaagaucgcucaccuuaucgaacucugaugaguuguccaaucggcgaggugcccagcccuuacaacucucguuuugaauccguagccuggucagcaagcgccugccacgacggcauuaauuggcuuacaauagggaucaguggaccagauaacggugcuguugcagugcugaaguauaauggcauuaucaccgacacgauaaagucuuggagaaacaauauuuugaggacucaagaguccgagugugccugcgucaacgggagcuguuucaccgugaugacagauggacccucgaauggccaggcuucuuacaaaaucuuucggaucgaaaaggguaaaauugugaaguccgucgagaugaacgccccuaauuaucauuacgaagagugcucauguuacccagacaguagcgagaucacuugcguuugccgcgauaacuggcacggguccaauagaccgugggugucuuucaaccagaaucucgaauaucagauuggauacauauguagcggcaucuuuggcgacaaccccaggccuaaugauaaaaccgggucaugcggaccaguaaguuccaacggugcgaacggcgugaagggguucagcuuuaaguauggaaauggcgucuggauuggucggacaaaaucuaucucaagucgcaacggguucgagaugaucugggaccccaauggcuggaccggaacggauaacaauuuuagcauuaagcaagacauagugggcaucaacgaaugguccggguacucuggaucguucguucagcauccugagcugacuggucuggacuguauucgaccaugcuucuggguggaacucaucagaggcaggcccaaagagaauacaauuuggaccagcggguccucaaucaguuuuuguggagucaacucugauacugugggcuggagcuggccggacggugcagaguuaccuuucacaauagauaaguga

SEQ ID NO: 144849 - RNA, 1410 nt, Artificial Sequence; identical to SEQ ID NO: 144776
  derived and/or modified CDS sequence (opt3) from neuraminidase__InfluenzaA__ACR08566

SEQ ID NO: 144850 - RNA, 1410 nt, Artificial Sequence; identical to SEQ ID NO: 144786
  derived and/or modified CDS sequence (opt3) from neuraminidase__InfluenzaA__ACR08567

SEQ ID NO: 144851 - RNA, 1410 nt, Artificial Sequence; identical to SEQ ID NO: 144776
  derived and/or modified CDS sequence (opt3) from neuraminidase__InfluenzaA__ACR08568

SEQ ID NO: 144852 - RNA, 1410 nt, Artificial Sequence; identical to SEQ ID NO: 144776
  derived and/or modified CDS sequence (opt3) from neuraminidase__InfluenzaA__ACR08569

SEQ ID NO: 144853 - RNA, 1410 nt, Artificial Sequence; identical to SEQ ID NO: 144786
  derived and/or modified CDS sequence (opt3) from neuraminidase__InfluenzaA__ACR08570

SEQ ID NO: 144854 - RNA, 1410 nt, Artificial Sequence; identical to SEQ ID NO: 144776
  derived and/or modified CDS sequence (opt3) from neuraminidase__InfluenzaA__ACR08571

SEQ ID NO: 144855 - RNA, 1410 nt, Artificial Sequence; identical to SEQ ID NO: 144776
  derived and/or modified CDS sequence (opt3) from neuraminidase__InfluenzaA__ACR08572

SEQ ID NO: 144856 - RNA, 1410 nt, Artificial Sequence; identical to SEQ ID NO: 144776
  derived and/or modified CDS sequence (opt3) from neuraminidase__InfluenzaA__ACR08573

SEQ ID NO: 144857 - RNA, 1410 nt, Artificial Sequence; identical to SEQ ID NO: 144776
  derived and/or modified CDS sequence (opt3) from neuraminidase__InfluenzaA__ACR08574

SEQ ID NO: 144858 - RNA, 1410 nt, Artificial Sequence; identical to SEQ ID NO: 144786
  derived and/or modified CDS sequence (opt3) from neuraminidase__InfluenzaA__ACR08576

SEQ ID NO: 144859 - RNA, 1410 nt, Artificial Sequence; identical to SEQ ID NO: 144776
  derived and/or modified CDS sequence (opt3) from neuraminidase__InfluenzaA__ACR08577

SEQ ID NO: 144860 - RNA, 1410 nt, Artificial Sequence; identical to SEQ ID NO: 144776
  derived and/or modified CDS sequence (opt3) from neuraminidase__InfluenzaA__ACR09378

SEQ ID NO: 144861 - RNA, 1410 nt, Artificial Sequence; identical to SEQ ID NO: 144776
  derived and/or modified CDS sequence (opt3) from neuraminidase__InfluenzaA__ACR09379

SEQ ID NO: 144862 - RNA, 1410 nt, Artificial Sequence; identical to SEQ ID NO: 144786
  derived and/or modified CDS sequence (opt3) from neuraminidase__InfluenzaA__ACR09380

SEQ ID NO: 144863 - RNA, 1410 nt, Artificial Sequence; identical to SEQ ID NO: 144776
  derived and/or modified CDS sequence (opt3) from neuraminidase__InfluenzaA__ACR09381

SEQ ID NO: 144864 - RNA, 1410 nt, Artificial Sequence; identical to SEQ ID NO: 144776
  derived and/or modified CDS sequence (opt3) from neuraminidase__InfluenzaA__ACR09382

SEQ ID NO: 144865 - RNA, 1410 nt, Artificial Sequence; identical to SEQ ID NO: 144786
  derived and/or modified CDS sequence (opt3) from neuraminidase__InfluenzaA__ACR09383

SEQ ID NO: 144866 - RNA, 1410 nt, Artificial Sequence; identical to SEQ ID NO: 144776
  derived and/or modified CDS sequence (opt3) from neuraminidase__InfluenzaA__ACR09384

SEQ ID NO: 144867 - RNA, 1410 nt, Artificial Sequence; identical to SEQ ID NO: 144786
  derived and/or modified CDS sequence (opt3) from neuraminidase__InfluenzaA__ACR09385

SEQ ID NO: 144868 - RNA, 1410 nt, Artificial Sequence; identical to SEQ ID NO: 144776
  derived and/or modified CDS sequence (opt3) from neuraminidase__InfluenzaA__ACR09386

SEQ ID NO: 144869 - RNA, 1410 nt, Artificial Sequence; identical to SEQ ID NO: 144786
  derived and/or modified CDS sequence (opt3) from neuraminidase__InfluenzaA__ACR10189

SEQ ID NO: 144870 - RNA, 1410 nt, Artificial Sequence; identical to SEQ ID NO: 144786
  derived and/or modified CDS sequence (opt3) from neuraminidase__InfluenzaA__ACR10226

SEQ ID NO: 144871 - RNA, 1410 nt, Artificial Sequence; identical to SEQ ID NO: 144776
  derived and/or modified CDS sequence (opt3) from neuraminidase__InfluenzaA__ACR10236

SEQ ID NO: 144872 - RNA, 1410 nt, Artificial Sequence; identical to SEQ ID NO: 144776
  derived and/or modified CDS sequence (opt3) from neuraminidase__InfluenzaA__ACR10237

SEQ ID NO: 144873 - RNA, 1410 nt, Artificial Sequence
  derived and/or modified CDS sequence (opt3) from neuraminidase__InfluenzaA__ACR15186
augaaccccaaucagaagaucauuaccauaggcagcgugucccugacaaucucuacuauuugcuucuuuaugcaaaucgccauucucaucacgaccgucacacuucacuucaaacaguacgaguuuaacucaccuccaaauaaccagguuaugcugugugaaccgacuauaaucgagagaaauauuaccgaaaucguguauuugacaaacaccacuauugagaaggaaaucugccccaaauuagcugaguacaggaaguggaguaaaccucaguguaauauaacaggguucgcaccauuuagcaaggacaacuccauucggcugucugccggaggugauaucuggguaacccgcgagcccuaugugucgugcgacccugauaaguguuaccaauucgcgcuaggccaggggacgacucucaauaacguccauucaaaugacaccgugcgagaucguacaccauauagaacucugcuuaugaacgaacugggaguucccuuucacuugggcaccaaacaggugugcauugcuuggagcaguuccucuugucaugacgguaaggccuggcuccacgucugcgugacaggggaugacaaaaaugcaaccgccagcuucaucuacaacggaaggcugguagauuccaucguuucauggaguaaggagauucugcggacgcaggaaagcgagugugugugcauaaauggcacuuguacagucgugaugaccgacggcucugcuuccgggaaagcagauacuaagauccucuuuauugaggaaggaaagaucgugcauacaucaaccuuaagcgguagugcccaacacgucgaggaaugcucuugcuauccucgccacccaggcguuagaugugugugcagggacaacuggcggggguccaaccgcccgauaguagauauuaauaugaaagacuacagcaucgugucgucuuacgucuguuccggacuggugggcgacacgccccgaaagaacgauucaaguagcuccggucauugccuugacccuaauaacgaggaagggggacacggcguuaaaggcugggcuuucgaugacgggaaugauguguggaugggaagaaccaucucugagaaguugaggagcgguuaugagacauuuaaagucauugaaggcuggucaaacccaaauaguaagcugcagaucaaccgucaggugauuguagaccgggggaaucgcuccggauacagcggcauauucucuguugaggguaaaucauguaucaacagaugcuuuuauguggaacuaauuagggggcggaaggaggaaacugagguccucuggaccaguaauagcaucguggucuucuguggcacauccggaacuuacggcaccgggucuuggcccgauggagccgacaucaaccugaugccuauuuga

SEQ ID NO: 144874 - RNA, 1413 nt, Artificial Sequence; identical to SEQ ID NO: 144680
  derived and/or modified CDS sequence (opt3) from neuraminidase__InfluenzaA__ACR15197

SEQ ID NO: 144875 - RNA, 1410 nt, Artificial Sequence
  derived and/or modified CDS sequence (opt3) from neuraminidase__InfluenzaA__ACR15208
augaaccccaaucagaagaucauuaccauaggcagcgugucccugacaaucucuacuauuugcuucuuuaugcaaaucgccauucucaucacgaccgucacacuucacuucaaacaguacgaguuuaacucaccuccaaauaaccagguuaugcugugugaaccgacuauaaucgagagaaauauuaccgaaaucguguauuugacaaacaccacuauugagaaggaaaucugccccaaauuagcugaguacaggaauuggaguaagccucagugugacauaacaggguucgcaccauuuagcaaagauaacuccauucggcugucugccggaggugacaucuggguaacccgcgagcccuaugugucgugcgauccugacaaguguuaccaauucgcgcuaggccaggggacgacucucaauaacguccauucaaaugauaccgugcgagaccguacaccauauagaacucugcuuaugaacgaacugggaguucccuuucacuugggcaccaaacaggugugcauugcuuggagcaguuccucuugucaugaugguaaggccuggcuccacgucugcaucacaggggacgauaagaaugcaaccgccagcuucaucuacaacggaaggcugguggacuccauuguaucauggaguaaagagauacugcggacgcaggaaagcgaguguguuugcaucaauggcacuuguacaguggucaugaccgauggcucugcuuccgggaaggcagacacuaaaauucucuuuaucgaggaaggaaagauagugcauacaucaaccuuaagcgguagugcccaacacguggaggaaugcucuugcuauccucgcuacccaggcgucagauguguuugcagggauaacuggaagggguccaaccggccgauuguggacaucaauaucaaagaccacagcauuguaucgucuuacguguguuccggacuggucggcgauacgccccgcaagaacgacucaaguagcuccucucauugccuugauccuaauaacgaggaaggugggcacggagugaaaggcugggcuuucgacgauggcaaugacguuuggauggggcgaaccaucagcgagaagucaagauugggauaugagacauuuaaagugauugaagguuggaguaacccaaaguccaaacugcagauaaauaggcaggucaucguggauaagggcaaccggagcggguacucuggaauuuucucaguagagggcaagaguuguaucaaucguugcuuuuauguugaacuaauccgcgguagaaaagaggaaacugaggugcucuggaccagcaacuccauugucguguucugugggacaucuggcacuuacggaaccggcucguggcccgacggggccgauauaaaucugaugccuaucuga

SEQ ID NO: 144876 - RNA, 1410 nt, Artificial Sequence
  derived and/or modified CDS sequence (opt3) from neuraminidase__InfluenzaA__ACR15230
auggaccccaaccagaagaucauuaccauaggcagcgugucccugacaaucucugccauuugcuucuuuaugcaaaucgcuauucucaucacuacggucacccuucacuucaaacaguacgaguuuaauucaccuccaaacaaucagguuaugcugugugaaccgacaauaaucgagagaaacauuacugaaaucguguauuugaccaauacaaccauugagaaggaaaucugccccaaauuagcagaguacaggaacuggaguaagccucaguguaauauaacuggguucgccccauuuagcaaagauaacuccauucggcugucugcgggaggugacaucuggguaacacgcgagcccuaugugucgugcgauccugacaaguguuaccaauucgcucuaggccaggggaccacgcucaauaacguccauucaaaugauacugugcacgaccgaaccccauaucguacacugcuuaugaacgaacugggaguucccuuucauuugggcacuaaacaggugugcauugccuggagcaguuccucuugucacgaugguaaggcauggcuccaugucugcgugaccggggacgaugagaaugccacagcuagcuucaucuacaacggaagacugguagacuccguugugucauggaguaagaaaauccugaggacccaggaaagcgagugugucugcauuaauggcacguguacuguggugaugacagauggcucugcauccgggaaggccgacaccaaaauacucuuuaucgaggaaggaaagauuguccacacuucaacauuaagcgguagugcucaacacguugaggaaugcucuugcuauccucgguacccaggcgugcgcuguguaugcagagauaacuggaagggguccaacaggccgaucguggacauaaauauuaaagacuacagcaucgucucgucuuauguguguuccggacugguuggcgauacuccccggaagaacgacucaaguagcaauucccauugccuugauccuaacaaugaggaaggugggcacggagugaaaggcugggccuucgacgauggcaacgacgucuggauggggcgcacgaucucugagaaguugcgaagcggauacgagaccuuuaaagugauugaagguuggucaaauccaaacaguaagcugcagaucaauagacagguaauuguugauaggggcaaccgguccggguauagcggaauauucucuguggagggcaaaucauguaucaaucguugcuuuuacgucgaacuaauucgcgguagaaaccaggagacagaagugcucuggaccaguaauagcaucgucguguucugugggaccuccggcacauauggaacuggcucuuggcccgacggggcggauaucaaccugaugccuauuuga

SEQ ID NO: 144877 - RNA, 1413 nt, Artificial Sequence; identical to SEQ ID NO: 144680
  derived and/or modified CDS sequence (opt3) from neuraminidase__InfluenzaA__ACR15241

SEQ ID NO: 144878 - RNA, 1410 nt, Artificial Sequence; identical to SEQ ID NO: 143932
  derived and/or modified CDS sequence (opt3) from neuraminidase__InfluenzaA__ACR15252

SEQ ID NO: 144879 - RNA, 1413 nt, Artificial Sequence
  derived and/or modified CDS sequence (opt3) from neuraminidase__InfluenzaA__ACR15263
augaaccccaaucagaagaucauuaccauaggcagcaucuccauugccaucgggauuaucucucugaugcuccaaauaggaaacaucauuucaaucugggcuagucacagcauucagacagguucccagaauaacacuggcaucugcaaucagagaauaauuacguacgagaacucuaccugggugaaucauacauaugucaacaucaauaacacuaauguuguggcaggggaagacaaaaccucgguaacacuugccggaaacucaagccuguguaguauuuccggcugggcgaucuacaccaaggauaauucuaucaggauugguagcaaaggggacguguucgucauacgggagccuuuuaucuccugcucacacuuggaaugucgcacuuucuuuuuaacacaaggagcucugcuaaacgauaagcauaguaauggcaccgugaaagaccgaagcccauaucgugcccucaugucuugcccgcugggcgaggcacccuccccuuacaacucaaaguucgaaagcguugccuggagugcuucugcaugucacgaugggaugggauggcuuacgauugguaucuccggcccagacaacggggccguggcuguccugaaguauaauggaauaauuacuggcaccaucaaaagcuggaagaaacagaucuugagaacacaggagucggagugcguguguaugaacgguucuugcuuuacuauuaugaccgaugggcccuccaauaaggccgcgucauacaaaaucuucaagauugaaaagggaaaaguaacaaagaguauagagcucaacgcaccuaauuuucauuaugaagaguguagcugcuacccagacaccggcaucguuaugugugugugcagggauaacuggcacggcuccaaucggcccugggucucuuucaaccagaaucuggacuaccaaauuggguauaucugcagcggaguguuuggugauaacccucgcccagaggacggcgaagggucauguaauccggugacggucgauggagccaacggcguuaaagguuucaguuacaaguaugacaaugggguguggaucggcagaacuaaauccaacaggcugcggaagggauuugagaugauuugggaccccaauggcuggacaaacaccgauagcgacuucucuguaaaacaggauguggucgcuauaacugacuggucaggguacagugguagcuuugugcagcacccugaacucacaggauuagauugcauccgcccauguuucuggguugagcuggugcgaggccuucccagagaaaacaccacgauuugguccucugggucgagcaucuccuucugcggagucaauucagacaccgccaacuggaguuggccugauggcgcagaguugccauuuacaauugacaaguga

SEQ ID NO: 144880 - RNA, 1413 nt, Artificial Sequence; identical to SEQ ID NO: 144680
  derived and/or modified CDS sequence (opt3) from neuraminidase__InfluenzaA__ACR15274

SEQ ID NO: 144881 - RNA, 1413 nt, Artificial Sequence
  derived and/or modified CDS sequence (opt3) from neuraminidase__InfluenzaA__ACR15307
augaaccccaaucagaagaucauuaccauaggcagcaucuccauuacaaucgggauuaucucucugaugcuccaaauaggaaacaucauuucaaucugggccagucacagcauucagacugguucccagaaucauacgggcaucugcaaccagagaauaauuaccuacgagaauaacacaugggugaaucacacuuaugucaacaucaauaacaccaauguuguggcugggaaagacaagacaucuguaacccuugcaggaaacucgucacuguguagcauuaguggcugggccaucuacacuaaagauaauuccaucaggauugguucuaagggggacguguucgucauacgggaaccuuuuaucagcugcucccauuuggagugucgcacauucuuuuuaacccaaggagcgcugcuaaacgauaaacacucaaauggcacggugaaggaccgaaguccauaucgugcucucaugagcugcccgcugggcgaagcccccucuccuuacaacuccaaguucgagucaguugcauggagcgccagugcuugucaugaugggaugggauggcuuacuauugguaucucuggcccagacaacggggcaguggccguccugaaauauaauggaauaauuaccgaaacaaucaaguccuggaaaaagagaaucuugaggacucaggagagcgagugcguguguguaaacggcucgugcuuuaccauuaugacagauggucccucuaauggggcugccuccuacaaaaucuucaagauugaaaagggaaaaguuaccaagucaauagagcucaacgcgccuaauuuucacuaugaagaguguaguugcuacccagacacgggcacugugaugugugucugccgggauaacuggcacggcagcaaucgccccuggguguccuucaaccagaaucuggacuaccagaucggguauauuugcucuggaguguuuggugauaacccuagaccaaaagacggcgaggggagcuguaauccggucacaguugauggagcagacggcgugaaggguuucucauacaaauaugggaacggcguauggaucggaaggaccaagaguaaucggcugcgcaaaggcuuugaaaugaucugggaccccaacggguggacugauacagacuccgauuucagcgugaagcaagacgucguggccauuaccgauuggucuggauacucagguaguuuuguucagcauccugagcucacgggcuuagacugcauacgaccauguuucuggguggaacuggucagagggcuucccagggagaauaccacaaucuggacuagcggauccucuauuucguucugcggcgugaacagcgauaccgcuaacugguccuggccugacggugccgaauugccauuuacaaucgauaaguga

SEQ ID NO: 144882 - RNA, 1413 nt, Artificial Sequence
  derived and/or modified CDS sequence (opt3) from neuraminidase__InfluenzaA__ACR15318
augaaccccaaucagaagaucauuaccauaggcagcaucuccauugccaucgggauuaucucucugaugcuccaaauaggaaacaucauuucaaucugggcuagucacagcauucagacagguucccagaaucauacuggcgugugcaaccagagaaucauaacguacgaaaauucuaccugggucaaccacacauauguuaauauuaacaauacuaacgugaucgcagggaaagacaagaccucgguaacacuugccggaaauucaagccuguguaguauuuccggcugggcgaucuacaccaaagauaacucuaucaggauugguagcaagggggacguguucgucauacgggagccuuuuaucuccugcucacauuuggagugucgcacuuucuuuuuaacacaaggagcucugcuaaaugauaaacacaguaacggcaccgugaaggaccgaagcccauaucgugcccucaugucuugcccgcugggcgaagcacccuccccuuacaauucaaaguucgagagcguugccuggagugcuucugcaugucaugaugggaugggauggcuuacgauugguaucuccggcccagacaacggggccguggcuguccugaaauauaacggaauaauuacugaaaccaucaagagcuggaaaagacagaucuugaggacacaggagucggagugcguguguguaaauggcucuugcuuuacuauuaugaccgauggucccuccaacggggccgcgucauacaagaucuucaaaauugaaaagggaaagguuacaaaaaguauagagcucaaugcaccuaacuuucacuaugaagaguguagcugcuacccagacaccggcacggugaugugugucugccgggauaauuggcacggcuccaaccgccccugggugucuuucaaucagaaccuggacuaccaaaucggguauauuugcagcggaguguuuggugauaauccuagaccaaaggacggcgaggggucauguaacccggucacuguugauggagccaauggcgugaaagguuucaguuacaaguaugggaacggcguauggaucggaaggacaaaauccaaucggcugcgcaagggcuuugaaaugaucugggaccccaacggguggaccgacacugauagcgacuucucugugaaacaggaugucguggcuauuacagacuggucaggauacagugguagcuuuguucagcauccugagcucaccggcuuagauugcauacgaccauguuucuggguggaacuggucagagggcuucccaaggagaauacgaccaucuggacauccggaucuucgauuagcuucugcggcgugaacuccgacacugccaacuggucauggccugauggugcagaauugccauuuaccaucgacaaguga

SEQ ID NO: 144883 - RNA, 1413 nt, Artificial Sequence
  derived and/or modified CDS sequence (opt3) from neuraminidase__InfluenzaA__ACR15329
augaaccccaaucagaagaucauuaccauaggcagcaucuccauugccaucgggauuaucucucugaugcuccaaauaggaaacaucauuucaaucugggcuagucacagcauucagacaagaucccagaaucauacuggugugugcaaccagaggaucauaacguacgaaaauucuaccugggucaaccacacauauguuaauauuaacaauacuaacgugaucgcaggcaaagacaagaccucgguaacacuugccggaaauucaagccuguguaguauuuccggaugggcgaucuacaccaaagauaacucuauccggauuggcagcaagggugacguguucgucauacgcgagccuuuuaucuccugcucacauuuggagugucgaacuuucuuuuuaacacaaggggcucugcuaaaugauaaacacaguaacggaaccgugaaggaccguagcccauauagagcccucaugucuugcccgcugggcgaagcacccuccccuuacaauucaaaguucgagagcguugccuggagugcuucugcaugucaugauggcaugggguggcuuacgauuggaaucuccgguccagacaacggcgccguggcuguccugaaauauaacgggauaauuacugaaaccaucaagagcuggaaaaagcagaucuugaggacacaggagucggagugcguguguguaaauggaucuugcuuuacuauuaugaccgauggccccuccaacggugccgcgucauacaaaaucuucaagauugaaaaggggaaaguuacaaagaguauagagcucaaugcaccuaacuuucacuaugaagaguguagcugcuacccagacaccggaacggugaugugugucugccgggauaauuggcacggcuccaaccgccccugggugucuuucaaucagaaccuggacuaccaaaucggcuauauuugcagcgggguguuuggagauaauccuagaccaaaagacggugagggcucauguaacccggucacuguugauggggccaauggagugaagggcuucaguuacaaauaugguaacgggguauggaucggcaggacaaaguccaaucggcugcgcaaaggauuugaaaugaucugggaccccaacggcuggaccgacacugauagcgacuucucugugaagcaggaugucguggcuauuacagacuggucaggguacagugggagcuuuguucagcauccugagcucaccgguuuagauugcauacgaccauguuucuggguggaacuggucagaggccuucccaaggagaauacgaccaucuggacauccgggucuucgauuagcuucugcggagugaacuccgacacugccaacuggucauggccugauggcgcagaauugccauuuaccaucgacaaauga

SEQ ID NO: 144884 - RNA, 1413 nt, Artificial Sequence; identical to SEQ ID NO: 144680
  derived and/or modified CDS sequence (opt3) from neuraminidase__InfluenzaA__ACR15340

SEQ ID NO: 144885 - RNA, 1413 nt, Artificial Sequence; identical to SEQ ID NO: 144680
  derived and/or modified CDS sequence (opt3) from neuraminidase__InfluenzaA__ACR15362

SEQ ID NO: 144886 - RNA, 1413 nt, Artificial Sequence; identical to SEQ ID NO: 144680
  derived and/or modified CDS sequence (opt3) from neuraminidase__InfluenzaA__ACR15373

SEQ ID NO: 144887 - RNA, 1413 nt, Artificial Sequence
  derived and/or modified CDS sequence (opt3) from neuraminidase__InfluenzaA__ACR15428
augaaccccaaucagaagaucauuaccauaggcagcaucuccauugccaucgggauuaucucucugaugcuccaaauaggaaacaucauuucaaucugggcuagucacagcauucagacagguucccagaauaacacuggcaucugcaaucagagaauaauuacguacgagaacucuaccugggugaaucauacauaugucaacaucaauaacacuaauguuguggcaggggaagacaaaaccucgguaacacuugccggaaacucaagccuguguaguguguccggcugggcgauuuacaccaaggauaauucuaucaggaucgguagcaaaggggacgucuucgugauucgggagccuuuuauauccugcucacacuuggaaugucgcacuuucuuuuuaacaaagggagcucugcuaaacgauaaacauaguaauggcaccguuaaggaccgaagcccauaucgugcccucaugucuugcccgcugggcgaggcacccuccccuuacaacucaaaguucgaaagcguggccuggagugcuucugcaugucacgaugggaugggauggcuuacgaucgguauuuccggcccagacaacggggccgucgcugugcugaaauauaauggaaucauaacuggcaccauuaagagcuggaaaaagcaaaucuugagaacacaggagucggagugcguauguaugaacgguucuugcuuuacuaucaugaccgaugggcccuccaauaaagccgcgucauacaagauuuucaagaucgaaaaaggaaagguuacaaaaaguauugagcucaacgcaccuaauuuucauuaugaagaguguagcugcuacccagacaccggcauagugaugugugucugcagggauaacuggcacggcuccaaucggcccugggugucuuucaaccagaaucuggacuaccagaucggguauauuugcagcggaguguuuggugauaacccucgcccagaggacggcgaagggucauguaauccggucacgguugauggagccaacggcgugaaggguuucaguuacaaauaugacaaugggguauggaucggcagaacuaaguccaacaggcugcggaaaggauuugagaugaucugggaccccaauggcuggacaaacaccgauagcgacuucucugugaagcaagaugucguggcuauuacugacuggucaggguacaguggauccuuuguucagcacccugaacucacagguuuagauugcauacgcccauguuucuggguggagcugguccgaggccuucccagagaaaacaccacgaucuggaccuccgggucuucgauuagcuucugcggagugaauagcgacacagccaacuggucauggccugauggcgcagaguugccauuuacuaucgacaaguga

SEQ ID NO: 144888 - RNA, 1413 nt, Artificial Sequence
  derived and/or modified CDS sequence (opt3) from neuraminidase__InfluenzaA__ACR15472
augaaccccaaucagaagaucauuaccauaggcagcaucuccauugccaucgggauuaucucucugaugcuccaaauaggaaacaucauuucaaucugggcuagucacagcauucagacagguucccagaauaacacuggcaucugcaaucagagaauaauuacguacgagaacucuaccugggugaaucauacauaugugaacaucaauaacacuaauguuguggcaggggaagacaaaaccccuguaacacuugccggaaacucgucacuguguagcauuaguggcugggcgaucuacaccaaggauaauuccaucaggauugguucuaaaggggacguguucgucauacgggagccauuuaucgcuugcagccacuuggaaugucgcacuuucuuuuuaacacaaggagcccugcuaaacgauaagcauuccaauggcaccgugaaagaccgaucaccguaucgugcacucaugaguugcccccugggcgaggccccuagcccauacaacucuaaguucgaauccguugcuuggucagcaagcgccugucacgaugggaugggauggcuuacgauugguaucaguggccccgacaacggggcuguggccguccugaaguauaauggaauaauuacuggcaccaucaaaucuuggaagaaacagaucuugagaacacaggaguccgagugcguguguaugaacgguagcugcuuuacuauuaugaccgaugggccuucgaauaaggcggcaucuuacaaaaucuucaagauugaaaagggaaaaguaacaaaguccauagagcucaacgccccaaauuuucauuaugaagaguguucaugcuaccccgacaccggcaucguuaugugugugugcagggauaacuggcacggcaguaaucggccuugggucagcuucaaccagaaucuggacuaccaaauuggguauaucugcuccggaguguuuggugauaacccacgcccggaggacggcgaagggucuuguaaucccgugacggucgauggagcuaacggcguuaaagguuucagcuacaaguaugacaaugggguguggaucggcagaacuaaaucaaacaggcugcggaagggauuugagguaauuugggacccuaauggcuggacaaacaccgauagugacuucuccgugaaacaggaugucguggccauaacugacuggagcggguacucuggaucauuuguucagcacccagaacucacagguuuagauugcauccgccccuguuucuggguggagcugguccgaggccuuccuagagaaaacaccacgauuuggaccagugggagcuccaucucuuucugcggagucaauucggacacagcaaacuggagcuggccagauggcgcugaguugcccuuuacuauugacaaguga

SEQ ID NO: 144889 - RNA, 1413 nt, Artificial Sequence; identical to SEQ ID NO: 144680
  derived and/or modified CDS sequence (opt3) from neuraminidase__InfluenzaA__ACR15483

SEQ ID NO: 144890 - RNA, 1413 nt, Artificial Sequence; identical to SEQ ID NO: 144680
  derived and/or modified CDS sequence (opt3) from neuraminidase__InfluenzaA__ACR15505

SEQ ID NO: 144891 - RNA, 1413 nt, Artificial Sequence; identical to SEQ ID NO: 144764
  derived and/or modified CDS sequence (opt3) from neuraminidase__InfluenzaA__ACR15516

SEQ ID NO: 144892 - RNA, 1410 nt, Artificial Sequence; identical to SEQ ID NO: 142762
  derived and/or modified CDS sequence (opt3) from neuraminidase__InfluenzaA__ACR15527

SEQ ID NO: 144893 - RNA, 1410 nt, Artificial Sequence
  derived and/or modified CDS sequence (opt3) from neuraminidase__InfluenzaA__ACR15538
augauccccauucagaagauaaucaccauuggcagcgugucccugacaaucucuacuauuugcuucuuuaugcaaaucgccauacucaucacgaccgucacacuucacuucaaacaguacgaguuuaacucaccuccaaauaaccagguuaugcugugugaaccgacuauuaucgagagaaauauuaccgaaaucguguauuugacaaacaccacuauagagaaggaaauuugccccaaauuagcugaguacaggaauuggaguaagccucagugugacaucacaggguucgcaccauuuagcaaagauaacuccauucggcugucugccggaggugacaucuggguaacccgcgagcccuaugugucgugcgauccugacaaguguuaccaauucgcgcuaggccaggggacgacucucaauaacguccauucaaaugauaccgugcacgaccgaacaccauaucguacucugcuuaugaacgaacugggaguucccuuucauuugggcaccaaacaggugugcaucgcuuggagcaguuccucuugucacgaugguaaggccuggcuccaugucugcgugacaggggacgauaagaaugcaaccgccagcuucauuuacaacggaagacugguagacuccauaguuucauggaguaaagagauccugaggacgcaggaaagcgagugugugugcauuaauggcacuuguacagucgugaugaccgauggcucugcuuccgggaaggcagacacuaaaauccucuuuauagaggaaggaaagauugugcacacaucaaccuuaagcgguagugcccaacacgucgaggaaugcucuugcuauccucgguacccaggcguucgcugugugugcagagauaacuggaagggguccaauaggccgaucguagacaucaacauuaaagacuacagcaucgugucgucuuaugucuguuccggacuggugggcgauacgccccggaagaacgacucaaguagcuccucucauugccuugauccuaauaacgaggaaggugggcacggaguuaaaggcugggcuuucgacgauggcaaugacguguggauggggcgcaccauuagcgagaaguugcgaucaggauacgagacauuuaaagucauagaagguuggaguaacccaaauuccaagcugcagaucaacagacaggugauuguagauaggggcaaucggagcggguauucuggaaucuucucaguugagggcaaaaguuguaucaaccguugcuuuuacguggaacuaauucgcgguagaaaggaggaaacugagguccucuggaccagcaauuccauaguggucuucugugggacaucuggcacuuauggaaccggcucguggcccgacggggccgauaucaaccugaugccuauuuga

SEQ ID NO: 144894 - RNA, 1410 nt, Artificial Sequence; identical to SEQ ID NO: 142375
  derived and/or modified CDS sequence (opt3) from neuraminidase__InfluenzaA__ACR15549

SEQ ID NO: 144895 - RNA, 1410 nt, Artificial Sequence; identical to SEQ ID NO: 142760
  derived and/or modified CDS sequence (opt3) from neuraminidase__InfluenzaA__ACR15560

SEQ ID NO: 144896 - RNA, 1410 nt, Artificial Sequence; identical to SEQ ID NO: 142760
  derived and/or modified CDS sequence (opt3) from neuraminidase__InfluenzaA__ACR15582

SEQ ID NO: 144897 - RNA, 1410 nt, Artificial Sequence
  derived and/or modified CDS sequence (opt3) from neuraminidase__InfluenzaA__ACR15593
augaaccccaaucagaagaucauuaccauaggcagcgugucccugacaaucucuacuauuugcuucuuuaugcaaaucgccauucucaucacgaccgucacacuucacuucaaacaguacgaguuuaacucaccuccaaauaaccagguuaugcugugugaaccgacuauaaucgagagaaauauuaccgaaaucguguauuugacaaacaccacuauugagaaggaaaucugccccaaacaggcugaguacaggaauuggaguaagccucaauguaacauaacaggguucgcaccauuuagcaaagacaauuccauucgguuaucugccggaggugauaucuggguaacccgcgagcccuaugugucgugcgacccugauaaguguuaccaguucgcgcugggccaggggacgacucuaaacaauguccauucaaacgacaccgugcacgaucgaacaccauaucguacucuccugaugaaugaacuuggaguucccuuucaucugggcaccaaacaggugugcauugcuuggagcaguuccucuugucacgacgguaaggccugguugcaugucugcgugacaggggaugacaagaacgcaaccgccagcuucaucuacaauggaagacucguagauuccaucguuucauggaguaaagagauucugaggacgcaagaaagcgagugugugugcauaaacggcacuuguacagucgugaugaccgacggcucugcuuccgggaaggcagauacuaaaauccuguuuauugaggaaggaaagaucgugcacacaucaacccucagcgguagugcccagcacgucgaggaaugcucuugcuauccucgguacccaggcguucgcugugugugcagagacaacuggaagggguccaauaggccgauaguagauauuaacaucaaagacuacagcaucgugucgucuuaugucuguuccggauuagugggcgacacgccccggaagaaugauucaaguagcuccucucauugccuggacccuaacaaugaggaaggugggcacggaguuaaaggcugggcuuucgaugacggcaacgauguguggauggggcgcaccauuagcgagaaacuucgaucaggauacgagacauuuaaggucaucgaagguuggaguaauccaaacuccaaguugcagauuaauagacaggugauaguagacaggggcaaccggagcggguauucuggaaucuucucaguugagggcaaaaguuguauuaaucguugcuuuuacguggaacugauccgcgguagaaaggaggaaacugagguccuauggaccagcaacuccaucguggucuucugugggacaucuggcacuuauggaaccggcucguggcccgauggggccgacauuaaucucaugccuauauga

SEQ ID NO: 144898 - RNA, 1410 nt, Artificial Sequence
  derived and/or modified CDS sequence (opt3) from neuraminidase__InfluenzaA__ACR15604
augaaccccaaucagaagaucauuaccauaggcagcgugucccugacaaucucuacuauuugcuucuuuaugcaaaucgccauucucaucacgaccgucacacuucacuucaaacaguacgaguuuaacucaccuccaaauaaccagguuaugcugugugaaccgacuauaaucgagagaaauauuaccgaaaucguguauuugacaaacaccacuauugagaaggaaaucugccccaaauuagcugaguacaggaauuggaguaagccucaguguaacauaacaggguucgcaccauuuagcaaagacaauuccauucggcugucugccggaggugauaucuggguaacccgcgagcccuaugugucgugcgacccugauaaguguuaccaauucgcgcuaggccaggggacgacucucaacaauguccauucaaacgacaccgugcacgaucgaacaccauaucguacucugcuuaugaaugaacugggaguucccuuucauuugggcaccaaacaggugugcauugcuuggagcaguuccucuugucacgacgguaaggccuggcuccaugucugcgugacaggggaugacaagaacgcaaccgccagcuucaucuacaauggaagacugguagauuccaucguuucauggaguaaagagauucugaggacgcaggaaagcgagugugugugcauaaacggcacuuguacagucgugaugaccgacggcucugcuuccgggaaggcagauacuaaaauccucuuuauugaggaaggaaagaucgugcacacaucaaccuuaagcgguagugcccaacacgucgaggaaugcucuugcuauccucgguacccaggcguucgcugugugugcagagacaacuggaagggguccaauaggccgauaguagauauuaacaucaaagacuacagcaucgugucgucuuaugucuguuccggacuggugggcgacacgccccggaagaaugauucaaguagcuccucucauugccuugacccuaacaaugaggaaggugggcacggaguuaaaggcugggcuuucgaugacggcaacgauguguggauggggcgcaccauuagcgagaaguugcgaucaggauacgagacauuuaaagucaucgaagguuggaguaauccaaacuccaagcugcagauuaauagacaggugauaguagacaggggcgaucggagcggguauucuggaaucuucucaguugagggcaaaaguuguauuaaccguugcuuuuacguggaacuaauccgcgguagaaaggaggaaacugagguccucuggaccagcaauuccaucguggucuucugugggacaucuggcacuuauggaaccggcucguggcccgacggggccgauauuaaccugaugccuauauga

SEQ ID NO: 144899 - RNA, 1410 nt, Artificial Sequence; identical to SEQ ID NO: 144776
  derived and/or modified CDS sequence (opt3) from neuraminidase__InfluenzaA__ACR15618

SEQ ID NO: 144900 - RNA, 1410 nt, Artificial Sequence; identical to SEQ ID NO: 144776
  derived and/or modified CDS sequence (opt3) from neuraminidase__InfluenzaA__ACR18924

SEQ ID NO: 144901 - RNA, 1410 nt, Artificial Sequence; identical to SEQ ID NO: 144776
  derived and/or modified CDS sequence (opt3) from neuraminidase__InfluenzaA__ACR18925

SEQ ID NO: 144902 - RNA, 1410 nt, Artificial Sequence; identical to SEQ ID NO: 144786
  derived and/or modified CDS sequence (opt3) from neuraminidase__InfluenzaA__ACR18926

SEQ ID NO: 144903 - RNA, 1410 nt, Artificial Sequence; identical to SEQ ID NO: 144786
  derived and/or modified CDS sequence (opt3) from neuraminidase__InfluenzaA__ACR18927

SEQ ID NO: 144904 - RNA, 1410 nt, Artificial Sequence; identical to SEQ ID NO: 144786
  derived and/or modified CDS sequence (opt3) from neuraminidase__InfluenzaA__ACR18928

SEQ ID NO: 144905 - RNA, 1410 nt, Artificial Sequence; identical to SEQ ID NO: 144786
  derived and/or modified CDS sequence (opt3) from neuraminidase__InfluenzaA__ACR18929

SEQ ID NO: 144906 - RNA, 1410 nt, Artificial Sequence; identical to SEQ ID NO: 144786
  derived and/or modified CDS sequence (opt3) from neuraminidase__InfluenzaA__ACR18930

SEQ ID NO: 144907 - RNA, 1410 nt, Artificial Sequence; identical to SEQ ID NO: 144786
  derived and/or modified CDS sequence (opt3) from neuraminidase__InfluenzaA__ACR18931

SEQ ID NO: 144908 - RNA, 1410 nt, Artificial Sequence; identical to SEQ ID NO: 144786
  derived and/or modified CDS sequence (opt3) from neuraminidase__InfluenzaA__ACR18933

SEQ ID NO: 144909 - RNA, 1410 nt, Artificial Sequence; identical to SEQ ID NO: 144776
  derived and/or modified CDS sequence (opt3) from neuraminidase__InfluenzaA__ACR18934

SEQ ID NO: 144910 - RNA, 1410 nt, Artificial Sequence; identical to SEQ ID NO: 144786
  derived and/or modified CDS sequence (opt3) from neuraminidase__InfluenzaA__ACR18935

SEQ ID NO: 144911 - RNA, 1410 nt, Artificial Sequence; identical to SEQ ID NO: 144786
  derived and/or modified CDS sequence (opt3) from neuraminidase__InfluenzaA__ACR23301

SEQ ID NO: 144912 - RNA, 1410 nt, Artificial Sequence; identical to SEQ ID NO: 144786
  derived and/or modified CDS sequence (opt3) from neuraminidase__InfluenzaA__ACR32997

SEQ ID NO: 144913 - RNA, 1410 nt, Artificial Sequence
  derived and/or modified CDS sequence (opt3) from neuraminidase__InfluenzaA__ACR33740
augaaccccaaucagaagaucauuaccauaggcagcgugugcaugacaaucgggauggccaaccugauucuccaaaucggaaauauuaucuccauauggaucucucacucaauucagcuugguaaccagaaucagaucgagacuuguaaccaaagugucauuacguacgaaaauaacaccuggguuaaucagacauaugugaacaucagcaauacuaacuucgcugcaggccaguccguagugucugucaaacuggccggaaauucgucauugugcccugugagcggaugggcgauauacaguaaggacaacuccauuagaaucggcucuaaaggugauguuuuugugauuagggagccauucaucagcuguuccccguuagaaugccggaccuuuuuccugacacagggggcucuacucaaugacaagcauucaaacggaaccaucaaagaucgcagucccuaucgaacucugaugagcuguccuauuggcgaggucccaucucccuacaacucccguuuugaaucaguggccuggagcgcaagugccugccacgacggcauaaauuggcuuacaaucgggauuucuggaccugauaacggugcuguagcaguucugaaguauaauggcaucauaaccgacacgauuaaguccuggagaaacaauaucuugaggacucaagagagcgagugugccugcgugaacgggucguguuucaccgucaugacagauggaccaucugacggccaggcuuccuacaaaaucuuucggauugaaaaggguaaaaucgugaagucaguggagaugaaugcccccaacuaucauuacgaagagugcaguuguuacccugauagcuccgagauuacuugcgucugccgcgacaauuggcacgggucuaacagaccauggguuagcuucaaucagaaccucgaauaucagauaggauacaucuguucaggcauuuuuggcgauaauccgaggcccaacgacaaaaccgggaguugcggaccuguguccagcaauggugcgaacggcguaaagggguucucuuuuaaguauggaaacggcguguggaucggucggacaaaaucaaucaguagccgcaauggguucgagaugauuugggauccaaacggcuggaccggaacggacaauaacuuuuccauaaagcaagacaucgucggcauuaaugaauggucuggguacucggggagcuucgugcagcaucccgagcugacuggucuggauuguauccgaccuugcuucuggguugaacucauuagaggcaggccaaaagagaacacaaucuggaccuccgggucaaguauaucuuuuuguggagugaauagcggcacugucgguugguccuggcccgacggggcagaguuaccguucacaaucgauaaguga

SEQ ID NO: 144914 - RNA, 1410 nt, Artificial Sequence; identical to SEQ ID NO: 144776
  derived and/or modified CDS sequence (opt3) from neuraminidase__InfluenzaA__ACR38792

SEQ ID NO: 144915 - RNA, 1410 nt, Artificial Sequence; identical to SEQ ID NO: 144786
  derived and/or modified CDS sequence (opt3) from neuraminidase__InfluenzaA__ACR38793

SEQ ID NO: 144916 - RNA, 1410 nt, Artificial Sequence; identical to SEQ ID NO: 144786
  derived and/or modified CDS sequence (opt3) from neuraminidase__InfluenzaA__ACR38794

SEQ ID NO: 144917 - RNA, 1410 nt, Artificial Sequence; identical to SEQ ID NO: 144786
  derived and/or modified CDS sequence (opt3) from neuraminidase__InfluenzaA__ACR38878

SEQ ID NO: 144918 - RNA, 1410 nt, Artificial Sequence; identical to SEQ ID NO: 144786
  derived and/or modified CDS sequence (opt3) from neuraminidase__InfluenzaA__ACR39357

SEQ ID NO: 144919 - RNA, 1410 nt, Artificial Sequence; identical to SEQ ID NO: 144786
  derived and/or modified CDS sequence (opt3) from neuraminidase__InfluenzaA__ACR39396

SEQ ID NO: 144920 - RNA, 1410 nt, Artificial Sequence; identical to SEQ ID NO: 144786
  derived and/or modified CDS sequence (opt3) from neuraminidase__InfluenzaA__ACR39406

SEQ ID NO: 144921 - RNA, 1410 nt, Artificial Sequence; identical to SEQ ID NO: 144786
  derived and/or modified CDS sequence (opt3) from neuraminidase__InfluenzaA__ACR39416

SEQ ID NO: 144922 - RNA, 1410 nt, Artificial Sequence; identical to SEQ ID NO: 144786
  derived and/or modified CDS sequence (opt3) from neuraminidase__InfluenzaA__ACR39426

SEQ ID NO: 144923 - RNA, 1410 nt, Artificial Sequence; identical to SEQ ID NO: 144786
  derived and/or modified CDS sequence (opt3) from neuraminidase__InfluenzaA__ACR39436

SEQ ID NO: 144924 - RNA, 1410 nt, Artificial Sequence; identical to SEQ ID NO: 144786
  derived and/or modified CDS sequence (opt3) from neuraminidase__InfluenzaA__ACR39446

SEQ ID NO: 144925 - RNA, 1410 nt, Artificial Sequence; identical to SEQ ID NO: 144786
  derived and/or modified CDS sequence (opt3) from neuraminidase__InfluenzaA__ACR39456

SEQ ID NO: 144926 - RNA, 1410 nt, Artificial Sequence; identical to SEQ ID NO: 144786
  derived and/or modified CDS sequence (opt3) from neuraminidase__InfluenzaA__ACR39466

SEQ ID NO: 144927 - RNA, 1410 nt, Artificial Sequence; identical to SEQ ID NO: 144786
  derived and/or modified CDS sequence (opt3) from neuraminidase__InfluenzaA__ACR39476

SEQ ID NO: 144928 - RNA, 1410 nt, Artificial Sequence; identical to SEQ ID NO: 144786
  derived and/or modified CDS sequence (opt3) from neuraminidase__InfluenzaA__ACR39486

SEQ ID NO: 144929 - RNA, 1410 nt, Artificial Sequence; identical to SEQ ID NO: 144786
  derived and/or modified CDS sequence (opt3) from neuraminidase__InfluenzaA__ACR39496

SEQ ID NO: 144930 - RNA, 1410 nt, Artificial Sequence; identical to SEQ ID NO: 144786
  derived and/or modified CDS sequence (opt3) from neuraminidase__InfluenzaA__ACR40291

SEQ ID NO: 144931 - RNA, 1410 nt, Artificial Sequence; identical to SEQ ID NO: 144786
  derived and/or modified CDS sequence (opt3) from neuraminidase__InfluenzaA__ACR40301

SEQ ID NO: 144932 - RNA, 1410 nt, Artificial Sequence
  derived and/or modified CDS sequence (opt3) from neuraminidase__InfluenzaA__ACR40311
augaaccccaaucagaagaucauuaccauaggcagcgugugcaugacaaucgggauggccaaccugauucuccaaaucggaaauauuaucuccauauggaucucucacucaauucagcuugguaaccagaaucagacugagacguguaaccaaagugucaucaccuacgaaaauaacacauggguuaaucagacuuaugugaacauuagcaauaccaacuucgcugcaggccaguccguagugucugucaaacuggccggaaauucgucauugugcccugugagcggaugggcgaucuacaguaaggacaacuccguuagaauaggcucuaaaggugauguguuugucauuagggagccauucaucagcuguuccccguuagaaugccggacauuuuuccugacccagggggcucuacucaaugacaagcauucaaacggaacuauuaaagaucgcagucccuaucgaacacugaugagcuguccuaucggcgaggugccaucucccuacaacucccguuuugaaucaguagccuggagcgcaagugccugccacgacggcaucaauuggcuuaccauugggauaucuggaccugauaacggugcuguugcagugcugaaguauaauggcaucauuacggacacuaucaaguccuggagaaacaauauauugaggacccaagagagcgagugugccugcgucaacgggucguguuucacagugaugacugauggaccaucuaauggccaggcuuccuacaaaauuuuucggaucgaaaaggguaaaaucgugaagucagucgagaugaacgcccccaauuaucauuacgaagagugcaguuguuacccugacagcuccgagauuaccugcguuugccgcgauaacuggcacgggucuaauagaccaugggugagcuucaaccagaaucucgaauaucagaucggauacauuuguucaggcauauuuggcgacaacccgaggcccaaugauaaaacagggaguugcggaccuguauccagcaacggugcgaacggcgugaagggguucucuuuuaaguauggaaauggcgucuggaucggucggaccaaaucaauuaguagccgcaacggguucgagaugaucugggacccaaauggcuggacgggaacugauaacaauuuuuccaucaagcaagacauugugggcauaaacgaauggucuggguacucggggagcuucguucagcaucccgagcugacaggucuggacuguauccgaccuugcuucuggguggaacucauuagaggcaggccaaaagagaauaccaucuggacuuccgggucaaguauuucuuuuuguggagucaacagcgauacagugggcugguccuggcccgacggugcagaguuaccguucaccaucgauaaguga

SEQ ID NO: 144933 - RNA, 1410 nt, Artificial Sequence
  derived and/or modified CDS sequence (opt3) from neuraminidase__InfluenzaA__ACR40321
augaaccccaaucagaagaucauuaccauaggcagcgugugcaugacaaucgggauggccaaccugauucuccaaaucggaaauauuaucuccauauggaucucucacucaauucagcuugguaaccagaaucagaucgagacuuguaaccaaagugucauuacguacgaaaauaacaccuggguuaaucagacauaugugaacaucagcaauacuaacuucgcugcaggccaguccguagugucugucaaacuggccggaaauucgucauugugcccugugagcggaugggcgauauacaguaaggacaacuccauuagaaucggcucuaaaggugauguuuuugugauuagggagccauucaucagcuguuccccguuagaaugccggaccuuuuuccugacacagggggcucuacucaaugacaagcauucaaacggaaccaucaaagaucgcagucccuaucgaacucugaugagcuguccuauuggcgaggucccaucucccuacaacucccguuuugaaucaguggccuggagcgcaagugccugccacgacggcauaaauuggcuuacaaucgggauuucuggaccugauaacggugcuguagcaguucugaaguauaauggcaucauaaccgacacgauuaaguccuggagaaacaauaucuugaggacucaagagagcgagugugccugcgugaacgggucguguuucaccgucaugacagauggaccaucugacggccaggcuuccuacaaaaucuuucggauugaaaaggguaaaaucgugaagucaguggagaugaaugcccccaacuaucauuacgaagagugcaguuguuacccugauagcuccgagauuacuugcgucugccgcgacaauuggcacgggucuaacagaccauggguuagcuucaaucagaaccucgaauaucagauaggauacaucuguucaggcauuuuuggcgauaauccgaggcccaacgacaaaaccgggaguugcggaccuguguccagcaauggugcgaacggcguaaagggguucucuuuuaaguauggaaacggcguguggaucggucggacaaaaucaaucaguagccgcaauggguucgagaugauuugggauccaaacggcuggaauggaaccgacaacaauuuuuccauaaagcaagacaucgucggcauuaacgaauggucuggguacucggggagcuucgugcagcaucccgagcugacgggucuggauuguauccgaccuugcuucuggguugaacucauuagaggcaggccaaaagagaauacuaucuggacauccgggucaaguauaucuuuuuguggagugaacagcgacaccgucggcugguccuggcccgauggugcagaguuaccguucacuaucgacaaguga

SEQ ID NO: 144934 - RNA, 1410 nt, Artificial Sequence; identical to SEQ ID NO: 144786
  derived and/or modified CDS sequence (opt3) from neuraminidase__InfluenzaA__ACR40341

SEQ ID NO: 144935 - RNA, 1410 nt, Artificial Sequence; identical to SEQ ID NO: 144786
  derived and/or modified CDS sequence (opt3) from neuraminidase__InfluenzaA__ACR40351

SEQ ID NO: 144936 - RNA, 1410 nt, Artificial Sequence; identical to SEQ ID NO: 144786
  derived and/or modified CDS sequence (opt3) from neuraminidase__InfluenzaA__ACR40361

SEQ ID NO: 144937 - RNA, 1410 nt, Artificial Sequence; identical to SEQ ID NO: 144786
  derived and/or modified CDS sequence (opt3) from neuraminidase__InfluenzaA__ACR40371

SEQ ID NO: 144938 - RNA, 1410 nt, Artificial Sequence; identical to SEQ ID NO: 144786
  derived and/or modified CDS sequence (opt3) from neuraminidase__InfluenzaA__ACR40391

SEQ ID NO: 144939 - RNA, 1410 nt, Artificial Sequence; identical to SEQ ID NO: 144776
  derived and/or modified CDS sequence (opt3) from neuraminidase__InfluenzaA__ACR46663

SEQ ID NO: 144940 - RNA, 1410 nt, Artificial Sequence; identical to SEQ ID NO: 144776
  derived and/or modified CDS sequence (opt3) from neuraminidase__InfluenzaA__ACR46673

SEQ ID NO: 144941 - RNA, 1410 nt, Artificial Sequence
  derived and/or modified CDS sequence (opt3) from neuraminidase__InfluenzaA__ACR46996
augaaccccaaucagaagaucauuaccauaggcagcgugugcaugacaaucgggauggccaaccugauucuccaaaucggaaauauuaucuccauauggaucucucacucaauucagcuugguaaccagaaucagaucgagacuuguaaccaaagugucauuacguacgaaaauaacaccuggguuaaucagacauaugugaacaucagcaauacuaacuucgcugcaggccaguccguagugucugucaaacuggccggaaauucgucauugugcccugugagcggaugggcgauauacaguaaggacaacuccauuagaaucggcucuaaaggugauguuuuugugauuagggagccauucaucagcuguuccccguuagaaugccggaccuuuuuccugacacagggggcucuacucaaugacaagcauucaaacggaaccaucaaagaucgcagucccuaucgaacucugaugagcuguccuauuggcgaggucccaucucccuacaacucccguuuugaaucaguggccuggagcgcaagugccugccacgacggcauaaauuggcuuacaaucgggauuucuggaccugauaacggugcuguagcaguucugaaguauaauggcaucauaaccgacacgauuaaguccuggagaaacaauaucuugaggacucaagagagcgagugugccugcgugaacgggucguguuucaccgucaugacagauggaccaucuaauggccaggcuuccuacaaaaucuuucggauugaaaaggguaaaaucgugaagucaguggagaugaacgcccccaauuaucauuacgaagagugcaguuguuacccugacagcuccgagauuacuugcgucugccgcgauaacuggcacgggucuaauagaccauggguuagcuucaaccagaaucucgaauaucagauaggauacaucuguucaggcauuuuuggcgacaacccgaggcccaaugauaaaaccgggaguugcggaccuguguccagcaacggugcgaacggcguaaagggguucucuuuuaaguauggaaauggcguguggaucggucggacaaaaucaaucaguagccgcaacggguucgagaugauuugggacccaaauggcuggaccggaacggauaacaauuuuuccauaaagcaagacaucgucggcauuaacgaauggucuggguacucggggagcuucgugcagcaucccgagcugacuggucuggacuguauccgaccuugcuucuggguugaacucauuagaggcaggccaaaagagaauacaaucuggaccuccgggucaaguauaucuuuuuguggagugaacagcgauacugucggcugguccuggcccgacggugcagaguuaccguucacaaucgauaaguga

SEQ ID NO: 144942 - RNA, 1410 nt, Artificial Sequence; identical to SEQ ID NO: 144941
  derived and/or modified CDS sequence (opt3) from neuraminidase__InfluenzaA__ACR46997

SEQ ID NO: 144943 - RNA, 1410 nt, Artificial Sequence; identical to SEQ ID NO: 144941
  derived and/or modified CDS sequence (opt3) from neuraminidase__InfluenzaA__ACR46998

SEQ ID NO: 144944 - RNA, 1410 nt, Artificial Sequence; identical to SEQ ID NO: 144941
  derived and/or modified CDS sequence (opt3) from neuraminidase__InfluenzaA__ACR46999

SEQ ID NO: 144945 - RNA, 1410 nt, Artificial Sequence; identical to SEQ ID NO: 144941
  derived and/or modified CDS sequence (opt3) from neuraminidase__InfluenzaA__ACR47000

SEQ ID NO: 144946 - RNA, 1410 nt, Artificial Sequence; identical to SEQ ID NO: 144941
  derived and/or modified CDS sequence (opt3) from neuraminidase__InfluenzaA__ACR47001

SEQ ID NO: 144947 - RNA, 1410 nt, Artificial Sequence; identical to SEQ ID NO: 144941
  derived and/or modified CDS sequence (opt3) from neuraminidase__InfluenzaA__ACR47002

SEQ ID NO: 144948 - RNA, 1410 nt, Artificial Sequence; identical to SEQ ID NO: 144941
  derived and/or modified CDS sequence (opt3) from neuraminidase__InfluenzaA__ACR47003

SEQ ID NO: 144949 - RNA, 1410 nt, Artificial Sequence
  derived and/or modified CDS sequence (opt3) from neuraminidase__InfluenzaA__ACR47008
augaaccccaaucagaagaucauuaccauaggcagcgugugcaugacaaucgggauggccaaccugauucuccaaaucggaaauauuaucuccauauggccuguccacucuauccagcuugguaaccagaaucagauugagacuuguaaccaaucaguuaucacguacgaaaauaacaccugggugaaucagacauauguaaacauuaguaauacuaacuucgcugcaggccagagcguggucuccaugaaacuggccgggaacucuucguugugcccagugggaggcugggcgaucuacucaaaggacaauagcguuagaauagguaguaaaggggauguguuugucauuagggagccguucaucuccuguucucccuuagaaugccggaccuuuuuccugacacagggagcucuacucaaugacaagcauagcaacggcaccauuaaagaucgcuccccuuaucgaacucugaugucauguccaaucggcgaggugcccaguccuuacaacagccguuuugaaucuguagccugguccgcaucagccugccacgacgggaucaauuggcuuacaauuggaauaagcgguccagauaacggcgcuguugcagugcugaaguauaaugggaucauuaccgacacgaucaagaguuggagaaacaauauauugaggacucaagagucugagugugccugcgucaacggauccuguuucaccgugaugacagauggccccagcaauggucaggcuucguacaaaauuuuucggaucgaaaaggggaaaaucgugaagucugucgagaugaacgccccuaauuaucauuacgaagagugcuccuguuacccagacucaagugagauuacuugcguuugccgcgauaacuggcacggaagcaauagaccguggguguccuucaaccagaaucucgaauaucagaucggcuacauuuguucuggcauauuuggggacaaccccaggccuaaugauaaaaccggaagcugcgguccaguaucaaguaacggcgcgaacggggugaagggauucuccuuuaaguauggcaauggugucuggaucgggcggacaaaaagcauuucuucacgcaacggcuucgagaugaucugggaccccaauggauggaccggcacggauaacaauuuuaguaucaagcaagacauuguggggauaaacgaauggagcggauacuccgguucuuucguucagcauccugagcugacuggccuggacuguauccgaccaugcuucuggguggaacucauuagagggaggcccaaagagaauacaaucuggaccucgggaagcuccauuucauuuuguggcgucaacagugauacuguggguuggucuuggccggacggggcagaguuaccuuucacaaucgauaaguga

SEQ ID NO: 144950 - RNA, 1410 nt, Artificial Sequence; identical to SEQ ID NO: 144786
  derived and/or modified CDS sequence (opt3) from neuraminidase__InfluenzaA__ACR49267

SEQ ID NO: 144951 - RNA, 1410 nt, Artificial Sequence; identical to SEQ ID NO: 144776
  derived and/or modified CDS sequence (opt3) from neuraminidase__InfluenzaA__ACR49268

SEQ ID NO: 144952 - RNA, 1410 nt, Artificial Sequence; identical to SEQ ID NO: 144776
  derived and/or modified CDS sequence (opt3) from neuraminidase__InfluenzaA__ACR49269

SEQ ID NO: 144953 - RNA, 1410 nt, Artificial Sequence; identical to SEQ ID NO: 144776
  derived and/or modified CDS sequence (opt3) from neuraminidase__InfluenzaA__ACR49270

SEQ ID NO: 144954 - RNA, 1410 nt, Artificial Sequence; identical to SEQ ID NO: 144816
  derived and/or modified CDS sequence (opt3) from neuraminidase__InfluenzaA__ACR49271

SEQ ID NO: 144955 - RNA, 1410 nt, Artificial Sequence; identical to SEQ ID NO: 144786
  derived and/or modified CDS sequence (opt3) from neuraminidase__InfluenzaA__ACR49272

SEQ ID NO: 144956 - RNA, 1410 nt, Artificial Sequence; identical to SEQ ID NO: 144776
  derived and/or modified CDS sequence (opt3) from neuraminidase__InfluenzaA__ACR49273

SEQ ID NO: 144957 - RNA, 1410 nt, Artificial Sequence; identical to SEQ ID NO: 144776
  derived and/or modified CDS sequence (opt3) from neuraminidase__InfluenzaA__ACR49274

SEQ ID NO: 144958 - RNA, 1410 nt, Artificial Sequence; identical to SEQ ID NO: 144816
  derived and/or modified CDS sequence (opt3) from neuraminidase__InfluenzaA__ACR49275

SEQ ID NO: 144959 - RNA, 1410 nt, Artificial Sequence; identical to SEQ ID NO: 144816
  derived and/or modified CDS sequence (opt3) from neuraminidase__InfluenzaA__ACR49277

SEQ ID NO: 144960 - RNA, 1410 nt, Artificial Sequence; identical to SEQ ID NO: 144816
  derived and/or modified CDS sequence (opt3) from neuraminidase__InfluenzaA__ACR49278

SEQ ID NO: 144961 - RNA, 1410 nt, Artificial Sequence; identical to SEQ ID NO: 144776
  derived and/or modified CDS sequence (opt3) from neuraminidase__InfluenzaA__ACR49279

SEQ ID NO: 144962 - RNA, 1410 nt, Artificial Sequence; identical to SEQ ID NO: 144776
  derived and/or modified CDS sequence (opt3) from neuraminidase__InfluenzaA__ACR50994

SEQ ID NO: 144963 - RNA, 1410 nt, Artificial Sequence; identical to SEQ ID NO: 144786
  derived and/or modified CDS sequence (opt3) from neuraminidase__InfluenzaA__ACR50998

SEQ ID NO: 144964 - RNA, 1410 nt, Artificial Sequence; identical to SEQ ID NO: 144786
  derived and/or modified CDS sequence (opt3) from neuraminidase__InfluenzaA__ACR51008

SEQ ID NO: 144965 - RNA, 1410 nt, Artificial Sequence; identical to SEQ ID NO: 144786
  derived and/or modified CDS sequence (opt3) from neuraminidase__InfluenzaA__ACR51018

SEQ ID NO: 144966 - RNA, 1410 nt, Artificial Sequence; identical to SEQ ID NO: 144786
  derived and/or modified CDS sequence (opt3) from neuraminidase__InfluenzaA__ACR51028

SEQ ID NO: 144967 - RNA, 1410 nt, Artificial Sequence
  derived and/or modified CDS sequence (opt3) from neuraminidase__InfluenzaA__ACR51038
augaaccccaaucagaagaucauuaccauaggcagcgugugcauguccaucgggauggccaaccugauucuccaaaucggaaauauuaucucuauauggaucucacacaguauucagcuugguaaccagaaucagaucgagacauguaaccaaagcgucauuacuuacgaaaauaacacguggguuaaucagaccuaugugaacaucuccaauacaaacuucgcugcaggccagucuguagugucggucaaacuggccgggaauagcagcuugugcccugugaguggaugggcgauauacuccaaggacaacucuauuagaaucggcagcaaaggugauguuuuugugauuagggagccauucaucuccuguucaccguuagaaugccggaccuuuuuccugacucagggggcucuacucaaugacaagcauaguaacggaacaaucaaagaucgcagccccuaucgaacccugaugucuuguccuauuggcgaggucccaucccccuacaacucacguuuugaaagcguggccuggagugcaucugccugccacgacggcauaaauuggcuuacuaucgggauuuccggaccugauaacggugcuguagcaguucugaaguauaauggcaucauaacagacaccauuaagagcuggagaaacaauaucuugaggacgcaagagucggagugugccugcgugaacgggucuuguuucacugucaugaccgauggaccauccgacggccaggcuucauacaaaaucuuucggauugaaaaggguaaaaucgugaagaguguggagaugaaugcccccaacuaucauuacgaagagugcagcuguuacccugauuccucugagauuacaugcgucugccgcgacaauuggcacgggagcaacagaccauggguuucauucaaucagaaccucgaauaucagauaggauacaucuguaguggcauuuuuggcgauaauccgaggcccaacgacaaaacuggguccugcggaccugugagcucuaauggugcgaacggcguaaagggguucucauuuaaguauggaaacggcguguggaucggucggaccaaaaguaucagcucccgcaauggguucgagaugauuugggauccaaacggcuggacaggaaccgacaauaacuuuucuauaaagcaagacaucgucggcauuaaugaauggucgggguacagcggauccuucgugcagcaucccgagcugacgggucuggauuguauccgaccuugcuucuggguugaacucauuagaggcaggccaaaagagaacacuaucuggacaucagggaguucuauaucauuuuguggagucaauuccgacaccgugggcuggucauggcccgauggugcagaguuaccguucacuaucgacaaguga

SEQ ID NO: 144968 - RNA, 1410 nt, Artificial Sequence; identical to SEQ ID NO: 144786
  derived and/or modified CDS sequence (opt3) from neuraminidase__InfluenzaA__ACR51048

SEQ ID NO: 144969 - RNA, 1410 nt, Artificial Sequence; identical to SEQ ID NO: 144786
  derived and/or modified CDS sequence (opt3) from neuraminidase__InfluenzaA__ACR51058

SEQ ID NO: 144970 - RNA, 1410 nt, Artificial Sequence; identical to SEQ ID NO: 144776
  derived and/or modified CDS sequence (opt3) from neuraminidase__InfluenzaA__ACR51068

SEQ ID NO: 144971 - RNA, 1410 nt, Artificial Sequence; identical to SEQ ID NO: 144786
  derived and/or modified CDS sequence (opt3) from neuraminidase__InfluenzaA__ACR52371

SEQ ID NO: 144972 - RNA, 1410 nt, Artificial Sequence; identical to SEQ ID NO: 144786
  derived and/or modified CDS sequence (opt3) from neuraminidase__InfluenzaA__ACR52381

SEQ ID NO: 144973 - RNA, 1410 nt, Artificial Sequence; identical to SEQ ID NO: 144786
  derived and/or modified CDS sequence (opt3) from neuraminidase__InfluenzaA__ACR52391

SEQ ID NO: 144974 - RNA, 1410 nt, Artificial Sequence; identical to SEQ ID NO: 144786
  derived and/or modified CDS sequence (opt3) from neuraminidase__InfluenzaA__ACR52401

SEQ ID NO: 144975 - RNA, 1410 nt, Artificial Sequence; identical to SEQ ID NO: 144786
  derived and/or modified CDS sequence (opt3) from neuraminidase__InfluenzaA__ACR52411

SEQ ID NO: 144976 - RNA, 1410 nt, Artificial Sequence; identical to SEQ ID NO: 144786
  derived and/or modified CDS sequence (opt3) from neuraminidase__InfluenzaA__ACR52421

SEQ ID NO: 144977 - RNA, 1410 nt, Artificial Sequence; identical to SEQ ID NO: 144786
  derived and/or modified CDS sequence (opt3) from neuraminidase__InfluenzaA__ACR52431

SEQ ID NO: 144978 - RNA, 1410 nt, Artificial Sequence; identical to SEQ ID NO: 144786
  derived and/or modified CDS sequence (opt3) from neuraminidase__InfluenzaA__ACR52441

SEQ ID NO: 144979 - RNA, 1410 nt, Artificial Sequence; identical to SEQ ID NO: 144786
  derived and/or modified CDS sequence (opt3) from neuraminidase__InfluenzaA__ACR52451

SEQ ID NO: 144980 - RNA, 1410 nt, Artificial Sequence; identical to SEQ ID NO: 144786
  derived and/or modified CDS sequence (opt3) from neuraminidase__InfluenzaA__ACR52471

SEQ ID NO: 144981 - RNA, 1410 nt, Artificial Sequence; identical to SEQ ID NO: 144786
  derived and/or modified CDS sequence (opt3) from neuraminidase__InfluenzaA__ACR52481

SEQ ID NO: 144982 - RNA, 1410 nt, Artificial Sequence; identical to SEQ ID NO: 144786
  derived and/or modified CDS sequence (opt3) from neuraminidase__InfluenzaA__ACR52491

SEQ ID NO: 144983 - RNA, 1410 nt, Artificial Sequence; identical to SEQ ID NO: 144786
  derived and/or modified CDS sequence (opt3) from neuraminidase__InfluenzaA__ACR54046

SEQ ID NO: 144984 - RNA, 1410 nt, Artificial Sequence; identical to SEQ ID NO: 144776
  derived and/or modified CDS sequence (opt3) from neuraminidase__InfluenzaA__ACR54052

SEQ ID NO: 144985 - RNA, 1410 nt, Artificial Sequence; identical to SEQ ID NO: 144786
  derived and/or modified CDS sequence (opt3) from neuraminidase__InfluenzaA__ACR54966

SEQ ID NO: 144986 - RNA, 1410 nt, Artificial Sequence; identical to SEQ ID NO: 144786
  derived and/or modified CDS sequence (opt3) from neuraminidase__InfluenzaA__ACR54976

SEQ ID NO: 144987 - RNA, 1410 nt, Artificial Sequence; identical to SEQ ID NO: 144786
  derived and/or modified CDS sequence (opt3) from neuraminidase__InfluenzaA__ACR54986

SEQ ID NO: 144988 - RNA, 1410 nt, Artificial Sequence; identical to SEQ ID NO: 144776
  derived and/or modified CDS sequence (opt3) from neuraminidase__InfluenzaA__ACR54996

SEQ ID NO: 144989 - RNA, 1410 nt, Artificial Sequence; identical to SEQ ID NO: 144786
  derived and/or modified CDS sequence (opt3) from neuraminidase__InfluenzaA__ACR55006

SEQ ID NO: 144990 - RNA, 1410 nt, Artificial Sequence; identical to SEQ ID NO: 144776
  derived and/or modified CDS sequence (opt3) from neuraminidase__InfluenzaA__ACR56383

SEQ ID NO: 144991 - RNA, 1410 nt, Artificial Sequence; identical to SEQ ID NO: 144776
  derived and/or modified CDS sequence (opt3) from neuraminidase__InfluenzaA__ACR56393

SEQ ID NO: 144992 - RNA, 1410 nt, Artificial Sequence; identical to SEQ ID NO: 144786
  derived and/or modified CDS sequence (opt3) from neuraminidase__InfluenzaA__ACR56403

SEQ ID NO: 144993 - RNA, 1410 nt, Artificial Sequence; identical to SEQ ID NO: 144786
  derived and/or modified CDS sequence (opt3) from neuraminidase__InfluenzaA__ACR56413

SEQ ID NO: 144994 - RNA, 1410 nt, Artificial Sequence; identical to SEQ ID NO: 144786
  derived and/or modified CDS sequence (opt3) from neuraminidase__InfluenzaA__ACR56423

SEQ ID NO: 144995 - RNA, 1410 nt, Artificial Sequence; identical to SEQ ID NO: 144786
  derived and/or modified CDS sequence (opt3) from neuraminidase__InfluenzaA__ACR56433

SEQ ID NO: 144996 - RNA, 1410 nt, Artificial Sequence; identical to SEQ ID NO: 144786
  derived and/or modified CDS sequence (opt3) from neuraminidase__InfluenzaA__ACR56443

SEQ ID NO: 144997 - RNA, 1410 nt, Artificial Sequence; identical to SEQ ID NO: 144786
  derived and/or modified CDS sequence (opt3) from neuraminidase__InfluenzaA__ACR56453

SEQ ID NO: 144998 - RNA, 1413 nt, Artificial Sequence; identical to SEQ ID NO: 144764
  derived and/or modified CDS sequence (opt3) from neuraminidase__InfluenzaA__ACR58555

SEQ ID NO: 144999 - RNA, 1413 nt, Artificial Sequence
  derived and/or modified CDS sequence (opt3) from neuraminidase__InfluenzaA__ACR61658
augaaccccaaucagaagaucauuaccauaggcagcaucuccauugccaucgggauuaucucucugaugcuccaaauaggaaacaucauuucaaucugggcuagucacagcauucagacagguucccagaaucauacuggcaucugcaaccagagaauaauuacguacgaaaauucuaccugggugaaccacacauaugucucgaucaauaacacuaauguugugaccgggaaagacaagacaucaguaacccuugcaggaaacagcagucuguguuccauuucuggcugggccaucuacacuaaagauaauagcaucaggauugguuccaagggggacguguucgucauacgggagccuuuuaucucaugcagucauuuggagugucgcacauucuuuuuaacccaaggagcgcugcuaaacgauaaacacagcaauggcacggugaaggaccgaucuccauaucgugcucucauguccugcccgcugggcgaagcccccucaccuuacaacagcaaguucgagaguguugcauggucugccuccgcuugucaugaugggaugggauggcuuacuauugguaucagcggcccagacaauggggcaguggccguccugaaauauaacggaauaauuaccgaaacaaucaagucguggaaaaagagaaucuugaggacucaggagucugagugcguguguguaaacggcuccugcuuuaccauuaugacagauggucccucaaauggggcugccaguuacaaaaucuucaagauugaaaagggaaaaguuaccaagagcauagagcucaacgcgccuaauuuucacuaugaagaguguuccugcuacccagacacgggcacugugaugugugucugccgggauaacuggcacggcucuaaucgccccugggugagcuucaaccagaaucuggacuaccagaucggguauauuugcucaggaguguuuggugauaacccuagaccaaaagacggcaaggggaguuguaauccggucacaguugauggagcagacggcgugaaagguuucuccuacaaguaugggaacggcguauggaucggaaggaccaaaagcaaucggcugcgcaagggcuuugagaugaucugggaccccaacggguggacugauacagacucugauuucucagugaagcaagacgucguggccauuaccgauuggaguggauacagcgguuccuuuguucagcauccugaacucacgggcuuagacugcauacgaccauguuucuggguggagcuggucagagggcuucccagggaaaauaccacaaucuggacuucuggaucgagcauuuccuucugcggcguggauucagacaccgcuaacuggaguuggccugauggugccgaguugccauuuacaaucgacaaauga

SEQ ID NO: 145000 - RNA, 1410 nt, Artificial Sequence
  derived and/or modified CDS sequence (opt3) from neuraminidase__InfluenzaA__ACR61680
augaaccccaaucagaagaucauuaccauaggcagcgugucccugacaaucucuacuauuugcuucuuuaugcaaaucgccauucucaucacgaccgucacacuucacuucaaacaguacgaguuuaacucaccuccaaauaaccagguuaugcugugugaaccgacuauaaucgagagaaauauuaccgaaaucguguauuugacaaacaccacuauugagaaggaaaucugccccaaauuagcugaguacaggaauuggaguaagccucagugugacauaacaggguucgcaccauuuagcaaagauaacuccauucggcugucugccggaggugacaucuggguaacccgcgagcccuaugugucgugcgauccugacaaguguuaccaauucgcgcuaggccaggggacgacucucaauaacguccauucaaaugauaccgugcgagaccguacaccauauagaacucugcuuaugaacgaacugggaguucccuuucacuugggcaccaaacaggugugcauugcuuggagcaguuccucuugucaugaugguaaggccuggcuccacgucugcaucacaggggacgauaagaaugcaaccgccagcuucaucuacaacggaaggcugguggacuccguaguuucauggaguaaagagauucugcggacgcaggaaagcgagugugugugcauaaauggcacuuguaucgucgugaugacagauggcucugcuuccgggaaggcagacaccaaaauucucuuuaucgaggaaggaaagauagugcauacuucaacauuaagcgguagugcccaacacgucgaggaaugcucuugcuauccucgcuacccaggcguuagaugugugugcagggauaacuggaagggguccaaccggccgauuguagacaucaauaucaaagaccacagcauugugucgucuuacgucuguuccggacuggugggcgauacccccaggaagaacgacucaaguagcuccucucauugccuugauccuaauaacgaggaaggugggcacggaguuaaaggcugggcuuucgacgauggcaaugacguguggauggggcgaacgaucagcgagaagucaagauugggauaugagaccuuuaaagucauugaagguuggaguaacccaaaguccaaacugcagauaaaucgccaggugaucguagaucggggcaaccguagcggguacucuggaauuuucucaguugagggcaagaguuguaucaaucgcugcuuuuauguggaacuaaucagagguaggaaggaggaaacagagguccucuggacuagcaacuccauuguggucuucugugggaccucuggcacauacggaacuggcucguggcccgacggggccgauauaaaucugaugccuaucuga

SEQ ID NO: 145001 - RNA, 1410 nt, Artificial Sequence
  derived and/or modified CDS sequence (opt3) from neuraminidase__InfluenzaA__ACR61691
augaaccccaaucagaagaucauuaccauaggcagcgugucccugacaaucucuacuauuugcuucuuuaugcagaucgccauucucaucacgaccgucacacuucacuucaaacaguacgaguuuaacucaccuccaaauaaccagguuaugcugugugaaccgacuauaaucgagagaaauauuaccgaaaucguguauuugacaaacaccacuauugagaaggaaaucugccauaaauuagcugaguacaggaauuggaguaagccccagugugacauaacaggguucgcaccuuuuagcaaagauaacuccauucggcugucugccggaggugacaucuggguaacccgcgagccauaugugucgugcgaucccgacaaguguuaccaauucgcgcuaggccaggggacgacucucaauaacguccacucaaauaacaccgugcgagaucguacaccuuauagaacucugcuuaugaaugaacugggaguuccauuucauuugggcaccaaacaggugugcauugcuuggagcaguuccucuugucacgacgguaaggccuggcuccaugucugcaucacaggggaugacaagaacgcaaccgccagcuucaucuacaauggaaggcugguggauuccguaguuucauggaguaaagagauucugcggacgcaggaaagcgagugugugugcauaaacggcacuuguacagucgugaugaccgacggcucugcuuccgggaaggcagauacuaaaauccucuuuauugaggaaggaaagaucgugcacacaucaaccuuaagcgguagugcccaacacgucgaggaaugcucuugcuauccccgcuacccuggcguuagaugugugugcagggacaacuggaagggguccaaucggccaauaguagauauuaacaucaaagaccauagcaucgugucgucuuacgucuguuccggacuggugggcgacacgccgcgcaagaaugauucaaguagcuccucucacugccuugaccccaacaaugaggaaggugggcauggaguuaaaggcugggcuuucgaugacggcaacgauguguggauggggcgaaccauuagcgagaagucaagauugggauaugagacauuuaaagucaucgaagguuggaguaauccuaaguccaaacugcagauuaacaggcaagugauaguagaccggggcaaucguagcggguacucuggaaucuucucaguugagggcaagaguuguauuaaccgcugcuuuuauguggaacuaaucagagguaggaaggaggaaacugagguccucuggaccagcaauuccaucguggucuucugugggacaucuggcacuuacggaaccggcucguggccagauggggccgacauuaaccugaugcccauauga

SEQ ID NO: 145002 - RNA, 1410 nt, Artificial Sequence
  derived and/or modified CDS sequence (opt3) from neuraminidase__InfluenzaA__ACR61702
augaaccccaaucagaagaucauuaccauaggcagcgugucccugacaaucucuacuauuugcuucuuuaugcagaucgccauucucaucacgaccgucacacuucacuucaaacaguacgaguuuaacucaccuccaaauaaccagguuaugcugugugaaccgacuauaaucgagagaaauauuaccgaaaucguguauuugacaaacaccacuauugagaaggaaaucugccccaaauuagcugaguacaggaauuggaguaagccucagugugacauaacaggguucgcaccauuuagcaaagauaacuccauucggcugucugccggaggugacaucuggguaacccgcgagcccuaugugucgugcgauccugacaaguguuaccaauucgcgcuaggccaggggacgacucucaauaacguccauucaaauaacaccgugcgagaucguacaccauauagaacucugcuuaugaaugaacugggaguucccuuucacuugggcaccaaacaggugugcauugcuuggagcaguuccucuugucaugacgguaaggccuggcuccacgucugcaucacaggggaugacaagaacgcaaccgccagcuucaucuacaauggaaggcugguggauuccguaguuucauggaguaaagagauucugcggacgcaggaaagcgagugugugugcauaaacggcacuuguacagucgugaugaccgacggcucugcuuccgggaaggcagauacuaaaauccucuuuauugaggaaggaaagaucgugcauacaucaaccuuaagcgguagugcccaacacgucgaggaaugcucuugcuauccucgcuacccaggcguuagaugugugugcagggacaacuggaagggguccaaucggccgauaguagauauuaacaucaaagaccacagcaucgugucgucuuacgucuguuccggacuggugggcgacacgccccgcaagaaugauucaaguagcuccucuaacugccuugacccuaauaacgaggaaggugggcauggaguuaaaggcugggcuuucgaugacggcaaugauguguggauggggcgaaccauuagcgagaagucaagauugggauaugagacauuuaaagucaucgaagguuggaguaacccaaaguccaaacugcagauuaauaggcaagugauaguagaccggggcaaccguagcggguacucuggaaucuucucaguugagggcaagaguuguauuaaucgcugcuuuuauguggaacuaaucagagguaggaaggaggaaacugagguccucuggaccagcaacuccaucguggucuucugugggacaucuggcacuuacggaaccggcucguggcccgauggggccgacauuaaucugaugccuauauga

SEQ ID NO: 145003 - RNA, 1410 nt, Artificial Sequence; identical to SEQ ID NO: 144776
  derived and/or modified CDS sequence (opt3) from neuraminidase__InfluenzaA__ACR67201

SEQ ID NO: 145004 - RNA, 1410 nt, Artificial Sequence; identical to SEQ ID NO: 144786
  derived and/or modified CDS sequence (opt3) from neuraminidase__InfluenzaA__ACR67202

SEQ ID NO: 145005 - RNA, 1410 nt, Artificial Sequence; identical to SEQ ID NO: 144776
  derived and/or modified CDS sequence (opt3) from neuraminidase__InfluenzaA__ACR67203

SEQ ID NO: 145006 - RNA, 1410 nt, Artificial Sequence; identical to SEQ ID NO: 144786
  derived and/or modified CDS sequence (opt3) from neuraminidase__InfluenzaA__ACR67204

SEQ ID NO: 145007 - RNA, 1410 nt, Artificial Sequence; identical to SEQ ID NO: 144786
  derived and/or modified CDS sequence (opt3) from neuraminidase__InfluenzaA__ACR67246

SEQ ID NO: 145008 - RNA, 1410 nt, Artificial Sequence; identical to SEQ ID NO: 144776
  derived and/or modified CDS sequence (opt3) from neuraminidase__InfluenzaA__ACR67256

SEQ ID NO: 145009 - RNA, 1410 nt, Artificial Sequence; identical to SEQ ID NO: 144786
  derived and/or modified CDS sequence (opt3) from neuraminidase__InfluenzaA__ACR77451

SEQ ID NO: 145010 - RNA, 1410 nt, Artificial Sequence; identical to SEQ ID NO: 144786
  derived and/or modified CDS sequence (opt3) from neuraminidase__InfluenzaA__ACR77461

SEQ ID NO: 145011 - RNA, 1410 nt, Artificial Sequence; identical to SEQ ID NO: 144786
  derived and/or modified CDS sequence (opt3) from neuraminidase__InfluenzaA__ACR77471

SEQ ID NO: 145012 - RNA, 1410 nt, Artificial Sequence; identical to SEQ ID NO: 144786
  derived and/or modified CDS sequence (opt3) from neuraminidase__InfluenzaA__ACR77481

SEQ ID NO: 145013 - RNA, 1410 nt, Artificial Sequence; identical to SEQ ID NO: 144786
  derived and/or modified CDS sequence (opt3) from neuraminidase__InfluenzaA__ACR77491

SEQ ID NO: 145014 - RNA, 1410 nt, Artificial Sequence; identical to SEQ ID NO: 144786
  derived and/or modified CDS sequence (opt3) from neuraminidase__InfluenzaA__ACR77501

SEQ ID NO: 145015 - RNA, 1410 nt, Artificial Sequence; identical to SEQ ID NO: 144786
  derived and/or modified CDS sequence (opt3) from neuraminidase__InfluenzaA__ACR83527

SEQ ID NO: 145016 - RNA, 1410 nt, Artificial Sequence; identical to SEQ ID NO: 144786
  derived and/or modified CDS sequence (opt3) from neuraminidase__InfluenzaA__ACR83539

SEQ ID NO: 145017 - RNA, 1410 nt, Artificial Sequence; identical to SEQ ID NO: 144786
  derived and/or modified CDS sequence (opt3) from neuraminidase__InfluenzaA__ACS14669

SEQ ID NO: 145018 - RNA, 1410 nt, Artificial Sequence; identical to SEQ ID NO: 144786
  derived and/or modified CDS sequence (opt3) from neuraminidase__InfluenzaA__ACS14679

SEQ ID NO: 145019 - RNA, 1410 nt, Artificial Sequence; identical to SEQ ID NO: 144786
  derived and/or modified CDS sequence (opt3) from neuraminidase__InfluenzaA__ACS14689

SEQ ID NO: 145020 - RNA, 1410 nt, Artificial Sequence; identical to SEQ ID NO: 144786
  derived and/or modified CDS sequence (opt3) from neuraminidase__InfluenzaA__ACS14699

SEQ ID NO: 145021 - RNA, 1410 nt, Artificial Sequence; identical to SEQ ID NO: 144786
  derived and/or modified CDS sequence (opt3) from neuraminidase__InfluenzaA__ACS14709

SEQ ID NO: 145022 - RNA, 1410 nt, Artificial Sequence; identical to SEQ ID NO: 144786
  derived and/or modified CDS sequence (opt3) from neuraminidase__InfluenzaA__ACS14719

SEQ ID NO: 145023 - RNA, 1410 nt, Artificial Sequence; identical to SEQ ID NO: 144786
  derived and/or modified CDS sequence (opt3) from neuraminidase__InfluenzaA__ACS14729

SEQ ID NO: 145024 - RNA, 1410 nt, Artificial Sequence; identical to SEQ ID NO: 144786
  derived and/or modified CDS sequence (opt3) from neuraminidase__InfluenzaA__ACS14739

SEQ ID NO: 145025 - RNA, 1410 nt, Artificial Sequence; identical to SEQ ID NO: 144776
  derived and/or modified CDS sequence (opt3) from neuraminidase__InfluenzaA__ACS27192

SEQ ID NO: 145026 - RNA, 1410 nt, Artificial Sequence; identical to SEQ ID NO: 144786
  derived and/or modified CDS sequence (opt3) from neuraminidase__InfluenzaA__ACS27202

SEQ ID NO: 145027 - RNA, 1410 nt, Artificial Sequence; identical to SEQ ID NO: 144786
  derived and/or modified CDS sequence (opt3) from neuraminidase__InfluenzaA__ACS27212

SEQ ID NO: 145028 - RNA, 1410 nt, Artificial Sequence; identical to SEQ ID NO: 144776
  derived and/or modified CDS sequence (opt3) from neuraminidase__InfluenzaA__ACS27222

SEQ ID NO: 145029 - RNA, 1410 nt, Artificial Sequence; identical to SEQ ID NO: 144786
  derived and/or modified CDS sequence (opt3) from neuraminidase__InfluenzaA__ACS27232

SEQ ID NO: 145030 - RNA, 1410 nt, Artificial Sequence; identical to SEQ ID NO: 144776
  derived and/or modified CDS sequence (opt3) from neuraminidase__InfluenzaA__ACS27242

SEQ ID NO: 145031 - RNA, 1410 nt, Artificial Sequence; identical to SEQ ID NO: 144786
  derived and/or modified CDS sequence (opt3) from neuraminidase__InfluenzaA__ACS27252

SEQ ID NO: 145032 - RNA, 1410 nt, Artificial Sequence; identical to SEQ ID NO: 144776
  derived and/or modified CDS sequence (opt3) from neuraminidase__InfluenzaA__ACS27771

SEQ ID NO: 145033 - RNA, 1410 nt, Artificial Sequence; identical to SEQ ID NO: 144941
  derived and/or modified CDS sequence (opt3) from neuraminidase__InfluenzaA__ACS34969

SEQ ID NO: 145034 - RNA, 1410 nt, Artificial Sequence; identical to SEQ ID NO: 144941
  derived and/or modified CDS sequence (opt3) from neuraminidase__InfluenzaA__ACS34970

SEQ ID NO: 145035 - RNA, 1410 nt, Artificial Sequence; identical to SEQ ID NO: 144941
  derived and/or modified CDS sequence (opt3) from neuraminidase__InfluenzaA__ACS34971

SEQ ID NO: 145036 - RNA, 1410 nt, Artificial Sequence; identical to SEQ ID NO: 144786
  derived and/or modified CDS sequence (opt3) from neuraminidase__InfluenzaA__ACS34972

SEQ ID NO: 145037 - RNA, 1410 nt, Artificial Sequence; identical to SEQ ID NO: 144786
  derived and/or modified CDS sequence (opt3) from neuraminidase__InfluenzaA__ACS50081

SEQ ID NO: 145038 - RNA, 1410 nt, Artificial Sequence; identical to SEQ ID NO: 144786
  derived and/or modified CDS sequence (opt3) from neuraminidase__InfluenzaA__ACS50087

SEQ ID NO: 145039 - RNA, 1410 nt, Artificial Sequence; identical to SEQ ID NO: 144786
  derived and/or modified CDS sequence (opt3) from neuraminidase__InfluenzaA__ACS50094

SEQ ID NO: 145040 - RNA, 1410 nt, Artificial Sequence; identical to SEQ ID NO: 144776
  derived and/or modified CDS sequence (opt3) from neuraminidase__InfluenzaA__ACS54264

SEQ ID NO: 145041 - RNA, 1410 nt, Artificial Sequence; identical to SEQ ID NO: 144941
  derived and/or modified CDS sequence (opt3) from neuraminidase__InfluenzaA__ACS54265

SEQ ID NO: 145042 - RNA, 1410 nt, Artificial Sequence; identical to SEQ ID NO: 144786
  derived and/or modified CDS sequence (opt3) from neuraminidase__InfluenzaA__ACS54266

SEQ ID NO: 145043 - RNA, 1410 nt, Artificial Sequence; identical to SEQ ID NO: 144786
  derived and/or modified CDS sequence (opt3) from neuraminidase__InfluenzaA__ACS54267

SEQ ID NO: 145044 - RNA, 1410 nt, Artificial Sequence; identical to SEQ ID NO: 144786
  derived and/or modified CDS sequence (opt3) from neuraminidase__InfluenzaA__ACS54268

SEQ ID NO: 145045 - RNA, 1410 nt, Artificial Sequence; identical to SEQ ID NO: 144786
  derived and/or modified CDS sequence (opt3) from neuraminidase__InfluenzaA__ACS54303

SEQ ID NO: 145046 - RNA, 1410 nt, Artificial Sequence; identical to SEQ ID NO: 144786
  derived and/or modified CDS sequence (opt3) from neuraminidase__InfluenzaA__ACS68823

SEQ ID NO: 145047 - RNA, 1410 nt, Artificial Sequence; identical to SEQ ID NO: 144786
  derived and/or modified CDS sequence (opt3) from neuraminidase__InfluenzaA__ACS75824

SEQ ID NO: 145048 - RNA, 1410 nt, Artificial Sequence; identical to SEQ ID NO: 144786
  derived and/or modified CDS sequence (opt3) from neuraminidase__InfluenzaA__ACS77929

SEQ ID NO: 145049 - RNA, 1410 nt, Artificial Sequence; identical to SEQ ID NO: 144786
  derived and/or modified CDS sequence (opt3) from neuraminidase__InfluenzaA__ACS77939

SEQ ID NO: 145050 - RNA, 1410 nt, Artificial Sequence; identical to SEQ ID NO: 144776
  derived and/or modified CDS sequence (opt3) from neuraminidase__InfluenzaA__ACS77949

SEQ ID NO: 145051 - RNA, 1410 nt, Artificial Sequence; identical to SEQ ID NO: 144786
  derived and/or modified CDS sequence (opt3) from neuraminidase__InfluenzaA__ACS77959

SEQ ID NO: 145052 - RNA, 1410 nt, Artificial Sequence; identical to SEQ ID NO: 144786
  derived and/or modified CDS sequence (opt3) from neuraminidase__InfluenzaA__ACS77969

SEQ ID NO: 145053 - RNA, 1410 nt, Artificial Sequence; identical to SEQ ID NO: 144786
  derived and/or modified CDS sequence (opt3) from neuraminidase__InfluenzaA__ACS77979

SEQ ID NO: 145054 - RNA, 1410 nt, Artificial Sequence; identical to SEQ ID NO: 144786
  derived and/or modified CDS sequence (opt3) from neuraminidase__InfluenzaA__ACS77989

SEQ ID NO: 145055 - RNA, 1410 nt, Artificial Sequence; identical to SEQ ID NO: 144786
  derived and/or modified CDS sequence (opt3) from neuraminidase__InfluenzaA__ACS77999

SEQ ID NO: 145056 - RNA, 1410 nt, Artificial Sequence; identical to SEQ ID NO: 144786
  derived and/or modified CDS sequence (opt3) from neuraminidase__InfluenzaA__ACS78009

SEQ ID NO: 145057 - RNA, 1410 nt, Artificial Sequence; identical to SEQ ID NO: 144786
  derived and/or modified CDS sequence (opt3) from neuraminidase__InfluenzaA__ACS78019

SEQ ID NO: 145058 - RNA, 1410 nt, Artificial Sequence; identical to SEQ ID NO: 144786
  derived and/or modified CDS sequence (opt3) from neuraminidase__InfluenzaA__ACS78039

SEQ ID NO: 145059 - RNA, 1410 nt, Artificial Sequence; identical to SEQ ID NO: 144786
  derived and/or modified CDS sequence (opt3) from neuraminidase__InfluenzaA__ACS78049

SEQ ID NO: 145060 - RNA, 1410 nt, Artificial Sequence; identical to SEQ ID NO: 144786
  derived and/or modified CDS sequence (opt3) from neuraminidase__InfluenzaA__ACS88274

SEQ ID NO: 145061 - RNA, 1410 nt, Artificial Sequence; identical to SEQ ID NO: 144786
  derived and/or modified CDS sequence (opt3) from neuraminidase__InfluenzaA__ACS88275

SEQ ID NO: 145062 - RNA, 1410 nt, Artificial Sequence; identical to SEQ ID NO: 144776
  derived and/or modified CDS sequence (opt3) from neuraminidase__InfluenzaA__ACS92572

SEQ ID NO: 145063 - RNA, 1410 nt, Artificial Sequence; identical to SEQ ID NO: 144776
  derived and/or modified CDS sequence (opt3) from neuraminidase__InfluenzaA__ACS92582

SEQ ID NO: 145064 - RNA, 1410 nt, Artificial Sequence; identical to SEQ ID NO: 144786
  derived and/or modified CDS sequence (opt3) from neuraminidase__InfluenzaA__ACS92592

SEQ ID NO: 145065 - RNA, 1410 nt, Artificial Sequence; identical to SEQ ID NO: 144786
  derived and/or modified CDS sequence (opt3) from neuraminidase__InfluenzaA__ACS92603

SEQ ID NO: 145066 - RNA, 1410 nt, Artificial Sequence; identical to SEQ ID NO: 144776
  derived and/or modified CDS sequence (opt3) from neuraminidase__InfluenzaA__ACS92614

SEQ ID NO: 145067 - RNA, 1410 nt, Artificial Sequence; identical to SEQ ID NO: 144786
  derived and/or modified CDS sequence (opt3) from neuraminidase__InfluenzaA__ACT09115

SEQ ID NO: 145068 - RNA, 1410 nt, Artificial Sequence; identical to SEQ ID NO: 144786
  derived and/or modified CDS sequence (opt3) from neuraminidase__InfluenzaA__ACT10309

SEQ ID NO: 145069 - RNA, 1410 nt, Artificial Sequence; identical to SEQ ID NO: 144786
  derived and/or modified CDS sequence (opt3) from neuraminidase__InfluenzaA__ACT10315

SEQ ID NO: 145070 - RNA, 1410 nt, Artificial Sequence; identical to SEQ ID NO: 144776
  derived and/or modified CDS sequence (opt3) from neuraminidase__InfluenzaA__ACT11059

SEQ ID NO: 145071 - RNA, 1350 nt, Artificial Sequence
  derived and/or modified CDS sequence (opt3) from neuraminidase__InfluenzaA__ACT15313
augaaccccaaucagaagaucauuaccauaggcagcaucugcauggugauugggaucgucucccugaugcuccaaauuggaaacaugaucucuauauggguuucacacaguauccagacagguaaucagugucaggacgagccuauuagcaacacuaaauuccuuacggaaaaggccguggcuuccguaacccuggcaggcaauucuucguugugcccaaucucagggugggccguguacagcaaagauaacaguauuagaaucggauccaggggcgacgucuuugugauacgggagccguucauuucuuguagccauuuagaaugccgcacauuuuuccugacucaaggugcgcuacucaaugauaagcacuccaacgggaccguuaaagaccgaucaccccaucguacacugaugaguuguccugugggagaggcuccaagccccuauaauucuagauuugaauccgucgccuggucagcaagcgccugccacgauggcaccaguuggcuuacuaucggcauuucugggccugacaacggagcuguggcaguacugaaguacaaugguaucaucacagauaccauuaaguccuggaggaacaauauaaugcggacgcaggagagcgagugugccugcguuaacggcucguguuucacugugaugaccgacgggccaucuuccggacaggcuucauauaaaaucuuuaagauggaaaaaggcaaggucgugaaaaguguggaguuggaugcccccaauuaccauuaugaagagugcagcuguuacccugacgcgggugagauuacaugcgucugccgcgauaacuggcacggguccaacagaccauggguuucuuucaaucagaaccucgaauaucaaaucggauacauauguagcggcguguuuggcgacaauccgaggcccaacgaugggacuggaucaugcgguccuguauucccaaauggcgcauacggggugaagggauuuaguuucaaguauggcaacggugucuggauugggcggaccaaauccacaaauagccgcucuggcuuugagaugaucugggaccccaacggauggaccggcacggacucaaguuucagcgugaagcaggauaucguugccauuacugacugguccggguacucuggaucguucgugcagcacccugaacugacaggucuggauuguauccgaccaugcuuuugggucgagcucauuagaggcaggcccaaagaaagcaccauauggacuuccgggucaaguaucucuuucuguggagugaauggcgacacaguaagcugguccuggccggauggugcugaguuaccuuuuaccauugacaaguga

SEQ ID NO: 145072 - RNA, 1350 nt, Artificial Sequence
  derived and/or modified CDS sequence (opt3) from neuraminidase__InfluenzaA__ACT15315
augaaccccaaucagaagaucauuaccauaggcagcaucugcauggugauugggaucgucucccugaugcuccaaauuggaaacaugaucucuauauggguuucacacaguauccagacagguaaucagugucaggacgagccuauuagcaacacuaaauuccuuacggaaaaggccguggcuuccguaacccuggcaggcaauucuucguugugcccaaucucagggugggccguguacagcaaagauaacaguauuagaaucggauccaggggcgacgucuuugugaugcgggagccguucauaucuuguagccauuuagaaugccgcacauuuuuccugacucaaggugcgcuacucaaugauaagcacuccaacgggaccguuaaagaccgaucaccccaucguacacugaugaguuguccugugggagaggcuccaagccccuauaauucuagauuugaauccgucgccuggucagcaagcgccugccacgauggcaccaguuggcuuacuauuggcaucucugggccugacaacggagcuguggcaguacugaaguacaaugguauuaucacagauaccaucaaguccuggaggaacaauauuaugcggacgcaggagagcgagugugccugcguuaacggcucguguuucacugugaugaccgacgggccaucuuccggacaggcuucauauaaaauauuuaagauggaaaaaggcaaggucgugaaaaguguggaguuggaugcccccaauuaccauuaugaagagugcagcuguuacccugacgcgggugagaucacaugcgucugccgcgauaacuggcacggguccaacagaccauggguuucuuucaaucagaaccucgaauaucaaauuggauacaucuguagcggcguguuuggcgacaauccgaggcccaacgaugggacuggaucaugcgguccuguauucccaaauggcgcauacggggugaagggauuuaguuucaaguauggcaacggugucuggauagggcggaccaaauccacaaauagccgcucuggcuuugagaugauuugggaccccaacggauggaccggcacggacucaaguuucagcgugaagcaggauaucguugccaucacugacugguccggguacucuggaucguucgugcagcacccugaacugacaggucuggauuguauucgaccaugcuuuugggucgagcucaucagaggcaggcccaaagaaagcaccauuuggacuuccgggucaaguauaucuuucuguggagugaauggcgacacaguaagcugguccuggccggauggugcugaguuaccuuuuaccaucgacaaguga

SEQ ID NO: 145073 - RNA, 1350 nt, Artificial Sequence; identical to SEQ ID NO: 145071
  derived and/or modified CDS sequence (opt3) from neuraminidase__InfluenzaA__ACT15319

SEQ ID NO: 145074 - RNA, 1350 nt, Artificial Sequence
  derived and/or modified CDS sequence (opt3) from neuraminidase__InfluenzaA__ACT15321
augaaccccaaucagaagaucauuaccauaggcagcaucugcauggugauugggaucgucucccugaugcuccaaauuggaaacaugaucucuauauggguuucacacaguauccagacagguaaucagugucaggacgagccuauuagcaacacuaaauuccuuacggaaagagccguggcuuccguaacccuggcaggcaauucuucguugugcccaaucucagggugggccguguacagcaaggauaacaguauuaggaucggaucccggggcgacgucuuugugauacgcgagccguucauuucuuguagccauuuagaaugccgaacauuuuuccugacucaaggugcgcuacucaaugauaaacacuccaacgggaccguuaaggaccguucaccccauagaacacugaugaguuguccugugggagaggcuccaagccccuauaauucuagguuugaauccgucgccuggucagcaagcgccugccacgauggcaccaguuggcuuacuaucggcauuucugggccugacaacggagcuguggcaguacugaaauacaaugguaucaucacagauaccauuaaguccuggcggaacaauauaaugcgcacgcaggagagcgagugugccugcguuaacggcucguguuucacugugaugaccgacgggccaucuuccggacaggcuucauauaagaucuuuaaaauggaaaagggcaaagucgugaagaguguggaguuggaugcccccaauuaccauuaugaagagugcagcuguuacccugacgcgggugagauuacaugcgucugcagagauaacuggcacggguccaacaggccauggguuucuuucaaucagaaccucgaauaucaaaucggauacauauguagcggcguguuuggcgacaauccgcggcccaacgaugggacuggaucaugcgguccuguauucccaaauggcgcauacggggugaaaggauuuaguuucaaguauggcaacggugucuggauugggcgcaccaaguccacaaauagccgaucuggcuuugagaugaucugggaccccaacggauggaccggcacggacucaaguuucagcgugaaacaggauaucguugccauuacugacugguccggguacucuggaucguucgugcagcacccugaacugacaggucuggauuguaucagaccaugcuuuugggucgagcucauuaggggccggcccaaggaaagcaccauauggacuuccgggucaaguaucucuuucuguggagugaauggcgacacaguaagcugguccuggccggauggugcugaguuaccuuuuaccauugacaaauga

SEQ ID NO: 145075 - RNA, 1350 nt, Artificial Sequence; identical to SEQ ID NO: 145071
  derived and/or modified CDS sequence (opt3) from neuraminidase__InfluenzaA__ACT15323

SEQ ID NO: 145076 - RNA, 1350 nt, Artificial Sequence; identical to SEQ ID NO: 145071
  derived and/or modified CDS sequence (opt3) from neuraminidase__InfluenzaA__ACT15325

SEQ ID NO: 145077 - RNA, 1350 nt, Artificial Sequence
  derived and/or modified CDS sequence (opt3) from neuraminidase__InfluenzaA__ACT15327
augaaccccaaucagaagaucauuaccauaggcagcaucugcauggugauugggaucgucucccugaugcuccaaauuggaaacaugaucucuauauggguuucacacaguauccagacagguaauagaugucaggacgagccuauuagcaacacuaaauuccuuacggaaaaggccguggcuuccguaacccuggcaggcaauucuucguugugcccaaucucagggugggccguguacagcaaagauaacaguauuaggaucggaucccggggcgacgucuuugugauacgcgagccguucauuucuuguagccauuuagaaugccgaacauuuuuccugacucagggugcgcuacucaaugauaagcacuccaacgggaccguuaaagaccguucaccccauagaacacugaugaguuguccugugggagaggcuccaagccccuauaauucuagguuugaauccgucgccuggucagcaagcgccugccacgauggcaccaguuggcuuacuaucggcauuucugggccugacaacggagcuguggcaguacugaaguacaaugguaucaucacagauaccauuaaguccuggcggaacaauauaaugcgcacgcaagagagcgagugugccugcguuaacggcucguguuucacugugaugaccgacgggccaucuuccggacaggcuucauauaaaaucuuuaagauggaaaaaggcaaggucgugaaaaguguggaguuggaugcccccaauuaccauuaugaagagugcagcuguuacccugacgcgggugagauuacaugcgucugcagagauaacuggcacggguccaacaggccauggguuucuuucaaucagaaccucgaauauaagaucggauacauauguagcggcauuuuuggcgacaauccgcggcccaacgaugggacuggaucaugcgguccuguguucccaaauggcgcauacgggguaaagggauuuaguuucaaauauggcaacgguguguggaucgggcgcaccaaguccacaaauagccgaucuggcuuugagaugaucugggaccccaacggauggaccggcacggacucaaguuucagcgucaaacaggauauuguggccaucacugacugguccggguacucuggaucguucguucaacacccugaacugacaggucuggauuguauuagaccaugcuuuuggguggagcucauaaggggccggcccaaggaaagcaccaucuggacuuccgggucaaguauuucuuucuguggagucaauggcgacacagugagcugguccuggccggauggugcugaguuaccuuuuaccaucgacaaauga

SEQ ID NO: 145078 - RNA, 1350 nt, Artificial Sequence
  derived and/or modified CDS sequence (opt3) from neuraminidase__InfluenzaA__ACT15331
augaaccccaaucagaagaucauuaccauaggcagcaucugcauggugauugggaucgucucccugaugcuccaaauuggaaacaugaucucuauauggguuucacacaguauccagacagguaaucagugucaggacgagccuauuagcaacacuaaauuccuuacggaaaaggccguggcuuccguaacccuggcaggcaauucuucguugugcccaaucucagggugggccguguacagcaaagauaacaguauuagaaucggauccaggggcgacgucuuugugauacgggagccguucauuucuuguagccauuuagaaugccgcacauuuuuccugacucaaggugcgcuacucaaugauaagcacuccaacgggaccguuaaagaccgaucaccccaucguacacugaugaguuguccugugggagaggcuccaagccccuauaauucuagauuugaauccgucgccuggucagcaagcgccugccacgauggcaccaguuggcuuacuaucggcauuucugggccugacaacggagcuguggcaguacugaaguacaaugguaucaucacagauaccauuaaguccuggaggaacaauauaaugcggacgcaggagagcgagugugccugcguuaacggcucguguuucacugugaugaccgacgggccaucuuccggacaggcuucauauaaaaucuuuaagauggaaaaaggcaaggucgugaaaaguguggaguuggaugcccccaauuaccauuaugaagagugcagcuguuacccugacgcgggugagauuacaugcgucugccgcgauaacuggcacggguccaacagaccauggguuucuuucaaucagaaccucgaauaucaaaucggauacauauguagcggcguguuuggcgacaauccgaggcccaacgaugggacuggaucaugcgguccuguauucccaaauggcgcauacggggugaagggauuuaguuucaaguauggcaacggugucuggauugggcggaccaaauccacaaauagccgcucuggcuuugagaugaucugggaccccaacggauggaccggcacggacucaaguuucagcgugaagcaggauaucguugccauuacugacugguccggguacucuggaucguucgugcagcacccugaacugacaggucuggauuguauccgaccaugcuuuugggucgagcucauuagaggcaggcccaaagaaagcaccauauggacuuccgggucaaguaucucuuucuguggagugaauagcgacacaguauccuggucauggccggauggcgcugaguuaccuuuuaccauugacaaguga

SEQ ID NO: 145079 - RNA, 1350 nt, Artificial Sequence
  derived and/or modified CDS sequence (opt3) from neuraminidase__InfluenzaA__ACT15333
augaaccccaaucagaagaucauuaccauaggcagcaucugcauggugauugggaucgucucccugaugcuccaaauuggaaacaugaucucuauauggguuucacacaguauccagacagguaaucagugucagggcgagccuauuagcaacacuaaauuccuuacggaaaaggccguggcuuccguaacccuggcaggaaauucuucguugugcccaaucucagggugggccguguacagcaaagacaacaguauuagaaucggcuccaggggugaugucuuugugauacgggagccguucauuucuuguagccauuuagaaugccgcacauuuuuccugacucaaggggcgcuacucaaugacaagcacuccaacggaaccguuaaagaucgaucaccccaucguacacugaugaguuguccugugggcgaggcuccaagccccuauaauucuagauuugaauccgucgccuggucagcaagcgccugccacgacggcaccaguuggcuuacuaucgggauuucuggaccugauaacggugcuguggcaguacugaaguacaauggcaucaucacagacaccauuaaguccuggaggaacaauauauugcggacgcaggagagcgagugugccugcguuaacgggucguguuucacugugaugaccgauggaccaucuuccggccaggcuucauauaaaaucuuuaagauggaaaaagguaaggucgugaaaaguguggagcucgacgcccccaauuaccauuaugaagagugcagcuguuacccugaugcgggggagauuacaugcgucugccgcgacaacuggcacggauccaacagaccauggguuucuuucaaucagaaccuggaauaucaaaucggcuacauauguagcggcguguuuggggauaauccgaggcccaacgacggaacugguucaugcggcccuguagugaguaauggggcauacggagucaagggcuucuccuuuaaguaugguaacgggguguggauuggccggaccaaaagcacaaauucucgcucaggauucgagaugaucugggauccaaacggcuggaccgggacggacaguagcuuuuccggaaagcaggacaucguugccauuacugauuggucugguuacucgggcagcuucgugcagcaccccgaacugacagggcucgacuguauccgaccuugcuucugggucgaguuaauuagaggaaggccaaaagaauccaccauauggacuucaggcaguucuaucagcuuuugugguguaaauuccgauacagugucauggagcuggcccgacggggcugagcugccguucaccauugauaaguga

SEQ ID NO: 145080 - RNA, 1350 nt, Artificial Sequence
  derived and/or modified CDS sequence (opt3) from neuraminidase__InfluenzaA__ACT15335
augaaccccaaucagaagaucauuaccauaggcagcaucugcauggugauugggaucgucucccugaugcuccaaauuggaaacaugaucucuauauggguuucacacaguauccagacagguaauagaugucaggacgagccuauuagcaacacuaaauuccuuacggaaaaggccguggcuuccguaacccuggcaggcaauucuucguugugcccaaucucagggugggccguguacagcaaagauaacaguauuaggaucggaucccggggcgacgucuuugugauacgcgagccguucauuucuuguagccauuuagaaugccgaacauuuuuccugacucagggugcgcuacucaaugauaagcacuccaacgggaccguuaaagaccguucaccccauagaacacugaugaguuguccugugggagaggcuccaagccccuauaauucuagguuugaauccgucgccuggucagcaagcgccugccacgauggcaccaguuggcuuacuaucggcauuucugggccugacaacggagcuguggcaguacugaaguacaaugguaucaucacagauaccauuaaguccuggcggaacaauauaaugcgcacgcaagagagcgagugugccugcguuaacggcucguguuucacugugaugaccgacgggccaucuuccggacaggcuucauauaaaaucuuuaagauggaaaaaggcaaggucgugaaaaguguggaguuggaugcccccaauuaccauuaugaagagugcagcuguuacccugacgcgggugagauuacaugcgucugcagagauaacuggcacggguccaacaggccauggguuucuuucaaucagaaccucgaauauaagaucggauacauauguagcggcauuuuuggcgacaauccgcggcccaacgaugggacuggaucaugcgguccugugcugccaaauggcgcauacgggguaaagggauucaguuuuaaauauggcaacgguguguggaucgggcgcaccaaguccacaaauagccgaucuggcuucgagaugaucugggaccccaacggauggaccggcacggacucaaguuuuagcgucaaacaggauauuguggccaucacugacugguccggguacucuggaucguucguucaacacccugaacugacaggucucgauuguauuagaccaugcuucuggguggaguuaauaaggggccggcccaaggaaagcaccaucuggacuuccgggucaaguauuucuuuuuguggagucaauggcgacacagugagcugguccuggccggauggugcugagcugccuuucaccaucgacaaauga

SEQ ID NO: 145081 - RNA, 1350 nt, Artificial Sequence
  derived and/or modified CDS sequence (opt3) from neuraminidase__InfluenzaA__ACT15337
augaaccccaaucagaagaucauuaccauaggcagcaucugcauggugauugggaucgucucccugaugcuccaaauuggaaacaugaucucuauauggguuucacacaguauccagacagguaaucagugucaggacgagccuauuagcaacacuaaauuccuuacggaaaaggccguggcuuccguaacccuggcaggcaauucuucguugugcccaaucucagggugggccguguacagcaaagauaacaguauuagaaucggauccaggggcgacgucuuugugauacgggagccguucauuucuuguagccauuuagaaugccgcacauuuuuccugacucaaggugcgcuacucaaugauaagcacuccaacgggaccguuaaagaccgaucaccccaucguacacugaugaguuguccugugggagaggcuccaagccccuauaauucuagauuugaauccgucgccuggucagcaagcgccugccacgauggcaccaguuggcuuacuaucggcauuucugggccugacaacggagcuguggcaguacugaaguacaaugguaucaucacagauaccauuaaguccuggaggaacaauauaaugcggacgcaggagagcgagugugccugcguuaacggcucguguuucacugugaugaccgacgggccaucuuccggacaggcuucauauaaaaucuuuaagauggaaaaaggcaaggucgugaaaaguguggaguuggaugcccccaauuaccauuaugaagagugcagcuguuacccugacgcgggugagauuacaugcgucugccgcgauaacuggcacggguccaacagaccauggguuucuuucaaucagaaccucgaauaucaaaucggauacauauguagcggcguguuuggcgacaauccgaggcccaacgaugggacuggaucaugcgguccuguauucccaaauggcgcauacggggugaagggauuuaguuucaaguauggcaacggugucuggauugggcggaccaaauccacaaauagccgcucuggcuuugagaugaucugggaccccaacggauggaccggcacggacucaaguuucagcgugaagcaggauaucguugccgugacugacugguccggguacucuggaucguucguccagcacccugaacugacaggucuggauuguauucgaccaugcuuuuggguggagcucaucagaggcaggcccaaagaaagcaccauuuggacuuccgggucaaguauaucuuucuguggaguaaauggcgacacaguuagcugguccuggccggauggugcugaguuaccuuuuaccaucgacaaguga

SEQ ID NO: 145082 - RNA, 1350 nt, Artificial Sequence; identical to SEQ ID NO: 145071
  derived and/or modified CDS sequence (opt3) from neuraminidase__InfluenzaA__ACT15341

SEQ ID NO: 145083 - RNA, 1350 nt, Artificial Sequence
  derived and/or modified CDS sequence (opt3) from neuraminidase__InfluenzaA__ACT15344
augaaccccaaucagaagaucauuaccauaggcagcaucugcauggugauugggaucgucucccugaugcuccaaauuggaaacaugaucucuauauggguuucacacaguauccagacagguaaucagugucaggacgagccuauuagcaacacuaaauuccuuacggaaaaggccguggcuuccguaacccuggcaggcaauucuucguugugcccaaucucagggugggccguguacagcaaagauaacaguauuagaaucggauccaggggcgacgucuuugugauacgggagccguucauuucuuguagccauuuagaaugccgcacauuuuuccugacucaaggugcgcuacucaaugauaagcacuccaacgggaccguuaaagaccgaucaccccaucguacacugaugaguuguccugugggagaggcuccaagccccuauaauucuagauuugaauccgucgccuggucagcaagcgccugccacgauggcaccaguuggcuuacuaucggcauuucugggccugacaacggagcuguggcaguacugaaguacaaugguaucaucacagauaccauuaaguccuggaggagcaacauaaugcggacgcaggagucggagugugccugcguuaauggcucuuguuucacugugaugaccgacgggccauccucaggacaggcuaguuauaaaaucuuuaagauggaaaaaggcaaggucgugaaaagcguggaguuggaugcccccaacuaccauuaugaagagugcuccuguuacccugacgcgggugagauuacaugcgucugccgcgauaauuggcacgggucuaacagaccauggguuagcuucaaccagaaucucgaauaucaaaucggauacauauguucaggcguguuuggcgacaacccgaggcccaaugaugggacuggaaguugcgguccuguauucccaaacggcgcauacggggugaagggauuuuccuucaaguauggcaauggugucuggauugggcggaccaaaagcacaaacucucgcucaggcuuugagaugaucugggaccccaauggauggaccggcacggacaguagcuucuccgugaagcaggauaucguugccauuacugacuggucuggguacucggguagcuucgugcagcacccugaacugacaggacuggauuguauccgaccaugcuuuugggucgagcucauuagaggcaggcccaaagaauccaccauauggacuucagggaguucuaucagcuucuguggagugaacggcgacacaguauccuggucauggccggauggugcugaguuaccuuuuaccauugacaaguga

SEQ ID NO: 145084 - RNA, 1350 nt, Artificial Sequence
  derived and/or modified CDS sequence (opt3) from neuraminidase__InfluenzaA__ACT15346
augaaccccaaucagaagaucauuaccauaggcagcaucugcauggugauugggaucgucucccugaugcuccaaauuggaaacaugaucucuauauggguuucacacaguauccagacagguaaucagugucaggacgagccuauuagcaacacuaaauuccuuacggaaaaggccguggcuuccguaacccuggcaggcaauucuucguugugcccaaucucagggugggccguguacagcaaagauaacaauauuagaaucggaaguaggggcgacgucuuugugauacgggagccguucauuuccuguucucauuuagaaugccgcacauuuuuccugacucaaggugcgcuacucaacgauaagcacagcaaugggaccguuaaagaccgaucaccccaucguacacugauguccuguccugugggagaggcuccaagucccuauaacagcagauuugaaucugucgccugguccgcaucagccugccacgauggcaccagcuggcuuacuaucggcauuagugggccugacaauggagcuguggcaguacugaaguacaacgguaucaucacagauaccauuaagucuuggaggaauaacauaaugcggacgcaggaguccgagugugccugcguuaauggcagcuguuucacugugaugaccgacgggccaucgucuggacaggcuuccuauaaaaucuuuaagauggaaaaaggcaaggucgugaaaucaguggaguuggaugcccccaacuaccauuaugaagagugcaguuguuacccugacgcgggugagauuacaugcgucugccgcgauaacuggcacgggagcaauagaccauggguuuccuucaaccagaaucucgaauaucaaaucggauacauauguucuggcguguuuggcgacaacccgaggcccaaugaugggacuggaagcugcgguccuguauucccaaacggcgcauacggggugaagggauuuucauucaaguauggcaauggugucuggauugggcggaccaaaaguacaaacucccgcagcggcuuugagaugaucugggaccccaauggauggaccggcacggacucuucauucagugugaagcaggauaucguugccauuacugacuggagcggguacuccggaucuuucgugcagcacccugaacugacaggucuggauuguauccgaccaugcuuuugggucgagcucauuagaggcaggcccaaagaaucgaccauauggacuagcggguccucaaucaguuucuguggagugaacggcgacacaguaucuuggagcuggccggauggugcugaguuaccuuuuaccauugacaaguga

SEQ ID NO: 145085 - RNA, 1350 nt, Artificial Sequence
  derived and/or modified CDS sequence (opt3) from neuraminidase__InfluenzaA__ACT15348
augaaccccaaucagaagaucauuaccauaggcagcaucugcauggugauugggacagucucccugaugcuccaaaucggaaacaugauuucuaucuggguuucacacaguauacagacugguaaucagugucagggcgagccuaucagcaacacgaaauuccuuaccgaaaaggccguggcuuccguaacacuggcagggaauagcucguugugcccaauuucaggaugggccguguacagcaaagacaacaguaucagaauuggcuccaggggugaugucuuugugauccgggagccguucauaucuuguagccauuuagaaugccgcaccuuuuuccugacucaaggggcgcuacucaaugacaagcacuccaacggaacaguuaaagaucgaucaccccaucguacccugaugaguuguccugugggcgaggcuccaagccccuauaauucuagauuugaauccgucgccuggucagcaagcgccugccacgacggcacuuccuggcuuacaauugggaucucuggaccugauaacggugcuguggcaguacugaaguacaauggcauuaucaccgacacgaucaaguccuggaggaacaauauuuugcggacucaggagagcgagugugccugcguuaacgggucguguuucaccgugaugacagauggaccaucuuccggccaggcuucauauaaaauauuuaagauggaaaaagguaaggucgugaaaaguguggagcucgacgcccccaauuaccauuaugaagagugcagcuguuacccugaugcgggggagaucacuugcgucugccgcgacaacuggcacggauccaacagaccauggguuucuuucaaucagaaccuggaauaucaaauuggcuacaucuguagcggcguguuuggggauaauccgaggcccaacgacggaaccgguucaugcggcccuguagugaguaauggggcauacggagucaagggcuucuccuuuaaguaugguaacgggguguggauaggccggacaaaaagcaccaauucucgcucaggauucgagaugauuugggauccaaacggcuggacggggacugacaguagcuuuuccggaaagcaggacaucguugccaucacagauuggucugguuacucgggcagcuucgugcagcaccccgaacugaccgggcucgacuguauucgaccuugcuucugggucgaguuaaucagaggaaggccaaaagaauccacuauuuggacaucaggcaguucuauaucuuuuuguggugugaauagugauaccguaucauggagcuggcccgacggggcugagcugccguucacgaucgauaaguga

SEQ ID NO: 145086 - RNA, 1350 nt, Artificial Sequence
  derived and/or modified CDS sequence (opt3) from neuraminidase__InfluenzaA__ACT15350
augaaccccaaucagaagaucauuaccauaggcagcaucugcauggugauugggaucgucucccugaugcuccaaauuggaaacaugaucucuauauggguuucacacaguauccagacagguaauagaugucaggacgagccuauuagcaacacuaaauuccuuacggaaaaggccguggcuuccguaacccuggcaggcaauucuucguugugcccaaucucagggugggccguguacagcaaagauaacaguauuaggaucggaucccggggcgacgucuuugugauacgcgagccguucauuucuuguagccauuuagaaugccgaacauuuuuccugacucagggugcgcuacucaaugauaagcacuccaacgggaccguuaaagaccguucaccccauagaacacugaugaguuguccugugggagaggcuccaagccccuauaauucuagguuugaauccgucgccuggucagcaagcgccugccacgauggcaccaguuggcuuacuaucggcauuucugggccugacaacggagcuguggcaguacugaaguacaaugguaucaucacagauaccauuaaguccuggcggaacaauauaaugcgcacgcaagagagcgagugugccugcguuaacggcucguguuucacugugaugaccgacgggccaucuuccggacaggcuucauauaaaaucuuuaagauggaaaaaggcaaggucgugaaaaguguggaguuggaugcccccaauuaccauuaugaagagugcagcuguuacccugacgcgggugagauuacaugcgucugcagagauaacuggcacggguccaacaggccauggguuucuuucaaucagaaccucgaauauaagaucggauacauauguagcggcauuuuuggcgacaauccgcggcccaacgaugggacuggaucaugcgguccuguguucccaaauggcgcauacgggguaaagggauuuaguuucaaauauggcaacgguguguggaucgggcgcaccaaguccacaaauagccgaucuggcuuugagaugaucugggaccccaacggauggaccggcacggacucaaguuucagcgucaaacaggauauuguggccaucacugacugguccggguacucuggaucguucguucaacacccugaacugacaggucuggauuguauuagaccaugcuuuuggguggagcucauaaggggccggcccaaggaacguaccaucuggacuagcggguccucaauuaguuucuguggagucaauggcgacacagugucuuggagcuggccggauggugcugaguuaccuuuuaccaucgacaaauga

SEQ ID NO: 145087 - RNA, 1350 nt, Artificial Sequence
  derived and/or modified CDS sequence (opt3) from neuraminidase__InfluenzaA__ACT15352
augaaccccaaucagaagaucauuaccauaggcagcaucugcauggugauugggaucgucucccugaugcuccaaauuggaaacaugaucucuauauggguuucacacaguauccagacagguaaucagugucaggacgagccuauuagcaacacuaaauuccuuacggaaaaggccguggcuuccguaacccuggcaggcaauucuucguugugcccaaucucagggugggccguguacagcaaagauaacaguauuagaaucggauccaggggcgacgucuuugugauacgggagccguucauuucuuguagccauuuagaaugccgcacauuuuuccugacucaaggugcgcuacucaaugauaagcacuccaacgggaccguuaaagaccgaucaccccaucguacacugaugaguuguccugugggagaggcuccaagccccuauaauucuagauuugaauccgucgccuggucagcaagcgccugccacgauggcaccaguuggcuuacuaucggcauuucugggccugacaacggagcuguggcaguacugaaguacaaugguaucaucacagauaccauuaaguccuggaggaacaauauauugcggacgcaggagagcgagugugccugcguuaacggcucguguuucacugugaugaccgacgggccaucuuccggacaggcuucauauaaaaucuuuaagauggaaaaaggcaaggucgugaaaaguguggagcucgaugcccccaauuaccauuaugaagagugcagcuguuacccugacgcgggugagauuacaugcgucugccgcgauaacuggcacggguccaacagaccauggguuucuuucaaucagaaccuggaauaucaaaucggauacauauguagcggcguguuuggcgacaauccgaggcccaacgaugggacuggaucaugcgguccuguagugaguaauggcgcauacggggucaagggauucuccuuuaaguauggcaacgguguguggauugggcggaccaaaagcacaaauucucgcucaggcuucgagaugaucugggacccaaacggauggaccggcacggacaguagcuuuuccgggaagcaggauaucguugccauuacugacuggucuggauacucggguagcuucgugcagcaccccgaacugacaggccucgauuguauccgaccuugcuucugggucgaguuaauuagagggaggccaaaagaauccaccauauggacuucaggaaguucuaucagcuuuuguggcguaaauuccgacacagugucauggagcuggcccgauggugcugagcugccguucaccauugacaaguga

SEQ ID NO: 145088 - RNA, 1350 nt, Artificial Sequence
  derived and/or modified CDS sequence (opt3) from neuraminidase__InfluenzaA__ACT15354
augaaccccagccagaagaucauuaccauaggcuccaucugcauggugauugggaucgucucucugaugcuccaaauuggaaauaugaucucaauauggaucagucacagcauucagacagguaaccagugucaggacgagccuaucuccaauacuaaauuccuuacggaaaaggccguugcuucugugacccuggcaggcaacucgucauugugcccaauuagcgggugggccguauacaguaaagauaauuccaucagaauaggaucuaggggcgacguguuugucauucgggagccguucaucagcuguucccauuuagaaugccgcacauuuuuccugacucaaggugcgcuacucaacgauaagcacucaaaugggaccgugaaagaccgaaguccccaucguacacugaugagcuguccuguuggagaggcuccaucucccuauaacuccagauuugaaucaguggccuggagcgcaagugccugccacgauggcaccucuuggcuuacuauuggcaucuccgggccugacaauggagcugucgcagugcugaaguacaacgguaucauuacagauaccauaaagagcuggaggaauaacaucaugcggacgcaggagucggagugugccugcguaaauggcucuuguuucacuguuaugaccgacgggccauccucaggacaggcuaguuauaaaauuuuuaagauggaaaaaggcaagguggucaaaagcguggaguuggaugcccccaacuaccauuaugaagagugcuccuguuacccugacgcgggugagaucacaugcgugugccgcgauaauuggcacgggucuaacagaccaugggucagcuucaaccagaaucucgaauaucaaauaggauacauuuguucaggcguuuuuggcgacaacccgaggcccaaugaugggacuggaaguugcgguccuguguucccaaacggcgcauacgggguaaagggauuuuccuucaaguauggcaaugguguguggaucgggcggaccaaaagcacaaacucucgcucaggcuuugagaugaucugggaccccaauggauggaccggcacggacaguagcuucuccgucaagcaggauauuguggccaucacugacuggucuggguacucggguagcuucguucagcacccugaacugacaggacuggauuguauucgaccaugcuuuuggguggagcucauaagaggcaggcccaaagaauccaccaucuggacuucagggaguucuauuagcuucuguggagucaacggcgacacaguguccuggucauggccggauggugcugaguuaccuuuuaccaucgacaaguga

SEQ ID NO: 145089 - RNA, 1350 nt, Artificial Sequence
  derived and/or modified CDS sequence (opt3) from neuraminidase__InfluenzaA__ACT15356
augaaccccaaucagaagaucauuaccauaggcagcaucugcauggugauugggaucgucucccugaugcuccaaauuggaaacaugaucucuauauggguuucacacaguauccagacagguaaucagugucaggacgagccuauuagcaacacuaaauuccuuacggaaaaggccguggcuuccguaacccuggcaggcaauucuucguugugcccaaucucagggugggccguguacagcaaagauaacaguauuagaaucggauccaggggcgacgucuuugugauacgggagccguucauuucuuguagccauuuagaaugccgcacauuuuuccugacucaaggugcgcuacucaaugauaagcacuccaacgggaccguuaaagaccgaucaccccaucguacacugaugaguuguccugugggagaggcuccaagccccuauaauucuagauuugaauccgucgccuggucagcaagcgccugccacgauggcaccaguuggcuuacuaucggcauuucugggccugacaacggagcuguggcaguacugaaguacaaugguaucaucacagauaccauuaaguccuggaggaacaauauauugcggacgcaggagagcgagugugccugcguuaacggcucguguuucacugugaugaccgacgggccaucuuccggacaggcuucauauaaaaucuuuaagauggaaaaaggcaaggucgugaaaaguguggagcucgaugcccccaauuaccauuaugaagagugcagcuguuacccugacgcgggugagauuacaugcgucugccgcgauaacuggcacggguccaacagaccauggguuucuuucaaucagaaccuggaauaucaaaucggauacauauguagcggcguguuuggcgacaauccgaggcccaacgaugggacuggaucaugcgguccuguauucaguaauggcgcauacggggugaagggauuuuccuucaaguauggcaacggugucuggauugggcggaccaaaagcacaaauucucgcucaggcuuugagaugaucugggacccaaacggauggaccggcacggacaguagcuucuccgggaagcaggauaucguggccauuacugacuggucuggauacucggguagcuucguucagcaccccgaacugacaggccucgauuguauccgaccuugcuuuuggguggaguuaauuagagggaggccaaaagaauccaccauauggacuucaggaaguucuaucagcuucuguggcgucaauuccgacacagugucauggagcuggcccgauggugcugagcugccguuuaccauugacaaguga

SEQ ID NO: 145090 - RNA, 1350 nt, Artificial Sequence
  derived and/or modified CDS sequence (opt3) from neuraminidase__InfluenzaA__ACT15358
augaaccccaaucagaagaucauuaccauaggcagcaucugcauggugauugggaucgucucccugaugcuccaaauuggaaacaugaucucuauauggguuucacacaguauccagacagguaauagaugucaggacgagccuauuagcaacacuaaauuccuuacggaaaaggccguggcuuccguaacccuggcaggcaauucuucguugugcccaaucucagggugggccguguacagcaaagauaacaguauuaggaucggaucccggggcgacgucuuugugauacgcgagccguucauuucuuguagccauuuagaaugccgaacauuuuuccugacucacggugcgcuacucaaugauaagcauuccaacgggaccguuaaagaccguucaccccacagaacacugaugaguuguccugugggagaggcuccaagccccuauaauucuagguuugaauccgucgccuggucagcaagcgccugccaugauggcaccaguuggcuuacuaucggcauuucugggccugacaacggagcuguggcaguacugaaguacaaugguaucaucacagauaccauuaaguccuggcggaacaauauaaugcgcacgcaggagagcgagugugccugcguuaacggcucguguuucacugugaugaccgacgggccaucuuccggacaggcuucauauaaaaucuuuaagauggaaaaaggcaaggucgugaaaaguguggaguuggaugcccccaauuaccacuaugaagagugcagcuguuacccugacgcgggugagauuacaugcgucugcagagauaacuggcacggguccaacaggccauggaucucuuucaaucaaaaccucgaauauaagauaggauacauuuguagcggcaucuuuggcgacaauccgcggcccaacgaugggacuggaucaugcgguccuguucugccaaauggcgcauacggggugaagggauucaguuuuaaauauggcaacgguguauggaucgggcgcaccaaguccacaaauagccgaucuggcuucgagaugauuugggaccccaacggauggaccggcacggacucaaguuuuagcgugaaacaggauaucgucgccauuacugacugguccggguacucuggaucguucgugcagcauccugaacugacaggucucgauuguauaagaccaugcuucuggguugaguuaaucaggggccggcccaaggaaagcaccauuuggacuuccgggucaaguaucucuuuuuguggagugaauggcgacacagucagcugguccuggccggauggugcugagcugccuuucaccaucgacaaauga

SEQ ID NO: 145091 - RNA, 1410 nt, Artificial Sequence; identical to SEQ ID NO: 142375
  derived and/or modified CDS sequence (opt3) from neuraminidase__InfluenzaA__ACT21515

SEQ ID NO: 145092 - RNA, 1410 nt, Artificial Sequence
  derived and/or modified CDS sequence (opt3) from neuraminidase__InfluenzaA__ACT21516
augaaccccaaucagaagaucauuaccauaggcagcgugucccugacaaucucuacuauuugcuucuuuaugcaaaucgccauucucaucacgaccgucacacuucacuucaaacaguacgaguuuaacucaccuccaaauaaccagguuaugcugugugaaccgacuauaaucgagagaaauauuaccgaaaucgcuuauuugacaaacaccacuauugagaaggaaaucugccccaaauuagcagaguacaggaauuggaguaagccucagugugacauaacaggguucgccccauuuagcaaagauaacuccauucggcugucugcgggaggugacaucugggugacccgcgagcccuauguaucgugcgauccugacaaguguuaccaauucgcucuaggccaggggacgacucucaauaacgugcauucaaaugauaccguccacgaccgaacaccauaucguacucugcuuaugaacgaacugggagugcccuuucauuugggcaccaagcagguuugcguggccuggagcaguuccucuugucacgaugguaaagcauggcuccaugucugcgugacaggggacgagaagaaugccaccgcuagcuucauuuacaacggaagacugguagauuccaucguuucauggaguaaagaaauccugaggacgcaggagagcgagugugugugcauuaauggcacuuguacagucgugaugaccgacggcucugcauccgggaaggccgauacuaaaauacucuuuaucgaagagggaaagauugugcacacaucaaccuuaagcgguagugcucaacacgucgaagagugcucuugcuauccucgguacccaggcguucgcugugugugcagagacaacuggaagggguccaacaggccgaucguagauauaaauauuaaagacuacagcaucgugucgucuuaugucuguuccggacuggugggcgacacgccccggaagaacgauucaaguagcuccucucauugccuugacccuaauaacgaagagggugggcacggaguuaaaggcugggccuucgaugacggcaaugauguguggauggggcgcaccaucagcgagaaguugcgaucaggauacgaaacauuuaaagucauugaggguuggaguaacccaaauuccaagcugcagaucaacagacaggugauuguagacaggggcaaucggagcggguauucuggaauauucucaguugaaggcaaaaguuguaucaaccguugcuuuuacguggagcuaauucgcgguagaaaggaagagaaugagguccucuggacuagcaacuccaucguggucuucugugggaccucuggcacauauggaacuggcucguggcccgauggggcggacaucaaucugaugccuauuuga

SEQ ID NO: 145093 - RNA, 1410 nt, Artificial Sequence
  derived and/or modified CDS sequence (opt3) from neuraminidase__InfluenzaA__ACT21517
augaaccccaaucagaagaucauuaccauaggcagcgugucccugacaaucucuacuauuugcuucuuuaugcaaaucgccauucucaucacgaccgucacacuucacuucaaacaguacgaguuuaacucaccuccaaauaaccagguuaugcugugugaaccgacuauaaucgagagaaauauuaccgaaaucguguauuugacaaacaccacuauugagaaggaaaucugccccaaauuagcugaguacaggaauuggagugagccucagugugacauaacaggguucgcaccauuuagcaaggauaacuccauucggcugucugccggaggugacaucuggguaacccgcgaacccuaugugucgugcgauccugacaaauguuaccaauucgcgcuaggccaggggacgacucucaauaacguccauucaaaugauaccgugcacgaccgaacaccauaucguacucugguuaugaacgagcuuggagugcccuuucaucugggcaccaagcaggucugcauugcuuggagcaguuccucuugucacgaugguaaggccugguugcaugugugcguaacaggggacgauaaaaaugcaaccgccagcuucaucuacaacggaagacucguugacuccaucgugucauggaguaaggaaauucugaggacgcaggagagcgagugugucugcauaaauggcacuuguacaguggugaugaccgauggcucugcuuccgggaaagcagacacuaagauccuguuuauugaagagggaaaaaucguccacacaucaacccucagcgguagugcccaacacguugaagagugcucuugcuauccucgguacccaggcgugcgcuguguaugcagagauaacuggaagggguccaacaggccgauaguggacauuaauaucaaggacuacagcaucgucucgucuuauguguguuccggauuagcuggcgauacgccccggaaaaacgacucaaguagcuccucucauugccuggauccuaauaacgaagagggugggcacggaguuaagggcugggccuucgacgauggcaaugacguguggauggggcgcaccauuagcgagaaacuucgaucaggauacgaaacauuuaaggucaucgaggguuggaguaacccaaauuccaaauugcagauuaacagacaggugauaguagauaggggcaaucggagcggguauucuggaaucuucucaguugaaggcaagaguuguauuaaccguugcuuuuacguggagcugauccgcgguagaaaagaagagacugagguccuauggaccagcaauuccaucguggucuucugugggacaucuggcacuuauggaaccggcucguggcccgacggggcggauauuaaccucaugccuauauga

SEQ ID NO: 145094 - RNA, 1410 nt, Artificial Sequence; identical to SEQ ID NO: 144786
  derived and/or modified CDS sequence (opt3) from neuraminidase__InfluenzaA__ACT21574

SEQ ID NO: 145095 - RNA, 1410 nt, Artificial Sequence; identical to SEQ ID NO: 144786
  derived and/or modified CDS sequence (opt3) from neuraminidase__InfluenzaA__ACT21585

SEQ ID NO: 145096 - RNA, 1410 nt, Artificial Sequence; identical to SEQ ID NO: 144786
  derived and/or modified CDS sequence (opt3) from neuraminidase__InfluenzaA__ACT22011

SEQ ID NO: 145097 - RNA, 1410 nt, Artificial Sequence; identical to SEQ ID NO: 144786
  derived and/or modified CDS sequence (opt3) from neuraminidase__InfluenzaA__ACT22012

SEQ ID NO: 145098 - RNA, 1410 nt, Artificial Sequence; identical to SEQ ID NO: 144786
  derived and/or modified CDS sequence (opt3) from neuraminidase__InfluenzaA__ACT22013

SEQ ID NO: 145099 - RNA, 1410 nt, Artificial Sequence; identical to SEQ ID NO: 144786
  derived and/or modified CDS sequence (opt3) from neuraminidase__InfluenzaA__ACT22014

SEQ ID NO: 145100 - RNA, 1410 nt, Artificial Sequence; identical to SEQ ID NO: 144776
  derived and/or modified CDS sequence (opt3) from neuraminidase__InfluenzaA__ACT22015

SEQ ID NO: 145101 - RNA, 1410 nt, Artificial Sequence
  derived and/or modified CDS sequence (opt3) from neuraminidase__InfluenzaA__ACT22016
augaaccccaaucagaagaucauuaccauaggcagcgugugcaugacaaucgggauggccaaccugauucuccaaaucggaaauauuaucuccauauggaucucucacucaauucagcuugguaaccagaaucagaucgagacuuguaaccaaagugucauuacguacgaaaauaacaccuggguuaaucagacauaugugaacaucagcaauacuaacuucgcugcaggccaguccguagugucugucaaacuggccggaaauucgucauugugcccugugagcggaugggcgauauacaguaaggacaacuccauuagaaucggcucuaaaggugauguuuuugugauuagggagccauucaucagcuguuccccguuagaaugccggaccuuuuuccugacacagggggcucuacucaaugacaagcauucaaacggaaccaucaaagaucgcagucccuaucgaacucugaugagcuguccuauuggcgaggucccaucucccuacaacucccguuuugaaucaguggccuggagcgcaagugccugccacgacggcauaaauuggcuuacaaucgggauuucuggaccugauaacggugcuguagcaguucugaaguauaauggcaucauaaccgacacgauuaaguccuggagaaacaauaucuugaggacucaagagagcgagugugccugcgugaacgggucguguuucaccgucaugacagauggaccaucuaauggccaggcuuccuacaaaaucuuucggauugaaaaggguaaaaucgugaagucaguggagaugaacgcccccaauuauuacuacgaagagugcaguuguuauccugacagcuccgagauuacuugcgucugccgcgauaacuggcaugggucuaauagaccauggguuagcuucaaccagaaucucgaauaccagauaggauauaucuguucaggcauuuuuggcgacaacccgaggcccaaugauaaaaccgggaguugcggaccuguguccagcaacggugcgaacggcguaaagggguucucuuuuaaguacggaaauggcguguggaucggucggacaaaaucaaucaguagccgcaacggguucgagaugauuugggacccaaauggcuggaccggaacggauaacaauuuuuccauaaagcaagacaucgucggcauuaacgaauggucuggguauucggggagcuucgugcagcaccccgagcugacuggucuggacuguauccgaccuugcuucuggguugaacucauuagaggcaggccaaaagagaauacaaucuggaccuccgggucaaguauaucuuuuuguggagugaacagcgauacugucggcugguccuggcccgacggugcagaguuaccguucacaaucgauaaguga

SEQ ID NO: 145102 - RNA, 1410 nt, Artificial Sequence; identical to SEQ ID NO: 144786
  derived and/or modified CDS sequence (opt3) from neuraminidase__InfluenzaA__ACT22017

SEQ ID NO: 145103 - RNA, 1410 nt, Artificial Sequence; identical to SEQ ID NO: 144786
  derived and/or modified CDS sequence (opt3) from neuraminidase__InfluenzaA__ACT22018

SEQ ID NO: 145104 - RNA, 1410 nt, Artificial Sequence; identical to SEQ ID NO: 144776
  derived and/or modified CDS sequence (opt3) from neuraminidase__InfluenzaA__ACT22506

SEQ ID NO: 145105 - RNA, 1410 nt, Artificial Sequence; identical to SEQ ID NO: 144786
  derived and/or modified CDS sequence (opt3) from neuraminidase__InfluenzaA__ACT22511

SEQ ID NO: 145106 - RNA, 1410 nt, Artificial Sequence; identical to SEQ ID NO: 144786
  derived and/or modified CDS sequence (opt3) from neuraminidase__InfluenzaA__ACT33121

SEQ ID NO: 145107 - RNA, 1410 nt, Artificial Sequence; identical to SEQ ID NO: 144786
  derived and/or modified CDS sequence (opt3) from neuraminidase__InfluenzaA__ACT33124

SEQ ID NO: 145108 - RNA, 1410 nt, Artificial Sequence; identical to SEQ ID NO: 144786
  derived and/or modified CDS sequence (opt3) from neuraminidase__InfluenzaA__ACT33126

SEQ ID NO: 145109 - RNA, 1410 nt, Artificial Sequence; identical to SEQ ID NO: 144776
  derived and/or modified CDS sequence (opt3) from neuraminidase__InfluenzaA__ACT35526

SEQ ID NO: 145110 - RNA, 1410 nt, Artificial Sequence; identical to SEQ ID NO: 144786
  derived and/or modified CDS sequence (opt3) from neuraminidase__InfluenzaA__ACT36507

SEQ ID NO: 145111 - RNA, 1410 nt, Artificial Sequence; identical to SEQ ID NO: 144786
  derived and/or modified CDS sequence (opt3) from neuraminidase__InfluenzaA__ACT36672

SEQ ID NO: 145112 - RNA, 1410 nt, Artificial Sequence; identical to SEQ ID NO: 144786
  derived and/or modified CDS sequence (opt3) from neuraminidase__InfluenzaA__ACT36673

SEQ ID NO: 145113 - RNA, 1410 nt, Artificial Sequence; identical to SEQ ID NO: 144786
  derived and/or modified CDS sequence (opt3) from neuraminidase__InfluenzaA__ACT36674

SEQ ID NO: 145114 - RNA, 1410 nt, Artificial Sequence; identical to SEQ ID NO: 144786
  derived and/or modified CDS sequence (opt3) from neuraminidase__InfluenzaA__ACT36675

SEQ ID NO: 145115 - RNA, 1410 nt, Artificial Sequence; identical to SEQ ID NO: 144786
  derived and/or modified CDS sequence (opt3) from neuraminidase__InfluenzaA__ACT36677

SEQ ID NO: 145116 - RNA, 1410 nt, Artificial Sequence
  derived and/or modified CDS sequence (opt3) from neuraminidase__InfluenzaA__ACT36678
augaaccccaaucagaagaucauuaccauaggcagcgugugcaugacaaucgggauggccaaccugauucuccaaaucggaaauauuaucuccauauggaucucucacucaauucagcuugguaaccagaaucagaucgagacuuguaaccaaagugucauuacguacgaaaauaacaccuggguuaaucagacauaugugaacaucagcaauacuaacuucgcugcaagacaguccguagugucugucaaacuggccggcaauucgucauugugcccugugagcgggugggcgauauacaguaaggacaacuccguuaggauuggaucuaaaggcgauguguuugucauccgggagccauucauuagcuguuccccguuagaaugccgcaccuuuuuccugacacagggugcucuacucaaugacaagcauucaaacgggaccaucaaagaucgaagucccuaucguacucugaugagcuguccuaucggagaggugccaucucccuacaacuccagauuugaaucaguagccuggagcgcaagugccugccacgacggcauuaauuggcuuacaauaggcaucucugggccugauaacggagcuguugcagugcugaaguauaaugguauuaucaccgacacgauaaaguccuggaggaacaauauuuugcggacucaagagagcgagugugccugcgucaacggcucguguuucaccgugaugacagaugggccaucuaauggacaggcuuccuacaaaaucuuucgcaucgaaaagggcaaaauugugaagucagucgagaugaacgcccccaauuaucauuacgaagagugcaguuguuacccugacagcuccgagaucacuugcguuugcagagauaacuggcacgguucuaauaggccaugggugagcuucaaccagaaucucgaauaucagauuggguacauauguucaggaaucuuuggcgacaacccgcggcccaaugauaaaaccggcaguugcgggccuguauccagcaacggagcgaacggugugaagggcuucucuuuuaaguaugggaauggagucuggauuggccgcacaaaaucaaucaguagccgaaacgguuucgagaugaucugggacccaaauggguggaccggcacggauaacaauuuuuccauuaagcaagacauagugggaaucaacgaauggucuggcuacucggggagcuucguucagcaucccgagcugacuggacuggacuguauuagaccuugcuucuggguggaacucaucaggggucggccaaaagagaauacaauuuggaccuccggcucaaguaucucuuuuuguggggucaacagcgauacugugggaugguccuggcccgacggcgcagaguuaccguucacaauagauaaguga

SEQ ID NO: 145117 - RNA, 1410 nt, Artificial Sequence; identical to SEQ ID NO: 144776
  derived and/or modified CDS sequence (opt3) from neuraminidase__InfluenzaA__ACT36679

SEQ ID NO: 145118 - RNA, 1410 nt, Artificial Sequence; identical to SEQ ID NO: 144786
  derived and/or modified CDS sequence (opt3) from neuraminidase__InfluenzaA__ACT36680

SEQ ID NO: 145119 - RNA, 1410 nt, Artificial Sequence; identical to SEQ ID NO: 144776
  derived and/or modified CDS sequence (opt3) from neuraminidase__InfluenzaA__ACT36682

SEQ ID NO: 145120 - RNA, 1410 nt, Artificial Sequence; identical to SEQ ID NO: 144776
  derived and/or modified CDS sequence (opt3) from neuraminidase__InfluenzaA__ACT36683

SEQ ID NO: 145121 - RNA, 1410 nt, Artificial Sequence; identical to SEQ ID NO: 144786
  derived and/or modified CDS sequence (opt3) from neuraminidase__InfluenzaA__ACT36684

SEQ ID NO: 145122 - RNA, 1410 nt, Artificial Sequence; identical to SEQ ID NO: 144776
  derived and/or modified CDS sequence (opt3) from neuraminidase__InfluenzaA__ACT36685

SEQ ID NO: 145123 - RNA, 1410 nt, Artificial Sequence; identical to SEQ ID NO: 144776
  derived and/or modified CDS sequence (opt3) from neuraminidase__InfluenzaA__ACT36686

SEQ ID NO: 145124 - RNA, 1410 nt, Artificial Sequence; identical to SEQ ID NO: 144776
  derived and/or modified CDS sequence (opt3) from neuraminidase__InfluenzaA__ACT36687

SEQ ID NO: 145125 - RNA, 1410 nt, Artificial Sequence
  derived and/or modified CDS sequence (opt3) from neuraminidase__InfluenzaA__ACT36688
augaaccccaaucagaagaucauuaccauaggcagcgugugcaugacaaucgggauggccaaccugauucuccaaaucggaaauauuaucuccauauggaucucucacucaauucagcuugguaaccagaaucagaucgagacuuguaaccaaagugucauuacguacgaaaauaacaccuggguuaaucagacauaugugaacaucagcaauacuaacuucgcugcaggccaguccguagugucugucaaacuggccggaaauucgucauugugcccugugagcggaugggcgauauacaguaaggacaacuccguuagaauuggcucuaaaggugauguguuugucaucagggagccauucauuagcuguuccccguuagaaugccggaccuuuuuccugacacagggggcucuacucaaugacaagcauucaaacggaaccaucaaagaucgcagucccuaucgaacucugaugagcuguccuaucggcgaggugccaucucccuacaacucccguuuugaaucaguagccuggagcgcaagugccugccacgacggcauuaauuggcuuacaauagggaucucuggaccugauaacggugcuguugcagugcugaaguauaauggcauuaucaccgacacgauaaaguccuggagaaacaauauuuugaggacucaagagagcgagugugccugcgucaacgggucguguuucaccgugaugacagauggaccaucuaauggccaggcuuccuacaaaaucuuucggaucgaaaaggguaaaauugugaagucagucgagaugaacgcccccaauuaucauuacgaagagugcaguuguuacccugacagcuccgagaucacuugcguuugccgcgauaacuggcacgggucuaauagaccaugggugagcuucaaccagaaucucgaauaucagauuggauacauauguucaggcaucuuuggcgacaacccgaggcccaaugauaaaaccgggaguugcggaccuguauccagcaacggugcgaacggcgugaagggguucucuuauaaguacggaaauggcgucuggauuggucggacaaaaucaaucaguagccgcaacggguuugagaugaucugggacccaaauggcuggaccggaacggauaacaauuucuccauuaagcaagacauagugggcaucaacgaauggucuggguauucggggagcuuuguucagcaucccgagcugacuggucuggacuguauucgaccuugcuucuggguggaacucaucagaggcaggccaaaagagaauacaauuuggaccuccgggucaaguaucucuuucuguggagucaacagcgauacugugggcugguccuggcccgacggugcagaguuaccguuuacaauagauaaguga

SEQ ID NO: 145126 - RNA, 1410 nt, Artificial Sequence; identical to SEQ ID NO: 144776
  derived and/or modified CDS sequence (opt3) from neuraminidase__InfluenzaA__ACT36689

SEQ ID NO: 145127 - RNA, 1410 nt, Artificial Sequence; identical to SEQ ID NO: 144816
  derived and/or modified CDS sequence (opt3) from neuraminidase__InfluenzaA__ACT36690

SEQ ID NO: 145128 - RNA, 1410 nt, Artificial Sequence; identical to SEQ ID NO: 144776
  derived and/or modified CDS sequence (opt3) from neuraminidase__InfluenzaA__ACT36691

SEQ ID NO: 145129 - RNA, 1410 nt, Artificial Sequence; identical to SEQ ID NO: 144816
  derived and/or modified CDS sequence (opt3) from neuraminidase__InfluenzaA__ACT36693

SEQ ID NO: 145130 - RNA, 1410 nt, Artificial Sequence; identical to SEQ ID NO: 144786
  derived and/or modified CDS sequence (opt3) from neuraminidase__InfluenzaA__ACT36694

SEQ ID NO: 145131 - RNA, 1410 nt, Artificial Sequence; identical to SEQ ID NO: 144786
  derived and/or modified CDS sequence (opt3) from neuraminidase__InfluenzaA__ACT36695

SEQ ID NO: 145132 - RNA, 1410 nt, Artificial Sequence; identical to SEQ ID NO: 144786
  derived and/or modified CDS sequence (opt3) from neuraminidase__InfluenzaA__ACT52684

SEQ ID NO: 145133 - RNA, 1410 nt, Artificial Sequence; identical to SEQ ID NO: 144776
  derived and/or modified CDS sequence (opt3) from neuraminidase__InfluenzaA__ACT54608

SEQ ID NO: 145134 - RNA, 1410 nt, Artificial Sequence
  derived and/or modified CDS sequence (opt3) from neuraminidase__InfluenzaA__ACT66157
augaaccccaaucagaagaucauuaccauaggcagcgugugcaugacaaucgggauggccaaccugauucuccaaaucggaaauauuaucuccauauggaucucucacucaauucagcuugguaaccagaaucagaucgagacuuguaaccaaagugucauuacguacgaaaauaacaccuggguuaaucagacauaugugaacaucagcaauacuaacuucgcugcaggccaguccguagugucugucaaacuggccggaaauucgucauugugcccugugagcggaugggcgauauacaguaaggacaacuccauuagaaucggcucuaaaggugauguuuuugugauuagggagccauucaucagcuguuccccguuagaaugccggaccuuuuuccugacacagggggcucuacucaaugacaagcauucaaacggaaccaucaaagaucgcagucccuaucgaacucugaugagcuguccuauuggcgaggucccaucucccuacaacucccguuuugaaucaguggccuggagcgcaagugccugccacgacggcauaaauuggcuuacaaucgggauuucuggaccugauaacggugcuguagcaguucugaaguauaauggcaucauaaccgacacgauuaaguccuggagaaacaauaucuugaggacucaagagagcgagugugccugcgugaacgggucguguuucaccgucaugacagauggaccaucuaauggccaggcuuccuacaaaauccuccggauugaaaaggguaaaaucgugaagucaguggagaugaacgcccccaauuaucauuacgaagagugcaguuguuacccugacagcuccgagauuacuugcgucugccgcgauaacuggcacgggucuaauagaccauggguuagcuuuaaccagaaucuggaauaucagauaggauacaucuguucaggcauuuucggcgacaacccgaggcccaaugauaaaaccgggaguugcggaccuguguccagcaacggugcgaacggcguaaagggguuuucuuucaaguauggaaauggcguguggaucggucggacaaaaucaaucaguagccgcaacggguuugagaugauuugggacccaaauggcuggaccggaacggauaacaauuucuccauaaagcaagacaucgucggcauuaacgaauggucuggguacucggggagcuuugugcagcaucccgagcugacuggucucgacuguauccgaccuugcuucuggguugaauuaauuagaggcaggccaaaagagaauacaaucuggaccuccgggucaaguauaucuuucuguggagugaacagcgauacugucggcugguccuggcccgacggugcagagcugccguuuacaaucgauaaguga

SEQ ID NO: 145135 - RNA, 1410 nt, Artificial Sequence; identical to SEQ ID NO: 144786
  derived and/or modified CDS sequence (opt3) from neuraminidase__InfluenzaA__ACT67117

SEQ ID NO: 145136 - RNA, 1410 nt, Artificial Sequence; identical to SEQ ID NO: 144776
  derived and/or modified CDS sequence (opt3) from neuraminidase__InfluenzaA__ACT67121

SEQ ID NO: 145137 - RNA, 1410 nt, Artificial Sequence; identical to SEQ ID NO: 144786
  derived and/or modified CDS sequence (opt3) from neuraminidase__InfluenzaA__ACT67240

SEQ ID NO: 145138 - RNA, 1410 nt, Artificial Sequence; identical to SEQ ID NO: 144786
  derived and/or modified CDS sequence (opt3) from neuraminidase__InfluenzaA__ACT67241

SEQ ID NO: 145139 - RNA, 1410 nt, Artificial Sequence; identical to SEQ ID NO: 144786
  derived and/or modified CDS sequence (opt3) from neuraminidase__InfluenzaA__ACT67243

SEQ ID NO: 145140 - RNA, 1410 nt, Artificial Sequence
  derived and/or modified CDS sequence (opt3) from neuraminidase__InfluenzaA__ACT67256
augaaccccaaucagaagaucauuaccauaggcagcgugugcaugacaaucgggauggccaaccugauucuccaaaucggaaauauuaucuccauauggaucucucacucaauucagcuugguaaccagaaucagaucgagacuuguaaccaaagugucauuacguacgaaaauaacaccuggguuaaucagacauaugugaacaucagcaauacuaacuucgcugcaggccaguccguagugucugucaaacuggccggaaauucgucauugugcccugugagcggaugggcgauauacaguaaggacaacuccauuagaaucggcucuaaaggugauguuuuugugauuagggagccauucaucagcuguuccccguuagaaugccggaccuuuuuccugacacagggggcucuacucaaugacaagcauucaaacggaaccaucaaagaucgcagucccuaucgaacucugaugagcuguccuauuggcgaggucccaucucccuacaacucccguuuugaaucaguggccuggagcgcaagugccugccacgacggcauaaauuggcuuacaaucgggauuucuggaccugauaacggugcuguagcaguucugaaguauaauggcaucauaaccgacacgauuaaguccuggagaaacaauaucuugaggacucaagagagcgagugugccugcgugaacgggucguguuucaccgucaugacagauggaccaucugacggccaggcuuccuacaaaaucuuucggauugaaaaggguaaaaucgugaagucaguggagaugaaugcccccaacuauuacuacgaagagugcaguuguuauccugauagcuccgagauuacuugcgucugccgcgacaauuggcaugggucuaacagaccauggguuagcuucaaucagaaccucgaauaccagauaggauauaucuguucaggcauuuuuggcgauaauccgaggcccaacgacaaaaccgggaguugcggaccuguguccagcaauggugcgaacggcguaaagggguucucuuuuaaguacggaaacggcguguggaucggucggacaaaaucaaucaguagccgcaauggguucgagaugauuugggauccaaacggcuggaccggaacggacaauaacuuuuccauaaagcaagacaucgucggcauuaaugaauggucuggguauucggggagcuucgugcagcaccccgagcugacuggucuggauuguauccgaccuugcuucuggguugaacucauuagaggcaggccaaaagagaacacaaucuggaccuccgggucaaguauaucuuuuuguggagugaauagcgacacugucggcugguccuggcccgauggugcagaguuaccguucacaaucgacaaguga

SEQ ID NO: 145141 - RNA, 1410 nt, Artificial Sequence
  derived and/or modified CDS sequence (opt3) from neuraminidase__InfluenzaA__ACT68161
augaaccccaaucagaagaucauuaccauaggcagcgugugcaugacaaucgggauggccaaccugauucuccaaaucggaaauauuaucuccauauggaucucucacucaauucagcuugguaaccagaaucagaucgagacuuguaaccaaagugucauuacguacgaaaauaacaccuggguuaaucagacauaugugaacaucagcaauacuaacuucgcugcaggccaguccguagugucugucaaacuggccggaaauucgucauugugcccugugagcggaugggcgauauacaguaaggacaacuccauuagaaucggcucuaaaggugauguuuuugugauuagggagccauucaucagcuguuccccguuagaaugccggaccuuuuuccugacacagggggcucuacucaaugacaagcauucaaacggaaccaucaaagaucgcagucccuaucgaacucugaugagcuguccuauuggcgaggucccaucucccuacaacucccguuuugaaucaguggccuggagcgcaagugccugccacgacggcauaaauuggcuuacaaucgggauuucuggaccugauaacggugcuguagcaguucugaaguauaauggcaucauaaccgacacgauuaaguccuggagaaacaauaucuugaggacucaagagagcgagugugccugcgugaacgggucguguuucaccgucaugacagauggaccaucugacggccaggcuuccuacaaaaucuuucggauugaaaaggguaaaaucgugaagucaguggagaugaaugcccccaacuaucauuacgaagagugcaguuguuacccugauagcuccgagauuacuugcgucugccgcgacaauuggcacgggucuaacagaccauggguuagcuucaaucagaaccucgaauaucagauaggauacaucuguucaggcauuuuuggcgauaauccgaggcccaacgacaaagcggggaguugcggaccuguguccagcaauggugcaaacggcguaaagggguucucuuuuaaguauggaaacggcguguggaucggucggaccaaaucaaucaguagccgcaauggguucgagaugauuugggauccaaacggcuggacaggaaccgacaauaacuuuuccauaaagcaagacaucgucggcauuaaugaauggucuggguacucggggagcuucgugcagcaucccgagcugacgggucuggauuguauccgaccuugcuucuggguugaacucauuagaggcaggccaaaagagaacacuaucuggacauccgggucaaguauaucuuuuuguggagugaauagcgacaccgucggcugguccuggcccgauggugccgaguuaccguucacuaucgacaaguga

SEQ ID NO: 145142 - RNA, 1410 nt, Artificial Sequence; identical to SEQ ID NO: 144776
  derived and/or modified CDS sequence (opt3) from neuraminidase__InfluenzaA__ACT68162

SEQ ID NO: 145143 - RNA, 1410 nt, Artificial Sequence; identical to SEQ ID NO: 144776
  derived and/or modified CDS sequence (opt3) from neuraminidase__InfluenzaA__ACT68163

SEQ ID NO: 145144 - RNA, 1410 nt, Artificial Sequence; identical to SEQ ID NO: 144776
  derived and/or modified CDS sequence (opt3) from neuraminidase__InfluenzaA__ACT68164

SEQ ID NO: 145145 - RNA, 1410 nt, Artificial Sequence; identical to SEQ ID NO: 144786
  derived and/or modified CDS sequence (opt3) from neuraminidase__InfluenzaA__ACT68166

SEQ ID NO: 145146 - RNA, 1410 nt, Artificial Sequence; identical to SEQ ID NO: 144786
  derived and/or modified CDS sequence (opt3) from neuraminidase__InfluenzaA__ACT68167

SEQ ID NO: 145147 - RNA, 1410 nt, Artificial Sequence; identical to SEQ ID NO: 144816
  derived and/or modified CDS sequence (opt3) from neuraminidase__InfluenzaA__ACT68168

SEQ ID NO: 145148 - RNA, 1410 nt, Artificial Sequence
  derived and/or modified CDS sequence (opt3) from neuraminidase__InfluenzaA__ACT68169
augaaccccaaucagaagaucauuaccauaggcagcgugugcaugacaaucgggauggccaaccugauucuccaaaucggaaauauuaucuccauauggaucucucacucaauucagcuuggugaccagaaccagaucgagacuuguaaucaaagugucauuacguacgaaaacaauaccuggguuaaccagacauaugugaauaucagcaacacuaauuucgcugcaggccaguccguagugucugucaaacuggccgggaacucgucauugugcccugugagcggaugggcgauauacaguaaggauaauuccauuagaaucggcucuaaaggugacguuuuugugauuagggagccauucaucagcuguuccccguuagaaugccggaccuuuuuccugacacagggggcucuacucaacgauaagcauucaaaugagaccaucaaagaccgcagucccuaucgaacucugaugagcuguccuauuggagaagucccaucucccuacaacucccguuuugagucaguggccuggagcgcaagugccugccacgauggcauaaacuggcuuacaaucggcauuucugggccugacaauggagcuguagcaguucugaaguauaacgguaucauaaccgauacgauuaaguccuggagaaauaacaucuugaggacucaagagagcgaaugugccugcgugaauggcucguguuucaccgucaugacagacgggccaucugauggacaggcuuccuacaaaaucuuucggauugagaagggcaaaaucgugaagucaguggaaaugaacgcccccaauuaucauuacgaggagugcaguuguuacccugacagcuccgaaauuacuugcgucugccgcgauaacuggcacgguucuaauagaccauggguuagcuucaaccagaaucucgaguaucagauaggguacaucuguucaggaauuuuuggcgacaacccgaggcccaaugauaaaaccggcaguugcgggccuguguccagcaacggagcgaaugguguaaagggcuucucuuuuaaguaugggaacggaguguggaucggccggacaaaaucaaucaguagccgcaacgguuucgaaaugauuugggacccaaauggguggaccggcacggacaacaauuuuuccauaaagcaagauaucgucggaauuucugaguggucgggcuacagcggguccuucgugcagcaucccgaacugacuggacuggacuguauccgaccuugcuucuggguugagcucauuagagguaggccaaaagagaacacaaucuggaccucaggcaguucuauauccuuuuguggggugaauagcgauacugucggauggucauggcccgacggcgcagaauuaccguucacaaucgauaaguga

SEQ ID NO: 145149 - RNA, 1410 nt, Artificial Sequence; identical to SEQ ID NO: 144776
  derived and/or modified CDS sequence (opt3) from neuraminidase__InfluenzaA__ACT68171

SEQ ID NO: 145150 - RNA, 1410 nt, Artificial Sequence; identical to SEQ ID NO: 144776
  derived and/or modified CDS sequence (opt3) from neuraminidase__InfluenzaA__ACT68172

SEQ ID NO: 145151 - RNA, 1410 nt, Artificial Sequence; identical to SEQ ID NO: 144786
  derived and/or modified CDS sequence (opt3) from neuraminidase__InfluenzaA__ACT68173

SEQ ID NO: 145152 - RNA, 1410 nt, Artificial Sequence; identical to SEQ ID NO: 144786
  derived and/or modified CDS sequence (opt3) from neuraminidase__InfluenzaA__ACT68174

SEQ ID NO: 145153 - RNA, 1410 nt, Artificial Sequence
  derived and/or modified CDS sequence (opt3) from neuraminidase__InfluenzaA__ACT68175
augaaccccaaucagaagaucauuaccauaggcagcgugugcaugacaaucgggauggccaaccugauucuccaaaucggaaauauuaucuccauauggaucucucacucaauucagcuugguaaccagaaucagaucgagacuuguaaccaaagugucauuacguacgaaaauaacaccuggguuaaucagacauaugugaacaucagcaauacuaacuucgcugcaggccaguccguagugucugucaaacuggccggaaauucgucauugugcccugugagcgggugggcgauauacaguaaggacaacuccguuagaauuggcucuaaaggugauguguuugucaucagggagccauucauuagcuguuccccguuagaaugccggaccuuuuuccugacacagggggcucuacucaaugacaagcauucaaacggaaccaucaaagaucgcagucccuaucgaacucugaugagcuguccuaucggcgaggugccaucucccuacaacucccguuuugaaucaguagccuggagcgcaagugccugccacgacggcauuaauuggcuuacaauagggaucucuggaccugauaacggugcuguugcagugcugaaguauaauggcauuaucaccgacacgauaaaguccuggagaaacaauauuuugaggacucaagagagcgagugugccugcgucaacgggucguguuucaccgugaugacagauggaccaucuaauggccaggcuuccuacaaaaucuuucggaucgaaaaggguaaaauugugaagucagucgagaugaacgcccccaauuaucauuacgaagagugcaguuguuacccugacagcggggagaucacuugcguuugccgcgauaacuggcacggauccaauagaccaugggugucuuucaaccagaaucucgaauaucagauuggcuacauauguagcggcaucuuuggggacaacccgaggcccaaugauaaaaccggaucaugcgguccuguaaguuccaacggcgcgaacggggugaagggauucagcuuuaaguauggcaauggugucuggauugggcggacaaaaucuaucucaagucgcaacggcuucgagaugaucugggacccaaauggauggaccggcacggauaacaauuuuagcauuaagcaagacauaguggggaucaacgaaugguccggauacucugguucguucguucagcaucccgagcugacuggccuggacuguauucgaccuugcuucuggguggaacucaucagagggaggccaaaagagaauacaauuuggaccagcggauccucaaucaguuuuuguggcgucaacucugauacuguggguuggagcuggcccgacggggcagaguuaccguucacaauagauaaguga

SEQ ID NO: 145154 - RNA, 1410 nt, Artificial Sequence; identical to SEQ ID NO: 144786
  derived and/or modified CDS sequence (opt3) from neuraminidase__InfluenzaA__ACT68176

SEQ ID NO: 145155 - RNA, 1410 nt, Artificial Sequence; identical to SEQ ID NO: 144786
  derived and/or modified CDS sequence (opt3) from neuraminidase__InfluenzaA__ACT68177

SEQ ID NO: 145156 - RNA, 1410 nt, Artificial Sequence; identical to SEQ ID NO: 144786
  derived and/or modified CDS sequence (opt3) from neuraminidase__InfluenzaA__ACT68178

SEQ ID NO: 145157 - RNA, 1410 nt, Artificial Sequence; identical to SEQ ID NO: 145153
  derived and/or modified CDS sequence (opt3) from neuraminidase__InfluenzaA__ACT68179

SEQ ID NO: 145158 - RNA, 1410 nt, Artificial Sequence; identical to SEQ ID NO: 144786
  derived and/or modified CDS sequence (opt3) from neuraminidase__InfluenzaA__ACT68180

SEQ ID NO: 145159 - RNA, 1410 nt, Artificial Sequence; identical to SEQ ID NO: 144816
  derived and/or modified CDS sequence (opt3) from neuraminidase__InfluenzaA__ACT79145

SEQ ID NO: 145160 - RNA, 1410 nt, Artificial Sequence
  derived and/or modified CDS sequence (opt3) from neuraminidase__InfluenzaA__ACT79155
augaaccccaaucagaagaucauuaccauaggcagcgugugcaugacaaucgggauggccaaccugauucuccaaaucggaaauauuaucuccauauggaucucucacucaauucagcuugguaaccagaaucagaucgagacuuguaaccaaagugucauuacguacgaaaauaacaccuggguuaaucagacauaugugaacaucagcaauacuaacuucgcugcaggccaguccguagugucugucaaacuggccgggaacucgucauugugcccugugggaggcugggcgauauacagcaaggacaauaguguuagaauugguuccaaaggggauguguuugucaucagggagccauucauuucuuguagcuuacuggaaugccggaccuuuuuccuaacacagggagcucuccugaaugacaagcauuccaacggcaccaucaaagaucgcucaccguaucgaacucuuaugaguugucccaucggcgaggugccuagcccauacaacucucguuuugaauccguagccuggucagcaagcgccugccacgacgggauuaauuggcugacaauaggaaucaguggucccgauaacggcgcuguugcaguguugaaguauaaugggauuaucaccgacacgauaaagucuuggagaaacaauauucucaggacucaagaguccgagugugccugcgucaacggaagcuguuucaccgugaugacagauggcccuucgaauggucaggcuucuuacaaaaucuuucggaucgaaaaggggaaaauugugaaguccgucgagaugaacgccccaaauuaucauuacgaagagugcucauguuaccccgacaguagcgagaucacuugcguuugccgcgauaacuggcacggauccaauagaccuugggugucuuucaaccagaaucuggaauaucagauuggcuacauauguagcggcaucuuuggggacaacccaaggccgaaugauaaaaccggaucaugcggucccguaaguuccaacggcgcgaacggggugaagggauucagcuuuaaguauggcaauggugucuggauugggcggacaaaaucuaucucaagucgcaacggcuucgagaugaucugggacccuaauggauggaccggcacggauaacaauuuuagcauuaagcaagacauaguggggaucaacgaaugguccggauacucugguucguucguucagcauccagagcugacuggccucgacuguauucgacccugcuucuggguggaauuaaucagagggaggccuaaagagaauacaauuuggaccagcggauccucaaucaguuuuuguggcgucaacucugauacuguggguuggagcuggccagacggggcagagcugcccuucacaauagauaaguga

SEQ ID NO: 145161 - RNA, 1410 nt, Artificial Sequence; identical to SEQ ID NO: 144776
  derived and/or modified CDS sequence (opt3) from neuraminidase__InfluenzaA__ACT79165

SEQ ID NO: 145162 - RNA, 1410 nt, Artificial Sequence; identical to SEQ ID NO: 144776
  derived and/or modified CDS sequence (opt3) from neuraminidase__InfluenzaA__ACT79175

SEQ ID NO: 145163 - RNA, 1410 nt, Artificial Sequence; identical to SEQ ID NO: 144786
  derived and/or modified CDS sequence (opt3) from neuraminidase__InfluenzaA__ACT79185

SEQ ID NO: 145164 - RNA, 1410 nt, Artificial Sequence; identical to SEQ ID NO: 144786
  derived and/or modified CDS sequence (opt3) from neuraminidase__InfluenzaA__ACT79622

SEQ ID NO: 145165 - RNA, 1410 nt, Artificial Sequence; identical to SEQ ID NO: 145153
  derived and/or modified CDS sequence (opt3) from neuraminidase__InfluenzaA__ACT79630

SEQ ID NO: 145166 - RNA, 1410 nt, Artificial Sequence; identical to SEQ ID NO: 144786
  derived and/or modified CDS sequence (opt3) from neuraminidase__InfluenzaA__ACT83798

SEQ ID NO: 145167 - RNA, 1410 nt, Artificial Sequence; identical to SEQ ID NO: 144786
  derived and/or modified CDS sequence (opt3) from neuraminidase__InfluenzaA__ACT83808

SEQ ID NO: 145168 - RNA, 1410 nt, Artificial Sequence; identical to SEQ ID NO: 144786
  derived and/or modified CDS sequence (opt3) from neuraminidase__InfluenzaA__ACT83818

SEQ ID NO: 145169 - RNA, 1410 nt, Artificial Sequence; identical to SEQ ID NO: 144786
  derived and/or modified CDS sequence (opt3) from neuraminidase__InfluenzaA__ACT83828

SEQ ID NO: 145170 - RNA, 1410 nt, Artificial Sequence; identical to SEQ ID NO: 144786
  derived and/or modified CDS sequence (opt3) from neuraminidase__InfluenzaA__ACT83838

SEQ ID NO: 145171 - RNA, 1410 nt, Artificial Sequence; identical to SEQ ID NO: 144776
  derived and/or modified CDS sequence (opt3) from neuraminidase__InfluenzaA__ACT83848

SEQ ID NO: 145172 - RNA, 1410 nt, Artificial Sequence; identical to SEQ ID NO: 144776
  derived and/or modified CDS sequence (opt3) from neuraminidase__InfluenzaA__ACT83858

SEQ ID NO: 145173 - RNA, 1410 nt, Artificial Sequence; identical to SEQ ID NO: 144786
  derived and/or modified CDS sequence (opt3) from neuraminidase__InfluenzaA__ACT83868

SEQ ID NO: 145174 - RNA, 1410 nt, Artificial Sequence; identical to SEQ ID NO: 144786
  derived and/or modified CDS sequence (opt3) from neuraminidase__InfluenzaA__ACT83878

SEQ ID NO: 145175 - RNA, 1410 nt, Artificial Sequence; identical to SEQ ID NO: 144786
  derived and/or modified CDS sequence (opt3) from neuraminidase__InfluenzaA__ACT86002

SEQ ID NO: 145176 - RNA, 1410 nt, Artificial Sequence; identical to SEQ ID NO: 144786
  derived and/or modified CDS sequence (opt3) from neuraminidase__InfluenzaA__ACT86012

SEQ ID NO: 145177 - RNA, 1410 nt, Artificial Sequence; identical to SEQ ID NO: 144786
  derived and/or modified CDS sequence (opt3) from neuraminidase__InfluenzaA__ACT86022

SEQ ID NO: 145178 - RNA, 1410 nt, Artificial Sequence; identical to SEQ ID NO: 144776
  derived and/or modified CDS sequence (opt3) from neuraminidase__InfluenzaA__ACT86032

SEQ ID NO: 145179 - RNA, 1410 nt, Artificial Sequence; identical to SEQ ID NO: 144786
  derived and/or modified CDS sequence (opt3) from neuraminidase__InfluenzaA__ACT86042

SEQ ID NO: 145180 - RNA, 1410 nt, Artificial Sequence; identical to SEQ ID NO: 144786
  derived and/or modified CDS sequence (opt3) from neuraminidase__InfluenzaA__ACT86052

SEQ ID NO: 145181 - RNA, 1410 nt, Artificial Sequence; identical to SEQ ID NO: 144786
  derived and/or modified CDS sequence (opt3) from neuraminidase__InfluenzaA__ACT86062

SEQ ID NO: 145182 - RNA, 1410 nt, Artificial Sequence; identical to SEQ ID NO: 144786
  derived and/or modified CDS sequence (opt3) from neuraminidase__InfluenzaA__ACT86072

SEQ ID NO: 145183 - RNA, 1410 nt, Artificial Sequence; identical to SEQ ID NO: 144786
  derived and/or modified CDS sequence (opt3) from neuraminidase__InfluenzaA__ACT86082

SEQ ID NO: 145184 - RNA, 1410 nt, Artificial Sequence; identical to SEQ ID NO: 144786
  derived and/or modified CDS sequence (opt3) from neuraminidase__InfluenzaA__ACT86092

SEQ ID NO: 145185 - RNA, 1410 nt, Artificial Sequence; identical to SEQ ID NO: 144786
  derived and/or modified CDS sequence (opt3) from neuraminidase__InfluenzaA__ACT86102

SEQ ID NO: 145186 - RNA, 1410 nt, Artificial Sequence; identical to SEQ ID NO: 144786
  derived and/or modified CDS sequence (opt3) from neuraminidase__InfluenzaA__ACT86112

SEQ ID NO: 145187 - RNA, 1410 nt, Artificial Sequence; identical to SEQ ID NO: 144786
  derived and/or modified CDS sequence (opt3) from neuraminidase__InfluenzaA__ACT86122

SEQ ID NO: 145188 - RNA, 1410 nt, Artificial Sequence; identical to SEQ ID NO: 144786
  derived and/or modified CDS sequence (opt3) from neuraminidase__InfluenzaA__ACT86132

SEQ ID NO: 145189 - RNA, 1410 nt, Artificial Sequence; identical to SEQ ID NO: 144786
  derived and/or modified CDS sequence (opt3) from neuraminidase__InfluenzaA__ACT86142

SEQ ID NO: 145190 - RNA, 1410 nt, Artificial Sequence; identical to SEQ ID NO: 144776
  derived and/or modified CDS sequence (opt3) from neuraminidase__InfluenzaA__ACT97323

SEQ ID NO: 145191 - RNA, 1410 nt, Artificial Sequence; identical to SEQ ID NO: 144786
  derived and/or modified CDS sequence (opt3) from neuraminidase__InfluenzaA__ACU00934

SEQ ID NO: 145192 - RNA, 1410 nt, Artificial Sequence; identical to SEQ ID NO: 144786
  derived and/or modified CDS sequence (opt3) from neuraminidase__InfluenzaA__ACU00944

SEQ ID NO: 145193 - RNA, 1410 nt, Artificial Sequence; identical to SEQ ID NO: 145140
  derived and/or modified CDS sequence (opt3) from neuraminidase__InfluenzaA__ACU00954

SEQ ID NO: 145194 - RNA, 1410 nt, Artificial Sequence
  derived and/or modified CDS sequence (opt3) from neuraminidase__InfluenzaA__ACU12497
augaaccccaaucagaagaucauuaccauaggcagcgugucccugacaaucgccacuauuugcuuccucaugcaaaucgcuauucuugucacgaccguuacacugcacuuuaaacaguacgaguguaacucuccuccaaauaaccaggugaugccgugcgaacccacuaucauagagagaaauaucaccgaaauuguauauuugacaaacaccacuaucgagagggaaauuuguccuaaguuaguggaguaccggaauuggucaaaaccacagugccgcgucacaggguucgcacccuuuaguaaggacaacagcauccgacuguccgccggaggugauauaugggugacccgugagccuuauguuucuugugacccaggcaaaugcuaccaauucgcgcuagggcagggaacgacucucaauaacagacauucgaaugauaccgugcacgacaggacacccuaucggacucugcuuaugaacgaacugggcgucccuuuucauuuggguaccaaacagguguguauugcuuggucaagcaguuccugccacgaugggaaggccuggcuccauguauguguuacaggacacgacgagaaugcaaccgccucuuucaucuacgauggccgccugguggacagcauugucuccuggucaaagaacauccugagaacgcaggaaagugagugcguguguaucaauggcacuugcacaguggucaugaccgaugggagcgcuucugagagggcagacacuaagauucucuuuauagaagagggaaaaaucguucacauuuccccauuaucagguagcgcccaacauguggaagagugcaguuguuauccgcgguaccccggcguacgcugcgugugucgagauaacuggaaggggucuaacagaccuaucgucgacauaaaugugaaagauuacuccauuguuagcucguaugugugcucuggacuggucggcgacacaccaaggaagaacgacuccucaaguagcuccuacugucggaaucccaacaaugaaaaggguucucacggggugaaaggaugggcuuucgaugacggcaacgauguauggaugggccguaccaucggggaggagcuucgcagcggauaugaaacguuuaagguuaucgguggcuggucaaccccuaauaguaaauugcagacaaacagacaggugauugucgacagggggaaucgguccggauacagcggcaucuucucuguggaggguaagucaugcauuaaccgauguuuuuaugucgaacugauacgcgggagaaaacaggagacuaaggugugguggaccaguaauagcaucguuguguucugcggcacauccggaacuuacggcaccgggucuuggccagauggagccgacauuaaccuaaugcccaucuga

SEQ ID NO: 145195 - RNA, 1413 nt, Artificial Sequence; identical to SEQ ID NO: 144680
  derived and/or modified CDS sequence (opt3) from neuraminidase__InfluenzaA__ACU12508

SEQ ID NO: 145196 - RNA, 1410 nt, Artificial Sequence
  derived and/or modified CDS sequence (opt3) from neuraminidase__InfluenzaA__ACU12519
augaaccccaaucagaagaucauuaccauaggcagcgugucccugacaaucucuacuauuugcuucuuuaugcaaaucgccauucucaucacgaccgucacacuucacuucaaacaguacgaguuuaacucaccuccaaauaaccagguuaugcugugugaaccgacuauaaucgagagaaauauuaccgaaaucguguauuugacaaacaccacuauugagaaggaaaucugccccaaauuagcugaguacaggaauuggaguaagccucaguguaacauaacaggguucgcaccauuuagcaaagacaauuccauucggcugucugccggaggugauaucuggguaacccgcgagcccuaugugucgugcgacccugauaaguguuaccaauucgcgcuaggccaggggacgacucucaacaauguccauucaaacgacaccgugcacgaucgaacaccauaucguacucugcuuaugaaugaacugggaguucccuuucauuugggcaccaaacaggugugcauugcuuggagcaguuccucuugucacgacgguaaggccuggcuccaugucugcaucacaggggaugacgagaacgcaaccgccagcuucaucuacaauggaagacugguggauuccguaguuucauggaguaagaaaauucugaggacgcaggaaagcgagugugugugcauaaacggcacuuguacagucgugaugaccgacggcucugcuuccgggaaggcagauacuaaaauccucuuuauugaggaaggaaagaucgugcacacaucaaccuuaagcgguagugcccaacacgucgaggaaugcucuugcuauccucgguacccaggcguucgcugugugugcagagacaacuggaagggguccaauaggccgauaguagauauuaacaucaaagacuacagcaucgugucgucuuaugucuguuccggacuggugggcgacacgccccggaagaaugauucaaguagcuccggucauugccuugacccuaacaaugaggaagggggacacggcguuaaaggcugggcuuucgaugacgggaacgauguguggaugggacgcaccauuucugagaaguugcgaagcgguuacgagacauuuaaagucaucgaaggcuggucaaauccaaacaguaagcugcagauuaauagacaggugauaguagacagggggaaccgguccggauauagcggcaucuucucuguugaggguaaaucauguauuaaucguugcuuuuacguggaacuaauccgcgggagaaaccaggagacugaaguccucuggaccaguaauagcaucguggucuucuguggcacauccggaacuuauggcaccgggucuuggcccgauggagccgacauuaaccugaugccuauauga

SEQ ID NO: 145197 - RNA, 1410 nt, Artificial Sequence
  derived and/or modified CDS sequence (opt3) from neuraminidase__InfluenzaA__ACU12530
augaaccccaaucagaagaucauuaccauaggcagcgugucccugacaaucucuacuauuugcuucuuuaugcaaaucgccauucucaucacgaccgucacacuucacuucaaacaguacgaguuuaacucaccuccaaauaaccagguuaugcugugugaaccgacuauaaucgagagaaauauuaccgaaaucguguauuugacaaacaccacuauugagaaggaaaucugccccaaauuagcugaguacaggaauuggaguaagccucaguguaacauaacaggguucgcaccauuuagcaaagacaauuccauucggcugucugccggaggugauaucuggguaacccgcgagcccuaugugucgugcgacccugauaaguguuaccaauucgcgcuaggccaggggacgacucucaacaauguccauucaaacgacaccgugcacgaucgaacaccauaucguacucugcuuaugaaugaacugggaguucccuuucauuugggcaccaaacaggugugcauugcuuggagcaguuccucuugucacgacgguaaggccuggcuccaugucugcgugacagggaacgauaagaaugcaaccgccagcuucaucuacaacggaagacugguagacuccaucguuucauggaguaaagagauucugaggacgcaggaaagcgagugugugugcauaaacggcacuuguacagucgugaugaccgauggcucugcuuccgggaaggcagacacuaaaauccucuuuauugaggaaggaaagaucgugcacacaucaaccuuaagcgguagugcccaacacgucgaggaaugcucuugcuauccucgguacccaggcguucgcugugugugcagagauaauuggaagggguccaacaggccgauaguagacauuaauaucaaagauuacagcaucgugucgucuuaugucuguuccggacuggugggcgacacgccccggaagaacgacucaaguagcuccucucauugccuugauccuaauaacgaggaaggugggcacggaguuaaaggcugggcuuucgacgauggcaaugacguguggauggggcgcaccauuagcgagaaguugcgaucaggauacgagacauuuaaagucaucgaagguuggaguaacccaaauuccaagcugcagauuaacagacaggugauaguagauaggggcaaucggagcggguauucuggaaucuucucaguugagggcaaaaguuguauuaaccguugcuuuuacguggaacuaauccgcgguagaaaggaggaaacugagguccucuggaccagcaauuccaucguggucuucugugggacaucuggcacuuauggaaccggcucguggcccgacggggccgauauuaaccugaugccuauauga

SEQ ID NO: 145198 - RNA, 1410 nt, Artificial Sequence
  derived and/or modified CDS sequence (opt3) from neuraminidase__InfluenzaA__ACU12541
augaaccccaaucagaagaucauuaccauaggcagcgugucccugacaaucucuacuauuugcuucuuuaugcaaaucgccauucucaucacgaccgucacacuucacuucaaacaguacgaguuuaacucaccuccaaauaaccagguuaugcugugugaaccgacuauaaucgagagaaauauuaccgaaaucguguauuugacaaacaccacuauugagaaggaaaucugccccaaauuagcugaguacaggaauuggaguaagccucaguguaacauaacaggguucgcaccauuuagcaaagacaauuccauucggcugucugccggaggugauaucuggguaacccgcgagcccuaugugucgugcgacccugauaaguguuaccaauucgcgcuaggccaggggacgacucucaacaauguccauucaaacgacaccgugcacgaucgaacaccauaucguacucugcuuaugaaugaacugggaguucccuuucauuugggcaccaaacaggugugcauugcuuggagcaguuccucuugucacgacgguaaggccuggcuccaugucugcgugacaggggaugacaagaacgcaaccgccagcuucaucuacaauggaagacugguagauuccaucguuucauggaguaaagagauucugaggacgcaggaaagcgagugugugugcauaaacggcacuuguacagucgugaugaccgacggcucugcuuccgggaaggcagauacuaaaauccucuuuauugaggaaggaaagaucgugcacacaucaaccuuaagcgguagugcccaacacgucgaggaaugcucuugcuauccucgguacccaggcguucgcugugugugcagagacaacuggaagggguccaauaggccgauaguagauauuaacaucaaagacuacagcaucgugucgucuuaugucuguuccggacuggugggcgacacgccccggaagaaugauucaaguagcuccucucauugccuugacccuaacaaugaggaaggugggcacggaguuaaaggcugggcuuucgaugacggcaacgauguguggauggggcgcaccauuagcgagaaguugcgaucaggauacgagacauuuaaagucaucgaagguuggaguaauccaaacuccaaguggcagauuaauagacaggugauaguagacaggggcaaccggagcggguauucuggaaucuucucaguugagggcaaaaguuguauuaaucguugcuuuuacguggaacugauccgcgguagaaaggaggaaacugagguccuauggaccagcaacuccaucguggucuucugugggacaucuggcacuuauggaaccggcucguggcccgauggggccgacauuaaucucaugccuauauga

SEQ ID NO: 145199 - RNA, 1410 nt, Artificial Sequence
  derived and/or modified CDS sequence (opt3) from neuraminidase__InfluenzaA__ACU12552
augaaccccaaucagaagaucauuaccauaggcagcgugucccugacaaucucuacuauuugcuucuuuaugcaaaucgccauucucaucacgaccgucacacuucacuucaaacaguacgaguuuaacucaccuccaaauaaccagguuaugcugugugaaccgacuauaaucgagagaaauauuaccgaaaucguguauuugacaaacaccacuauugagaaggaaaucugccccaaauuagcugaguacaggaauuggaguaagccucaguguaacauaacaggguucgcaccauuuagcaaagacaauuccauucggcugucugccggaggugauaucuggguaacccgcgagcccuaugugucgugcgacccugauaaguguuaccaauucgcgcuaggccaggggacgacucucaacaauguccauucaaacgacaccgugcacgaucgaacaccauaucguacucugcuuaugaaugaacugggaguucccuuucauuugggcaccaaacaggugugcauugcuuggagcaguuccucuugucacgacgguaaggccuggcuccaugucugcgugacaggggaugacaagaacgcaaccgccagcuucaucuacaauggaagacugguagauuccaucguuucauggaguaaagagauucugaggacgcaggaaagcgagugugugugcauaaacggcacuuguacagucgugaugaccgacggcucugcuuccgggaaggcagauacuaaaauccucuuuauugaggaaggaaagaucgugcacacaucaaccuuaagcgguagugcccaacacgucgaggaaugcucuugcuauccucgguacccaggcguucgcugugugugcagagacaacuggaagggguccaauaggccgauaguagauauuaacaucaaagacuacagcaucgugucgggauaugucuguucuggccuggugggugacacgccccggaagaaugauuccucaaguagcucccauugcucugacccuaacaaugaggaagggggacacggcguuaaaggcugggcuuucgaugacgggaacgauguguggaugggacgcaccauuagcgagaaacuucgaucagguuacgagacauuuaaggucaucgaaggcuggaguaauccaaacuccaaguugcagauuaauagacaggugauaguagacagggggaaccggagcggauauucuggcaucuucucaguugaggguaaaaguuguauuaaucguugcuuuuacguggaacugauccgcgggagaaaggaggaaacugagguccuauggaccagcaacuccaucguggucuucuguggcacaucuggaacuuauggcaccgggucguggcccgauggagccgacauuaaucucaugccuauauga

SEQ ID NO: 145200 - RNA, 1413 nt, Artificial Sequence
  derived and/or modified CDS sequence (opt3) from neuraminidase__InfluenzaA__ACU12574
augaaccccaaucagaagaucauuaccauaggcagcaucuccauugccaucgggauuaucaaccugaugcuccaaauaggaaauaucauuucuaucugggcuucacacaguauucagacagguagccagaacaauacuggcaucugcaaccagagaauaauuacguacgaaaauuccaccugggugaaccauacauaugucaauaucaacaauacuaacguuguggcaggggaggacaaaaccucuguaacacuugccggaaauucgucacuguguagcauuaguggcugggcgaucuacaccaaggauaacuccaucaggauugguucuaaaggggacguguucgucauacgggagccuuuuaucagcugcucccacuuggaaugucgcacuuucuuuuuaacacaaggagcucugcuaaaugauaagcauucaaacggcaccgugaaagaccgaaguccauaucgugcccucaugagcugcccgcugggcgaggcacccucuccuuacaacuccaaguucgaaucaguugccuggagcgcuagugcaugucacgaugggaugggauggcuuacgauugguaucucuggcccagacaauggggccguggcuguccugaaguauaacggaauaauuacuggcaccaucaaauccuggaagaaacagaucuugagaacacaggagagcgagugcguguguaugaaugguucgugcuuuacuauuaugaccgaugggcccucuaacaaggccgcguccuacaaaaucuucaagauugaaaagggaaaaguaacaaagucaauagagcucaaugcaccuaacuuuuauuacgaagaguguaguugcuacccagacaccggcaucguuaugugugugugcagggauaauuggcauggcagcaaccggcccugggucuccuucaaucagaaccuggacuaucaaauuggguacaucugcucuggaguguuuggugauaauccucgcccagaggacggcgaagggagcuguaacccggugacggucgauggagccaauggcguuaaagguuucucauauaaguacgacaacgggguguggaucggcagaacuaaaaguaauaggcugcggaagggauuugagaugauuugggaccccaacggcuggacaaacaccgauuccgacuucagcguaaaacaggauguggucgcuauaacugacuggucuggguauucaggaaguuuugugcagcacccugaacucacagguuuagauugcauccgcccauguuucuggguugagcuggugcgaggccuucccagagaaaauaccacgauuuggaccagcggguccucuaucucguucugcggagucaacagcgacacagccaauugguccuggccugauggcgcagaguugccauuuacuauugacaaguga

SEQ ID NO: 145201 - RNA, 1413 nt, Artificial Sequence; identical to SEQ ID NO: 144680
  derived and/or modified CDS sequence (opt3) from neuraminidase__InfluenzaA__ACU12585

SEQ ID NO: 145202 - RNA, 1413 nt, Artificial Sequence
  derived and/or modified CDS sequence (opt3) from neuraminidase__InfluenzaA__ACU12596
augaaccccaaucagaagaucauuaccauaggcagcaucuccauugccaucgggauuaucucucugaugcuccaaauaggaucaaucauuaguaucugggcuagccacuccauuagaacagguucucagaacaauacuggcaucugcaaccagaggauaauuacguacgagaauagcaccugggugaaccauacauaugucaauaucaacaauacuaacguuguggcaggggaagacaaaaagucaguaacccuugccggaaauagcagucuguguuccauuucuggcugggcgaucuacacaaaagauaacagcauccggauugguuccaagggggacguguucgucauacgcgagccuuuuaucucaugcagucacuuggaaugucgaaccuucuuuuuaacucagggagcucugcuaaaugauaaacauagcaacggcacagugaaggaccguucuccauauagagcccucauguccugcccgcugggcgaggcacccucaccuuacaauagcaaguucgaaaguguugccuggucugcuuccgcaugucacgaugggaugggauggcuuaccauugguaucagcggcccagacaacggggccguggcuguccugaaauauaacggaauaauuacgggcacuaucaagucguggaaaaagcaaaucuugaggacccaggagucugagugcguguguaugaaugguuccugcuuuacaauuaugacugaugggcccucaaacaaagccgcgaguuacaagaucuucaagauugaaaaaggaaagguaaccaaaagcauagagcucaaugcaccuaacuuuuauuacgaagaguguuccugcuacccagacacaggcaucguuaugugugugugccgggauaauuggcauggcucuaaccgccccugggucagcuucaaucagaaccuggacuaucagauuggguacaucugcucaggaguguuuggugauaauccuagaccagaggacggcgaagggaguuguaacccggugaccgucgauggagccaauggcguuaaggguuucuccuauaaauacgggaacggcguguggaucggaaggacgaagucgaaucggcugcgcaaaggcuuugagaugauuugggaccccaacggguggacuaauacagacucugauuucucaguaaagcaagacguggucgcuauaaccgauuggaguggauauagcgguuccuuugugcagcacccugaacucacuggcuuagacugcauccgaccauguuucuggguugagcuggugagagggcuucccagggaaaacacaaccauuuggacgucuggaucgagcaucuccuucugcggcgucaacucagauaccgccaauuggaguuggccugacggugcagaguugccauuuacaauugauaaguga

SEQ ID NO: 145203 - RNA, 1410 nt, Artificial Sequence; identical to SEQ ID NO: 144786
  derived and/or modified CDS sequence (opt3) from neuraminidase__InfluenzaA__ACU13077

SEQ ID NO: 145204 - RNA, 1410 nt, Artificial Sequence; identical to SEQ ID NO: 144786
  derived and/or modified CDS sequence (opt3) from neuraminidase__InfluenzaA__ACU13078

SEQ ID NO: 145205 - RNA, 1410 nt, Artificial Sequence; identical to SEQ ID NO: 144786
  derived and/or modified CDS sequence (opt3) from neuraminidase__InfluenzaA__ACU13079

SEQ ID NO: 145206 - RNA, 1410 nt, Artificial Sequence; identical to SEQ ID NO: 144786
  derived and/or modified CDS sequence (opt3) from neuraminidase__InfluenzaA__ACU13080

SEQ ID NO: 145207 - RNA, 1410 nt, Artificial Sequence; identical to SEQ ID NO: 144776
  derived and/or modified CDS sequence (opt3) from neuraminidase__InfluenzaA__ACU13081

SEQ ID NO: 145208 - RNA, 1410 nt, Artificial Sequence; identical to SEQ ID NO: 144786
  derived and/or modified CDS sequence (opt3) from neuraminidase__InfluenzaA__ACU13082

SEQ ID NO: 145209 - RNA, 1410 nt, Artificial Sequence; identical to SEQ ID NO: 144786
  derived and/or modified CDS sequence (opt3) from neuraminidase__InfluenzaA__ACU13083

SEQ ID NO: 145210 - RNA, 1410 nt, Artificial Sequence
  derived and/or modified CDS sequence (opt3) from neuraminidase__InfluenzaA__ACU13084
augaaccccaaucagaagaucauuaccauaggcagcgugugcaugacaaucgggauggccaaccugauucuccaaaucggaaauauuaucuccauauggaucucucacucaauucagcuugguaaccagaaucagaucgagacuuguaaccaaagugucauuacguacgaaaauaacaccuggguuaaucagacauaugugaacaucagcaauacuaacuucgcugcaggccaguccguagugucuaugaaacuggccggaaauucgucauugugcccugucgggggcugggcgauauacagcaaggacaacagugugagaauugguuccaaaggggauguuuuugugaucagggagccauucauuucuuguagcccguuagaaugccggaccuuuuuccugacacagggagcucuacucaaugacaagcauuccaacggcaccaucaaagaucgcucacccuaucgaacucugaugaguuguccuaucggcgaggucccaagccccuacaacucucguuuugaauccguggccuggucagcaagcgccugccacgacgggauuaauuggcuuacaauaggaaucagugguccugauaacggcgcuguagcaguucugaaguauaaugggauuaucaccgacacgauaaagucuuggagaaacaauauuuugaggacucaagaguccgagugugccugcgugaacggaagcuguuucaccgucaugacagauggcccaucgaauggucaggcuucuuacaaaaucuuucggaucgaaaaggggaaaauugugaaguccguggagaugaacgcccccaauuaucauuacgaagagugcucauguuacccugacaguagcgagaucacuugcgucugccgcgauaacuggcacggauccaauagaccauggguuucuuucaaccagaaucucgaauaucagauuggcuacauauguagcggcaucuuuggggacaacccgaggcccaaugauaaaaccggaucaugcgguccugugaguuccaacggcgcgaacgggguaaagggauucagcuuuaaguauggcaaugguguguggauugggcggacaaaaucuaucucaagucgcaacggcuucgagaugaucugggacccaaauggauggaccggcacggauaacaauuuuagcauuaagcaagacauagucgggaucaacgaaugguccggauacucugguucguucgugcagcaucccgagcugacuggccuggacuguauucgaccuugcuucuggguugaacucaucagagggaggccaaaagagaauacaauuuggaccagcggauccucaaucaguuuuuguggcgugaacucugauacugucgguuggagcuggcccgacggggcagaguuaccguucacaauagauaaguga

SEQ ID NO: 145211 - RNA, 1410 nt, Artificial Sequence; identical to SEQ ID NO: 144786
  derived and/or modified CDS sequence (opt3) from neuraminidase__InfluenzaA__ACU16799

SEQ ID NO: 145212 - RNA, 1410 nt, Artificial Sequence; identical to SEQ ID NO: 144786
  derived and/or modified CDS sequence (opt3) from neuraminidase__InfluenzaA__ACU16861

SEQ ID NO: 145213 - RNA, 1410 nt, Artificial Sequence; identical to SEQ ID NO: 144786
  derived and/or modified CDS sequence (opt3) from neuraminidase__InfluenzaA__ACU16934

SEQ ID NO: 145214 - RNA, 1410 nt, Artificial Sequence; identical to SEQ ID NO: 144786
  derived and/or modified CDS sequence (opt3) from neuraminidase__InfluenzaA__ACU16997

SEQ ID NO: 145215 - RNA, 1410 nt, Artificial Sequence; identical to SEQ ID NO: 144786
  derived and/or modified CDS sequence (opt3) from neuraminidase__InfluenzaA__ACU17130

SEQ ID NO: 145216 - RNA, 1410 nt, Artificial Sequence; identical to SEQ ID NO: 144786
  derived and/or modified CDS sequence (opt3) from neuraminidase__InfluenzaA__ACU17191

SEQ ID NO: 145217 - RNA, 1410 nt, Artificial Sequence
  derived and/or modified CDS sequence (opt3) from neuraminidase__InfluenzaA__ACU17262
augaaccccaaucagaagaucauuaccauaggcagcgugugcaugacaaucgggauggccaaccugauucuccaaaucggaaauauuaucuccauauggaucucucacucaauucagcuugguaaccagagucagaucgagacuuguaaucaaagcgucauuacguacgaaaacaauaccuggguuaaccagacauaugugaauaucuccaacacuaauuucgcugcaggccagucuguagugucggucaaacuggccgggaacagcagcuugugcccugugaguggaugggcgauauacuccaaggacaauucuauuagaaucggcagcaaaggugauguuuuugugauuagggagccauucaucuccuguucaccguuagaaugccggaccuuuuuccugacacagggggcucuacucaacgacaagcauaguaauggaaccaucaaagaucgcagccccuaucgaacucugaugucuuguccuauuggcgaggucccaucccccuacaacucacguuuugaaagcguggccuggagugcaucugccugccacgacggcauaaacuggcuuacaaucgggauuuccggaccugauaauggugcuguagcaguucugaaguauaacggcaucauaaccgacacgauuaagagcuggagaaauaacaucuugaggacucaagagucggagugugccugcgugaaugggucuuguuucaccgucaugacagauggaccauccgacggccaggcuucauacaaaaucuuucggauugaaaaggguaaaaucgugaagaguguggagaugaacgcccccaauuaucauuacgaagagugcagcuguuacccugauuccucugagauuacuugcgucugccgcgacaacuggcacgggagcaauagaccauggguuucauucaaccagaaucucgaauaucagauaggauacaucuguaguggcauuuuuggcgauaacccgaggcccaaugacaaaaccggguccugcggaccugugagcucuaacggugcgaauggcguaaagggguucucauuuaaguauggaaacggcguguggaucggucggacaaaaaguaucagcucccgcaacggguucgagaugauuugggauccaaauggcuggaccggaacggacaacaauuuuucuauaaagcaagacaucgucggcauuaacgaauggucgggguacagcggauccuucgugcagcaucccgagcugacuggucuggauuguauccgaccuugcuucuggguugaacucauuagaggcaggccaaaagagaauacaaucuggaccucagggaguucuauaucauuuuguggagugaacuccgacacugucggcuggucauggcccgauggugcagaguuaccguucacaaucgacaaguga

SEQ ID NO: 145218 - RNA, 1410 nt, Artificial Sequence; identical to SEQ ID NO: 144786
  derived and/or modified CDS sequence (opt3) from neuraminidase__InfluenzaA__ACU17325

SEQ ID NO: 145219 - RNA, 1410 nt, Artificial Sequence; identical to SEQ ID NO: 144786
  derived and/or modified CDS sequence (opt3) from neuraminidase__InfluenzaA__ACU17393

SEQ ID NO: 145220 - RNA, 1410 nt, Artificial Sequence; identical to SEQ ID NO: 144786
  derived and/or modified CDS sequence (opt3) from neuraminidase__InfluenzaA__ACU17454

SEQ ID NO: 145221 - RNA, 1410 nt, Artificial Sequence; identical to SEQ ID NO: 144786
  derived and/or modified CDS sequence (opt3) from neuraminidase__InfluenzaA__ACU17524

SEQ ID NO: 145222 - RNA, 1410 nt, Artificial Sequence; identical to SEQ ID NO: 145140
  derived and/or modified CDS sequence (opt3) from neuraminidase__InfluenzaA__ACU27043

SEQ ID NO: 145223 - RNA, 1413 nt, Artificial Sequence
  derived and/or modified CDS sequence (opt3) from neuraminidase__InfluenzaA__ACU27415
augaaccccaaucagaagaucauuaccauaggcagcaucuccauugccaucgggauuaucucucugaugcuccaaauaggaaacaucauuucaaucugggcuagucacagcauucagacagguucccagaauaacacuggcaucugcaaucagagaauaauuacguacgagaacucuaccugggugaaucauacauaugucaacaucaauaacacuaauguuguggcaggggaagacaaaaccucgguaacauucgccggaaacucaagccuuuguaguauuuccggcugggcgaucuacaccaaggauaauucuaucaggauugguagcaaaggggacguguuugucauacgggagccuuucaucuccugcucacaccuggaaugucgcacauuuuucuugacucaaggagcuuuacugaacgauaagcauaguaauggcaccgugaaagaccgaagcccauaucgugcccuaaugucuugcccgcucggcgaggcacccuccccuuacaacucaaaguuugaaagcguugccuggagugcuucugcaugucacgaugggaugggauggcugacgauugguaucuccggcccagacaacggggccguggcuguccuuaaguauaauggaauaauuacuggcaccaucaaaagcuggaagaaacagauccugagaacacaggagucggagugcguguguaugaacgguucuugcuucacuauuaugaccgaugggcccuccaauaaggccgcgucauacaaaaucuuuaagauugaaaagggaaaaguaacaaagaguauagaguugaacgcaccuaauuucuauuacgaagaguguagcugcuacccagacaccggcaucguuaugugugugugcagggauaacuggcauggcuccaaucggcccugggucucuuuuaaccagaaucucgacuaucaaauuggguacaucugcagcggaguguucggugauaacccucgcccagaggacggcgaagggucauguaauccggugacggucgauggagccaacggcguuaaagguuuuaguuauaaguacgggaauggcguguggaucggaagaacuaaauccaacaggcugcggaagggcuucgagaugauuugggaccccaauggguggacaaacaccgacagcgauuuuucuguaaaacaggacguggucgcuauaacugauuggucaggauauagugguagcuucgugcagcacccugaacugacaggccucgacugcauccgcccauguuucuggguugaguuagugcgagggcugcccagagaaaacaccacgauuuggaccuccggaucuucgaucagcuuuugcggcgucaauuccgauacagccaacuggucauggccugacggugcagagcuuccauucacuauugauaaguga

SEQ ID NO: 145224 - RNA, 1413 nt, Artificial Sequence; identical to SEQ ID NO: 145223
  derived and/or modified CDS sequence (opt3) from neuraminidase__InfluenzaA__ACU27416

SEQ ID NO: 145225 - RNA, 1410 nt, Artificial Sequence; identical to SEQ ID NO: 144776
  derived and/or modified CDS sequence (opt3) from neuraminidase__InfluenzaA__ACU29961

SEQ ID NO: 145226 - RNA, 1410 nt, Artificial Sequence
  derived and/or modified CDS sequence (opt3) from neuraminidase__InfluenzaA__ACU29971
augaaccccaaucagaagaucauuaccauaggcagcgugugcaugacaaucgggauggccaaccugauucuccaaaucggaaauauuaucuccauauggaucucucacucaauucagcuugguaaccagaaucagaucgagacuuguaaccaaagugucauuacguacgaaaauaacaccuggguuaaucagacauaugugaacaucagcaauacuaacuucgcugcaggccaguccguagugucugucaaacuggccggaaauucgucauugugcccugugagcggaugggcgauauacaguaaggacaacuccguuagaauuggcucuaaaggugauguguuugucaucagggagccauucauuagcuguuccccguuagaaugccggaccuuuuuccugacacagggggcucuacucaaugacaagcauucaaacggaaccaucaaagaucgcagucccuaucgaacucugaugagcuguccuaucggcgaggugccaucucccuacaacucccguuuugaaucaguagccuggagcgcaagugccugccacgacggcauuaauuggcuuacaauagggaucucuggaccugauaacggugcuguugcagugcugaaguauaauggcauuaucaccgacacgauaaaguccuggagaaacaauauuuugaggacucaagagagcgagugugccugcgucaacgggucguguuucaccgugaugacagauggaccaucuaauggccaggcuuccuacaaaaucuuucggaucgaaaaggguaaaauugugaagucagucgagaugaacgcccccaauuaucauuacgaagagugcaguuguuacccugacagcuccgagaucacuugcguuugccgcgauaacuggcacgggucuaauagaccaugggugagcuucaaccagaaucucgaauaucagauuggauacauauguucaggcaucuuuggcgacaacccgaggcccaaugauaaaaccgggaguugcggaccuguauccagcaacggugcgaacggcgugaagggguucucuuuuaaguauggaaauggcgucuggauuggucggacaaaaucaaucaguagccgcaacggguucgagaugaucugggacccaaauggcuggaccggaacggauaacaauuuuuccauuaagcaagacauagugggcaucaacgaauggucuggguacucggggagcuucguucagcaucccgagcugacuggucuggacuguauucgaccuugcuucuggguggaacucaucagaggcaggccaaaagagaauacaauuuggaccuccgggucaaguaucucuuuuuguggagucaacagcgauacugugggcugguccuggucagacggugcagaguuacccuucacaauagauaaguga

SEQ ID NO: 145227 - RNA, 1410 nt, Artificial Sequence; identical to SEQ ID NO: 144786
  derived and/or modified CDS sequence (opt3) from neuraminidase__InfluenzaA__ACU29981

SEQ ID NO: 145228 - RNA, 1410 nt, Artificial Sequence; identical to SEQ ID NO: 144786
  derived and/or modified CDS sequence (opt3) from neuraminidase__InfluenzaA__ACU29991

SEQ ID NO: 145229 - RNA, 1410 nt, Artificial Sequence; identical to SEQ ID NO: 144786
  derived and/or modified CDS sequence (opt3) from neuraminidase__InfluenzaA__ACU30001

SEQ ID NO: 145230 - RNA, 1410 nt, Artificial Sequence; identical to SEQ ID NO: 144786
  derived and/or modified CDS sequence (opt3) from neuraminidase__InfluenzaA__ACU30021

SEQ ID NO: 145231 - RNA, 1410 nt, Artificial Sequence
  derived and/or modified CDS sequence (opt3) from neuraminidase__InfluenzaA__ACU30085
augaaccccaaucagaagaucauuaccauaggcagcgugugcaugacaaucgggauggccaaccugauucuccaaaucggaaauauuaucuccauauggaucucucacucaauucagcuugguaaccagaaucagaucgagacuuguaaccaaagugucauuacguacgaaaauaacaccuggguuaaucagacauaugugaacaucagcaauacuaacuucgcugcaggccaguccguagugucugucaaacugaugggaaauucgucauugugcccugugagcggaugggccauauacaguaaggacaacuccguuagaauuggcucuaaaggugauguguuugucaucagggagccauucauuagcuguuccccguuagaaugccggaccuuuuuccugacacagggggcgcuacucaaugacaagcauucaaacggaaccaucaaagaucgcagucccuaucgaacucugaugagcuguccuaucggcgaggugccaucucccuacaacucccguuuugaaucaguagcuuggagcgccagugcaugccacgacggcauuaauuggcuuacaauagggaucucuggaccugauaacggugccguugcugugcugaaguauaauggcauuaucaccgacacgauaaaguccuggagaaacaauauuuugaggacucaagagagcgagugugcaugcgucaacgggucguguuucaccgugaugacagauggaccaucuaauggccaggccuccuacaaaaucuuucggaucgaaaaggguaaaauugugaagucagucgagaugaacgcucccaauuaucauuacgaagagugcaguuguuacccugacagcuccgagaucacuugcguuugccgcgauaacuggcacgggucuaauagaccaugggugagcuucaaccagaaucucgaauaucagauuggauacauauguucaggcaucuuuggcgacaacccgaggcccaaugauaaaaccgggaguugcggaccuguauccagcaacggugccaacggcgugaagggguucucuuuuaaguauggaaauggcgucuggauuggucggacaaaaucaaucaguagccgcaacggguucgagaugaucugggacccaaauggcuggaccggaacggauaacaauuuuuccauuaagcaagacauagugggcaucaacgaauggucuggguacucggggagcuucguucagcaucccgagcugacuggucuggacuguauucgaccuugcuucuggguggaacucaucagaggcaggccaaaagagaauacaauuuggaccuccgggucaaguaucucuuuuuguggagucaacagcgauacugugggcugguccuggcccgacggugcggaguuaccguucacaauagauaaguga

SEQ ID NO: 145232 - RNA, 1410 nt, Artificial Sequence; identical to SEQ ID NO: 145210
  derived and/or modified CDS sequence (opt3) from neuraminidase__InfluenzaA__ACU30095

SEQ ID NO: 145233 - RNA, 1410 nt, Artificial Sequence; identical to SEQ ID NO: 144786
  derived and/or modified CDS sequence (opt3) from neuraminidase__InfluenzaA__ACU30105

SEQ ID NO: 145234 - RNA, 1410 nt, Artificial Sequence; identical to SEQ ID NO: 144786
  derived and/or modified CDS sequence (opt3) from neuraminidase__InfluenzaA__ACU30114

SEQ ID NO: 145235 - RNA, 1410 nt, Artificial Sequence; identical to SEQ ID NO: 144786
  derived and/or modified CDS sequence (opt3) from neuraminidase__InfluenzaA__ACU30123

SEQ ID NO: 145236 - RNA, 1410 nt, Artificial Sequence
  derived and/or modified CDS sequence (opt3) from neuraminidase__InfluenzaA__ACU31177
augaaccccaaucagaagaucauuaccauaggcagcgugugcaugacaaucgggauggccaaccugauucuccaaaucggaaauauuaucuccauauggaucucucaccuuauucagcuggguaaccagaaucagaucgagacuuguaaccaaucagucauuacguacgaaaauaacaccuggguuaaucagacauaugugaacaucaguaauacuaacuucgcugcaggccagagcguaguguccgucaaauuggccggaaauucuucguuaugcccugugucaggaugggcgauauacagcaaggacaacaguauuagaaucggcuccaaaggugauguuuuugugauuagggagccauucaucucuuguagcccgcuggaaugccggaccuuuuuccuaacacagggggcucuccugaaugacaagcauuccaacggaaccaucaaagaucgcucacccuaucgaacucuuaugaguuguccuauuggcgaggucccaagccccuacaacucucguuuugaauccguggccuggucagcaagcgccugccacgacggcauaaguuggcugacaaucgggauuucuggaccugauaauggugcuguagcaguuuugaaguauaacggcaucauaaccgacacgauuaaguccuggagaaauaacauccucaggacucaagagagcgagugugccugcgugaaugggucguguuucaccgucaugacagauggaccaucugacggccaggcuuccuacaaaaucuuucggauugaaaaggguaaaaucgugaagucaguggagaugaacgcccccaauuaucauuacgaagagugcaguuguuacccugauagcuccgagauuacuugcgucugccgcgacaacuggcacgggucuaauagaccauggguuagcuucaaccagaaucuggaauaucagauaggauacaucuguucaggcauuuuuggcgauaacccgaggcccaaugacaaaaccgggaguugcggaccuguguccagcaacggugcgaauggcguaaagggguucucuuuuaaguauggaaacggcguguggaucggucggacaaaaucaaucaguagccgcaacggguucgagaugauuugggauccaaauggcuggaccggaacggacaacaauuuuuccauaaagcaagacaucgucggcauuaacgaauggucuggguacucggggagcuucgugcagcaucccgagcugacuggucucgauuguauccgaccuugcuucuggguugaauuaauuagaggcaggccaaaagagaauacaaucuggaccuccgggucaaguauaucuuuuuguggagugaacagcgacacugucggcugguccuggcccgauggugcagagcugccguucacaaucgacaaguga

SEQ ID NO: 145237 - RNA, 1410 nt, Artificial Sequence; identical to SEQ ID NO: 144786
  derived and/or modified CDS sequence (opt3) from neuraminidase__InfluenzaA__ACU31178

SEQ ID NO: 145238 - RNA, 1410 nt, Artificial Sequence; identical to SEQ ID NO: 144776
  derived and/or modified CDS sequence (opt3) from neuraminidase__InfluenzaA__ACU31179

SEQ ID NO: 145239 - RNA, 1410 nt, Artificial Sequence; identical to SEQ ID NO: 144776
  derived and/or modified CDS sequence (opt3) from neuraminidase__InfluenzaA__ACU31180

SEQ ID NO: 145240 - RNA, 1410 nt, Artificial Sequence; identical to SEQ ID NO: 144776
  derived and/or modified CDS sequence (opt3) from neuraminidase__InfluenzaA__ACU31181

SEQ ID NO: 145241 - RNA, 1410 nt, Artificial Sequence; identical to SEQ ID NO: 144786
  derived and/or modified CDS sequence (opt3) from neuraminidase__InfluenzaA__ACU31182

SEQ ID NO: 145242 - RNA, 1410 nt, Artificial Sequence; identical to SEQ ID NO: 144816
  derived and/or modified CDS sequence (opt3) from neuraminidase__InfluenzaA__ACU31183

SEQ ID NO: 145243 - RNA, 1410 nt, Artificial Sequence; identical to SEQ ID NO: 144786
  derived and/or modified CDS sequence (opt3) from neuraminidase__InfluenzaA__ACU31184

SEQ ID NO: 145244 - RNA, 1410 nt, Artificial Sequence; identical to SEQ ID NO: 144776
  derived and/or modified CDS sequence (opt3) from neuraminidase__InfluenzaA__ACU31185

SEQ ID NO: 145245 - RNA, 1410 nt, Artificial Sequence; identical to SEQ ID NO: 144776
  derived and/or modified CDS sequence (opt3) from neuraminidase__InfluenzaA__ACU31186

SEQ ID NO: 145246 - RNA, 1410 nt, Artificial Sequence; identical to SEQ ID NO: 144776
  derived and/or modified CDS sequence (opt3) from neuraminidase__InfluenzaA__ACU31187

SEQ ID NO: 145247 - RNA, 1410 nt, Artificial Sequence; identical to SEQ ID NO: 144776
  derived and/or modified CDS sequence (opt3) from neuraminidase__InfluenzaA__ACU31188

SEQ ID NO: 145248 - RNA, 1350 nt, Artificial Sequence
  derived and/or modified CDS sequence (opt3) from neuraminidase__InfluenzaA__ACU46645
augaaccccaauaagaaaaucauuaccauaggcagcaucugcauggugacagggauggucucccugaugcuccagauuggaaaccuuaucucuauuuggguuucacacaguauccauacugguaaucaacacaaggccgagccuauaagcaacacgaaucuguugaccgagaaaacaguggcuuccguaaaguuagcaggcaacucuucgcuguguccaaucaaugggugggccguguacucaaaagacaacagcauuagaaucggaaguaagggcgaugucuucgugauuagggaaccguuuaucuccugcucucaucuagaaugucggacuuucuuucucacccagggugcgcugcuuaaugacaagcacagcaacgggacaguuaaagaucgcucaccccaucgaacccugauguccggaccugugggcgaggcuccaagucccuauaauagccguuucgaauacgucgccuggucugcauccgccugccacgacagaacuucaagguugacaauaggcauuagcgggccugauaacggagcuguggcaguacucaaguauaaugguaucauuaccgacacgaucaaaaguuggcggaacaauauccugcgcacucaggagucugagugugccugcguuaacggcuccuguuuuaccgugaugacagaugggccaagcaacggacaggcuucgcacaagauuuucaaaauggaaaagggcaaggucgugaaaucuguggagcuggacgcccccaauuaccauuaugaagagugcuccuguuacccugaugcgggugagauaacuugcgucuguagagacaacuggcacgggucaaauaggccauggguuaguuuuaaccaaaaucucgaauaucagaucggauacauuugcagcggcguguucggcgauaacccgcggcccaaugacggggcaggauccugcgguccuguaucuagcaacggcgccuacggggugaagggauuuucauucaaauauggcaauggugucuggaucgggcgcaccaagaguacaaacucccgaagcggcuuugagaugauaugggauccaaauggauggaccgaaacggacucuucauucagugugaaacaggacauuguugcuaucacugauuggagcggcuacuccgggucuuuugugcagcaucccgaguuaacaggacuggacuguaucagaccuugcuucugggucgaacuuauuaggggucggccaaaggagucgaccaucuggacuagcggcuccucaauuaguuucuguggggugaacucugauacaguaggauggagcuggcccgacggcgccgaguugccguuuaccauagauaaauga

SEQ ID NO: 145249 - RNA, 1410 nt, Artificial Sequence
  derived and/or modified CDS sequence (opt3) from neuraminidase__InfluenzaA__ACU56927
augaaccccaaucagaagaucauuaccauaggcagcgugugcaugacaaucgggauggccaaccugauucuccaaaucggaaauauuaucuccauauggaucucucacucaauucagcuugguaaccagaaucagaucgagacuuguaaccaaagugucauuacguacgaaaauaacaccuggguuaaucagacauaugugaacaucagcaauacuaacuucgcugcaggccaguccguagugucugucaaacuggccggaaauucgucauugugcccugugagcggaugggcgauauacaguaaggacaacuccauuagaaucggcucuaaaggugauguuuuugugauuagggagccauucaucagcuguuccccguuagaaugccggaccuuuuuccugacacagggggcucuacucaaugacaagcauucaaacggaaccaucaaagaucgcagucccuaucgaacucugaugagcuguccuauuggcgaggucccaucucccuacaacucccguuuugaaucaguggccuggagcgcaagugccugccacgacggcauaaauuggcuuacaaucgggauuucuggaccugauaacggugcuguagcaguucugaaguauaauggcaucauaaccgacacgauuaaguccuggagaaacaauaucuugaggacucaagagagcgagugugccugcgugaacgggucguguuucaccgucaugacagauggaccaucuaauggccaggcuuccuacaaaaucuuucggauugacaaggguaaaaucgugaagucaguggaaaugaacgcccccaauuaucauuacgaggaaugcaguuguuacccugauagcuccgagauuacuugcgucugccgcgacaacuggcacgggucuaauagaccauggguuagcuucaaccagaaucucgaguaucagauaggauacaucuguucaggcauuuuuggcgauaacccgaggcccaaugacaaaaccgggaguugcggaccuguguccagcaacggugcgaacggcguaaagggguucucuuuuaaguauggaaauggcguguggaucggucggacaaaaucaaucaguagccgcaacggguucgaaaugauuugggauccaaauggcuggaccggaacggacaacaauuuuuccauaaagcaagacaucgucggcauuaacgaguggucuggguacucggggagcuucgugcagcaucccgaacugacuggucuggauuguauccgaccuugcuucuggguugagcucauuagaggcaggccaaaagaaaauacaaucuggaccuccgggucaaguauaucuuuuuguggagugaacagcgacacugucggcugguccuggcccgauggugcagaguuaccguucacaaucgacaaguga

SEQ ID NO: 145250 - RNA, 1410 nt, Artificial Sequence; identical to SEQ ID NO: 144941
  derived and/or modified CDS sequence (opt3) from neuraminidase__InfluenzaA__ACU56934

SEQ ID NO: 145251 - RNA, 1410 nt, Artificial Sequence; identical to SEQ ID NO: 144786
  derived and/or modified CDS sequence (opt3) from neuraminidase__InfluenzaA__ACU64791

SEQ ID NO: 145252 - RNA, 1410 nt, Artificial Sequence
  derived and/or modified CDS sequence (opt3) from neuraminidase__InfluenzaA__ACU64811
augaaccccaaucagaagaucauuaccauaggcagcgugugcaugacaaucgggauggccaaccugauucuccaaaucggaaauauuaucuccauauggaucucucacucaauucagcuugguaaccagaaucagaucgagacuuguaaccaaagugucauuacguacgaaaauaacaccuggguuaaucagacauaugugaacaucagcaauacuaacuucgcugcaggccaguccaugguaucugugaaacuggccggaaauucgucauugugcccugucagcggaugggcgauauacaguaaggacaacuccgugagaauuggcucuaaaggugauguuuuuaucauuagggagccauucaucagcuguuccccguuagaaugccggaccuuuuuccugacacagggggcucuacucaaugacaagcauucaaacggaaccaucaaagaucgcagucccuaucgaacucugaugagcuguccuauuggcgaggugccaucucccuacaacucccguuuugaaucagucgccuggagcgcaagugccugccacgacggcauaaauuggcuuacaaucgggauuucuggaccugauaacggugcuguggcaguacugaaguauaauggcaucauaaccgacacgauuaaguccuggagaaacaauaucuugaggacucaagagagcgagugugccugcguuaacgggucguguuucaccgugaugacagauggaccaucuaauggccaggcuuccuacaaaaucuuucggauugaaaaggguaaaaucgucaagucaguggagaugaacgcccccaauuaucauuacgaagagugcaguuguuacccugacagcuccgagauuacuugcgugugccgcgauaacuggcacgggucuaauagaccaugggucagcuucaaccagaaucucgaauaucagauaggauacaucuguucaggcauuuuuggcgacaacccgaggcccaaugauaaaaccgggaguugcggaccuguuuccagcaacggugcgaacggcgugaagggguucucuuuuaaguauggaaauggcguauggaucggucggacaaaaucaaucaguagccgcaacggguucgagaugauuugggacccaaauggcuggaccggaacggauaacaauuuuuccauaaagcaagacaucgugggcauuaacgaauggucuggguacucggggagcuucguccagcaucccgagcugacuggucuggacuguauccgaccuugcuucuggguggaacucauuagaggcaggccaaaagagaauacaaucuggaccuccgggucaaguauaucuuuuuguggaguuaacagcgauacugugggcugguccuggcccgacggugcagaguuaccguucacaaucgauaaguga

SEQ ID NO: 145253 - RNA, 1410 nt, Artificial Sequence; identical to SEQ ID NO: 144551
  derived and/or modified CDS sequence (opt3) from neuraminidase__InfluenzaA__ACU79885

SEQ ID NO: 145254 - RNA, 1410 nt, Artificial Sequence; identical to SEQ ID NO: 142143
  derived and/or modified CDS sequence (opt3) from neuraminidase__InfluenzaA__ACU79896

SEQ ID NO: 145255 - RNA, 1410 nt, Artificial Sequence; identical to SEQ ID NO: 142143
  derived and/or modified CDS sequence (opt3) from neuraminidase__InfluenzaA__ACU79918

SEQ ID NO: 145256 - RNA, 1410 nt, Artificial Sequence; identical to SEQ ID NO: 142143
  derived and/or modified CDS sequence (opt3) from neuraminidase__InfluenzaA__ACU79929

SEQ ID NO: 145257 - RNA, 1413 nt, Artificial Sequence
  derived and/or modified CDS sequence (opt3) from neuraminidase__InfluenzaA__ACU79940
augaaccccaaucagaagaucauuaccauaggcagcaucuccauugugaucgggauuaucucucugaugcuccaaauaggaaacaucauuucaaucugggccagucacagcauucagacagguucccagaaucauacuggcaucugcaaccagagaauaauuacguacgaaaauucuaccugggucaaccacacauauguuaauaucaacaauacuaacgugguagcugggaaagacaagaccucggugacacuugcaggaaauucaagccuguguaguauuuccggcugggccaucuacaccaaagauaacucuaucaggauugguagcaagggggacgucuucgugauacgggagccuuuuaucuccugcucacauuuggagugucgcacuuucuuuuuaacacaaggagcgcugcuaaaugauaaacacaguaacggcaccguuaaggaccgaagcccauaucgugcucucaugucuugcccgcugggcgaagcccccuccccuuacaauucaaaguucgagagcguggcauggagugccucugcuugucaugaugggaugggauggcuuacgauugguaucuccggcccagacaacggggcagucgccgugcugaaauauaacggaauaauuacugaaaccaucaagagcuggaaaaagagaaucuugaggacacaggagucggagugcguauguguuaauggcucuugcuuuacuauuaugaccgauggucccuccaacggggcugccucauacaaaaucuucaagauugaaaagggaaaagugacaaagaguauagagcucaaugcgccuaacagccacuaugaagaguguuccugcuacccagacaccggcacggucaugugugugugccgggauaauuggcacggcucuaaccgccccugggugagcuuuaaucagaaccuggacuaccagaucggguauauuugcucaggagucuucggugauaauccuagaccaaaagacggcgaggggaguuguaacccgguuacuguggauggagcagacggcguaaaggguuuuuccuacagguaugggaauggcguguggaucggacggacaaaaagcaaccgccugcgaaagggcuucgaaaugaucugggaccccaauggguggaccgauacugacucugauuuuucagucaaacaagacgugguugccaugacagauuggaguggauacagcgguuccuucgugcagcauccugagcucaccggcuuagacugcauuagaccauguuuuugggucgaacuggugagggggcggccccgugagaacacgaccauauggacaucuggaucgagcaucuccuucugcggcguaaauucagauacugcuaacuggaguuggccugacggugccgaacuuccauucaccauugauaaguga

SEQ ID NO: 145258 - RNA, 1410 nt, Artificial Sequence
  derived and/or modified CDS sequence (opt3) from neuraminidase__InfluenzaA__ACU79951
augaaccccaaucagaagaucauuaccauaggcagcgugucccugacaaucgagacugucugcuuccucaugcaaauugccauccuugcuacgaccguuacacugcacuuuaaacagcaugaaugugacucuccugcaucaaaccaggugaugccaugcgagccgauuaucauagaaagaaauaucacugagauuguauacuugaacaauaccacaaucgaaaaggagauuugucccgagguggucgaauauaggaacuggaguaaaccucagugccaaaucaccggguucgccccauuuagcaaggauaauuccauacgguuaucugcgggaggugacauuugggugacucgcgagcccuacguuucgugugauccuggcaaaugcuaucaguucgcucuggggcagggaacaacccuagacaacaagcacucaaauggcacgauccaugaucguauuccacaccgaacucuccugaugaacgaacuuggugugcccuuucaucuggggaccaagcaggucuguguggccuggagcaguuccucuugccacgacggaaaagcaugguugcacguauguguuacaggcgaugacagaaaugccacugcuagcuucaucuacgauggcaggcucguggacuccaucgggucauggagucaaaacauucugcggacccaggagagcgagugcgucuguauaaauggaacaugcaccguggugaugacggaugguucugcauccggccgcgccgacacuagaauccuguuuauuaaggaagggaaaaucguccauauaucaccucucagcggaagugcucagcacauugaggaaugcucuuguuauccaagguacccggauguucggugcaucugucgcgacaacuggaagggcuccaaucgacccgugaucgacauuaacauggaggauuauagcaucgacucgucuuacguaugcuccgguuuagugggggauacaccuagaaacgacgauucaaguagcaauuccaacuguagggacccaaauaacgaacggggaaaucccggcgucaaaggcugggccuucgauaacggggacgauguguggaugggacguaccauuucuaaggacagccgcucagguuacgagacuuuuaagguuauaggcggguggaguacaccuaauuccaaaagccaggugaacagacaagucaucgugggaaauaacaauuggucuggcuauucagguauuuucaguguagagggcaagagcugcaucaacagguguuuuuacguugaacugauccgggggcgaccacaggagacccgcgugugguggacguccaauucuauugucguguucugcggaaccucgggcacauaugggacuggaagcuggcccgauggugcgaacauaaauuuuaugccgaucuga

SEQ ID NO: 145259 - RNA, 1410 nt, Artificial Sequence; identical to SEQ ID NO: 144651
  derived and/or modified CDS sequence (opt3) from neuraminidase__InfluenzaA__ACU79973

SEQ ID NO: 145260 - RNA, 1413 nt, Artificial Sequence; identical to SEQ ID NO: 144680
  derived and/or modified CDS sequence (opt3) from neuraminidase__InfluenzaA__ACU79984

SEQ ID NO: 145261 - RNA, 1410 nt, Artificial Sequence; identical to SEQ ID NO: 144647
  derived and/or modified CDS sequence (opt3) from neuraminidase__InfluenzaA__ACU80006

SEQ ID NO: 145262 - RNA, 1410 nt, Artificial Sequence
  derived and/or modified CDS sequence (opt3) from neuraminidase__InfluenzaA__ACU80017
augaacaccaaucagagaaucauuacaauaggcacuaucugccugauuguggggaucauuagccuccuucugcaaaucggaaacauaaucuuguuauggaugucccacucuauucagacgggugagaagucacaucccaaaguguguaaucagaguguuaucaccuacgaaaacaauacaugggugaaccagacuuauguaaauauuagcaacaccaauaucgccgcuggccaaggggugacaccuauaauucuggcaggaaacuccucucuaugcccaaucucgggcugggccauuuacucaaaggacaauagcaucaggaucgguaguaaaggggauauuuucgucaugcgggagccguuuauauccuguucucaccucgaaugccgcaccuucuuucugacucagggagcgcuucugaacgaccgacauagcaauggcacagugaaggaucguucccccuauagaaccuugaugucauguccuaucggcgaggcuccaagucccuacaacagcagguucgaaucuguugccugguccgcaucagccugccacgacgggaugggauggcucacgauugguaucagcggcccugauaauggggcuguggcaguccugaaauauaacggaauaauuacugacaccaucaagaguuggcggaacaagauccugcgcacacaggagucugagugugugugcauuaauggcuccuguuuuacuaucaugaccgaugguccaagcaacgggcaggccucguacaaacucuucaagauggaaaaaggaaagauuauaagaucuaucgaguuagacgcucccaauuaucauuacgaagagugcuccuguuacccugauacaggcaaaguaguuugcgugugcagggacaacuggcacgccucaaaucggccaugggucaguuuugaucaaaaccuggacuaucagauuggcuacaucuguagcgggguguucggagauaauccgcgcuccaacgacgguaagggcaauugcgggcccgugcuuucuaacggagcgaauggcgucaaggguuuuagcuuccgauaugggaacggcguuuggaucggaagaaccaaaucaauuaguuccaggagcggcuuugagaugauaugggacccuaauggguggacggaaacugauucuucauucaguaugaagcaggacaucauugcauugacagauuggagcggauacuccgguucuuuugugcagcacccagagcugaccggcaugaacuguauccggcccugcuucuggguagaacuaauucgugggcaaccuaaagagucgacuaucuggacaagcggauccucaauaaguuucuguggcgucaauucugguaccgccagcugguccuggccagacggggcugaucuccccuuuacgaucgacaaguga

SEQ ID NO: 145263 - RNA, 1413 nt, Artificial Sequence; identical to SEQ ID NO: 144680
  derived and/or modified CDS sequence (opt3) from neuraminidase__InfluenzaA__ACU80028

SEQ ID NO: 145264 - RNA, 1410 nt, Artificial Sequence; identical to SEQ ID NO: 144647
  derived and/or modified CDS sequence (opt3) from neuraminidase__InfluenzaA__ACU80039

SEQ ID NO: 145265 - RNA, 1413 nt, Artificial Sequence; identical to SEQ ID NO: 144764
  derived and/or modified CDS sequence (opt3) from neuraminidase__InfluenzaA__ACU80050

SEQ ID NO: 145266 - RNA, 1410 nt, Artificial Sequence; identical to SEQ ID NO: 145197
  derived and/or modified CDS sequence (opt3) from neuraminidase__InfluenzaA__ACU80061

SEQ ID NO: 145267 - RNA, 1413 nt, Artificial Sequence; identical to SEQ ID NO: 144680
  derived and/or modified CDS sequence (opt3) from neuraminidase__InfluenzaA__ACU80072

SEQ ID NO: 145268 - RNA, 1413 nt, Artificial Sequence; identical to SEQ ID NO: 144680
  derived and/or modified CDS sequence (opt3) from neuraminidase__InfluenzaA__ACU80094

SEQ ID NO: 145269 - RNA, 1410 nt, Artificial Sequence; identical to SEQ ID NO: 144651
  derived and/or modified CDS sequence (opt3) from neuraminidase__InfluenzaA__ACU80105

SEQ ID NO: 145270 - RNA, 1410 nt, Artificial Sequence; identical to SEQ ID NO: 144651
  derived and/or modified CDS sequence (opt3) from neuraminidase__InfluenzaA__ACU80127

SEQ ID NO: 145271 - RNA, 1410 nt, Artificial Sequence; identical to SEQ ID NO: 144651
  derived and/or modified CDS sequence (opt3) from neuraminidase__InfluenzaA__ACU80138

SEQ ID NO: 145272 - RNA, 1410 nt, Artificial Sequence; identical to SEQ ID NO: 144647
  derived and/or modified CDS sequence (opt3) from neuraminidase__InfluenzaA__ACU80160

SEQ ID NO: 145273 - RNA, 1413 nt, Artificial Sequence; identical to SEQ ID NO: 144680
  derived and/or modified CDS sequence (opt3) from neuraminidase__InfluenzaA__ACU80171

SEQ ID NO: 145274 - RNA, 1410 nt, Artificial Sequence; identical to SEQ ID NO: 144560
  derived and/or modified CDS sequence (opt3) from neuraminidase__InfluenzaA__ACU80182

SEQ ID NO: 145275 - RNA, 1410 nt, Artificial Sequence
  derived and/or modified CDS sequence (opt3) from neuraminidase__InfluenzaA__ACU80193
augaaccccaaucagaagaucauuaccauaggcagcgugucccugacaaucucuacuauuugcuucuuuaugcaaacggccauccucauuaccacagucacucuucacuucaaacaguacgaguuuaacucaccuccaaauaaccagguuaugcugugugaaccgaccaucauagagagaaauaucacagaaauuguguauuugaccaacacuacaaucgagaaggaaauuugccccaaauuagcugaguacaggaauuggaguaagccucagugugacaucaccggguucgcaccauuuagcaaagauaacuccauacggcugucugccggaggugacauuuggguaacgcgcgagcccuaugugucgugcgauccugacaaguguuaccaauucgcgcuaggccaggggacuacccucaauaacguccauucaaaugauacagugcgagaccguacuccauauagaacccugcuuaugaacgaacugggaguucccuuucacuugggcacaaaacaggugugcaucgcuuggagcaguuccucuugucaugaugguaaggccuggcuccacgucugcauuaccggggacgauaagaaugcaacggccagcuucaucuacaacggaaggcugguggacuccaucguaucauggaguaaagagauucugcggacucaggaaagcgaguguguuugcauaaauggcacauguaccguggucaugacugauggcucugcuuccgggaaggcagacacaaaaauccucuuuauugaggaaggaaagaucgugcauaccucaacguuaagcgguagugcccaacacguggaggaaugcucuugcuauccucgcuacccaggcgucagauguguuugcagggauaacuggaagggguccaaccggccgauaguggacauuaauaucaaagaccacagcaucguaucgucuuacguguguuccggacuggucggcgauacaccccgcaagaacgacucaaguagcuccucucauugccuugauccuaauaacgaggaaggugggcacggagugaaaggcugggcuuucgacgauggcaaugacguuuggauggggcgaaccauuagcgagaagucaagauugggauaugagacuuuuaaagugaucgaagguuggaguaacccaaaguccaaacugcagauuaauaggcaggucauaguggaucggggcgaccguagcggguacucuggaaucuucucaguagagggcaagaguuguauuaaccgcugcuuuuauguugaacuaaucagagguaggaaggaggaaaccgaggugcucuggacaagcaauuccaucgucguguucugugggacuucuggcaccuacggaacaggcucguggcccgauggggccgacauuaaccugaugccuauauga

SEQ ID NO: 145276 - RNA, 1410 nt, Artificial Sequence; identical to SEQ ID NO: 144560
  derived and/or modified CDS sequence (opt3) from neuraminidase__InfluenzaA__ACU80204

SEQ ID NO: 145277 - RNA, 1413 nt, Artificial Sequence
  derived and/or modified CDS sequence (opt3) from neuraminidase__InfluenzaA__ACU80237
augaaccccaaucagaagaucauuaccauaggcagcaucuccauugccaucgggauuaucucucugaugcuccaaauaggaaacaucauuucaaucugggcuagucacagcauucagacagguaaucagaacaauacuggcaucugcaaccagagaauaauuacguacgaaaauuccaccugggugaaccauacauaugucaauaucaacaauacuaacguuguggcaggggaggacaaaaccucuguaacacuugccggaaauucgucacuguguagcauuaguggcugggcgaucuacaccaaggauaacuccaucaggauugguucuaaaggggacguguucgucauacgggagccuuuuaucagcugcucccacuuggaaugucgcacuuucuuuuuaacacaaggagcucugcuaaaugauaagcauucaaacggcaccgugaaagaccgaaguccauaucgugcccucaugagcugcccgcugggcgaggcacccucuccuuacaacuccaaguucgaaucaguugccuggagcgcuagugcaugucacgaugggaugggauggcuuacgauugguaucucuggcccagacaauggggccguggcuguccugaaguauaacggaauaauuacuggcaccaucaaauccuggaagaaacagaucuugagaacacaggagagcgagugcguguguaugaaugguucgugcuuuacuauuaugaccgaugggcccucuaacaaggccgcguccuacaaaaucuucaagauugaaaagggaaaaguaacaaagucaauagagcucaaugcaccuaacuuucauuaugaagaguguaguugcuacccagacaccggcaucguuaugugugugugcagggauaauuggcacggcagcaaccggcccugggucuccuucaaucagaaccuggacuaccaaauuggguauaucugcucuggaguguuuggugauaauccucgcccagaggacggcgaagggagcuguaacccggugacggucgauggagccaauggcguuaaagguuucucauacaaguaugacaacgggguguggaucggcagaacuaaaaguaauaggcugcggaagggauuugagaugauuugggaccccaacggcuggacaaacaccgauuccgacuucagcguaaaacaggauguggucgcuauaacugacuggucuggguacucaggaaguuuugugcagcacccugaacucacagguuuagauugcauccgcccauguuucuggguugagcuggugcgaggccuucccagagaaaauaccacgauuuggaccagcggguccucuaucucguucugcggagucaacagcgacacagccaauugguccuggccugauggcgcagaguugccauuuacuauugacaaguga

SEQ ID NO: 145278 - RNA, 1410 nt, Artificial Sequence; identical to SEQ ID NO: 144651
  derived and/or modified CDS sequence (opt3) from neuraminidase__InfluenzaA__ACU80248

SEQ ID NO: 145279 - RNA, 1410 nt, Artificial Sequence; identical to SEQ ID NO: 144651
  derived and/or modified CDS sequence (opt3) from neuraminidase__InfluenzaA__ACU80259

SEQ ID NO: 145280 - RNA, 1413 nt, Artificial Sequence
  derived and/or modified CDS sequence (opt3) from neuraminidase__InfluenzaA__ACU80270
augaaccccaaucagaagaucauuaccauaggcagcaucuccauugccaucgggauuaucucucugaugcuccaaauaggaaacaucauuucaaucugggcuagucacagcauucagacagguucccagaauaacacuggcaucugcaaucagagaauaauuacguacgagaacucuaccugggugaaucauacauaugucaacaucaauaacacuaauguuguggcaggggaagacaaaaccucgguaacacuugccggaaacucaagccuguguaguauuuccggcugggcgaucuacaccaaggauaauucuaucaggauugguagcaaaggggacguguucgucauacgggagccuuuuaucuccugcucacacuuggaaugucgcacuuucuuuuuaacacaaggagcucugcuaaacgauaagcauaguaauggcaccgugaaagaccgaagcccauaucgugcccucaugucuugcccgcugggcgaggcacccuccccuuacaacucaaaguucgaaagcguugccuggagugcuucugcaugucacgaugggaugggauggcuuacgauugguaucuccggcccagacaacggggccguggcuguccugaaguauaauggaauaauuacuggcaccaucaaaagcuggaagaaacagaucuugagaacacaggagucggagugcguguguaugaacgguucuugcuuuacuauuaugaccgaugggcccuccaauaaggccgcgucauacaaaaucuucaagauugaaaagggaaaaguaacaaagaguauagagcucaacgcaccuaauuuucauuaugaagaguguagcugcuacccagacaccuccaucguuaugugugugugcagggauaacuggcacggcucuaaucggcccugggucagcuucaaccagaaucuggacuaccaaauuggcuauaucugcucagggguguuuggagauaacccucgcccagaggacggugaaggcaguuguaauccggugacggucgauggggccaacggaguuaaaggcuucuccuacaaguaugacaaugguguguggaucgggagaacuaaaagcaacaggcugcggaagggcuuugagaugauuugggaccccaauggauggacaaacaccgauucugacuucucaguaaaacaggauguggucgcuauaacugacuggaguggcuacagcggguccuuugugcagcacccugaacucacaggauuagauugcauccgcccauguuucuggguugagcuggugcgaggucuucccagagaaaacaccacgauuuggaccucuggcucgagcaucuccuucugcggggucaauucagacacagccaacuggaguuggccugauggagcagaguugccauuuacuauugacaaguga

SEQ ID NO: 145281 - RNA, 1413 nt, Artificial Sequence
  derived and/or modified CDS sequence (opt3) from neuraminidase__InfluenzaA__ACU80281
augaaccagaaucaaaagaucauuaccauaggcagcaucuccauugccaucgggauuaucucucugaugcuccagauaggaaacaucauuucaaucugggcuagucacagcauucagacagguucccagaauaacacuggcaucugcaaucaaagaauaauuacguacgagaacucuaccugggugaaucauacauaugucaacaucaauaacacuaauguuguggcaggggaagacaaaaccucgguaacacuugccggaaacucaagccuguguaguauuuccggcugggcgaucuacaccaaggauaauucuaucaggauugguagcaaaggggacguguucgucauacgggagcccuuuaucuccugcucacacuuggaaugucgcacuuucuuuuuaacacagggagcucugcuaaacgauaagcauaguaauggcaccgugaaagaccgaagcccuuaucgugcccucaugucuugcccacugggcgaggcaccgucccccuacaacucaaaguucgaaagcguugccuggagugcuucugcaugucacgaugggaugggauggcuuacgauugguaucuccggcccugacaacggggccguggcuguccugaaguauaauggaauaauuacuggcaccaucaaaagcuggaagaaacagaucuugagaacacaggagucggagugcguguguaugaacgguucuugcuuuacuauuaugaccgaugggccauccaauaaggccgcgucauacaaaaucuucaagauugaaaagggaaaaguaacaaagaguauagagcucaacgcacccaauuuucauuaugaagaguguagcugcuacccugacaccggcaucguuaugugugugugcagggauaacuggcacggcuccaaucggccaugggucucuuucaaccaaaaucuggacuaccagauuggguauaucugcagcggaguguuuggugauaacccccgcccugaggacggcgaagggucauguaauccagugacggucgauggagccaacggcguuaaagguuucaguuacaaguaugacaaugggguguggaucggcagaacuaaauccaacaggcugcggaagggauuugagaugauuugggacccgaauggcuggacaaacaccgauagcgacuucucuguaaaacaggauguggucgcuauaacugacuggucaggguacagugguagcuuugugcagcaccccgaacucacaggauuagauugcauccgcccuuguuucuggguugagcuggugcgaggccuuccaagagaaaacaccacgauuuggaccuccgggucuucgaucagcuucugcggagucaauuccgacacagccaacuggucauggcccgauggcgcagaguugccuuuuacuauugacaaguga

SEQ ID NO: 145282 - RNA, 1410 nt, Artificial Sequence
  derived and/or modified CDS sequence (opt3) from neuraminidase__InfluenzaA__ACU80303
augaaccccaaucagaagaucauuaccauaggcagcgugucccugacaaucucuacuauuugcuucuuuaugcaaaucgccauucucaucacgaccgucacacuucacuucaaacaguacgaguuuaacucaaguccuaauaaccagguuaugcugugugaaccaacuauaaucgagagaaauauuaccgaaaucguguauuugacaaacaccacuauugagaaggaaaucugcccgaaauuagcugaguacaggaauuggagcaagccccagugugacauaacaggguucgcaccuuuuuccaaagauaacucuauucggcugucggccggaggugacaucuggguaacccgcgagccauaugugucaugcgaucccgacaaguguuaccaauucgcgcuaggccaggggacgacucucaauaacguccauagcaauaacaccgugcgagaucguacaccuuauagaacucugcuuaugaaugaacugggaguuccauuucacuugggcaccaaacaggugugcauugcuuggaguuccucuagcugucaugacgguaaggccuggcuccacgucugcaucacaggggaugacaagaacgcaaccgccuccuucaucuacaauggaaggcugguggauucaauuguaaguuggagcaaagagauacugcggacgcaggaaucugaguguguuugcaucaacggcacuuguacaguggucaugaccgacggcuccgcuucagggaaggcagauacuaaaauucucuuuaucgaggaaggaaagauagugcauacaagcaccuuaagugguucugcccaacacguggaggaaugcuccugcuauccccgcuacccuggcgucagauguguuugcagggacaacuggaaggggagcaaucggccaauuguggauaucaacaucaaagaccacucgauuguaucuuccuacguguguucaggacuggucggcgacacgccgcgcaagaaugauaguagcuccucuagccauugccuugaccccaacaaugaggaaggugggaacggagugaaaggcugggcuuucgaugacggcaaugauguuuggauggggcgaaccaucucagagaagaguagauugggauaugagacauuuaaagugauugaagguugguccaacccuaagagcaaacugcagauaaauaggcaggucaucguggaccggggcaaccguucuggguacucaggaauuuucaguguagagggcaagagcuguaucaaucgcugcuuuuauguugaacuaaucagagguaggaaggaggaaacugaggugcucuggaccuccaacucuauugucguguucugugggacaucgggcacuuacggaaccggcagcuggccagauggggccgacauaaaucugaugcccaucuga

SEQ ID NO: 145283 - RNA, 1410 nt, Artificial Sequence; identical to SEQ ID NO: 144651
  derived and/or modified CDS sequence (opt3) from neuraminidase__InfluenzaA__ACU80314

SEQ ID NO: 145284 - RNA, 1410 nt, Artificial Sequence; identical to SEQ ID NO: 144651
  derived and/or modified CDS sequence (opt3) from neuraminidase__InfluenzaA__ACU80325

SEQ ID NO: 145285 - RNA, 1410 nt, Artificial Sequence; identical to SEQ ID NO: 144647
  derived and/or modified CDS sequence (opt3) from neuraminidase__InfluenzaA__ACU80336

SEQ ID NO: 145286 - RNA, 1410 nt, Artificial Sequence; identical to SEQ ID NO: 144651
  derived and/or modified CDS sequence (opt3) from neuraminidase__InfluenzaA__ACU80347

SEQ ID NO: 145287 - RNA, 1410 nt, Artificial Sequence; identical to SEQ ID NO: 144651
  derived and/or modified CDS sequence (opt3) from neuraminidase__InfluenzaA__ACU80358

SEQ ID NO: 145288 - RNA, 1410 nt, Artificial Sequence; identical to SEQ ID NO: 144651
  derived and/or modified CDS sequence (opt3) from neuraminidase__InfluenzaA__ACU80369

SEQ ID NO: 145289 - RNA, 1410 nt, Artificial Sequence; identical to SEQ ID NO: 144651
  derived and/or modified CDS sequence (opt3) from neuraminidase__InfluenzaA__ACU80380

SEQ ID NO: 145290 - RNA, 1410 nt, Artificial Sequence
  derived and/or modified CDS sequence (opt3) from neuraminidase__InfluenzaA__ACU80391
augaaccccaaucagaagaucauuaccauaggcagcgugucccugacaaucucuacuauuugcuucuuuaugcaaaucgccauucucaucacgaccgucacacuucacuucaaacaguacgaguuuaacucaaguccuaauaaccagguuaugcugugugaaccaacuauaaucgagagaaauauuaccgaaaucguguauuugacaaacaccauuaucgagaaggaaauaugcccgaaauuagcugaguacaggaauuggagcaagccccagugugacauuacuggguucgcaccuuuuuccaaagauaacucuauccggcugucggccggaggugacauuuggguaacacgcgagccauaugugucaugcgaucccgacaaguguuaccaauucgcgcuaggccaggggaccacgcucaauaacguccauagcaauaacacugugcgagaucguaccccuuauagaacacugcuuaugaaugaacugggaguuccauuucacuugggcacuaaacaggugugcaucgcuuggaguuccucuagcugucaugacgguaaggccuggcuccacgucugcaucaccggggaugacaagaacgcaacagccuccuucauuuacaauggaaggcugguggauucaauaguaaguuggagcaaagagauccugcggacccaggaaucugaguguguuugcauuaacggcacguguacuguggucaugacagacggcuccgcuucagggaaggcagauaccaaaauccucuuuauagaggaaggaaagauugugcauacuagcacauuaagugguucugcccaacacguggaggaaugcuccugcuauccccgcuacccuggcgucagauguguuugcagggacaacuggaaggggagcaaucggccaaucguggauaucaacauuaaagaccacucgaucguaucuuccuacguguguucaggacuggucggcgacaccccgcgcaagaaugauaguagcuccucuagccauugccuugaccccaacaaugaggaaggugggcacggagugaaaggcugggcuuucgaugacggcaacgauguuuggauggggcgaacgauuucagagaagaguagauugggauaugagaccuuuaaagugauagaagguugguccaauccuaagagcaaacugcagaucaacaggcaggucauuguggaccggggcaaucguucuggguacucaggaaucuucaguguagagggcaagagcuguaucaaccgcugcuuuuauguugaacuaauuagagguaggaaggaggaaacagaggugcucuggacuuccaauucuauagucguguucugugggaccucgggcacauacggaacuggcagcuggccagauggggccgacaucaaccugaugcccauuuga

SEQ ID NO: 145291 - RNA, 1410 nt, Artificial Sequence; identical to SEQ ID NO: 144647
  derived and/or modified CDS sequence (opt3) from neuraminidase__InfluenzaA__ACU80402

SEQ ID NO: 145292 - RNA, 1413 nt, Artificial Sequence; identical to SEQ ID NO: 144680
  derived and/or modified CDS sequence (opt3) from neuraminidase__InfluenzaA__ACU80413

SEQ ID NO: 145293 - RNA, 1410 nt, Artificial Sequence; identical to SEQ ID NO: 144651
  derived and/or modified CDS sequence (opt3) from neuraminidase__InfluenzaA__ACU80427

SEQ ID NO: 145294 - RNA, 1410 nt, Artificial Sequence; identical to SEQ ID NO: 144651
  derived and/or modified CDS sequence (opt3) from neuraminidase__InfluenzaA__ACU80438

SEQ ID NO: 145295 - RNA, 1410 nt, Artificial Sequence; identical to SEQ ID NO: 144647
  derived and/or modified CDS sequence (opt3) from neuraminidase__InfluenzaA__ACU80461

SEQ ID NO: 145296 - RNA, 1410 nt, Artificial Sequence; identical to SEQ ID NO: 144651
  derived and/or modified CDS sequence (opt3) from neuraminidase__InfluenzaA__ACU80603

SEQ ID NO: 145297 - RNA, 1410 nt, Artificial Sequence; identical to SEQ ID NO: 144651
  derived and/or modified CDS sequence (opt3) from neuraminidase__InfluenzaA__ACU80614

SEQ ID NO: 145298 - RNA, 1410 nt, Artificial Sequence; identical to SEQ ID NO: 144651
  derived and/or modified CDS sequence (opt3) from neuraminidase__InfluenzaA__ACU80625

SEQ ID NO: 145299 - RNA, 1410 nt, Artificial Sequence; identical to SEQ ID NO: 144647
  derived and/or modified CDS sequence (opt3) from neuraminidase__InfluenzaA__ACU80636

SEQ ID NO: 145300 - RNA, 1410 nt, Artificial Sequence
  derived and/or modified CDS sequence (opt3) from neuraminidase__InfluenzaA__ACU80647
augaaccccaaucagaagaucauuaccauaggcagcgugucccugacaaucucuacuauuugcuucuuuaugcaaacggccauccucauuaccacagucacucuucacuucaaacaguacgaguuuaacucaccuccaaauaaccagguuaugcugugugaaccgaccaucauagagagaaauaucacagaaauuguguauuugaccaacacuacaaucgagaaggaaauuugccccaaauuagcugaguacaggaauuggaguaagccucagugugacaucaccggguucgcaccauuuagcaaagauaacuccauacggcugucugccggaggugacauuuggguaacgcgcgagcccuaugugucgugcgauccugacaaguguuaccaauucgcgcuaggccaggggacuacccucaauaacguccauucaaaugauacagugcgagaccguacuccauauagaacccugcuuaugaacgaacugggaguucccuuucacuugggcacaaaacaggugugcaucgcuuggagcaguuccucuugucaugaugguaaggccuggcuccacgucugcauuaccggggacgauaagaaugcaacggccagcuucaucuacaacggaaggcugguggacuccguaguuucauggaguaaagagauccugcggacucaggaaagcgagugugugugcauuaauggcacauguaccgucgugaugacugauggcucugcuuccgggaaggcagacacaaaaauacucuuuaucgaggaaggaaagauugugcauaccucaacguuaagcgguagugcccaacacgucgaggaaugcucuugcuauccucgcuacccaggcguuagaugugugugcagggauaacuggaagggguccaaccggccgaucguagacauaaauauuaaagaccacagcaucgugucgucuuacgucuguuccggacuggugggcgauacccccaggaagaacgacucaaguagcuccucucauugccuugauccuaauaacgaggaaggugggcacggaguuaaaggcugggcuuucgacgauggcaaugacguguggauggggcgaacaaucagcgagaagucaagauugggauaugagacuuuuaaagucauugaagguuggaguaacccaaaguccaaacugcagaucaaucgccaggugauuguagaucggggcgaccguagcggguacucuggaauauucucaguugagggcaagaguuguaucaaccgcugcuuuuauguggaacuaauuagagguaggaaggaggaaaccgagguccucuggacaagcaauuccaucguggucuucugugggacuucuggcaccuacggaacaggcucguggcccgauggggccgacaucaaccugaugccuauuuga

SEQ ID NO: 145301 - RNA, 1410 nt, Artificial Sequence
  derived and/or modified CDS sequence (opt3) from neuraminidase__InfluenzaA__ACU80658
augaaccccaaucagaagaucauuaccauaggcagcgugucccugacaaucucuacuauuugcuucuuuaugcaaaucgccauucucaucacgaccgucacacuucacuucaaacaguacgaguuuaacucaccuccaaauaaccagguuaugcugugugaaccgaagauaaucgagagaaauauuacugaaaucguguauuugaccaacacaaccauugagaaagaaaucugccccaaguuagcugaguacaggaauuggaguaaaccucagugugacauaacuggguucgcaccauuuagcaaggauaacuccauucggcugucugccggaggugacaucuggguaacacgcgagcccuaugugucgugcgauccugacaaguguuaccaauucgcgcuaggccaggggaccacgcucaauaacguccauucaaaugauacugugcgagaccguaccccauauagaacacugcuuaugaacgaacugggaguucccuuucacuugggcacuaaacaggugugcauugcuuggagcaguuccucuugucaugaugguaaggccuggcuccacgucugcaucaccggggacgauaaaaaugcaacagccagcuucaucuacaacggaaggcugguggacuccguaguuucauggaguaaggagauucugcggacccaggaaagcgagugugugugcauaaauggcacguguacugucgugaugacagauggcucugcuuccgggaaagcagacaccaagauccucuuuauugaggaaggaaagaucgugcauacuucaacauuaagcgguagugcccaacacgucgaggaaugcucuugcuauccucgcuacccaggcguuagaugugugugcagggauaacuggaaaggguccaaccggccgauaguagacauuaauaucaaggaccacagcaucgugucgucuuacgucuguuccggacuggugggcgauacccccaggaaaaacgacucaaguagcuccucucauugccuugauccuaauaacgaggaaggugggcacggaguuaagggcugggcuuucgacgauggcaaugacguguggauggggcgaacgauuagcgagaaaucaagauugggauaugagaccuuuaaggucaucgaagguuggaguaacccaaaauccaagcugcagauuaaucgccaggugauaguagaucggggcaaccguagcggguacucuggaaucuucucaguugagggcaagaguuguauuaaucgcugcuuuuauguggaacuaaucagagguaggaaagaggaaacagagguccucuggacuagcaacuccaucguggucuucugugggaccucuggcacauacggaacuggcucguggcccgacggggccgauauuaaucugaugccuauauga

SEQ ID NO: 145302 - RNA, 1410 nt, Artificial Sequence; identical to SEQ ID NO: 144560
  derived and/or modified CDS sequence (opt3) from neuraminidase__InfluenzaA__ACU80669

SEQ ID NO: 145303 - RNA, 1410 nt, Artificial Sequence; identical to SEQ ID NO: 144647
  derived and/or modified CDS sequence (opt3) from neuraminidase__InfluenzaA__ACU80691

SEQ ID NO: 145304 - RNA, 1410 nt, Artificial Sequence; identical to SEQ ID NO: 144651
  derived and/or modified CDS sequence (opt3) from neuraminidase__InfluenzaA__ACU80702

SEQ ID NO: 145305 - RNA, 1410 nt, Artificial Sequence; identical to SEQ ID NO: 144651
  derived and/or modified CDS sequence (opt3) from neuraminidase__InfluenzaA__ACU80713

SEQ ID NO: 145306 - RNA, 1410 nt, Artificial Sequence; identical to SEQ ID NO: 144647
  derived and/or modified CDS sequence (opt3) from neuraminidase__InfluenzaA__ACU80724

SEQ ID NO: 145307 - RNA, 1410 nt, Artificial Sequence; identical to SEQ ID NO: 144560
  derived and/or modified CDS sequence (opt3) from neuraminidase__InfluenzaA__ACU80735

SEQ ID NO: 145308 - RNA, 1410 nt, Artificial Sequence; identical to SEQ ID NO: 144647
  derived and/or modified CDS sequence (opt3) from neuraminidase__InfluenzaA__ACU80746

SEQ ID NO: 145309 - RNA, 1410 nt, Artificial Sequence
  derived and/or modified CDS sequence (opt3) from neuraminidase__InfluenzaA__ACU80757
augaaccccaaucagaagaucauuaccauaggcagcgugucccugacaaucucuacuauuugcuucuuuaugcaaaucgccauucucaucacgaccgucacacuucacuucaaacaguacgaguuuaacucaccuccaaauaaccagguuaugcugugugaaccgacuauaaucgagagaaauauuaccgaagugguauauuugacaaacaccacuaucgagaaggaaauuugccccaaauuagcugaguacaggaauuggaguaagccucagugugacaucacaggguucgcaccauuuagcaaagauaacuccauacggcugucugccggaggugacauuugggugacccgcgagcccuaugucucgugcgauccugacaaguguuaccaauucgcgcuaggccaggggacgacucucaauaacgugcauucaaaugauaccguucgagaccguacaccauauagaacucugcuuaugaacgaacugggagugcccuuucacuugggcaccaagcaggucugcaucgcuuggagcaguuccucuugucaugaugguaaagccuggcuccacgugugcauuacaggggacgauaagaaugcaaccgccagcuucaucuacaacggaaggcugguagacuccguugugucauggaguaaagagauccugcggacgcaggaaagcgagugugucugcauuaauggcacuuguacaguggugaugaccgauggcucugcuuccgggaaggcagacacuaaaauacucuuuaucgaggaaggaaagauuguccauacaucaaccuuaagcgguagugcccaacacguugaggaaugcucuugcuauccucgcuacccaggcgugagauguguaugcagggauaacuggaagggguccaaccggccgaucguggacauaaauauuaaagaccacagcaucgucucgucuuacguguguuccggacugguuggcgauacgccccgcaagaacgacucaaguagcuccucucauugccuugauccuaauaacgaggaaggugggcacggagugaaaggcugggcuuucgacgauggcaaugacgucuggauggggcgaaccaucagcgagaagucaagauugggauaugagacauuuaaagugauugaagguuggaguaacccaaaguccaaacugcagaucaauaggcagguaauuguugaucggggcaaccguagcggguacucuggaauauucucaguggagggcaagaguuguaucaaucgcugcuuuuaugucgaacuaauuagagguaggaaggaggaaacugaggugcucuggaccagcaacuccaucgucguguucugugggacaucuggcacuuacggaaccggcucguggcccgacggggccgauaucaaucugaugccuauuuga

SEQ ID NO: 145310 - RNA, 1410 nt, Artificial Sequence; identical to SEQ ID NO: 145275
  derived and/or modified CDS sequence (opt3) from neuraminidase__InfluenzaA__ACU80768

SEQ ID NO: 145311 - RNA, 1410 nt, Artificial Sequence; identical to SEQ ID NO: 144647
  derived and/or modified CDS sequence (opt3) from neuraminidase__InfluenzaA__ACU80779

SEQ ID NO: 145312 - RNA, 1410 nt, Artificial Sequence; identical to SEQ ID NO: 144560
  derived and/or modified CDS sequence (opt3) from neuraminidase__InfluenzaA__ACU80790

SEQ ID NO: 145313 - RNA, 1410 nt, Artificial Sequence; identical to SEQ ID NO: 144647
  derived and/or modified CDS sequence (opt3) from neuraminidase__InfluenzaA__ACU80801

SEQ ID NO: 145314 - RNA, 1410 nt, Artificial Sequence
  derived and/or modified CDS sequence (opt3) from neuraminidase__InfluenzaA__ACU81106
augaaccccaaucagaagaucauuaccauaggcagcgugucccugacaaucucuacuauuugcuucuuuaugcagaucgccauucucaucacgaccgucacacuucacuucaaacaguacgaguuuaacucaccuccaaauaaccagguuaugcugugugaaccgacuauaaucgagagaaauauuaccgaaaucguguauuugacaaacaccacuauugagaaggaaaucugccccaaauuagcugaguacaggaauuggaguaagccucagugugacauaacaggguucgcaccauuuagcaaagauaacuccauucggcugucugccggaggugacaucuggguaacccgcgagcccuaugugucgugcgauccugacaaguguuaccaauucgcgcuaggccaggggacgacucucaauaacguccauucaaauaacaccgugcgagaucguacaccauauagaacucugcuuaugaaugaacugggaguucccuuucacuugggcaccaaacaggugugcauugcuuggagcaguuccucuugucaugacgguaaggccuggcuccacgucugcaucacaggggaugacaagaacgcaaccgccagcuucaucuacaauggaaggcugguggauuccguaguuucauggaguaaagagauucugcggacgcaggaaagcgagugugugugcauaaacggcacuuguacagucgugaugaccgacggcucugcuuccgggaaggcagauacuaaaauccucuuuauugaggaaggaaagaucgugcauacaucaaccuuaagcgguagugcccaacacgucgaggaaugcucuugcuauccucgcuacccaggcguuagaugugugugcagggacaacuggaagggguccaaucggccgauaguagauauuaacaucaaagaccacagcaucgugucgucuuacgucuguuccggacuggugggcgacacgccccgcaagaaugauucaaguagcuccucucauugccuugacccuaacaaugaggaaggugggcacggaguuaaaggcugggcuuucgaugacggcaacgauguguggauggggcgaaccauuagcgagaagucaagauugggauaugagacauuuaaagucaucgaagguuggaguaauccaaaguccaaacugcagauuaacaggcaagugauaguagaccggggcaauagcucuggguacucaggaaucuucaguguugagggcaagagcuguauuaaccguugcuuuuauguggaacuaauccgcgguagaaaggaggaaacugagguccucuggaccuccaauucuaucguggucuucugugggacaucgggcacuuacggaaccggcagcuggcccgauggggccgacauuaaccugaugccuauauga

SEQ ID NO: 145315 - RNA, 1410 nt, Artificial Sequence; identical to SEQ ID NO: 144941
  derived and/or modified CDS sequence (opt3) from neuraminidase__InfluenzaA__ACU87265

SEQ ID NO: 145316 - RNA, 1410 nt, Artificial Sequence; identical to SEQ ID NO: 144786
  derived and/or modified CDS sequence (opt3) from neuraminidase__InfluenzaA__ACU87273

SEQ ID NO: 145317 - RNA, 1410 nt, Artificial Sequence; identical to SEQ ID NO: 144786
  derived and/or modified CDS sequence (opt3) from neuraminidase__InfluenzaA__ACV04231

SEQ ID NO: 145318 - RNA, 1410 nt, Artificial Sequence; identical to SEQ ID NO: 144786
  derived and/or modified CDS sequence (opt3) from neuraminidase__InfluenzaA__ACV04241

SEQ ID NO: 145319 - RNA, 1410 nt, Artificial Sequence; identical to SEQ ID NO: 144786
  derived and/or modified CDS sequence (opt3) from neuraminidase__InfluenzaA__ACV04251

SEQ ID NO: 145320 - RNA, 1410 nt, Artificial Sequence; identical to SEQ ID NO: 144786
  derived and/or modified CDS sequence (opt3) from neuraminidase__InfluenzaA__ACV04261

SEQ ID NO: 145321 - RNA, 1410 nt, Artificial Sequence; identical to SEQ ID NO: 144786
  derived and/or modified CDS sequence (opt3) from neuraminidase__InfluenzaA__ACV04271

SEQ ID NO: 145322 - RNA, 1410 nt, Artificial Sequence
  derived and/or modified CDS sequence (opt3) from neuraminidase__InfluenzaA__ACV04281
augaaccccaaucagaagaucauuaccauaggcagcgugugcaugacaaucgggauggccaaccugauucuccaaaucggaaauauuaucuccauauggaucucucacucaauucagcuugguaaccagaaucagaucgagacuuguaaccaaagugucauuacguacgaaaauaacaccuggguuaaucagacauaugugaacaucggcaauacuaacuucgcugcagggcagagcguaguguccgucaaacuggccggaaauucuucguugugcccugugucaggcugggcgauauacagcaaggacaacaguauuagaaucgguuccaaaggggauguuuuugugauuagggagccauucaucucuuguagcccguuagaaugccggaccuuuuuccugacacagggagcucuacucaaugacaagcauuccaacggcaccaucaaagaucgcucacccuaucgaacucugaugaguuguccuauuggcgaggucccaagccccuacaacucucguuuugaauccguggccuggucagcaagcgccugccacgacgggauaaauuggcuuacaaucggaauuagugguccugauaacggcgcuguagcaguucugaaguauaaugggaucauaaccgacacgauuaagucuuggagaaacaauaucuugaggacucaagaguccgagugugccugcgugaacggaagcuguuucaccgucaugacagauggcccaucggacggucaggcuucuuacaaaaucuuucggauugaaaaggggaaaaucgugaaguccguggagaugaaugcccccaacuaucauuacgaagagugcucauguuacccugauaguagcgagauuacuugcgucugccgcgacaauuggcacggauccaacagaccauggguuucuuucaaucagaaccucgaauaucagauaggcuacaucuguagcggcauuuuuggggauaauccgaggcccaacgacaaaaccggaucaugcgguccugugaguuccaauggcgcgaacgggguaaagggauucagcuuuaaguauggcaacgguguguggaucgggcggacaaaaucuaucucaagucgcaauggcuucgagaugauuugggauccaaacggauggaccggcacggacaauaacuuuagcauaaagcaagacaucgucgggauuaaugaaugguccggauacucugguucguucgugcagcaucccgagcugacuggccuggauuguauccgaccuugcuucuggguugaacucauuagagggaggccaaaagagaacacaaucuggaccagcggauccucaauaaguuuuuguggcgucaauucugacacuguggguuggagcuggcccgauggggcagaguuaccguucacaaucgacaaguga

SEQ ID NO: 145323 - RNA, 1410 nt, Artificial Sequence; identical to SEQ ID NO: 144786
  derived and/or modified CDS sequence (opt3) from neuraminidase__InfluenzaA__ACV04291

SEQ ID NO: 145324 - RNA, 1410 nt, Artificial Sequence; identical to SEQ ID NO: 144786
  derived and/or modified CDS sequence (opt3) from neuraminidase__InfluenzaA__ACV04301

SEQ ID NO: 145325 - RNA, 1410 nt, Artificial Sequence; identical to SEQ ID NO: 144786
  derived and/or modified CDS sequence (opt3) from neuraminidase__InfluenzaA__ACV04321

SEQ ID NO: 145326 - RNA, 1410 nt, Artificial Sequence; identical to SEQ ID NO: 144786
  derived and/or modified CDS sequence (opt3) from neuraminidase__InfluenzaA__ACV04331

SEQ ID NO: 145327 - RNA, 1410 nt, Artificial Sequence; identical to SEQ ID NO: 144786
  derived and/or modified CDS sequence (opt3) from neuraminidase__InfluenzaA__ACV04341

SEQ ID NO: 145328 - RNA, 1410 nt, Artificial Sequence; identical to SEQ ID NO: 144786
  derived and/or modified CDS sequence (opt3) from neuraminidase__InfluenzaA__ACV04351

SEQ ID NO: 145329 - RNA, 1410 nt, Artificial Sequence; identical to SEQ ID NO: 144786
  derived and/or modified CDS sequence (opt3) from neuraminidase__InfluenzaA__ACV04361

SEQ ID NO: 145330 - RNA, 1410 nt, Artificial Sequence; identical to SEQ ID NO: 144786
  derived and/or modified CDS sequence (opt3) from neuraminidase__InfluenzaA__ACV04371

SEQ ID NO: 145331 - RNA, 1410 nt, Artificial Sequence; identical to SEQ ID NO: 144786
  derived and/or modified CDS sequence (opt3) from neuraminidase__InfluenzaA__ACV04381

SEQ ID NO: 145332 - RNA, 1410 nt, Artificial Sequence; identical to SEQ ID NO: 144786
  derived and/or modified CDS sequence (opt3) from neuraminidase__InfluenzaA__ACV04391

SEQ ID NO: 145333 - RNA, 1410 nt, Artificial Sequence; identical to SEQ ID NO: 144786
  derived and/or modified CDS sequence (opt3) from neuraminidase__InfluenzaA__ACV04401

SEQ ID NO: 145334 - RNA, 1410 nt, Artificial Sequence; identical to SEQ ID NO: 144776
  derived and/or modified CDS sequence (opt3) from neuraminidase__InfluenzaA__ACV04411

SEQ ID NO: 145335 - RNA, 1410 nt, Artificial Sequence; identical to SEQ ID NO: 144786
  derived and/or modified CDS sequence (opt3) from neuraminidase__InfluenzaA__ACV04492

SEQ ID NO: 145336 - RNA, 1410 nt, Artificial Sequence; identical to SEQ ID NO: 144786
  derived and/or modified CDS sequence (opt3) from neuraminidase__InfluenzaA__ACV04502

SEQ ID NO: 145337 - RNA, 1410 nt, Artificial Sequence; identical to SEQ ID NO: 144776
  derived and/or modified CDS sequence (opt3) from neuraminidase__InfluenzaA__ACV04512

SEQ ID NO: 145338 - RNA, 1410 nt, Artificial Sequence
  derived and/or modified CDS sequence (opt3) from neuraminidase__InfluenzaA__ACV04522
augaaccccaaucagaagaucauuaccauaggcagcgugugcaugacaaucgggauggccaaccugauucuccaaaucggaaauauuaucuccauauggaucucucacucaauucagcuugguaaccagaaucagaucgagacuuguaaccaaagugucauuacguacgaaaauaacaccuggguuaaucagacauaugugaacaucagcaauacuaacuucgcugcaggcaaauccguagugucugucaagcuggccggaaauucgucauugugcccugugagcggaugggcgauauacaguaaagacaacuccauuagaaucggcucuaagggugauguuuuugugauuagggagccauucaucagcuguuccccguuagaaugccggaccuuuuuccugacacagggggcucuacucaaugacaaacauucaaacggaaccaucaaggaucgcagucccuaucgaacucugaugagcuguccuauuggcgaggucccaucucccuacaacucccguuuugaaucaguggccuggagcgcaagugccugccacgacggcauaaauuggcuuacaaucgggauuucuggaccugauaacggugcuguagcaguucugaaguauaauggcaucauaaccgacacgauuaaauccuggagaaacaauaucuugaggacucaggagagcgagugugccugcgugaacgggucguguuucaccgucaugacagauggaccaucugacggccaggcuuccuacaagaucuuucggauugaaaaagguaagaucgugaaaucaguggagaugaaugcccccaacuaucauuacgaagagugcaguuguuacccugauagcuccgagauuacuugcgucugccgcgacaauuggcacgggucuaacagaccauggguuagcuucaaucaaaaccucgaauaucagauaggauacaucuguucaggcauuuuuggcgauaauccgaggcccaacgacaagaccgggaguugcggaccuguguccagcaauggugcgaacggcguaaagggguucucuuuuaaauauggaaacggcguguggaucggucggacaaagucaaucaguagccgcaauggguucgagaugauuugggauccaaacggcuggaccggaacggacaauaacuuuuccauaaaacaggacaucgucggcauuaaugaauggucuggguacucggggagcuucgugcaacaucccgagcugacuggucuggauuguauccgaccuugcuucuggguugaacucauuagaggcaggccaaaggagaacacaaucuggaccuccgggucaaguauaucuuuuuguggagugaauagcgacacugucggcugguccuggcccgauggugcagaguuaccguucacaaucgacaaauga

SEQ ID NO: 145339 - RNA, 1410 nt, Artificial Sequence; identical to SEQ ID NO: 144786
  derived and/or modified CDS sequence (opt3) from neuraminidase__InfluenzaA__ACV04532

SEQ ID NO: 145340 - RNA, 1410 nt, Artificial Sequence; identical to SEQ ID NO: 144786
  derived and/or modified CDS sequence (opt3) from neuraminidase__InfluenzaA__ACV04542

SEQ ID NO: 145341 - RNA, 1410 nt, Artificial Sequence; identical to SEQ ID NO: 144786
  derived and/or modified CDS sequence (opt3) from neuraminidase__InfluenzaA__ACV04552

SEQ ID NO: 145342 - RNA, 1410 nt, Artificial Sequence; identical to SEQ ID NO: 144786
  derived and/or modified CDS sequence (opt3) from neuraminidase__InfluenzaA__ACV04562

SEQ ID NO: 145343 - RNA, 1410 nt, Artificial Sequence; identical to SEQ ID NO: 144776
  derived and/or modified CDS sequence (opt3) from neuraminidase__InfluenzaA__ACV04572

SEQ ID NO: 145344 - RNA, 1410 nt, Artificial Sequence; identical to SEQ ID NO: 144786
  derived and/or modified CDS sequence (opt3) from neuraminidase__InfluenzaA__ACV04582

SEQ ID NO: 145345 - RNA, 1410 nt, Artificial Sequence
  derived and/or modified CDS sequence (opt3) from neuraminidase__InfluenzaA__ACV04758
augaaccccaaucagaagaucauuaccauaggcagcgugugcaugacaaucgggauggccaaccugauucuccaaaucggaaauauuaucuccauauggaucucucacucaauucagcuugguaaccagaaucagaucgagacuuguaaccaaagugucauuacguacgaaaauaacaccuggguuaaucagacauaugugaacaucagcaauacuaacuucgcugcaggccaguccguagugucugucaaacuggccgggaauagcucauugugcccugugagcggaugggcgauauacaguaaggacaacuccauuagaaucggcucuaaaggugauguuuuugugauuagggagccauucaucagcuguuccccgucagaaugccggaccuuuuucuuaacacagggggcucugcuaaaugacaagcauaguaacggaaccaucaaagaucgcagccccuaucgaacucucaugucuuguccuauuggcgaggucccaucccccuacaacucacguuuugaaagcguggccuggagugcaucugccugccacgacggcauaaauuggcugacaaucgggauuuccggaccugauaacggugcuguagcaguucuuaaguauaauggcaucauaaccgacacgauuaagagcuggagaaacaauauccugaggacucaagagucggagugugccugcgugaacgggucuuguuucaccgucaugacagauggaccauccaauggccaggcuucauacaaaaucuuucggauugaaaaggguaaaaucgugaagaguguggagaugaacgcccccaauuaucauuacgaagagugcagcuguuacccugacuccucugagauuacuugcgucugccgcgauaacuggcacgggagcaauagaccauggguuucauucaaccagaauuuggaauaucagauaggauacaucuguaguggcauuuuuggcgacaacccgaggcccaaugauaaaaccggguccugcggaccugugagcucuaacggugcgaacggcguaaagggguucucauuuaaguauggaaauggcguguggaucggucggacaaaaaguaucagcucccgcaacggguucgagaugauuugggacccaaauggcuggaccggaacggauaacaauuuuucuauaaagcaagacaucgucggcauuaacgaauggucgggguacagcggauccuucgugcagcaucccgagcucacuggucuggacuguauccgaccuugcuucuggguugaacugauuagaggcaggccaaaagagaauacaaucuggaccucagggaguucuauaucguuuuguggagugaacuccgauacugucggcuggucauggcccgacggugcagagcucccguucacaaucgauaaguga

SEQ ID NO: 145346 - RNA, 1410 nt, Artificial Sequence; identical to SEQ ID NO: 144776
  derived and/or modified CDS sequence (opt3) from neuraminidase__InfluenzaA__ACV33087

SEQ ID NO: 145347 - RNA, 1410 nt, Artificial Sequence; identical to SEQ ID NO: 144786
  derived and/or modified CDS sequence (opt3) from neuraminidase__InfluenzaA__ACV33107

SEQ ID NO: 145348 - RNA, 1410 nt, Artificial Sequence; identical to SEQ ID NO: 144786
  derived and/or modified CDS sequence (opt3) from neuraminidase__InfluenzaA__ACV33117

SEQ ID NO: 145349 - RNA, 1410 nt, Artificial Sequence; identical to SEQ ID NO: 144786
  derived and/or modified CDS sequence (opt3) from neuraminidase__InfluenzaA__ACV33127

SEQ ID NO: 145350 - RNA, 1410 nt, Artificial Sequence; identical to SEQ ID NO: 144786
  derived and/or modified CDS sequence (opt3) from neuraminidase__InfluenzaA__ACV33137

SEQ ID NO: 145351 - RNA, 1410 nt, Artificial Sequence; identical to SEQ ID NO: 144786
  derived and/or modified CDS sequence (opt3) from neuraminidase__InfluenzaA__ACV33147

SEQ ID NO: 145352 - RNA, 1410 nt, Artificial Sequence
  derived and/or modified CDS sequence (opt3) from neuraminidase__InfluenzaA__ACV33157
augaaccccaaucagaagaucauuaccauaggcagcgugugcaugacaaucgggauggccaaccugauucuccaaaucggaaauauuaucuccauauggaucucucacucaauucagcuugguaaccagaaucagaucgagacuuguaaccaaagugucauuacguacgaaaauaacaccuggguuaaucagacauaugugaacaucagcaauacuaacuucgcugcaggccaguccguagugucugucaaacuggccggaaauucgucauugugcccugugagcggaugggcgauauacaguaaggacaacuccauuagaaucggcucuaaaggugauguuuuugugauuagggagccauucaucagcuguuccccguuagaaugccggaccuuuuuccugacacagggggcucuacucaaugacaagcauucaaacggaaccaucaaagaucgcagucccuaucgaacucugaugagcuguccugucggcgaggugccaucucccuacaacucccguuuugaaucaguagccuggagcgcaagugccugccacgacggcauuaauuggcuuacaauagggaucucuggaccugauaacggugcuguugcagugcugaaguauaauggcauuaucaccgacacgauaaaguccuggagaaacaauauuuugaggacucaagagagcgagugugccugcgucaacgggucguguuucaccgugaugacagauggaccaucugacggccaggcuuccuacaaaaucuuucggaucgaaaaggguaaaauugugaagucagucgagaugaaugcccccaacuaucauuacgaagagugcaguuguuacccugauagcuccgagaucacuugcguuugccgcgacaauuggcacgggucuaacagaccaugggugagcuucaaucagaaccucgaauaucagauuggauacauauguucaggcaucuuuggcgauaauccgaggcccaacgacaaaaccgggaguugcggaccuguauccagcaauggugcgaacggcgugaagggguucucuuuuaaguauggaaacggcgucuggauuggucggacaaaaucaaucaguagccgcaauggguucgagaugaucugggauccaaacggcuggaccggaacggacaauaacuuuuccauuaagcaagacauagugggcaucaaugaauggucuggguacucggggagcuucguucagcaucccgagcugacuggucuggauuguauucgaccuugcuucuggguggaacucaucagaggcaggccaaaagagaacacaauuuggaccuccgggucaaguaucucuuuuuguggagucaauagcgacacugugggcugguccuggcccgauggugcagaguuaccguucacaauagacaaguga

SEQ ID NO: 145353 - RNA, 1410 nt, Artificial Sequence
  derived and/or modified CDS sequence (opt3) from neuraminidase__InfluenzaA__ACV33167
augaaccccaaucagaagaucauuaccauaggcagcgugugcaugacaaucgggauggccaaccugauucuccaaaucggaaauauuaucuccauauggaucucucacucaauucagcuugguaaccagaaucagaucgagacuuguaaccaaagugucauuacguacgaaaauaacaccuggguuaaucagacauaugugaacaucagcaauacuaacuucgcugcaggccaguccguagugucugucaaacuggccggaaauucgucauugugcccugugagcggaugggcgauauacaguaaggacaacuccauuagaaucggcucuaaaggugauguuuuugugauuagggagccauucaucagcuguuccccguuagaaugccggaccuuuuuccugacacagggggcucuacucaaugacaagcauucaaacggaaccaucaaagaucgcagucccuaucgaacucugaugagcuguccuauuggcgaggucccaucucccuacaacucccguuuugaaucaguggccuggagcgcaagugccugccacgacggcauaaauuggcuuacaaucgggauuucuggaccugauaacggugcuguagcaguucugaaguauaauggcaucauaaccgacacgauuaaguccuggagaaacaauaucuugaggacucaagagagcgagugugccugcgugaacgggucguguuucaccgucaugacagauggaccaucugacggccaggcuuccuacaaaaucuuucggauugaaaaggguaaaaucgugaagucaguggagaugaaugcccccaacuaucauuacgaagagugcaguuguuacccugauagcuccgagauuacuugcgucugccgcgacaauuggcacgggucuaacagaccauggguuagcuucaaucagaaccucgaauaucagauaggauacaucuguucaggcauuuuuggcgauaauccgaggcccaacgacaaaaccgggaguugcggaccuguguccagcaauggugcgaacggcguaaagggguucucuuuuaaguauggaaacggcguguggaucggucggacaaaaucaaucaguagccgcaauggguucgagaugauuugggauccaaacggcuggaccggaacggacaauaacuuuuccauaaagcaagacaucgucggcauuaaugaauggucuggguacucggggagcuucgugcagcaucccgagcugacuggucuggauuguauccgaccuugcuucuggguugaacucauuagaggcaggccaaaagagaacacaaucuggaccuccgggucaaguauaucuuuuuguggagugaauagcgacacugucgauugguccuggcccgacggcgcagaguuaccguucacaaucgauaaguga

SEQ ID NO: 145354 - RNA, 1410 nt, Artificial Sequence; identical to SEQ ID NO: 144786
  derived and/or modified CDS sequence (opt3) from neuraminidase__InfluenzaA__ACV33177

SEQ ID NO: 145355 - RNA, 1410 nt, Artificial Sequence
  derived and/or modified CDS sequence (opt3) from neuraminidase__InfluenzaA__ACV41993
augaaccccaaucagaagaucauuaccauaggcagcgugugcaugacaaucgggauggccaaccugauucuccaaaucggaaauauuaucuccauauggaucucucacucaauucagcuugguaaccagaaucagaucgagauuuguaaccaaagugucaucacuuacgaaaauaacacguggguuaaucagaccuaugugaacauaagcaauacaaacuucgcugcaggccaguccguagugucugucaaacuggccgggaacucgucauugugcccugugggaggcugggcgauuuacagcaaggacaauaguguuagaaucgguuccaaaggggauguguuugucauuagggagccauucaucucuuguagcccguuagaaugccggaccuuuuuccugacucagggagcucuacucaaugacaagcauuccaacggcacaaucaaagaucgcucacccuaucgaacccugaugaguuguccuauuggcgaggugccaagccccuacaacucucguuuugaauccguagccuggucagcaagcgccugccacgacgggauaaauuggcuuacuaucggaauuagugguccugauaacggcgcuguugcagugcugaaguauaaugggaucauaacagacaccauuaagucuuggagaaacaauaucuugaggacgcaagaguccgagugugccugcgucaacggaagcuguuucacugugaugaccgauggcccaucgaauggucaggcuucuuacaaaaucuuucggauugaaaaggggaaaaucgugaaguccgucgagaugaacgcccccaauuaucauuacgaagagugcucauguuacccugacaguagcgagauuacaugcguuugccgcgauaacuggcacggauccaauagaccaugggugucuuucaaccagaaucucgaauaucagauaggcuacaucuguagcggcauuuuuggggacaacccgaggcccaaugauaaaacuggaucaugcgguccuguaaguuccaacggcgcgaacggggugaagggauucagcuuuaaguauggcaauggugucuggaucgggcggaccaaaucuaucucaagucgcaacggcuucgagaugauuugggacccaaauggauggacaggcaccgauaacaauuuuagcauaaagcaagacaucguggggauuaacgaaugguccggauacucugguucguucguucagcaucccgagcugacgggccuggacuguauccgaccuugcuucuggguggaacucauuagagggaggccaaaagagaauacuaucuggacaagcggauccucaauaaguuuuuguggcgucaacucugauaccguggguuggagcuggcccgacggggcagaguuaccguucacuaucgauaaguga

SEQ ID NO: 145356 - RNA, 1410 nt, Artificial Sequence; identical to SEQ ID NO: 144786
  derived and/or modified CDS sequence (opt3) from neuraminidase__InfluenzaA__ACV42010

SEQ ID NO: 145357 - RNA, 1410 nt, Artificial Sequence; identical to SEQ ID NO: 144786
  derived and/or modified CDS sequence (opt3) from neuraminidase__InfluenzaA__ACV42020

SEQ ID NO: 145358 - RNA, 1410 nt, Artificial Sequence; identical to SEQ ID NO: 144551
  derived and/or modified CDS sequence (opt3) from neuraminidase__InfluenzaA__ACV49504

SEQ ID NO: 145359 - RNA, 1362 nt, Artificial Sequence
  derived and/or modified CDS sequence (opt3) from neuraminidase__InfluenzaA__ACV49537
augaaccccaaucagaagaucauuaccauaggcagcaucugcaugguggucgggauuaucucccugauucuccaaaucggaaacauaaucucuauuuggaucucacacaguauucagacagguaaucagaaccauacuggcaucuguaaucaggggauaauuacguacaacguuguggccggacaagacagcaccuccguaauccuuacaggcaauucuucgcugugcccuauuagagguugggcuauccacucaaaagauaacgggaucaggauuggaagcaagggcgacguguucgucauacgggagccauuuaucaguuguucccauuuggaaugccgcacuuucuuuuuaacccagggcgcacugcuaaaugauaaacacucuaacggggccgugaaggaccgaagcccguaucgugcgcucauguccugucccguuggagaggcuccuucaccauacaauaguagauucgaaagcguggccuggucugcauccgccugccaugaugguaugggcuggcugacaauugggaucucaggacccgacaacggcgcugucgcagugcuuaaauauaaugguauaauuaccgagacuaucaagagcuggaggaagaaaauccugcggacacaggaaagugaguguaccugcguaaacgggucuuguuuuacgauuaugacugauggaccuuccgacggcuuggccagcuacaagaucuucaaaauugagaagggcaaaguuaccaagucgauagaacucaaugcuccaaacucucacuaugaggaaugcuccuguuaccccgauacagggaaggugaugugcgucugccgcgacaacuggcacggaucaaauagaccuugggugaguuuugaucagaaccuggacuaucaaaucgguuacauuuguagcggcguguucggggauaauccaaggccgaaagacggaacuggcuccugcggucccgucucugccgacggggcgaacggcguuaagggauuuagcuaccgguauggcaaugggguguggaucggacgcaccaaaucagauaguucccgacaugguuucgagaugaucugggacccuaacggcuggacagagaccgauagcagauuuucuguaaggcaggacguggucgcaaugacggaucggucaggguacaguggcagcuucgugcagcacccagaacugacuggacucgacuguaugcgucccugcuuuuggguugaguuaauucgcgguagaccugaagagaagacaauauggaccuccgggucuaucauuucguucuguggcgugaauagcgauacugucgacugguccuggccagauggagccgaacugcccuucacaaucgacaaauga

SEQ ID NO: 145360 - RNA, 1362 nt, Artificial Sequence
  derived and/or modified CDS sequence (opt3) from neuraminidase__InfluenzaA__ACV49559
augaaccccaaucagaagaucauuaccauaggcagcaucugcaugguggucgggauuaucucccugauucuccaaaucggaaacauaaucucuauuuggaucucacacaguauucaggccgguagcuccacauggguuaaucagacuuacgugaacaucucuaauacgaacguaguggcuggccaggacgcaaccucggucauacuuacaggaaauucaagccuguguccuauuagagggugggccaucuauaguaaagauaacggcauuaggaucgguuccaagggggacaucuucgugauucgggagccauuuauaucuugcagccauuuggaaugucgcgcguucuuuuuaacucaaggagcucugcuaaaugauaaacacuccaacggcaccguuaaggaccgaucaccguaccgugcccucaugaguugccccgugggcgaggcaccuagcccauauaauucuagauucgaauccgucgccuggucagcuagcgcaugucaugaugggaugggauggcugacaaucgguauuaguggccccgacaacggggccguggcuguacuuaaauacaauggaaucauaaccgagacuauuaagucuuggaggaagaaaauccugcggacacaggaauccgagugcgccuguguuaacggcagcugcuuuaccaucaugacggaugguccuucggacgggccagcgucuuauaagauuuucaaaaucgagaagggaaaagugacuaaguccauugaauuggaugcacccaauucacacuacgaggaauguaguugcuauccugacaccggcaaggucaugugugugugccgcgauaacuggcauggcagcaacagaccauggguguccuuugaccagaaucucgauuaccagauaggguacaucugcucuggagucuucggugacacaccgaggcccaaagacggcacugggagcuguggaccuguuucaguggauggcgccaacgguguaaagggguuuaguuaucgguacggcgacggaguguggauuggccgcaccaaaucccaaagcucucgacacggguucgagaugaucugggauccaaauggauggacagagaccgacucaagauuuagugucaggcaggaugugguugcuaucacggacuggagcgguuauuccggcucuuucgugcagcaccccgaacugacugggcuggauugcaugcggccuuguuuuugggucgagcucauucguggacagccaaaggagaaaacaauauggaccucgggcagcuccaucucauucugcggugugaacagugacacuguagauuggucuuggcccgacggggccgaauuaccguucacaauugauaaguga

SEQ ID NO: 145361 - RNA, 1395 nt, Artificial Sequence
  derived and/or modified CDS sequence (opt3) from neuraminidase__InfluenzaA__ACV49570
augaaccccaaucagaagaucauuaccauaggcagcaucugcaugguggucgggauuaucucccugauucuccaaaucggaaacauaguuucuaucuggauuucacacaguauccagacagguaaucagaaccauacuggcacgugugaccagagcauuaucaccuacaaaaauuccacaugggugaaccaaacuuauguaaauguggucgccgggaaggauaccacaucugugauacuugcuggaaacucgucacugugcccuauuagaggcugggcaaucuacagcaaagacaaugguguuaggauugggaguaagggagauguguucgucauccgggagccauuuaucuccuguucucacuuggaaugccgcaccuucuuuuuaacucagggcgcccugcuaaacgacaaacauagcaauggcacagugaaggaucgauccccguaucgugcgcucaugucaugucccguaggggaggcuccuaguccauacaacagcagauucgaaucuguugccugguccgcaucagccugccacgacggaauggguuggcugaccauuggcauaagcgggcccgaugacggagcuguggcaguccuuaaguauaauggcaucauuacggagacuaucaaaaguuggaggaaggaaauacugcggacccaggagucugagugugugugcgugaacgguuccuguuuuacaauuaugacugaugggccuagcggaggcccagccucguacaaaaucuucaagaucgaaaaaggcaaggucaccaagucuauugaguuggacgcucccaauucccauuaugaagagugcucauguuacccugauacaaguaaaguuaugugcgugugccgcgacaacuggcacgggagcaacagaccauggguauccuuugaucagaaucucgacuaccaaaugggauauaucuguucugguguguucggcgacaacccgaggcccaaggaugggaaaggaagcugcggcccugucuacguggacggugccaaugggguuaagggcuuuucauauaaauacggaaacggcguguggauugggcggaccaagaguaauuccagccgccagggauucgagaugauaugggauccaaacgguuggacggaaacugacucuaacuuuuucacaaaacaggaugucguggcgguaaccgacuggucaggcuauagugggagcuuuguucagcaccccgagcugacuggacuggauuguaugcgaccuugcuucuggguggaacucaucagaggcaggccaaaggagaauacaauuuggaccuccgguucuucgaucagcuucuguggggucaauuccgacacgguggauuggucauggcccgacggcgcagaauuaccguuuaccaucgauaaguga

SEQ ID NO: 145362 - RNA, 1410 nt, Artificial Sequence; identical to SEQ ID NO: 144452
  derived and/or modified CDS sequence (opt3) from neuraminidase__InfluenzaA__ACV49581

SEQ ID NO: 145363 - RNA, 1410 nt, Artificial Sequence; identical to SEQ ID NO: 144452
  derived and/or modified CDS sequence (opt3) from neuraminidase__InfluenzaA__ACV49592

SEQ ID NO: 145364 - RNA, 1410 nt, Artificial Sequence
  derived and/or modified CDS sequence (opt3) from neuraminidase__InfluenzaA__ACV49603
augaaccccaaucagaagaucauuaccauaggcagcgugucccugacaaucgagacugucugcuuccucaugcaaauugccauccuugcuacgaccguuacacugcacuuuaaacagcaugaaugugacucuccugcaucaaaccaggugaugccaugcgagccgauuaucauagaaagaaauaucacugagauuguauacuugaacaauaccacaaucgaaaaggagauuugucccgagguggucgaauauaggaacuggaguaaaccucagugccaaaucaccggguucgccccauuuagcaaggauaauuccauacgguuaucugcgggaggugacauuugggugacucgcgagcccuacguuucgugugauccuggcaaaugcuaucaguucgcucuggggcagggaacaacccuagacaacaagcacucaaauggcacgauccaugaucguauuccacaccgaacucuccugaugaacgaacuuggugugcccuuucaucuggggaccaagcaggucuguguggccuggagcaguuccucuugccacgacggaaaagcaugguugcacguauguguuacaggcgaugacagaaaugccacugcuagcuucaucuacgauggcaggcucguggacuccaucgggucauggagucaaaacauucugcggacccaggagagcgagugcgucuguauaaauggaacaugcaccguggugaugacggaugguucugcauccggccgcgccgacacuagaauccuguuuauuaaggaagggaaaaucguccauauaucaccucucagcggaagugcucagcacauugaggaaugcucuuguuauccaagguacccggauguucggugcaucugucgcgacaacuggaagggcuccaaucgacccgugaucgacauuaacauggaggauuauagcaucgacucgucuuacguaugcuccgguuuagugggggauacaccuagaaacgacgauucaaguagcaauuccaacuguagggacccaaauaacgaacggggaaaucccggcgucaaaggcugggccuucgauaacggggacgauguguggaugggacguaccauuucuaaggacagccgcucagguuacgagacuuuuaagguuauaggcggguggaguacaccuaauuccaaaagccaggugaacagacaagucaucguggauaauaacaauuggucuggauauucaggcauuuucaguguagaggguaagagcugcaucaacagguguuuuuacguugaacugauccgggggcgaccacaggagacccgcgugugguggacguccaauucuauugucguguucugcggcaccucgggaacauauggcacugggagcuggcccgacggagcgaacauaaauuuuaugccgaucuga

SEQ ID NO: 145365 - RNA, 1410 nt, Artificial Sequence
  derived and/or modified CDS sequence (opt3) from neuraminidase__InfluenzaA__ACV49625
augaaccccaaucagaagaccaucacaauuggcagcgugucccugacuauagagacggucugcuuccucaugcaaaucgccauucuugcuaccacaguuacucugcacuuuaaacagcaugaaugugacucuccugcaucaaaccaggugaugccaugcgagccgaucauuaucgaaagaaauauaaccgagaucguauacuugaacaauacaaccauugaaaaggagaucugucccgagguggucgaauauaggaacuggaguaaaccucagugccaaauuacuggguucgccccauuuagcaaggauaauuccauccgguuaucugcgggaggugacauaugggugacacgcggccccuacguuucgugugauccugggaaaugcuaucaguucgcucugggacagggcaccacgcuagacaacaagcacucaaaugguacuauucaugaucgaaucccacaccguacccuccugaugaacgagcuuggggugcccuuucaucugggaacaaagcaggucuguguggccuggagcaguuccucuugccacgacggcaaagcaugguugcacguauguguuacuggcgaugacagaaaugccaccgcuagcuucauuuacgaugggaggcucguggacuccaucggaucauggagucaaaacauccugcggacacaggaaagcgagugcgucuguauuaaugguaccugcacgguggugaugacugauggcucugcauccgggcgcgccgacacaagaauacuguuuaucaaggagggaaaaauuguccauaucucaccucucagcggcagugcucagcacauagaagagugcucuuguuauccaagguacccggauguucggugcauuugucgcgacaacuggaaggguuccaaucgacccgugaucgacaucaacauggaagauuauagcauugacucgucuuacguaugcuccggguuagugggagauaccccuagaaacgacgauucaaguagcaauuccaacuguagggacccaaauaacgagcggggcaaucccggcgucaaagggugggccuucgauaacggagacgauguguggaugggucguacuaucucuaaggacagccgcucaggcuacgaaacauuuaagguuauugggggauggaguaccccuaauuccaaaagccaggugaacagacaagucauaguggauaauaacaauuggucuggcuauucagguaucuucaguguagagggcaagagcugcauuaacagguguuuuuacguugagcugauccgggggcgaccacaggaaacgcgcgugugguggaccuccaauucuaucgucguguucugcggaacaucgggcacuuaugggaccggaagcuggcccgacggugcgaacauuaauuuuaugccgauauga

SEQ ID NO: 145366 - RNA, 1410 nt, Artificial Sequence; identical to SEQ ID NO: 144504
  derived and/or modified CDS sequence (opt3) from neuraminidase__InfluenzaA__ACV49647

SEQ ID NO: 145367 - RNA, 1413 nt, Artificial Sequence
  derived and/or modified CDS sequence (opt3) from neuraminidase__InfluenzaA__ACV49669
augaaccccaaucagaagaucauuaccauaggcagcaucugcauggccauugggaucauuucccugauccuccaaauaggaaacaucgugucuauuuggaucucacacaguauucagacagguagccagaauuacacuggcaucuguaaccagagaauaauuacguaugaaaauuccaccugggucaaccaaacauacguuaauaucaacaauacuaacgugguagcugggcaggacaccacaucugugacccuugcaggaaauucgucacugugcccuauuagcggcugggccaucuauaguaaagauaacuccaucaggauugguucuaagggggacgucuucgugauacgggagccauuuaucagcuguucccauuuggagugccgcacuuucuuuuuaacacagggagcgcugcuaaaugauaaacacucaaacggcaccguuaaggaccgaaguccguaccgugcucucaugagcugucccauuggcgaagccccuucuccauauaauuccagauucgagucaguggcauggagcgccagugcuugccaugaugggaugggauggcugacgaucgguauaucuggccccgacgauggggcagucgccgugcuuaaauacaacggaauuaucacugaaaccaucaaguccuggaggaagcggauucugcgcacacaggagagcgaguguguaugcguuaacggcucguguuuuacuaucaugaccgacgguccuaauaacgggccagcuucuuauaaaauuuucaagauagaaaaaggaaagaucacaaaauccauugaguuggaugcccccaauucacacuacgaagagugcaguuguuacccugacgcgggcaccgugaugugcgucugcagagauaacuggcauggcagcaauaggccauggguguccuuuaaccaaaaucucgacuaucagaucggguacaucuguucuggaguguucggugauaacccgcggcccaaggacggcaaggggagcugcggaccugucacgguugacggcgcagauggugugaaaggguuuucauaucgcuacggcaauggaguauggauuggccgaacuaagaguaacuccagcagaaggggguucgagaugauaugggacccaaauggauggacagauaccgacucuaaauuucuggugaagcaggaugucguggccaugacugacuggucagguuauaguggcagcuucguucagcaccccgaacugacagggcucgauuguaugcggccuugcuuuuggguggaguuaauccguggacgcccaagagaaaacaccacgauuuggaccuccgguucuucgaucagcuucuguggcgucaauggggacacagcuaacugguccuggcccgauggcgccgagcugccguucacuauugacaaauga

SEQ ID NO: 145368 - RNA, 1413 nt, Artificial Sequence
  derived and/or modified CDS sequence (opt3) from neuraminidase__InfluenzaA__ACV49679
augaaccccaaucagaagaucauuaccauaggcagcaucuccauugccaucgggauuaucucucugaugcuccaaauaggaucaaucauuaguaucugggcuagccacuccauuagaacagguucucagaacaauacuggcaucugcaaccagaggauaauuacguacgaaaauucgaccugggugaaccauacauaugucaauaucaacaauacuaacguuguggcaggggaggacaaaaccucaguaacacuugccggaaauagcagucuguguuccauuucuggcugggcgaucuacaccaaggauaacagcauccggauugguuccaaaggggacguguucgucauacgcgagccuuuuaucucaugcagucacuuggaaugucgaacuuucuuuuuaacacagggagcucugcuaaaugauaagcauagcaacggcaccgugaaagaccguucuccauauagagcccucauguccugcccgcugggcgaggcacccucaccuuacaauagcaaguucgaaaguguugccuggucugcuuccgcaugucacgaugggaugggauggcuuacgauugguaucagcggcccagacaacggggccguggcuguccugaaguauaacggaauaauuacuggcaccaucaaaucguggaagaaacaaaucuugaggacacaggagucugagugcguguguaugaaugguuccugcuuuacuauuaugaccgaugggcccucaaacaaggccgcgaguuacaaaaucuucaagauugaaaagggaaaaguaacaaagagcauagagcucaaugcaccuaacuuuuauuacgaagaguguuccugcuacccagacaccggcaucguuaugugugugugccgggauaauuggcauggcucuaaccgccccugggucagcuucaaucagaaccuggacuaucagauuggguacaucugcucaggaguguuuggugauaauccuagaccagaggacggcgaagggaguuguaacccggugacggucgauggagccaauggcguuaaagguuucuccuauaaguacgggaacggcguguggaucggaaggacuaaaagcaaucggcugcgcaagggcuuugagaugauuugggaccccaacggguggacaaauaccgacucugauuucucaguaaaacaagacguggucgcuauaacugauuggaguggauauagcgguuccuuugugcagcacccugaacucacaggcuuagacugcauccgaccauguuucuggguugagcuggugagagggcuucccagggaaaacaccacgauuuggaccucuggaucgagcaucuccuucugcggcgucaacucagauacagccaauuggaguuggccugacggugcagaguugccauuuacuauugauaaguga

SEQ ID NO: 145369 - RNA, 1410 nt, Artificial Sequence
  derived and/or modified CDS sequence (opt3) from neuraminidase__InfluenzaA__ACV53442
augaaccccaaucagaagaucauuaccauaggcagcgugugcaugacaaucgggauggccaaccugauucuccaaaucggaaauauuaucuccauauggaucucucacucaauucagcuugguaaccagaaucagaucgagacuuguaaccaaagugucauuacguacgaaaauaacaccuggguuaaucagacauaugugaacaucagcaauacuaacuucgcugcaggccaguccguagugucugucaaacuggccggaaauucgucauugugcccugugagcggaugggcgauauacaguaaggacaacuccguuagaauuggcucuaaaggugauguguuugucaucagggagccauucauuagcuguuccccguuagaaugccggaccuuuuuccugacacagggggcucuacucaaugacaagcauucaaacggaaccaucaaagaucgcagucccuaucgaacucugaugagcuguccuaucggcgaggugccaucucccuacaacucccguuuugaaucaguagccuggagcgcaagugccugccacgacggcauuaauuggcuuacaauagggaucucuggaccugauaacggugcuguugcagugcugaaguauaauggcauuaucaccgacacgauaaaguccuggagaaacaauauuuugaggacucaagagagcgagugugccugcgucaacgggucguguuucaccgugaugacagauggaccaucugacggccaggcuuccuacaaaaucuuucggaucgaaaaggguaaaauugugaagucagucgagaugaaugcccccaacuaucauuacgaagagugcaguuguuacccugauagcuccgagaucacuugcguuugccgcgacaauuggcacgggucuaacagaccaugggugagcuucaaucagaaccucgaauaucagauuggauacauauguucaggcaucuuuggcgauaauccgaggcccaacgacaaaaccgggaguugcggaccuguauccagcaauggugcgaacggcgugaagggguucucuuuuaaguauggaaacggcgucuggauuggucggacaaaaucaaucaguagccgcaauggguucgagaugaucugggauccaaacggcuggaccggaacggacaauaacuuuuccauuaagcaagacauagugggcaucaaugaauggucuggguacucggggagcuucguucagcaucccgagcugacuggucuggauuguauucgaccuugcuucuggguggaacucaucagaggcaggccaaaagagaacacaauuuggaccuccgggucaaguaucucuuuuuguggagucaauagcgacacugugggcugguccuggcccgauggugcagaguuaccguucacaauagacaaguga

SEQ ID NO: 145370 - RNA, 1410 nt, Artificial Sequence; identical to SEQ ID NO: 145153
  derived and/or modified CDS sequence (opt3) from neuraminidase__InfluenzaA__ACV53452

SEQ ID NO: 145371 - RNA, 1410 nt, Artificial Sequence; identical to SEQ ID NO: 144776
  derived and/or modified CDS sequence (opt3) from neuraminidase__InfluenzaA__ACV53462

SEQ ID NO: 145372 - RNA, 1410 nt, Artificial Sequence; identical to SEQ ID NO: 144786
  derived and/or modified CDS sequence (opt3) from neuraminidase__InfluenzaA__ACV53472

SEQ ID NO: 145373 - RNA, 1410 nt, Artificial Sequence
  derived and/or modified CDS sequence (opt3) from neuraminidase__InfluenzaA__ACV53482
augaaccccaaucagaagaucauuaccauaggcagcgugugcaugacaaucgggauggccaaccugauucuccaaaucggaaauauuaucuccauauggaucucucacucaauucagcuugguaaccagaaucagaucgagacuuguaaccaaagugucauuacguacgaaaauaacaccuggguuaaucagacauaugugaacaucagcaauacuaacuucgcugcaggccaguccguagugucugucaaacuggccggaaauucgucauugugcccugugagcgggugggcgauauacaguaaggacaacuccguuagaauuggcucuaaaggugauguguuugucaucagggagccauucauuagcuguuccccguuagaaugccggaccuuuuuccugacacagggggcucuacucaaugacaagcauucaaacggaaccaucaaagaucgcagucccuaucgaacucugaugagcuguccuaucggcgaggugccaucucccuacaacucccguuuugaaucaguagccuggagcgcaagugccugccacgacggcauuaauuggcuuacaauagggaucucuggaccugauaacggugcuguugcagugcugaaguauaauggcauuaucaccgacacgauaaaguccuggagaaacaauauuuugaggacucaagagagcgagugugccugcgucaacgggucguguuucaccgugaugacagauggaccaucuaauggccaggcuuccuacaaaaucuuucggaucgaaaaggguaaaauugugaagucagucgagaugaacgcccccaauuaucauuacgaagagugcaguuguuacccugacagcggggagaucacuugcguuugccgcgauaacuggcacggauccaauagaccaugggugucuuucaaccagaaucucgaauaucagauuggcuacauauguagcggcaucuuuggggacaacccgaggcccaaugauaaaaccggaucaugcgguccuguaaguuccaacggcgcgaacggggugaagggauucagcuuuaaguauggcaauggugucuggauugggcggacaaaaucuaucucaagucgcaacggcuucgagaugaucugggacccaaauggauggaccgcaacggauaacaauuuuagcauuaagcaagacauagugggcaucaacgaaugguccggguacucuggaucguucguucagcaucccgagcugacuggucuggacuguauucgaccuugcuucuggguggaacucaucagaggcaggccaaaagagaauacaauuuggaccagcggguccucaaucaguuuuuguggagucaacucugauacugugggcuggagcuggcccgacggugccgaguuaccguucacaauagauaaguga

SEQ ID NO: 145374 - RNA, 1410 nt, Artificial Sequence
  derived and/or modified CDS sequence (opt3) from neuraminidase__InfluenzaA__ACV53492
augaaccccaaucagaagaucauuaccauaggcagcgugugcaugacaaucgggauggccaaccugauucuccaaaucggaaauauuaucuccauauggaucucucacucaauucagcuugguaaccagaaucagaucgagacuuguaaccaaagugucauuacguacgaaaauaacaccuggguuaaucagacauaugugaacaucagcaauacuaacuucgcugcaggccaguccguagugucugucaaacuggccggaaauucgucauugugcccugugagcgggugggcgauauacaguaaggacaacuccauuagaaucggcucuaaaggugauguuuuugugauuagggagccauucaucagcuguuccccguuagaaugccggaccuuuuuccugacacagggggcucuacucaaugacaagcauucaaacggaaccaucaaagaucgcagucccuaucgaacucugaugagcuguccuauuggcgaggucccaucucccuacaacucccguuuugaaucaguggccuggagcgcaagugccugccacgacggcauaaauuggcuuacaaucgggauuucuggaccugauaacggugcuguagcaguucugaaguauaauggcaucauaaccgacacgauuaaguccuggagaaacaauaucuugaggacucaagagagcgagugugccugcgugaacgggucguguuucaccgucaugacagauggaccaucugacggccaggcuuccuacaaaaucuuucggauugaaaaggguaaaaucgugaagucaguggagaugaaugcccccaacuaucauuacgaagagugcaguuguuacccugauagcuccgagauuacuugcgucugccgcgacaauuggcacgggucuaacagaccauggguuagcuucaaucagaaccucgaauaucagauaggauacaucuguucaggcauuuuuggcgauaauccgaggcccaacgacaaagcggggaguugcggaccuguguccagcaauggugcaaacggcguaaagggguucucuuuuaaguauggaaacggcguguggaucggucggaccaaaucaaucaguagccgcaauggguucgagaugauuugggauccaaacggcuggacagaaaccgacaauaacuuucugauaaagcaagacaucgucggaauuaaugagugguccggcuacucugggucguucgugcagcaucccgaacugacgggacucgauuguauccgaccuugcuucuggguugaguuaauuagagguaggccaaaagagaacacuaucuggacaagcggcuccucaauaaguuuuuguggggucaauucugacaccgugggauggagcuggcccgauggcgccgaacugccguucacuaucgacaaguga

SEQ ID NO: 145375 - RNA, 1410 nt, Artificial Sequence
  derived and/or modified CDS sequence (opt3) from neuraminidase__InfluenzaA__ACV53502
augaaccccaaucagaagaucauuaccauaggcagcgugugcaugacaaucgggauggccaaccugauucuccaaaucggaaauauuaucuccauauggaucucucacucaauucagcuugguaaccagaaucagaucgagacuuguaaccaaagugucauuacguacgaaaauaacaccuggguuaaucagacauaugugaacaucagcaauacuaacuucgcugcaggccaguccguagugucugucaaacuggccggaaauucgucauugugcccugugagcgggugggcgauauacaguaaggacaacuccauuagaaucggcucuaaaggugauguuuuugugauuagggagccauucaucagcuguuccccguuagaaugccggaccuuuuuccugacacagggggcucuacucaaugacaagcauucaaacggaaccaucaaagaucgcagucccuaucgaacucugaugagcuguccuauuggcgaggucccaucucccuacaacucccguuuugaaucaguggccuggagcgcaagugccugccacgacggcauaaauuggcuuacaaucgggauuucuggaccugauaacggugcuguagcaguucugaaguauaauggcaucauaaccgacacgauuaaguccuggagaaacaauaucuugaggacucaagagagcgagugugccugcgugaacgggucguguuucaccgucaugacagauggaccaucugacggccaggcuuccuacaaaaucuuucggauugaaaaggguaaaaucgugaagucaguggagaugaaugcccccaacuaucauuacgaagagugcaguuguuacccugauagcuccgagauuacuugcgucugccgcgacaauuggcacgggucuaacagaccauggguuagcuucaaucagaaccucgaauaucagauaggauacaucuguucaggcauuuuuggcgauaauccgaggcccaacgacaaagcggggaguugcggaccuguguccagcaauggugcaaacggcguaaagggguucucuuuuaaguauggaaacggcguguggaucggucggaccaaaucaaucaguagccgcaauggguucgagaugauuugggauccaaacggcuggacaggaaccgacaauaacuuucugauaaagcaagacaucgucggcauuaaugaaugguccggguacucuggaucguucgugcagcaucccgagcugacgggucucgauuguauccgaccuugcuucuggguugaauuaauuagaggcaggccaaaagagaacacuaucuggacaagcggguccucaauaaguuuuuguggagucaauucugacaccgugggcuggagcuggcccgauggugccgagcugccguucacuaucgacaaguga

SEQ ID NO: 145376 - RNA, 1410 nt, Artificial Sequence
  derived and/or modified CDS sequence (opt3) from neuraminidase__InfluenzaA__ACV53891
augaaccccaaucagaagaucauuaccauaggcagcgugugcaugacaaucgggauggccaaccugauucuccaaaucggaaauauuaucuccauauggaucucucacucaauucagcuugguaaccagaaucagaucgagacuuguaaccaaagugucauuacguacgaaaauaacaccuggguuaaucagacauaugugaacaucagcaauacuaacuucgcugcaggccaguccguagugucugucaaacuggccggaaauucgucauugugcccugugagcggaugggcgauauacaguaaggacaacuccauuagaaucggcucuaaaggugauguuuuugugauuagggagccauucaucagcuguuccccguuagaaugccggaccuuuuuccugacacagggggcucuacucaaugacaagcauucaaacggaaccaucaaagaucgcagucccuaucgaacucugaugagcuguccuauuggcgaggucccaucucccuacaacucccguuuugaaucaguggccuggagcgcaagugccugccacgacggcauaaauuggcuuacaaucgggauuucuggaccugauaacggugcuguagcaguucugaaguauaauggcaucauaaccgacacgauuaaguccuggagaaacaaaaucuugaggacucaagagagcgagugugccugcgugaaugggucguguuucaccgucaugacagauggaccaucugacggccaggcuuccuacaagaucuuucggauugaaaaagguaagaucgugaaaucaguggagaugaacgcccccaauuaucauuacgaagagugcaguuguuacccugauagcuccgagauuacuugcgucugccgcgacaacuggcacgggucuaauagaccauggguuagcuucaaccagaaucucgaauaucagauaggauacaucuguucaggcauuuuuggcgauaacccgaggcccaaugacaagaccgggaguugcggaccuguguccagcaacggugcgaauggcguaaagggguucucuuuuaaauauggaaacggcguguggaucggucggacaaagucaaucaguagccgcaacggguucgagaugauuugugauccaaauggcuggaccggaacggacaacaauuuuuccauaaaacaagacaucgucggcauuaacgaauggucuggguacucggggagcuucgugcagcaucccgagcugacuggucuggauugcauccgaccuuguuucuggguugaacucauuagaggcaggccaaaggagaauacaaucuggaccuccgggucaaguauaucuuuuugcggagugaacagcgacacugucggcugguccuggcccgauggugcagaguuaccguucacaaucgacaaauga

SEQ ID NO: 145377 - RNA, 1410 nt, Artificial Sequence
  derived and/or modified CDS sequence (opt3) from neuraminidase__InfluenzaA__ACV53901
augaaccccaaucagaagaucauuaccauaggcagcgugugcaugacaaucgggauggccaaccugauucuccaaaucggaaauauuaucuccauauggaucucucacucaauucagcuugguaaccagaaucagaucgagacuuguaaccaaagugucauuacguacgaaaauaacaccuggguuaaucagacauaugugaacaucagcaauacuaacuucgcugcaggccaguccguagugucugucaaacuggccgggaauagcucauugugcccugugagcggaugggcgauauacaguaaggacaacuccauuagaaucggcucuaaaggugauguuuuugugauuagggagccauucaucagcuguuccccguuagaaugccggaccuuuuuccugacacagggggcucuacucaaugacaagcauucaaacggaaccaucaaagaucgcagucccuaucgaacucugaugagcuguccuauuggcgaggucccaucucccuacaacucccguuuugaaucaguggccuggagcgcaagugccugccacgacggcauaaauuggcuuacaaucgggauuucuggaccugauaacggugcuguagcaguucugaaguauaauggcaucauaaccgacacgauuaaguccuggagaaacaauaucuugaggacucaagagagcgagugugccugcgugaacgggucguguuucaccgucaugacagauggaccaucugacggccaggcuuccuacaaaaucuuucggauugaaaaggguaaaaucgugaagucaguggagaugaaugcccccaacuaucauuacgaagagugcaguuguuacccugauagcuccgagauuacuugcgucugccgcgacaauuggcacgggucuaacagaccauggguuagcuucaaucagaaccucgaauaucagauaggauacaucuguucaggcauuuuuggcgauaauccgaggcccaacgacaaaaccgggaguugcggaccuguguccagcaauggugcgaacggcguaaagggguucucuuuuaaguauggaaacggcguguggaucggucggacaaaaucaaucaguagccgcaauggguucgagaugauuugggauccaaacggcuggaccggaacggacaauaacuuuuccauaaagcaagacaucgucggcauuaaugaauggucuggguacucgcgaucguucgugcagcaucccgagcugacuggacuggauuguaucagaccuugcuucuggguugaacucauuaggggucggccaaaagagaacacaaucuggaccuccggcucaaguauaucuuuuuguggggugaauagcgacacugucggaugguccuggcccgauggcgcagaguuaccguucacaaucgacaaguga

SEQ ID NO: 145378 - RNA, 1410 nt, Artificial Sequence; identical to SEQ ID NO: 144786
  derived and/or modified CDS sequence (opt3) from neuraminidase__InfluenzaA__ACV53911

SEQ ID NO: 145379 - RNA, 1410 nt, Artificial Sequence; identical to SEQ ID NO: 144776
  derived and/or modified CDS sequence (opt3) from neuraminidase__InfluenzaA__ACV67088

SEQ ID NO: 145380 - RNA, 1410 nt, Artificial Sequence; identical to SEQ ID NO: 144786
  derived and/or modified CDS sequence (opt3) from neuraminidase__InfluenzaA__ACV67168

SEQ ID NO: 145381 - RNA, 1410 nt, Artificial Sequence; identical to SEQ ID NO: 144776
  derived and/or modified CDS sequence (opt3) from neuraminidase__InfluenzaA__ACV67169

SEQ ID NO: 145382 - RNA, 1410 nt, Artificial Sequence; identical to SEQ ID NO: 144786
  derived and/or modified CDS sequence (opt3) from neuraminidase__InfluenzaA__ACV67171

SEQ ID NO: 145383 - RNA, 1410 nt, Artificial Sequence; identical to SEQ ID NO: 144786
  derived and/or modified CDS sequence (opt3) from neuraminidase__InfluenzaA__ACV67172

SEQ ID NO: 145384 - RNA, 1410 nt, Artificial Sequence; identical to SEQ ID NO: 144816
  derived and/or modified CDS sequence (opt3) from neuraminidase__InfluenzaA__ACV67173

SEQ ID NO: 145385 - RNA, 1410 nt, Artificial Sequence; identical to SEQ ID NO: 144776
  derived and/or modified CDS sequence (opt3) from neuraminidase__InfluenzaA__ACV67174

SEQ ID NO: 145386 - RNA, 1410 nt, Artificial Sequence
  derived and/or modified CDS sequence (opt3) from neuraminidase__InfluenzaA__ACV67175
augaaccccaaucagaagaucauuaccauaggcagcgugugcaugacaaucgggauggccaaccugauucuccaaaucggaaauauuaucuccauauggaucucucacucaauucagcuugguaaccagaaucagaucgagacuuguaaccaaagugucauuacguacgaaaauaacaccuggguuaaucagacauaugugaacaucagcaauacuaacuucgcugcaggccaguccguagugucugucaaacuggccgggaauagcucauugugcccugugagcggaugggcgauauacaguaaggacaacuccauuagaaucggcucuaaaggugauguuuuugugauuagggagccauucaucagcuguuccccguuagaaugccggaccuuuuuccugacacagggggcucuacucaaugacaagcauucaaacggaaccaucaaagaucgcagucccuaucgaacucugaugagcuguccuauuggcgaggucccaucucccuacaacucccguuuugaaucaguggccuggagcgcaagugccugccacgacggcauaaauuggcuuacaaucgggauuucuggaccugauaacggugcuguagcaguucugaaguauaauggcaucauaaccgacacgauuaaguccuggagaaacaauaucuugaggacucaagagagcgagugugccugcgugaacgggucguguuucaccgucaugacagauggaccaucugacggccaggcuuccuacaaaaucuuucggauugaaaaggguaaaaucgugaagucaguggagaugaaugcccccaacuaucauuacgaagagugcaguuguuacccugauagcuccgagauuacuugcgucugccgcgacaauuggcacgggucuaacagaccauggguuagcuucaaucagaaccucgaauaucagauaggauacaucuguucaggcauuuuuggcgauaauccgaggcccaacgacaaaaccgggaguugcggaccuguguccagcaaugguucuaacggcguaaagggguucucauuuaaguauggaaacggcguguggaucggucggacaaaaaguaucagcucccgcaauggguucgagaugauuugggauccaaacggcuggaccggaacggacaauaacuuuucuauaaagcaagacaucgucggcauuaaugaauggucgggguacagcggauccuucgugcagcaucccgagcugacuggucuggauuguauccgaccuugcuucuggguugaacucauuagaggcaggccaaaagagaacacaaucuggaccucagggaguucuauaucguuuuguggagucaauuccgacacugugggcuggucauggcccgauggugcggaguuaccguucacaaucgacaaguga

SEQ ID NO: 145387 - RNA, 1410 nt, Artificial Sequence; identical to SEQ ID NO: 144786
  derived and/or modified CDS sequence (opt3) from neuraminidase__InfluenzaA__ACV67176

SEQ ID NO: 145388 - RNA, 1410 nt, Artificial Sequence; identical to SEQ ID NO: 144776
  derived and/or modified CDS sequence (opt3) from neuraminidase__InfluenzaA__ACV67177

SEQ ID NO: 145389 - RNA, 1410 nt, Artificial Sequence; identical to SEQ ID NO: 144786
  derived and/or modified CDS sequence (opt3) from neuraminidase__InfluenzaA__ACV67178

SEQ ID NO: 145390 - RNA, 1410 nt, Artificial Sequence; identical to SEQ ID NO: 144786
  derived and/or modified CDS sequence (opt3) from neuraminidase__InfluenzaA__ACV67179

SEQ ID NO: 145391 - RNA, 1410 nt, Artificial Sequence
  derived and/or modified CDS sequence (opt3) from neuraminidase__InfluenzaA__ACV67180
augaaccccaaucagaagaucauuaccauaggcagcgugugcaugacaaucgggauggccaaccugauucuccaaaucggaaauauuaucuccauauggaucucucacucaauucagcuugguaaccagaaucagaucgagacuuguaaccaaagugucauuacguacgaaaauaacaccuggguuaaucagacauaugugaacaucagcaauacuaacuucgcugcaggccagccuguaguguccgucaaacuggccggaaauucuucguugugcccagugucagggugggcgauauacagcaaggacaacaguauuagaaucggcuccaaaggugauguuuuugugauuagggagccguucaucucuuguagccccuuagaaugccggaccuuuuuccugacacagggggcucuacucaaugacaagcauuccaacggaaccaucaaagaucgcucaccuuaucgaacucugaugaguuguccaauuggcgagguccccagcccuuacaacucucguuuugaauccguggccuggucagcaagcgccugccacgacggcauaaauuggcuuacaaucgggauuaguggaccagauaacggugcuguagcaguucugaaguauaauggcaucauaaccgacacgauuaagucuuggagaaacaauaucuugaggacucaagaguccgagugugccugcgugaacgggagcuguuucaccgucaugacagauggacccucggacggccaggcuucuuacaaaaucuuucggauugaaaaggguaaaaucgugaaguccguggagaugaaugccccuaacuaucauuacgaagagugcucauguuacccagauaguagcgagauuacuugcgucugccgcgacaauuggcacggguccaacagaccguggguuucuuucaaucagaaccucgaauaucagauaggauacaucuguagcggcauuuuuggcgauaaucccaggccuaacgacaaaaccgggucaugcggaccagugaguuccaauggugcgaacggcguaaagggguucagcuuuaaguauggaaacggcguguggaucggucggacaaaaucuaucucaagucgcaauggguucgagaugauuugggaucccaacggcuggaccggaacggacaauaacuuuagcauaaagcaagacaucgucggcauuaaugaaugguccggguacucuggaucguucgugcagcauccugagcugacuggucuggauuguauccgaccaugcuucuggguugaacucauuagaggcaggcccaaagagaacacaaucuggaccagcggguccucaauaaguuuuuguggagucaauucugacacugugggcuggagcuggccggauggugcagaguuaccuuucacaaucgacaaguga

SEQ ID NO: 145392 - RNA, 1410 nt, Artificial Sequence
  derived and/or modified CDS sequence (opt3) from neuraminidase__InfluenzaA__ACV67181
augaaccccaaucagaagaucauuaccauaggcagcgugugcaugacaaucgggauggccaaccugauucuccaaaucggaaauauuaucuccauauggaucucucacucaauucagcuugguaaccagaaucagaucgagacuuguaaccaaagugucauuacguacgaaaauaacaccuggguuaaucagacauaugugaacaucagcaauacuaacuucgcugcaggccaguccguagugucugucaaacuggccggaaauucgucauugugcccugugagcggaugggcgauauacaguaaggacaacuccauuagaaucggcucuaaaggugauguuuuuauuaucagggagccauucaucagcuguuccccguuagaaugccggaccuuuuuccugacacagggggcucuacucaaugacaagcauucaaacggaaccauuaaagaucgcagucccuaucgaacucugaugagcuguccuauaggcgaggugccaucucccuacaacucccguuuugaaucagucgccuggagcgcaagugccugccacgacggcaucaauuggcuuacaauugggaucucuggaccugauaacggugcuguggcaguacugaaguauaauggcauaauuaccgacacgaucaaguccuggagaaacaauaucuugaggacucaagagagcgagugugccugcguuaacgggucguguuucaccgugaugacagauggaccaucugacggccaggcuuccuacaaaauuuuucggaucgaaaaggguaaaauuauaaagucagucgagaugaaugcccccaacuaucauuacgaagagugcaguuguuacccugauagcuccgagaucacuugcgugugccgcgacaauuggcacgggucuaacagaccaugggugagcuucaaucagaaccucgaauaucagauuggauacaucuguucaggcaucuuuggcgauaauccgaggcccaacgacaaaaccgggaguugcggaccugucuccagcaauggugcgaacggcguuaagggguucucuuuuaaguauggaaacggcguguggauuggucggacaaaaucaauaaguagccgcaauggguucgagaugaucugggauccaaacggcuggaccggaacggacaauaacuuuuccauuaagcaagacaucguaggcauuaaugaauggucuggguacucggggagcuucgugcagcaucccgagcugacuggucuggauuguauccgaccuugcuucugggucgaacucauaagaggcaggccaaaagagaacacaaucuggaccuccgggucaaguauuucuuuuuguggagugaauagcgacacuguuggcugguccuggcccgauggugcagaguuaccguucacaaucgacaaguga

SEQ ID NO: 145393 - RNA, 1410 nt, Artificial Sequence; identical to SEQ ID NO: 145210
  derived and/or modified CDS sequence (opt3) from neuraminidase__InfluenzaA__ACV67182

SEQ ID NO: 145394 - RNA, 1410 nt, Artificial Sequence
  derived and/or modified CDS sequence (opt3) from neuraminidase__InfluenzaA__ACV67183
augaaccccaaucagaagaucauuaccauaggcagcgugugcaugacaaucgggauggccaaccugauucuccaaaucggaaauauuaucuccauauggaucucucacucaauucagcuugguaaccagaaucagaucgagacuuguaaccaaagugucauuacguacgaaaauaacaccuggguuaaucagacauaugugaacaucagcaauacuaacuucgcugcaggccaguccguagugucugucaaacuggccggaaauucgucauugugcccugugagcgggugggcgauauacaguaaggacaacuccguuagaauuggcucuaaaggugauguguuugucaucagggagccauucauuagcuguuccccguuagaaugccggaccuuuuuccugacacagggggcucuacucaaugacaagcauucaaacggaaccaucaaagaucgcagucccuaucgaacucugaugagcuguccuaucggcgaggugccaucucccuacaacucccguuuugaaucaguagccuggagcgcaagugccugccacgacggcauuaauuggcuuacaauagggaucucuggaccugauaacggugcuguugcagugcugaaguauaauggcauuaucaccgacacgauaaaguccuggagaaacaauauuuugaggacucaagagagcgagugugccugcgucaacgggucguguuucaccgugaugacagauggaccaucuaauggccaggcuuccuacaaaaucuuucggaucgaaaaggguaaaauugugaagucagucgagaugaacgcccccaauuaucauuacgaagagugcaguuguuacccugacagcaacgagaucacuugcguuugccgcgauaauuggcacggguccaacagaccaugggugucuuucaaucagaaccucgaauaucagauuggauacauauguagcggcaucuuuggcgacaauccgaggcccaacgauaaaaccgggucaugcggaccuguaaguuccaacggugcgaauggcgugaagggguucagcuuuaaguauggaaacggcgucuggauuggucggacaaaaucuaucaauucacgcaacggguucgagaugaucugggacccaaauggcuggaccggaacggauaacaauuuuaguauuaagcaagacauagugggcaucaacgaauggagcggguacuccggaucuuucguucagcaucccgagcugacuggucuggacuguauucgaccuugcuucuggguggaacucaucagaggcaggccaaaagagaauacaauuuggaccucggggagcuccaucucauuuuguggagucaacagugauacugugggcuggucuuggcccgacggugcagaguuaccguucacaauagauaaguga

SEQ ID NO: 145395 - RNA, 1410 nt, Artificial Sequence; identical to SEQ ID NO: 144786
  derived and/or modified CDS sequence (opt3) from neuraminidase__InfluenzaA__ACV67184

SEQ ID NO: 145396 - RNA, 1410 nt, Artificial Sequence; identical to SEQ ID NO: 144776
  derived and/or modified CDS sequence (opt3) from neuraminidase__InfluenzaA__ACV67186

SEQ ID NO: 145397 - RNA, 1410 nt, Artificial Sequence; identical to SEQ ID NO: 144786
  derived and/or modified CDS sequence (opt3) from neuraminidase__InfluenzaA__ACV67187

SEQ ID NO: 145398 - RNA, 1410 nt, Artificial Sequence; identical to SEQ ID NO: 144786
  derived and/or modified CDS sequence (opt3) from neuraminidase__InfluenzaA__ACV67188

SEQ ID NO: 145399 - RNA, 1410 nt, Artificial Sequence; identical to SEQ ID NO: 144816
  derived and/or modified CDS sequence (opt3) from neuraminidase__InfluenzaA__ACV67189

SEQ ID NO: 145400 - RNA, 1410 nt, Artificial Sequence; identical to SEQ ID NO: 144816
  derived and/or modified CDS sequence (opt3) from neuraminidase__InfluenzaA__ACV67190

SEQ ID NO: 145401 - RNA, 1410 nt, Artificial Sequence; identical to SEQ ID NO: 144776
  derived and/or modified CDS sequence (opt3) from neuraminidase__InfluenzaA__ACV67191

SEQ ID NO: 145402 - RNA, 1410 nt, Artificial Sequence; identical to SEQ ID NO: 144816
  derived and/or modified CDS sequence (opt3) from neuraminidase__InfluenzaA__ACV67192

SEQ ID NO: 145403 - RNA, 1410 nt, Artificial Sequence; identical to SEQ ID NO: 144816
  derived and/or modified CDS sequence (opt3) from neuraminidase__InfluenzaA__ACV67193

SEQ ID NO: 145404 - RNA, 1410 nt, Artificial Sequence; identical to SEQ ID NO: 144786
  derived and/or modified CDS sequence (opt3) from neuraminidase__InfluenzaA__ACV67194

SEQ ID NO: 145405 - RNA, 1410 nt, Artificial Sequence; identical to SEQ ID NO: 144786
  derived and/or modified CDS sequence (opt3) from neuraminidase__InfluenzaA__ACV67195

SEQ ID NO: 145406 - RNA, 1410 nt, Artificial Sequence; identical to SEQ ID NO: 144786
  derived and/or modified CDS sequence (opt3) from neuraminidase__InfluenzaA__ACV67196

SEQ ID NO: 145407 - RNA, 1410 nt, Artificial Sequence; identical to SEQ ID NO: 144776
  derived and/or modified CDS sequence (opt3) from neuraminidase__InfluenzaA__ACV67197

SEQ ID NO: 145408 - RNA, 1410 nt, Artificial Sequence; identical to SEQ ID NO: 144776
  derived and/or modified CDS sequence (opt3) from neuraminidase__InfluenzaA__ACV67199

SEQ ID NO: 145409 - RNA, 1410 nt, Artificial Sequence; identical to SEQ ID NO: 144776
  derived and/or modified CDS sequence (opt3) from neuraminidase__InfluenzaA__ACV67200

SEQ ID NO: 145410 - RNA, 1410 nt, Artificial Sequence; identical to SEQ ID NO: 144776
  derived and/or modified CDS sequence (opt3) from neuraminidase__InfluenzaA__ACV67201

SEQ ID NO: 145411 - RNA, 1410 nt, Artificial Sequence; identical to SEQ ID NO: 144776
  derived and/or modified CDS sequence (opt3) from neuraminidase__InfluenzaA__ACV67202

SEQ ID NO: 145412 - RNA, 1410 nt, Artificial Sequence; identical to SEQ ID NO: 144786
  derived and/or modified CDS sequence (opt3) from neuraminidase__InfluenzaA__ACV67203

SEQ ID NO: 145413 - RNA, 1410 nt, Artificial Sequence; identical to SEQ ID NO: 144786
  derived and/or modified CDS sequence (opt3) from neuraminidase__InfluenzaA__ACV67204

SEQ ID NO: 145414 - RNA, 1410 nt, Artificial Sequence; identical to SEQ ID NO: 144786
  derived and/or modified CDS sequence (opt3) from neuraminidase__InfluenzaA__ACV67205

SEQ ID NO: 145415 - RNA, 1410 nt, Artificial Sequence
  derived and/or modified CDS sequence (opt3) from neuraminidase__InfluenzaA__ACV67206
augaaccccaaucagaagaucauuaccauaggcagcgugugcaugacaaucgggauggccaaccugauucuccaaaucggaaauauuaucuccauauggaucucucacucaauucagcuugguaaccagaaucagaucgagacuuguaaccaaagugucauuacguacgaaaauaacaccuggguuaaucagacauaugugaacaucagcaauacuaacuucgcugcaggccaguccaugguaucugugaaacuggccggaaauucgucauugugcccugucagcggaugggcgauauacaguaaggacaacuccgugagaauuggcucuaaaggugauguuuuugugaucagggagccauucauuagcuguuccccguuagaaugccggaccuuuuuccugacacagggggcucuacucaaugacaagcauucaaacggaaccaucaaagaucgcagucccuaucgaacucugaugagcuguccuaucggcgaggucccaucucccuacaacucccguuuugaaucaguggccuggagcgcaagugccugccacgacggcauuaauuggcuuacaauagggaucucuggaccugauaacggugcuguagcaguucugaaguauaauggcauuaucaccgacacgauaaaguccuggagaaacaauauuuugaggacucaagagagcgagugugccugcgugaacgggucguguuucaccgucaugacagauggaccaucuaauggccaggcuuccuacaaaaucuuucggaucgaaaaggguaaaauugugaagucaguggagaugaacgcccccaauuauuacuacgaagagugcaguuguuauccugacagcuccgagaucacuugcgucugccgcgauaacuggcaugggucuaauagaccauggguuagcuucaaccagaaucucgaauaccagauuggauauauauguucaggcaucuuuggcgacaacccgaggcccaaugauaaaaccgggaguugcggaccuguguccagcaacggugcgaacggcguaaagggguucucuuuuaaguacggaaauggcguguggauuggucggacaaaaucaaucaguagccgcaacggguucgagaugaucugggacccaaauggcuggaccggaacggauaacaauuuuuccauuaagcaagacauagucggcaucaacgaauggucuggguauucggggagcuucgugcagcaccccgagcugacuggucuggacuguauucgaccuugcuucuggguugaacucaucagaggcaggccaaaagagaauacaauuuggaccuccgggucaaguaucucuuuuuguggagugaacagcgauacugucggcugguccuggcccgacggugcagaguuaccguucacaauagauaaguga

SEQ ID NO: 145416 - RNA, 1410 nt, Artificial Sequence; identical to SEQ ID NO: 144776
  derived and/or modified CDS sequence (opt3) from neuraminidase__InfluenzaA__ACV67207

SEQ ID NO: 145417 - RNA, 1410 nt, Artificial Sequence; identical to SEQ ID NO: 144786
  derived and/or modified CDS sequence (opt3) from neuraminidase__InfluenzaA__ACV67208

SEQ ID NO: 145418 - RNA, 1410 nt, Artificial Sequence; identical to SEQ ID NO: 144776
  derived and/or modified CDS sequence (opt3) from neuraminidase__InfluenzaA__ACV67210

SEQ ID NO: 145419 - RNA, 1410 nt, Artificial Sequence; identical to SEQ ID NO: 144786
  derived and/or modified CDS sequence (opt3) from neuraminidase__InfluenzaA__ACV67211

SEQ ID NO: 145420 - RNA, 1410 nt, Artificial Sequence; identical to SEQ ID NO: 144786
  derived and/or modified CDS sequence (opt3) from neuraminidase__InfluenzaA__ACV70076

SEQ ID NO: 145421 - RNA, 1410 nt, Artificial Sequence
  derived and/or modified CDS sequence (opt3) from neuraminidase__InfluenzaA__ACV70086
augaaccccaaucagaagaucauuaccauaggcagcgugugcaugacaaucgggauggccaaccugauucuccaaaucggaaauauuaucuccauauggaucucucacucaauucagcuugguaaccagaaucagaucgagacuuguaaccaaaguauuaucacguacgaaaauaacaccugggucaaucagacauauguuaacauaagcaauacuaacuucgcugcaggccaguccgugguaucugugaaacuggccggaaauucgucauugugcccugucagcggaugggcgauuuacaguaaggacaacuccgugagaaucggcucuaaaggugauguuuuugugauuagggagccauucaucagcuguuccccguuagaaugccggaccuuuuuccugacacagggggcucuacucaaugacaagcauucaaacggaaccaucaaagaucgcagucccuaucgaacucugaugagcuguccuauuggcgaggucccaucucccuacaacucccguuuugaaucaguggccuggagcgcaagugccugccacgacggcauaaauuggcuuacaaucgggauuucuggaccugauaacggugcuguagcaguucugaaguauaauggcaucauaaccgacacgauuaaguccuggagaaacaauaucuugaggacucaagagagcgagugugccugcgugaacgggucguguuucaccgucaugacagauggaccaucuaauggccaggcuuccuacaaaaucuuucggauugaaaaggguaaaaucgugaagucaguggagaugaacgcccccaauuaucauuacgaagagugcaguuguuacccugacagcuccgagauuacuugcgucugccgcgauaacuggcacgggucuaauagaccauggguuagcuucaaccagaaucucgaauaucagauaggauacaucuguucaggcauuuuuggcgacaacccgaggcccaaugauaaaaccgggaguugcggaccuguguccagcaacggugcgaacggcguaaagggguucucuuuuaaguauggaaauggcguguggaucggucggacaaaaucaaucaguagccgcaacggguucgagaugauuugggacccaaauggcuggaccggaacggauaacaauuuuuccauaaagcaagacaucgucggcauuaacgaauggucuggguacucggggagcuucgugcagcaucccgagcugacuggucuggacuguauccgaccuugcuucuggguugaacucauuagaggcaggccaaaagagaauacaaucuggaccuccgggucaaguauaucuuuuuguggagugaacagcgauacugucggcugguccuggcccgacggugcagaguuaccguucacaaucgauaaguga

SEQ ID NO: 145422 - RNA, 1410 nt, Artificial Sequence
  derived and/or modified CDS sequence (opt3) from neuraminidase__InfluenzaA__ACV70096
augaaccccaaucagaagaucauuaccauaggcagcgugugcaugacaaucgggauggccaaccugauucuccaaaucggaaauauuaucuccauauggaucucucacucaauucagcuugguaaccagaaucagaucgagacuuguaaccaaagugucauuacguacgaaaauaacaccuggguuaaucagacauaugugaacaucagcaauacuaacuucaccgcuggccaguccguagugucugucaaacuggcaggaaauucgucauugugcccugugagcggaugggccauauacaguaaggacaacuccauuagaaucggcucuaaaggugauguuuuugugauuagggagccauucaucagcuguuccccguuagaaugccggacauuuuuccugacccagggggcgcuacucaaugacaagcauucaaacggaacuaucaaagaucgcagucccuaucgaacacugaugagcuguccuauuggcgaggucccaucucccuacaacucccguuuugaaucaguggcuuggagcgccagugcaugccacgacggcauaaauuggcuuaccaucgggauuucuggaccugauaacggugccguagcuguucugaaguauaauggcaucauaacggacacuauuaaguccuggagaaacaauaucuugaggacccaagagagcgagugugcaugcgugaacgggucguguuucacagucaugacugauggaccaucugacggccaggccuccuacaaaaucuuucggauugaaaaggguaaaaucgugaagucaguggagaugaaugcucccaacuaucauuacgaagagugcaguuguuacccugauagcuccgagauuaccugcgucugccgcgacaauuggcacgggucuaacagaccauggguuagcuucaaucagaaccucgaauaucagauaggauacaucuguucaggcauuuuuggcgauaauccgaggcccaacgacaaaacagggaguugcggaccuguguccagcaauggugccaacggcguaaagggguucucuuuuaaguauggaaacggcguguggaucggucggaccaaaucaaucaguagccgcaauggguucgagaugauuugggauccaaacggcuggacgggaacugacaauaacuuuuccauaaagcaagacaucgucggcauuaaugaauggucuggguacucggggagcuucgugcagcaucccgagcugacaggucuggauuguauccgaccuugcuucuggguugaacucauuagaggcaggccaaaagagaacaccaucuggacuuccgggucaaguauaucuuuuuguggagugaauagcgacacagucggcugguccuggcccgauggugcggaguuaccguucaccaucgacaaguga

SEQ ID NO: 145423 - RNA, 1410 nt, Artificial Sequence; identical to SEQ ID NO: 144786
  derived and/or modified CDS sequence (opt3) from neuraminidase__InfluenzaA__ACV70106

SEQ ID NO: 145424 - RNA, 1410 nt, Artificial Sequence; identical to SEQ ID NO: 144786
  derived and/or modified CDS sequence (opt3) from neuraminidase__InfluenzaA__ACV70116

SEQ ID NO: 145425 - RNA, 1410 nt, Artificial Sequence; identical to SEQ ID NO: 144786
  derived and/or modified CDS sequence (opt3) from neuraminidase__InfluenzaA__ACV70126

SEQ ID NO: 145426 - RNA, 1410 nt, Artificial Sequence; identical to SEQ ID NO: 144786
  derived and/or modified CDS sequence (opt3) from neuraminidase__InfluenzaA__ACV70157

SEQ ID NO: 145427 - RNA, 1410 nt, Artificial Sequence; identical to SEQ ID NO: 144776
  derived and/or modified CDS sequence (opt3) from neuraminidase__InfluenzaA__ACV70167

SEQ ID NO: 145428 - RNA, 1410 nt, Artificial Sequence; identical to SEQ ID NO: 144786
  derived and/or modified CDS sequence (opt3) from neuraminidase__InfluenzaA__ACV70177

SEQ ID NO: 145429 - RNA, 1410 nt, Artificial Sequence; identical to SEQ ID NO: 144786
  derived and/or modified CDS sequence (opt3) from neuraminidase__InfluenzaA__ACV70187

SEQ ID NO: 145430 - RNA, 1410 nt, Artificial Sequence; identical to SEQ ID NO: 144786
  derived and/or modified CDS sequence (opt3) from neuraminidase__InfluenzaA__ACV70197

SEQ ID NO: 145431 - RNA, 1410 nt, Artificial Sequence; identical to SEQ ID NO: 144786
  derived and/or modified CDS sequence (opt3) from neuraminidase__InfluenzaA__ACV70207

SEQ ID NO: 145432 - RNA, 1410 nt, Artificial Sequence
  derived and/or modified CDS sequence (opt3) from neuraminidase__InfluenzaA__ACV70217
augaaccccaaucagaagaucauuaccauaggcagcgugugcaugacaaucgggauggccaaccugauucuccaaaucggaaauauuaucuccauauggaucucucacucaauucagcuugguaaccagaaucagaucgagacuuguaaccaaagugucauuacguacgaaaauaacaccuggguuaaucagacauaugugaacaucagcaauacuaacuucgcugcaggccaguccguagugucugucaaacuggccggaaauucgucauugugcccugugagcggaugggcgauauacaguaaggacaacuccguuagaauuggcucuaaaggugauguguuugucaucagggagccauucauuagcuguucccauuuagaaugccggaccuuuuuccugacacagggggcucuacucaaugacaagcacucaaacggaaccaucaaagaucgcaguccguaucgaacucugaugagcugucccaucggcgaggugccuucuccauacaacucccguuuugaaucaguagccuggagcgcaagugccugccaugacggcauuaauuggcuuacaauagggaucucuggacccgauaacggugcuguugcagugcugaaguauaauggcauuaucaccgacacgauaaaguccuggagaaacaauauuuugaggacucaagagagcgagugugccugcgucaacgggucguguuucaccgugaugacagauggaccuucuaauggccaggcuuccuacaaaaucuuucggaucgaaaaggguaaaauugugaagucagucgagaugaacgccccaaauuaucacuacgaagagugcaguuguuaccccgacagcuccgagaucacuugcguuugccgcgauaacuggcaugggucuaauagaccuugggugagcuucaaccagaaucucgaauaucagauuggauacauauguucaggcaucuuuggcgacaacccaaggccgaaugauaaaaccgggaguugcggacccguauccagcaacggugcgaacggcgugaagggguucucuuuuaaguauggaaauggcgucuggauuggucggacaaaaucaaucaguagccgcaacggguucgagaugaucugggacccuaauggcuggaccggaacggauaacaauuuuuccauuaagcaagacauagugggcaucaacgaauggucuggguacucggggagcuucguucagcacccagagcugacuggucuggacuguauucgacccugcuucuggguggaacucaucagaggcaggccuaaagagaauacaauuuggaccuccgggucaaguaucucuuuuuguggagucaacagcgauacugugggcugguccuggccagacggugcagaguuacccuucacaauagauaaguga

SEQ ID NO: 145433 - RNA, 1410 nt, Artificial Sequence; identical to SEQ ID NO: 144786
  derived and/or modified CDS sequence (opt3) from neuraminidase__InfluenzaA__ACV70227

SEQ ID NO: 145434 - RNA, 1410 nt, Artificial Sequence; identical to SEQ ID NO: 144786
  derived and/or modified CDS sequence (opt3) from neuraminidase__InfluenzaA__ACV70237

SEQ ID NO: 145435 - RNA, 1410 nt, Artificial Sequence; identical to SEQ ID NO: 144786
  derived and/or modified CDS sequence (opt3) from neuraminidase__InfluenzaA__ACV70247

SEQ ID NO: 145436 - RNA, 1410 nt, Artificial Sequence; identical to SEQ ID NO: 144786
  derived and/or modified CDS sequence (opt3) from neuraminidase__InfluenzaA__ACV70257

SEQ ID NO: 145437 - RNA, 1410 nt, Artificial Sequence; identical to SEQ ID NO: 144786
  derived and/or modified CDS sequence (opt3) from neuraminidase__InfluenzaA__ACV70267

SEQ ID NO: 145438 - RNA, 1410 nt, Artificial Sequence; identical to SEQ ID NO: 144786
  derived and/or modified CDS sequence (opt3) from neuraminidase__InfluenzaA__ACV70277

SEQ ID NO: 145439 - RNA, 1410 nt, Artificial Sequence; identical to SEQ ID NO: 144786
  derived and/or modified CDS sequence (opt3) from neuraminidase__InfluenzaA__ACV70287

SEQ ID NO: 145440 - RNA, 1410 nt, Artificial Sequence; identical to SEQ ID NO: 144786
  derived and/or modified CDS sequence (opt3) from neuraminidase__InfluenzaA__ACV70297

SEQ ID NO: 145441 - RNA, 1410 nt, Artificial Sequence; identical to SEQ ID NO: 144786
  derived and/or modified CDS sequence (opt3) from neuraminidase__InfluenzaA__ACV70307

SEQ ID NO: 145442 - RNA, 1410 nt, Artificial Sequence; identical to SEQ ID NO: 144776
  derived and/or modified CDS sequence (opt3) from neuraminidase__InfluenzaA__ACV70317

SEQ ID NO: 145443 - RNA, 1410 nt, Artificial Sequence; identical to SEQ ID NO: 144786
  derived and/or modified CDS sequence (opt3) from neuraminidase__InfluenzaA__ACV70327

SEQ ID NO: 145444 - RNA, 1410 nt, Artificial Sequence; identical to SEQ ID NO: 144786
  derived and/or modified CDS sequence (opt3) from neuraminidase__InfluenzaA__ACV70337

SEQ ID NO: 145445 - RNA, 1410 nt, Artificial Sequence; identical to SEQ ID NO: 144786
  derived and/or modified CDS sequence (opt3) from neuraminidase__InfluenzaA__ACV70347

SEQ ID NO: 145446 - RNA, 1410 nt, Artificial Sequence; identical to SEQ ID NO: 144786
  derived and/or modified CDS sequence (opt3) from neuraminidase__InfluenzaA__ACV70357

SEQ ID NO: 145447 - RNA, 1410 nt, Artificial Sequence; identical to SEQ ID NO: 144786
  derived and/or modified CDS sequence (opt3) from neuraminidase__InfluenzaA__ACV70367

SEQ ID NO: 145448 - RNA, 1410 nt, Artificial Sequence; identical to SEQ ID NO: 144786
  derived and/or modified CDS sequence (opt3) from neuraminidase__InfluenzaA__ACV70377

SEQ ID NO: 145449 - RNA, 1410 nt, Artificial Sequence; identical to SEQ ID NO: 144786
  derived and/or modified CDS sequence (opt3) from neuraminidase__InfluenzaA__ACV70387

SEQ ID NO: 145450 - RNA, 1410 nt, Artificial Sequence; identical to SEQ ID NO: 144786
  derived and/or modified CDS sequence (opt3) from neuraminidase__InfluenzaA__ACV70397

SEQ ID NO: 145451 - RNA, 1410 nt, Artificial Sequence; identical to SEQ ID NO: 144786
  derived and/or modified CDS sequence (opt3) from neuraminidase__InfluenzaA__ACV70407

SEQ ID NO: 145452 - RNA, 1410 nt, Artificial Sequence; identical to SEQ ID NO: 144776
  derived and/or modified CDS sequence (opt3) from neuraminidase__InfluenzaA__ACV70417

SEQ ID NO: 145453 - RNA, 1410 nt, Artificial Sequence; identical to SEQ ID NO: 144786
  derived and/or modified CDS sequence (opt3) from neuraminidase__InfluenzaA__ACV70427

SEQ ID NO: 145454 - RNA, 1410 nt, Artificial Sequence; identical to SEQ ID NO: 144786
  derived and/or modified CDS sequence (opt3) from neuraminidase__InfluenzaA__ACV70437

SEQ ID NO: 145455 - RNA, 1410 nt, Artificial Sequence; identical to SEQ ID NO: 144786
  derived and/or modified CDS sequence (opt3) from neuraminidase__InfluenzaA__ACV70447

SEQ ID NO: 145456 - RNA, 1410 nt, Artificial Sequence; identical to SEQ ID NO: 144786
  derived and/or modified CDS sequence (opt3) from neuraminidase__InfluenzaA__ACV70457

SEQ ID NO: 145457 - RNA, 1410 nt, Artificial Sequence; identical to SEQ ID NO: 144786
  derived and/or modified CDS sequence (opt3) from neuraminidase__InfluenzaA__ACV70467

SEQ ID NO: 145458 - RNA, 1410 nt, Artificial Sequence; identical to SEQ ID NO: 144786
  derived and/or modified CDS sequence (opt3) from neuraminidase__InfluenzaA__ACV70477

SEQ ID NO: 145459 - RNA, 1410 nt, Artificial Sequence; identical to SEQ ID NO: 144786
  derived and/or modified CDS sequence (opt3) from neuraminidase__InfluenzaA__ACV70487

SEQ ID NO: 145460 - RNA, 1410 nt, Artificial Sequence; identical to SEQ ID NO: 144786
  derived and/or modified CDS sequence (opt3) from neuraminidase__InfluenzaA__ACV70497

SEQ ID NO: 145461 - RNA, 1410 nt, Artificial Sequence; identical to SEQ ID NO: 144786
  derived and/or modified CDS sequence (opt3) from neuraminidase__InfluenzaA__ACV70507

SEQ ID NO: 145462 - RNA, 1410 nt, Artificial Sequence; identical to SEQ ID NO: 144786
  derived and/or modified CDS sequence (opt3) from neuraminidase__InfluenzaA__ACV70517

SEQ ID NO: 145463 - RNA, 1410 nt, Artificial Sequence; identical to SEQ ID NO: 144786
  derived and/or modified CDS sequence (opt3) from neuraminidase__InfluenzaA__ACV70527

SEQ ID NO: 145464 - RNA, 1410 nt, Artificial Sequence; identical to SEQ ID NO: 144786
  derived and/or modified CDS sequence (opt3) from neuraminidase__InfluenzaA__ACV70547

SEQ ID NO: 145465 - RNA, 1410 nt, Artificial Sequence; identical to SEQ ID NO: 144786
  derived and/or modified CDS sequence (opt3) from neuraminidase__InfluenzaA__ACV70557

SEQ ID NO: 145466 - RNA, 1410 nt, Artificial Sequence; identical to SEQ ID NO: 144786
  derived and/or modified CDS sequence (opt3) from neuraminidase__InfluenzaA__ACV70567

SEQ ID NO: 145467 - RNA, 1410 nt, Artificial Sequence; identical to SEQ ID NO: 144786
  derived and/or modified CDS sequence (opt3) from neuraminidase__InfluenzaA__ACV70577

SEQ ID NO: 145468 - RNA, 1410 nt, Artificial Sequence; identical to SEQ ID NO: 144786
  derived and/or modified CDS sequence (opt3) from neuraminidase__InfluenzaA__ACV70587

SEQ ID NO: 145469 - RNA, 1410 nt, Artificial Sequence; identical to SEQ ID NO: 144776
  derived and/or modified CDS sequence (opt3) from neuraminidase__InfluenzaA__ACV70597

SEQ ID NO: 145470 - RNA, 1410 nt, Artificial Sequence; identical to SEQ ID NO: 144786
  derived and/or modified CDS sequence (opt3) from neuraminidase__InfluenzaA__ACV70607

SEQ ID NO: 145471 - RNA, 1410 nt, Artificial Sequence; identical to SEQ ID NO: 145369
  derived and/or modified CDS sequence (opt3) from neuraminidase__InfluenzaA__ACV70617

SEQ ID NO: 145472 - RNA, 1410 nt, Artificial Sequence; identical to SEQ ID NO: 144786
  derived and/or modified CDS sequence (opt3) from neuraminidase__InfluenzaA__ACV70647

SEQ ID NO: 145473 - RNA, 1410 nt, Artificial Sequence; identical to SEQ ID NO: 144786
  derived and/or modified CDS sequence (opt3) from neuraminidase__InfluenzaA__ACV70657

SEQ ID NO: 145474 - RNA, 1410 nt, Artificial Sequence; identical to SEQ ID NO: 144786
  derived and/or modified CDS sequence (opt3) from neuraminidase__InfluenzaA__ACV70667

SEQ ID NO: 145475 - RNA, 1410 nt, Artificial Sequence; identical to SEQ ID NO: 144786
  derived and/or modified CDS sequence (opt3) from neuraminidase__InfluenzaA__ACV70677

SEQ ID NO: 145476 - RNA, 1410 nt, Artificial Sequence; identical to SEQ ID NO: 144786
  derived and/or modified CDS sequence (opt3) from neuraminidase__InfluenzaA__ACV70687

SEQ ID NO: 145477 - RNA, 1410 nt, Artificial Sequence; identical to SEQ ID NO: 144786
  derived and/or modified CDS sequence (opt3) from neuraminidase__InfluenzaA__ACV70697

SEQ ID NO: 145478 - RNA, 1410 nt, Artificial Sequence; identical to SEQ ID NO: 144786
  derived and/or modified CDS sequence (opt3) from neuraminidase__InfluenzaA__ACV70707

SEQ ID NO: 145479 - RNA, 1410 nt, Artificial Sequence; identical to SEQ ID NO: 144786
  derived and/or modified CDS sequence (opt3) from neuraminidase__InfluenzaA__ACV70717

SEQ ID NO: 145480 - RNA, 1410 nt, Artificial Sequence; identical to SEQ ID NO: 144786
  derived and/or modified CDS sequence (opt3) from neuraminidase__InfluenzaA__ACV70727

SEQ ID NO: 145481 - RNA, 1410 nt, Artificial Sequence; identical to SEQ ID NO: 144786
  derived and/or modified CDS sequence (opt3) from neuraminidase__InfluenzaA__ACV70737

SEQ ID NO: 145482 - RNA, 1410 nt, Artificial Sequence; identical to SEQ ID NO: 144786
  derived and/or modified CDS sequence (opt3) from neuraminidase__InfluenzaA__ACV70757

SEQ ID NO: 145483 - RNA, 1410 nt, Artificial Sequence; identical to SEQ ID NO: 144786
  derived and/or modified CDS sequence (opt3) from neuraminidase__InfluenzaA__ACV70767

SEQ ID NO: 145484 - RNA, 1410 nt, Artificial Sequence; identical to SEQ ID NO: 144786
  derived and/or modified CDS sequence (opt3) from neuraminidase__InfluenzaA__ACV70777

SEQ ID NO: 145485 - RNA, 1410 nt, Artificial Sequence; identical to SEQ ID NO: 144786
  derived and/or modified CDS sequence (opt3) from neuraminidase__InfluenzaA__ACV70787

SEQ ID NO: 145486 - RNA, 1410 nt, Artificial Sequence; identical to SEQ ID NO: 144786
  derived and/or modified CDS sequence (opt3) from neuraminidase__InfluenzaA__ACV70797

SEQ ID NO: 145487 - RNA, 1410 nt, Artificial Sequence; identical to SEQ ID NO: 144786
  derived and/or modified CDS sequence (opt3) from neuraminidase__InfluenzaA__ACV70807

SEQ ID NO: 145488 - RNA, 1410 nt, Artificial Sequence; identical to SEQ ID NO: 144786
  derived and/or modified CDS sequence (opt3) from neuraminidase__InfluenzaA__ACV70817

SEQ ID NO: 145489 - RNA, 1410 nt, Artificial Sequence; identical to SEQ ID NO: 144776
  derived and/or modified CDS sequence (opt3) from neuraminidase__InfluenzaA__ACV70827

SEQ ID NO: 145490 - RNA, 1410 nt, Artificial Sequence; identical to SEQ ID NO: 144786
  derived and/or modified CDS sequence (opt3) from neuraminidase__InfluenzaA__ACV70837

SEQ ID NO: 145491 - RNA, 1410 nt, Artificial Sequence
  derived and/or modified CDS sequence (opt3) from neuraminidase__InfluenzaA__ACV70847
augaaccccaaucagaagaucauuaccauaggcagcgugugcaugacaaucgggauggccaaccugauucuccaaaucggaaauauuaucuccauauggaucucucacucaauucagcuugguaaccagaaucagaucgagacuuguaaccaaagugucauuacguacgaaaauaacaccuggguuaaucagacauaugugaacaucagcaauacuaacuucgcugcaggccaguccguagugucugucaaacuggccggaaauucgucauugugcccugugagcggaugggcgauauacaguaaggacaacuccauuagaaucggcucuaaaggugauguuuuugugauuagggagccauucaugagcuguuccccguuagaaugccggaccuuuuuccugacacagggggcucuacucaaugacaagcauucaaacggaaccaucaaagaucgcagucccuaucgaacucugaugagcuguccuaucggcgaggucccaucucccuacaacucccguuuugaaucaguggccuggagcgcaagugccugccacgacggcauuaauuggcuuacaauagggaucucuggaccugauaacggugcuguagcaguucugaaguauaauggcauuaucaccgacacgauaaaguccuggagaaacaauauuuugaggacucaagagagcgagugugccugcgugaacgggucguguuucaccgucaugacagauggaccaucugacggccaggcuuccuacaaaaucuuucggaucgaaaaggguaaaauugugaagucaguggagaugaaugcccccaacuaucauuacgaagagugcaguuguuacccugauagcuccgagaucacuugcgucugccgcgacaauuggcacgggucuaacagaccauggguuagcuucaaucagaaccucgaauaucagauuggauacauauguucaggcaucuuuggcgauaauccgaggcccaacgacaaaaccgggaguugcggaccuguguccagcaauggugcgaacggcguaaagggguucucuuuuaaguauggaaacggcguguggauuggucggacaaaaucaaucaguagccgcaauggguucgagaugaucugggauccaaacggcuggaccggaacggacaauaacuuuuccauuaagcaagacauagucggcaucaaugaauggucuggguacucggggagcuucgugcagcaucccgagcugacuggucuggauuguauucgaccuugcuucuggguugaacucaucagaggcaggccaaaagagaacacaauuuggaccuccgggucaaguaucucuuuuuguggagugaauagcgacacugucggcugguccuggcccgauggugcagaguuaccguucacaauagacaaguga

SEQ ID NO: 145492 - RNA, 1410 nt, Artificial Sequence; identical to SEQ ID NO: 144786
  derived and/or modified CDS sequence (opt3) from neuraminidase__InfluenzaA__ACV70867

SEQ ID NO: 145493 - RNA, 1410 nt, Artificial Sequence; identical to SEQ ID NO: 144786
  derived and/or modified CDS sequence (opt3) from neuraminidase__InfluenzaA__ACV70877

SEQ ID NO: 145494 - RNA, 1410 nt, Artificial Sequence
  derived and/or modified CDS sequence (opt3) from neuraminidase__InfluenzaA__ACV70887
augaaccccaaucagaagaucauuaccauaggcagcgugugcaugacaaucgggauggccaaccugauucuccaaaucggaaauauuaucuccauauggaucucucacucaauucagcuugguaaccagaaucagaucgagacuuguaaccaaagugucauuacguacgaaaauaacaccuggguuaaucagacauaugugaacaucagcaauacuaacuucgcugcaggccaguccaugguaucugugaaacuggccggaaauucgucauugugcccugucagcggaugggcgauauacaguaaggacaacuccgugagaauuggcucuaaaggugauguuuuugugaucagggagccauucauuagcuguuccccguuagaaugccggaccuuuuuccugacacagggggcucuacucaaugacaagcauucaaacggaaccaucaaagaucgcagucccuaucgaacucugaugagcuguccuaucggcgaggucccaucucccuacaacucccguuuugaaucaguggccuggagcgcaagugccugccacgacggcauuaauuggcuuacaauagggaucucuggaccugauaacggugcuguagcaguucugaaguauaauggcauuaucaccgacacgauaaaguccuggagaaacaauauuuugaggacucaagagagcgagugugccugcgugaacgggucguguuucaccgucaugacagauggaccaucuaauggccaggcuuccuacaaaaucuuucggaucgaaaaggguaaaauugugaagucaguggagaugaacgcccccaauuaucauuacgaagagugcaguuguuacccugacagcuccgagaucacuugcgucugccgcgauaacuggcacgggucuaauagaccauggguuagcuucaaccagaaucucgaauaucagauuggauacauauguucaggcaucuuuggcgacaacccgaggcccaaugauaaaaccgggaguugcggaccuguguccagcaacggugcgaacggcguaaagggguucucuuuuaaguauggaaauggcguguggauuggucggacaaaaucaaucaguagccgcaacggguucgagaugaucugggacccaaauggcuggaccggaacggauaacaauuuuuccauuaagcaagacauagucggcaucaacgaauggucuggguacucggggagcuucgugcagcaucccgagcugacuggucuggacuguauucgaccuugcuucuggguugaacucaucagaggcaggccaaaagagaauacaauuuggaccuccgggucaaguaucucuuuuuguggagugaacagcgauacugucggcugguccuggcccgacggugcagaguuaccguucacaauagauaaguga

SEQ ID NO: 145495 - RNA, 1410 nt, Artificial Sequence; identical to SEQ ID NO: 144786
  derived and/or modified CDS sequence (opt3) from neuraminidase__InfluenzaA__ACV70897

SEQ ID NO: 145496 - RNA, 1410 nt, Artificial Sequence; identical to SEQ ID NO: 144786
  derived and/or modified CDS sequence (opt3) from neuraminidase__InfluenzaA__ACV70907

SEQ ID NO: 145497 - RNA, 1410 nt, Artificial Sequence; identical to SEQ ID NO: 144786
  derived and/or modified CDS sequence (opt3) from neuraminidase__InfluenzaA__ACV70917

SEQ ID NO: 145498 - RNA, 1410 nt, Artificial Sequence; identical to SEQ ID NO: 144776
  derived and/or modified CDS sequence (opt3) from neuraminidase__InfluenzaA__ACV70927

SEQ ID NO: 145499 - RNA, 1410 nt, Artificial Sequence; identical to SEQ ID NO: 144786
  derived and/or modified CDS sequence (opt3) from neuraminidase__InfluenzaA__ACV70937

SEQ ID NO: 145500 - RNA, 1410 nt, Artificial Sequence; identical to SEQ ID NO: 144786
  derived and/or modified CDS sequence (opt3) from neuraminidase__InfluenzaA__ACV70947

SEQ ID NO: 145501 - RNA, 1410 nt, Artificial Sequence; identical to SEQ ID NO: 144786
  derived and/or modified CDS sequence (opt3) from neuraminidase__InfluenzaA__ACV70957

SEQ ID NO: 145502 - RNA, 1410 nt, Artificial Sequence; identical to SEQ ID NO: 144786
  derived and/or modified CDS sequence (opt3) from neuraminidase__InfluenzaA__ACV70967

SEQ ID NO: 145503 - RNA, 1410 nt, Artificial Sequence; identical to SEQ ID NO: 144786
  derived and/or modified CDS sequence (opt3) from neuraminidase__InfluenzaA__ACV70977

SEQ ID NO: 145504 - RNA, 1410 nt, Artificial Sequence; identical to SEQ ID NO: 144786
  derived and/or modified CDS sequence (opt3) from neuraminidase__InfluenzaA__ACV70987

SEQ ID NO: 145505 - RNA, 1410 nt, Artificial Sequence; identical to SEQ ID NO: 144786
  derived and/or modified CDS sequence (opt3) from neuraminidase__InfluenzaA__ACV71007

SEQ ID NO: 145506 - RNA, 1410 nt, Artificial Sequence; identical to SEQ ID NO: 144647
  derived and/or modified CDS sequence (opt3) from neuraminidase__InfluenzaA__ACV82218

SEQ ID NO: 145507 - RNA, 1410 nt, Artificial Sequence; identical to SEQ ID NO: 144647
  derived and/or modified CDS sequence (opt3) from neuraminidase__InfluenzaA__ACV82219

SEQ ID NO: 145508 - RNA, 1410 nt, Artificial Sequence
  derived and/or modified CDS sequence (opt3) from neuraminidase__InfluenzaA__ACV82220
augaaccccaaucagaagaucauuaccauaggcagcgugucccugacaaucucuacuauuugcuucuuuaugcagcucgccauccuuauuacgaccgucacacugcacuucaaacaguacgaguuuaacucaccuccaaauaaccagguuauguugugugaaccgacuaucauagagagaaauaucaccgaaauuguguauuuaacaaacaccacuaucgagaaggaaauuugccccaaacuggcugaguacaggaauuggaguaagccucagugugacaucacaggguucgcaccauuuagcaaagauaacuccauacggcuaucugccggaggugacauuuggguaacccgcgagcccuaugugucgugcgauccugacaaguguuaccaauucgcgcucggccaggggacgacucugaauaacguccauucaaauaacaccgugcgagaucguacaccauauagaacucuucugaugaaugaauugggaguucccuuucaccucggcaccaaacaggugugcaucgcuuggagcaguuacuccugucaugacgguaaggccuggcugcacgucugcauuacaggggaugacaagaacgcaaccgccucuuucaucuauaauggaaggcugguggauagcguaguuuccuggucaaaagagauccuccggacgcaggaaagugagugugugugcauuaacggcacuuguacagucgugaugaccgacggcagcgcuucugggaaggcagauacuaaaauauuauuuaucgaggaaggaaagauugugcauacauccacccugucagguagcgcccaacacgucgaggaaugcaguugcuacccucgcuacccaggcguuagaugugugugcagggacaacuggaaggggucuaaucggccgaucguagauauaaacauuaaagaccacuccaucgugagcucguaugucuguucuggacuugugggcgacacgccccgcaagaaugauuccucaaguagcucccauugcuuggacccuaacaaugaggaaggugggcacggaguuaaaggcugggcuuucgaugacggcaacgauguguggauggggcgaaccaucucugaaaagagcagacugggauacgagacauuuaaagucauugaggguuggucaaauccaaagaguaaacuacagaucaacaggcaagugauuguagaccggggcaaucguuccggguauagcggaauauucucuguugagggcaagucauguaucaaccgcugcuuuuacguggaacucauuagagguaggaaggagaaaacugaaguccuguggaccaguaauagcaucguggucuucugugggacauccggcacuuauggaaccggcucuuggcccgauggggccgacaucaaccuuaugccuauuuga

SEQ ID NO: 145509 - RNA, 1413 nt, Artificial Sequence
  derived and/or modified CDS sequence (opt3) from neuraminidase__InfluenzaA__ACV82221
augaaccccaaucagaagaucauuaccauaggcagcaucuccauugccaucgggauuaucucucugaugcuccaaauaggaaacaucauuucaaucugggcuagucacagcauucagacagguucccagaauaacacuggcaucugcaaucagagaauaauuacguacgagaacucuaccugggugaaucauacauaugucaacaucaauaacacuaauguuguggcaggggaagacaaaaccucgguaacacuugccggaaacucaagccuguguaguauuuccggcugggcgaucuacaccaaggauaauucuaucaggauugguagcaaaggggacguguucgucauacgggagccuuuuaucuccugcucacacuuggaaugucgcacuuucuuuuuaacacaaggagcucugcuaaacgauaagcauaguaauggcaccgugaaagaccgaagcccauaucgugcccucaugucuugcccgcugggcgaggcacccuccccuuacaacucaaaguucgaaagcguugccuggagugcuucugcaugucacgaugggaugggauggcuuacgauugguaucuccggcccagacaacggggccguggcuguccugaaguauaauggaauaauuacuggcaccaucaaaagcuggaagaaacagaucuugagaacacaggagucggagugcguguguaugaacgguucuugcuuuacuauuaugaccgaugggcccuccaauaaggccgcgucauacaaaaucuucaagauugaaaagggaaaaguaacaaagaguauagagcucaacgcaccuaauuuuuauuacgaagaguguagcugcuacccagacaccggcaucguuaugugugugugcagggauaacuggcauggcuccaaucggcccugggucucuuucaaccagaaucuggacuaucaaauuggguacaucugcagcggaguguuuggugauaacccucgcccagaggacggcgaagggucauguaauccggugacggucgauggagccaacggcguuaaagguuucaguuauaaguacgggaauggcguguggaucggaagaacuaaauccaacaggcugcggaagggcuuugagaugauuugggaccccaauggguggacaaacaccgacagcgauuucucuguaaaacaggacguggucgcuauaacugauuggucaggauauagugguagcuuugugcagcacccugaacucacaggcuuagacugcauccgcccauguuucuggguugagcuggugcgagggcuucccagagaaaacaccacgauuuggaccuccggaucuucgaucagcuucugcggcgucaauuccgauacagccaacuggucauggccugacggugcagaguugccauuuacuauugauaaguga

SEQ ID NO: 145510 - RNA, 1410 nt, Artificial Sequence; identical to SEQ ID NO: 144786
  derived and/or modified CDS sequence (opt3) from neuraminidase__InfluenzaA__ACV88402

SEQ ID NO: 145511 - RNA, 1410 nt, Artificial Sequence; identical to SEQ ID NO: 144786
  derived and/or modified CDS sequence (opt3) from neuraminidase__InfluenzaA__ACV88412

SEQ ID NO: 145512 - RNA, 1410 nt, Artificial Sequence; identical to SEQ ID NO: 144776
  derived and/or modified CDS sequence (opt3) from neuraminidase__InfluenzaA__ACV88422

SEQ ID NO: 145513 - RNA, 1365 nt, Artificial Sequence
  derived and/or modified CDS sequence (opt3) from neuraminidase__InfluenzaA__ACV89505
augaaccccaaucagaagaucauuaccauaggcagcaucugccugguggucgggcucauuucccuuauccugcaaauuggaaacaucauaucuaucuggauuucacacaguauccagacagguagccagaaucauacuggcauuuguaaccagaauaucauaacguacaaaaacuccaccuggguuaaggacacaacuucugugauuuugaccggaaauucgucauuaugcccuaucagagggugggccauuuauagcaaagauaacaguaucaggaucggcuccaagggugacguauucgugauucgggagccauuuauaucuuguagccaccuggaaugccgcacauucuuucuaacccaaggggcucuccugaaugauaaacauuccucaggaacugucaaggaccgaaguccguaccgugcacuuaugagcugucccgugggcgaggccccuucuccauauaacuccagauucgaaucaguugcguggagcgcuagugccugccacgauggcaugggguggcugacaaucggaauuucuggucccgacaauggcgcaguggccgucuugaaguacaacgggaucauaaccgagacgauuaaauccuggaggaagaaaauccuccggacucaggaaagcgagugugcuugcgugaauggaucguguuuuaccaucaugacagauggcccuucugacggucuggcauccuauaagauuuucaaaaucgagaaggggaagguaacuaaaucaauugaacugaacgccccaaauagucauuacgaggaaugcagcuguuaucccgauaccggaaagguuaugugcgugugccgcgacaacuggcacggcuccaacagaccuugggucucuuuugaucagaaucucgacuaccagauaggcuacaucuguagcgggguguucggagauaacccaaggccggaggacgguacaggcucaugcgggcccguguaugucgacggagcuaauggcguuaaagguuuuaguuaccgguaugggaacggcguguggauuggacgcaccaagucccacagcucucgacauggcuucgagaugaucugggauccuaauggguggacggaaacugacucaaaauuuaguguaagacaagauguggucgccaugacagacuggagcggauacuccgguucuuucgugcagcacccagaguuaaccggccuggauuguaugaggcccugcuuuuggguugaacuuauccgggggcguccuaaggagggaacuauuuggacaucggcgagcuccauaucauucuguggcgugaacagugacaccgucgauuggucuuggccagacggugcagaauugcccuucagcaucgauaaauga

SEQ ID NO: 145514 - RNA, 1410 nt, Artificial Sequence; identical to SEQ ID NO: 144786
  derived and/or modified CDS sequence (opt3) from neuraminidase__InfluenzaA__ACV91673

SEQ ID NO: 145515 - RNA, 1410 nt, Artificial Sequence; identical to SEQ ID NO: 144786
  derived and/or modified CDS sequence (opt3) from neuraminidase__InfluenzaA__ACV91681

SEQ ID NO: 145516 - RNA, 1410 nt, Artificial Sequence
  derived and/or modified CDS sequence (opt3) from neuraminidase__InfluenzaA__ACX31593
augaaccccaaucagaagaucauuaccauaggcagcgugucccugacaaucucuacuauuugcuucuuuaugcaaaucgccauucucaucacgaccgucacacuucacuucaaacaguacgaguuuaacucaccuccaaauaaccagguucuguugugugaaccggcuauaaucgagagaaauauuacugaaaucguguauuuaaccaacacaaccauugagaaggaaaucugccccaaacuggcagaguacaggaauuggaguaagccucagugugacauaacuggguucgccccauuuagcaaagauaacuccauucggcuaucugcgggaggugacaucuggguaacacgcgagcccuaugugucgugcgauccugacaaguguuaccaauucgcucucggccaggggaccacgcugaauaacguccauucaaauaacacugugcgagaucguaccccauauagaacacuucugaugaaugaauugggaguucccuuucaccucggcacuaaacaggugugcauugccuggagcaguuccucuugucaugacgguaaggcauggcugcacgucugcaucaccggggaugacaagaacgccacagcuagcuucaucuacaauggaaggcugguggauuccguaguuucauggaguaaagagauucuccggacccaggaaagcgagugugugugcauaaacggcacguguacugucgugaugacagacggcucugcauccgggaaggccgauaccaaaaucuuauuuauugaggaaggaaagaucgugcauacuucaacacugagcgguagugcucaacacgucgaggaaugcucuugcuauccucgcuacccaggcguuagaugugugugcagggacaacuggaagggguccaaucggccgauaguagauauuaacaucaaagaccacagcaucgugucgucuuacgucuguuccggacuugugggcgacacccccaggaagaaugauucaaguagcuccucucauugcuuggacccuaacaaugaggaaggugggcacggaguuaaaggcugggccuucgaugacggcaacgauguguggauggggcgaacgauuagcgagaagucaagacugggauaugagaccuuuaaagucaucgaagguuggaguaauccaaaguccaaacuacagauuaaccgccaggugauaguagaccggggcaaucguagcggguacucuggaaucuucucaguugagggcaagaguuguauuaaccgcugcuuuuauguggaacucaucagagguaggaaggaggaaacagagguccuguggacuagcaauuccaucguggucuucugugggaccucuggcacauacggaacuggcucguggcccgauggggcggacauuaaccuuaugccuauauga

SEQ ID NO: 145517 - RNA, 1410 nt, Artificial Sequence; identical to SEQ ID NO: 144786
  derived and/or modified CDS sequence (opt3) from neuraminidase__InfluenzaA__ACX31901

SEQ ID NO: 145518 - RNA, 1410 nt, Artificial Sequence; identical to SEQ ID NO: 144786
  derived and/or modified CDS sequence (opt3) from neuraminidase__InfluenzaA__ACX31902

SEQ ID NO: 145519 - RNA, 1410 nt, Artificial Sequence; identical to SEQ ID NO: 144786
  derived and/or modified CDS sequence (opt3) from neuraminidase__InfluenzaA__ACX31905

SEQ ID NO: 145520 - RNA, 1410 nt, Artificial Sequence; identical to SEQ ID NO: 144786
  derived and/or modified CDS sequence (opt3) from neuraminidase__InfluenzaA__ACX31906

SEQ ID NO: 145521 - RNA, 1410 nt, Artificial Sequence; identical to SEQ ID NO: 144786
  derived and/or modified CDS sequence (opt3) from neuraminidase__InfluenzaA__ACX31907

SEQ ID NO: 145522 - RNA, 1410 nt, Artificial Sequence; identical to SEQ ID NO: 144786
  derived and/or modified CDS sequence (opt3) from neuraminidase__InfluenzaA__ACX31908

SEQ ID NO: 145523 - RNA, 1410 nt, Artificial Sequence; identical to SEQ ID NO: 144941
  derived and/or modified CDS sequence (opt3) from neuraminidase__InfluenzaA__ACX31909

SEQ ID NO: 145524 - RNA, 1410 nt, Artificial Sequence; identical to SEQ ID NO: 144786
  derived and/or modified CDS sequence (opt3) from neuraminidase__InfluenzaA__ACX31911

SEQ ID NO: 145525 - RNA, 1410 nt, Artificial Sequence; identical to SEQ ID NO: 144786
  derived and/or modified CDS sequence (opt3) from neuraminidase__InfluenzaA__ACX31912

SEQ ID NO: 145526 - RNA, 1410 nt, Artificial Sequence; identical to SEQ ID NO: 144786
  derived and/or modified CDS sequence (opt3) from neuraminidase__InfluenzaA__ACX31913

SEQ ID NO: 145527 - RNA, 1410 nt, Artificial Sequence; identical to SEQ ID NO: 144786
  derived and/or modified CDS sequence (opt3) from neuraminidase__InfluenzaA__ACX31914

SEQ ID NO: 145528 - RNA, 1410 nt, Artificial Sequence; identical to SEQ ID NO: 144786
  derived and/or modified CDS sequence (opt3) from neuraminidase__InfluenzaA__ACX31915

SEQ ID NO: 145529 - RNA, 1410 nt, Artificial Sequence; identical to SEQ ID NO: 144786
  derived and/or modified CDS sequence (opt3) from neuraminidase__InfluenzaA__ACX31916

SEQ ID NO: 145530 - RNA, 1410 nt, Artificial Sequence
  derived and/or modified CDS sequence (opt3) from neuraminidase__InfluenzaA__ACX31917
augaaccccaaucagaagaucauuaccauaggcagcgugugcaugacaaucgggauggccaaccugauucuccaaaucggaaauauuaucuccauauggaucucucacucaauucagcuugguaaccagaaucagaucgagacuuguaaccaaagugucauuacguacgaaaauaacaccuggguuaaucagacauaugugaacaucagcaauacuaacuucgcugcaggccaguccguagugucugucaaacuggccggaaauucgucauugugcccugugagcggaugggcgauauacaguaaggacaacuccauuagaaucggcucuaaaggugauguuuuugugauuagggagccauucaucagcuguuccccguuagaaugccggaccuuuuuccugacacagggggcucuacucaaugacaagcauucaaacggaaccaucacugaucgcagucccuaucgaacacugaugagcuguccuauuggcgaggucccaucucccuacaacucccguuuugaaucaguggccuggagcgcaagugccugccacgacggcauaaauuggcuuaccaucgggauuucuggaccugauaacggugcuguagcaguucugaaauauaauggcaucauaacggacacuauuaaguccuggagaaacaauaucuugaggacccaagagagcgagugugccugcgugaacgggucguguuucacagucaugacugauggaccaucugacggccaggcuuccuacaagaucuuucggauugaaaaagguaagaucgugaaaucaguggagaugaaugcccccaacuaucauuacgaagagugcaguuguuacccugauagcuccgagauuaccugcgucugccgcgacaauuggcacgggucuaacagaccauggguuagcuucaaucagaaccucgaauaucagauaggauacaucuguucaggcauuuuuggcgauaauccgaggcccaacgacaagacagggaguugcggaccuguguccagcaauggugcgaacggcguaaaaggguucucuuuuaaguauggaaacggcguguggaucggucggaccaagucaaucaguagccgcaauggguucgagaugauuugggauccaaacggcuggacgggaacugacaauaacuuuuccauaaaacaagacaucgucggcauuaaugaauggucuggguacucggggagcuucgugcagcaucccgagcugacaggucuggauuguauccgaccuugcuucuggguugaacucauuagaggcaggccaaaggagaacaccaucuggacuuccgggucaaguauaucuuuuuguggagugaauagcgacacagucggcugguccuggcccgauggugcagaguuaccguucaccaucgacaaauga

SEQ ID NO: 145531 - RNA, 1410 nt, Artificial Sequence; identical to SEQ ID NO: 144786
  derived and/or modified CDS sequence (opt3) from neuraminidase__InfluenzaA__ACX31918

SEQ ID NO: 145532 - RNA, 1410 nt, Artificial Sequence; identical to SEQ ID NO: 144786
  derived and/or modified CDS sequence (opt3) from neuraminidase__InfluenzaA__ACX31919

SEQ ID NO: 145533 - RNA, 1410 nt, Artificial Sequence; identical to SEQ ID NO: 144786
  derived and/or modified CDS sequence (opt3) from neuraminidase__InfluenzaA__ACX31920

SEQ ID NO: 145534 - RNA, 1410 nt, Artificial Sequence; identical to SEQ ID NO: 145140
  derived and/or modified CDS sequence (opt3) from neuraminidase__InfluenzaA__ACX31922

SEQ ID NO: 145535 - RNA, 1410 nt, Artificial Sequence; identical to SEQ ID NO: 144786
  derived and/or modified CDS sequence (opt3) from neuraminidase__InfluenzaA__ACX31923

SEQ ID NO: 145536 - RNA, 1410 nt, Artificial Sequence; identical to SEQ ID NO: 144776
  derived and/or modified CDS sequence (opt3) from neuraminidase__InfluenzaA__ACX31924

SEQ ID NO: 145537 - RNA, 1410 nt, Artificial Sequence
  derived and/or modified CDS sequence (opt3) from neuraminidase__InfluenzaA__ACX31925
augaaccccaaucagaagaucauuaccauaggcagcgugugcaugacaaucgggauggccaaccugauucuccaaaucggaaauauuaucuccauauggaucucucacucaauucagcuugguaaccagaaucagaucgagacuuguaaccaaagugucauuacguacgaaaauaacaccuggguuaaucagacauaugugaacaucagcaauacuaacuucgcugcaggccaguccguagugucugucaaacuggccggaaauucgucauugugcccugugagcggaugggcgauauacaguaaggacaacuccauuagaaucggcucuaaaggugauguuuuugugauuagggagccauucaucagcuguuccccguuagaaugccggaccuuuuuccugacacagggggcucuacucaaugacaagcauucaaacggaaccaucaaagaucgcagucccuaucgaacucugaugagcuguccuauuggcgaggucccaucucccuacaacucccguuuugaaucaguggccuggagcgcaagugccugccacgacggcauaaauuggcuuacaaucgggauuucuggaccugauaacggugcuguagcaguucugaaguauaauggcaucauaaccgacacgauuaaguccuggagaaacaauaucuugaggacucaagagagcgagugugccugcgugaacgggucguguuucacccucaugacagauggaccaucugacggccaggcuuccuacaaaaucuuucggauugaaaaggguaaaaucgucaagucaguggagaugaaugcccccaacuaucauuacgaagagugcaguuguuacccugauagcuccgagauuacuugcgugugccgcgacaauuggcacgggucuaacagaccaugggucagcuucaaucagaaccuggaauaucagauaggauacaucuguucaggcauuuuuggcgauaauccgaggcccaacgacaaaaccgggaguugcggaccuguuuccagcaauggugcgaacggcgugaagggguucucuuuuaaguauggaaacggcguauggaucggucggacaaaaucaaucaguagccgcaauggguucgagaugauuugggauccaaacggcuggaccggaacggacaauaacuuuuccauaaagcaagacaucgugggcauuaaugaauggucuggguacucggggagcuucguccagcaucccgagcugacuggucucgauuguauccgaccuugcuucuggguggaauuaauuagaggcaggccaaaagagaacacaaucuggaccuccgggucaaguauaucuuuuuguggaguuaauagcgacacugugggcugguccuggcccgauggugcagagcugccguucaucauugacaaguga

SEQ ID NO: 145538 - RNA, 1410 nt, Artificial Sequence; identical to SEQ ID NO: 144786
  derived and/or modified CDS sequence (opt3) from neuraminidase__InfluenzaA__ACX31926

SEQ ID NO: 145539 - RNA, 1410 nt, Artificial Sequence; identical to SEQ ID NO: 144786
  derived and/or modified CDS sequence (opt3) from neuraminidase__InfluenzaA__ACX31927

SEQ ID NO: 145540 - RNA, 1410 nt, Artificial Sequence
  derived and/or modified CDS sequence (opt3) from neuraminidase__InfluenzaA__ACX31928
augaaccccaaucagaagaucauuaccauaggcagcgugugcaugacaaucgggauggccaaccugauucuccaaaucggaaauauuaucuccauauggaucucucacucaauucagcuugguaaccagaaucagaucgagacuuguaaccaaagugucauuacguacgaaaauaacaccuggguuaaucagacauaugugaacaucagcaauacuaacuucgcugcaggccaguccguagugucugucaaacuggccggaaauucgucauugugcccugugagcggaugggcgauauacaguaaggacaacuccauuagaaucggcucuaaaggugauguuuuugugauuagggagccauucaucagcuguuccccguuagaaugccggaccuuuuuccugacacagggggcucuacucaaugacaagcauucaaacggaaccaucaaagaucgcagucccuaucgaacucugaugagcuguccuauuggcgaggucccaucucccuacaacucccguuuugaaucaguggccuggagcgcaagugccugccacgacggcauaaauuggcuuacaaucgggauuucuggaccugauaacggugcuguagcaguucugaaguauaauggcaucauaaccgacacgauuaaguccuggagaaacaauaucuugaggacucaagagagcgagugugccugcgugaacgggucguguuucaccgucaugacagauggaccaucugacggccaggcuuccuacaaaaucuuucggauugaaaaggguaaaaucgugaagucaguggagaugaaugcccccaacuaucauuacgaagagugcaguuguuacccugauagcuccgagauuacuugcgucugccgcgacaauuggcacgggucuaacagaccauggguuagcuucaaucagaaccucgaauaucagauaggauacaucuguucaggcauuuuuggcgauaauccgaggcccaacgacaaaaccgggaguugcggaccuguguccagcaauggugagaacggcguaaagggguucucuuuuaaguauggaaacggcguguggaucggucggacaaaaucaaucaguagccgcaauggguucgaaaugauuugggauccaaacggcuggaccggaacggacaauaacuuuuccauaaagcaagacaucgucggcauuaaugaguggucuggguacucggggagcuucgugcagcaucccgaacugacuggucuggauuguauccgaccuugcuucuggguugagcucauuagaggcaggccaaaagagaacacaaucuggaccuccgggucaaguauaucuuuuuguggagugaauggcgacacugucgguuggagcuggcccgauggggcggaauuaccguucacaaucgacaaguga

SEQ ID NO: 145541 - RNA, 1410 nt, Artificial Sequence; identical to SEQ ID NO: 144816
  derived and/or modified CDS sequence (opt3) from neuraminidase__InfluenzaA__ACX31929

SEQ ID NO: 145542 - RNA, 1410 nt, Artificial Sequence; identical to SEQ ID NO: 145140
  derived and/or modified CDS sequence (opt3) from neuraminidase__InfluenzaA__ACX31930

SEQ ID NO: 145543 - RNA, 1410 nt, Artificial Sequence; identical to SEQ ID NO: 144786
  derived and/or modified CDS sequence (opt3) from neuraminidase__InfluenzaA__ACX31931

SEQ ID NO: 145544 - RNA, 1410 nt, Artificial Sequence; identical to SEQ ID NO: 144786
  derived and/or modified CDS sequence (opt3) from neuraminidase__InfluenzaA__ACX31932

SEQ ID NO: 145545 - RNA, 1410 nt, Artificial Sequence; identical to SEQ ID NO: 144786
  derived and/or modified CDS sequence (opt3) from neuraminidase__InfluenzaA__ACX35250

SEQ ID NO: 145546 - RNA, 1410 nt, Artificial Sequence; identical to SEQ ID NO: 144786
  derived and/or modified CDS sequence (opt3) from neuraminidase__InfluenzaA__ACX35260

SEQ ID NO: 145547 - RNA, 1410 nt, Artificial Sequence; identical to SEQ ID NO: 144786
  derived and/or modified CDS sequence (opt3) from neuraminidase__InfluenzaA__ACX35270

SEQ ID NO: 145548 - RNA, 1410 nt, Artificial Sequence
  derived and/or modified CDS sequence (opt3) from neuraminidase__InfluenzaA__ACX35280
augaaccccaaucagaagaucauuaccauaggcagcgugugcaugacaaucgggauggccaaccugauucuccaaaucggaaauauuaucuccauauggaucucucacucaauucagcuugguaaccagaaucagaucgagacuuguaaccaaagugucauuacguacgaaaauaacaccuggguuaaucagacauaugugaacaucagcaauacuaacuucgcugcaggccaguccguagugucugucaaacuggccggaaauucgucauugugcccugugagcggaugggcgauauacaguaaggacaacuccauuagaaucggcucuaaaggugauguuuuugugauuagggagccauucaucagcuguuccccguuagaaugccggaccuuuuuccugacacagggggcucuacucaaugacaagcauucaaacggaaccaucaaagaucgcagucccuaucgaacucugaugagcuguccuauuggcgaggucccaucucccuacaacucccguuuugaaucaguggccuggagcgcaagugccugccacgacggcauaaauuggcuuacaaucgggauuucuggaccugauaacggugcuguagcaguucugaaguauaauggcaucauaaccgacacgauuaaguccuggagaaacaauaucuugaggacucaagagagcgagugugccugcgugaacgggucguguuucaccgucaugacagauggaccaucugacggccaggcuuccuacaaaaucuuucggauugaaaaggguaaaaucgugaagucaguggauaugaaugcccccaacuaucauuacgaggaaugcaguuguuacccugacagcuccgagauuacuugcgucugccgcgauaauuggcacgggucuaacagaccauggguuagcuucaaucagaaccucgaguaucagauaggauacaucuguucaggcauuuuuggcgacaauccgaggcccaacgauaaaaccgggaguugcggaccuguguccagcaauggugcgaacggcguaaagggguucucuuuuaaguauggaaacggcguguggaucggucggacaaaaucaaucaguagccgcaauggguucgaaaugauuugggacccaaacggcuggaccggaacggacaauaacuuuuccauaaagcaagauaucgucggcauuaaugaguggucuggguacucggggagcuucgugcagcaucccgaacugacuggucuggacuguauccgaccuugcuucuggguugagcucauuagaggcaggccaaaagaaaacacaaucuggaccuccgggucaaguauaucuuuuuguggagugaauagcgauacugucggcugguccuggcccgacggugcagaguuaccguucacaaucgauaaguga

SEQ ID NO: 145549 - RNA, 1410 nt, Artificial Sequence; identical to SEQ ID NO: 144786
  derived and/or modified CDS sequence (opt3) from neuraminidase__InfluenzaA__ACX35290

SEQ ID NO: 145550 - RNA, 1410 nt, Artificial Sequence; identical to SEQ ID NO: 144786
  derived and/or modified CDS sequence (opt3) from neuraminidase__InfluenzaA__ACX35300

SEQ ID NO: 145551 - RNA, 1410 nt, Artificial Sequence
  derived and/or modified CDS sequence (opt3) from neuraminidase__InfluenzaA__ACX35310
augaaccccaaucagaagaucauuaccauaggcagcgugugcaugacaaucgggauggccaaccugauucuccaaaucggaaauauuaucuccauauggaucucucacucaauucagcuugguaaccagaaucagaucggcacuuguaaccaaagugucauuacguacgagaauaacaccuggguuaaucagacauaugugaacaucagcaauacuaacuucgcugcagggcaguccguagugucugucaaacuggccggaaauucgucauugugcccugugagcggcugggcgauauacaguaaggacaacuccauuagaaucgguucuaaaggggauguuuuugugauuagggaaccauucaucagcuguuccccguuagagugccggaccuuuuuccugacacagggagcucuacucaaugacaagcauucaaacggcaccaucaaagaucgcagucccuaucgaacucugaugagcuguccuauuggcgaagucccaucucccuacaacucccguuuugagucaguggccuggagcgcaagugccugccacgacgggauaaauuggcuuacaaucggaauuucugguccugauaacggcgcuguagcaguucugaaguauaaugggaucauaaccgacacgauuaaguccuggagaaacaauaucuugaggacucaagaaagcgagugugccugcgugaacggaucguguuucaccgucaugacagauggcccaucugacggucaggcuuccuacaaaaucuuucggauugagaaggggaaaaucgugaagucaguggaaaugaaugcccccaacuaucauuacgaggaaugcaguuguuacccugauagcuccgagauuacuugcgucugccgcgacaauuggcacggaucuaacagaccauggguuagcuucaaucagaaccucgaguaucagauaggcuacaucuguucaggcauuuuuggggauaauccgaggcccaacgacaaaaccggaaguugcgguccuguguccagcaauggcgcgaacgggguaaagggauucucuuuuaaguauggcaacgguguguggaucgggcggacaaaaucaaucaguagccgcaauggcuucgaaaugauuugggauccaaacggauggaccggcacggacaauaacuuuuccauaaagcaagacaucgucgggauuaaugaguggucuggauacucggguagcuucgugcagcaucccgaacugacuggccuggauuguauccgaccuugcuucuggguugagcucauuagagggaggccaaaagaaaacacaaucuggaccuccggaucaaguauaucuuuuuguggcgugaauagcgacacugucgguugguccuggcccgauggggcagaguuaccguucacaaucgacaaguga

SEQ ID NO: 145552 - RNA, 1410 nt, Artificial Sequence; identical to SEQ ID NO: 144786
  derived and/or modified CDS sequence (opt3) from neuraminidase__InfluenzaA__ACX35320

SEQ ID NO: 145553 - RNA, 1410 nt, Artificial Sequence
  derived and/or modified CDS sequence (opt3) from neuraminidase__InfluenzaA__ACX35330
augaaccccaaucagaagaucauuaccauaggcagcgugugcaucacaauugggauggccaaccugauccuccaaauuggaaauaucauauccaucuggauuucucacucaauccagcuugguaaccagaaucagauugagacuuguaaccaaagugucaucacguacgaaaauaacaccuggguuaaucagacauaugugaacauaagcaauacuaacuucgcugcaggccaguccguagugucugucaaacuggccggaaauucgucauugugcccugugagcggaugggcgauuuacaguaaggacaacuccaucagaauuggcucuaaaggugauguuuuugugaucagggagccauucaucagcuguuccccguuagaaugccggaccuuuuuccugacacagggggcucuacucaaugacaagcauucaaacggaaccauuaaagaucgcagucccuaucgaacucugaugagcuguccuauaggcgaggucccaucucccuacaacucccguuuugaaucaguggccuggagcgcaagugccugccacgacggcaucaauuggcuuacaauugggaucucuggaccugauaacggugcuguagcaguucugaaguauaauggcauaauuaccgacacgaucaaguccuggagaaacaauaucuugaggacucaagagagcgagugugccugcgugaacgggucguguuucaccgucaugacagauggaccaucugacggccaggcuuccuacaaaauuuuucggaucgaaaaggguaaaauugugaagucaguggagaugaaugcccccaacuaucauuacgaagagugcaguuguuacccugauagcuccgagauaacuugcgucugccgcgacaauuggcacgggucuaacagaccauggguuagcuucaaucagaaccucgaauaucagaucggauacauuuguucaggcaucuuuggcgauaauccgaggcccaacgacaaaaccgggaguugcggaccuguguccagcaauggugcgaacggcguaaagggguucucuuuuaaguauggaaacggcguguggaucggucggacaaaaucaauuaguagccgcaauggguucgagaugauaugggauccaaacggcuggaccggaacggacaauaacuuuuccaucaagcaagacauugucggcaucaaugaauggucuggguacucggggagcuucgugcagcaucccgagcugacuggucuggauuguauucgaccuugcuucuggguugaacucaucagaggcaggccaaaagagaacacaauauggaccuccgggucaaguaucucuuuuuguggagugaauagcgacacugucggcugguccuggcccgauggugcagaguuaccguucacaauugacaaguga

SEQ ID NO: 145554 - RNA, 1410 nt, Artificial Sequence; identical to SEQ ID NO: 144786
  derived and/or modified CDS sequence (opt3) from neuraminidase__InfluenzaA__ACX48479

SEQ ID NO: 145555 - RNA, 1410 nt, Artificial Sequence; identical to SEQ ID NO: 144786
  derived and/or modified CDS sequence (opt3) from neuraminidase__InfluenzaA__ACX48481

SEQ ID NO: 145556 - RNA, 1410 nt, Artificial Sequence; identical to SEQ ID NO: 144786
  derived and/or modified CDS sequence (opt3) from neuraminidase__InfluenzaA__ACX55836

SEQ ID NO: 145557 - RNA, 1410 nt, Artificial Sequence
  derived and/or modified CDS sequence (opt3) from neuraminidase__InfluenzaA__ACX56269
augaaccccaagcagaaaaucauuaccauaggcagcgugugcaugacaaucgggauggccaaucugauucuccaaaucggaaacauuaucuccauauggaucucucacucaauucagcuugguaaucagaaccagaucgagacuuguaaucaaagugucauuacguacgaaaacaauaccuggguuaaccagacauaugugaauaucagcaacacuaauuucgcugcaggccaguccguagugucugucaagcuggccgggaacucgucauugugcccugugagcggaugggcgauauacaguaaagacaauuccauuagaaucggcucuaagggugauguuuuugugauuagggagccauucaucagcuguuccccguuagaaugccggaccuuuuuccugacacagggggcucuacucaacgacaaacauucaaauggaaccaucaaggaucgcagucccuaucgaacucugaugagcuguccuauuggcgaggucccaucucccuacaacucccguuuugaaucaguggccuggagcgcaagugccugccacgacggcauaaacuggcuuacaaucgggauuucuggaccugauaauggugcuguagcaguucugaaguauaacggcaucauaaccgacacgauuaaauccuggagaaauaacaucuugaggacucaagagagcgagugugccugcgugaaugggucguguuucaccgucaugacagauggaccaucugacggccaggcuuccuacaagaucuuucggauugaaaaagguaagaucgugaaaucaguggagaugaacgcccccaauuaucauuacgaagagugcaguuguuacccugauagcuccgagauuacuugcgucugccgcgacaacuggcacgggucuaauagaccauggguuagcuucaaccagaaucucgaauaucagauaggauacaucuguucaggcauuuuuggcgauaacccgaggcccaaugacaagaccgggaguugcggaccuguguccagcaacggugcgaauggcguaaagggguucucuuuuaaauauggaaacggcguguggaucggucggacaaagucaaucaguagccgcaacggguucgagaugauuugggauccaaauggcuggaccggaacggacaacaauuuuuccauaaaacaagacaucgucggcauuaacgaauggucuggguacucggguagcuucgugcagcaucccgagcugacuggacuggauuguauccgaccuugcuucuggguugaacucauuagaggcaggccaaaggagaauacaaucuggaccuccgggucaaguauaucuuuuuguggagugaacagcgacacugucggcugguccuggcccgauggugcagaguuaccguucacaaucgacaaauga

SEQ ID NO: 145558 - RNA, 1410 nt, Artificial Sequence
  derived and/or modified CDS sequence (opt3) from neuraminidase__InfluenzaA__ACX56270
augaaccccaagcagaaaaucauuaccauaggcagcgugugcaugacaaucgggauggccaaucugauucuccaaaucggaaacauuaucuccauauggaucucucacucaauucagcuugguaaucagaaccagaucgagacuuguaaucaaagugucauuacguacgaaaacaauaccuggguuaaccagacauaugugaauaucagcaacacuaauuucgcugcaggccaguccguagugucugucaagcuggccgggaacucgucauugugcccugugagcggaugggcgauauacaguaaagacaauuccauuagaaucggcucuaagggugauguuuuugugauuagggagccauucaucagcuguuccccguuagaaugccggaccuuuuuccugacacagggggcucuacucaacgacaaacauucaaauggaaccaucaaggaucgcagucccuaucgaacucugaugagcuguccuauuggcgaggucccaucucccuacaacucccguuuugaaucaguggccuggagcgcaagugccugccacgacggcauaaacuggcuuacaaucgggauuucuggaccugauaauggugcuguagcaguucugaaguauaacggcaucauaaccgacacgauuaaauccuggagaaauaacaucuugaggacucaagagagcgagugugccugcgugaaugggucguguuucaccgucaugacagauggaccaucugacggccaggcuuccuacaagaucuuucggauugaaaaagguaagaucgugaaaucaguggagaugaacgcccccaauuaucauuacgaagagugcaguuguuacccugauagcuccgagauuacuugcgucugccgcgacaacuggcacgggucuaauagaccauggguuagcuucaaccagaaucucgaauaucagauaggauacaucuguucaggcauuuuuggcgauaacccgaggcccaaugacaagaccgggaguugcggaccuguguccagcaacggugcgaauggcguaaagggguucucuuuuaaauauggaaacggcguguggaucggucggacaaagucaaucaguagccgcaacggguucgagaugauuugggauccaaauggcuggaccggaacggacaacaauuuuuccauaaaacaagacaucgucggcauuaacgaauggucuggguacucggguagcuucgugcagcaucccgagcugacuggacuggauuguauccgaccuugcuucuggguugaacucauuagaggcaggccaaaggagaauacaaucuggaccuccgggucaaguauaucuuuuuguggagugaacagcgacuccgucucauggagcuggcccgauggcgcagaguuaccguucacuaucgacaaauga

SEQ ID NO: 145559 - RNA, 1410 nt, Artificial Sequence
  derived and/or modified CDS sequence (opt3) from neuraminidase__InfluenzaA__ACX56271
augaaccccaagcagaaaaucauuaccauaggcagcgugugcaugacaaucgggauggccaaucugauucuccaaaucggaaacauuaucuccauauggaucucucacucaauucagcuugguaaucagaaccagaucgagacuuguaaucaaagugucauuacguacgaaaacaauaccuggguuaaccagacauaugugaauaucagcaacacuaaucuggcugcaggccaguccguagggucugugaaguuggccggaaacucgucauuaugcccugucagcggcugggcgauauacaguaaagacaauuccauuagaaucgguucuaagggggauguguucguuauuagggagccauuuaucagcuguuccccgcuggaaugccggaccuucuuucuaacacagggagcucuccugaacgacaaacauucaaauggcaccaucaaggaucgcagucccuaucgaacucuuaugagcuguccuauuggcgaggugccaucucccuacaacucccguuucgaaucagucgccuggagcgcaagugccugccacgacgggauaaacuggcugacaaucggaauuucugguccugauaauggcgcuguggcaguauugaaguauaacgggaucauaaccgacacgauuaaauccuggagaaauaacauccucaggacucaagagagcgagugugccugcguuaauggaucguguuuuaccgugaugacagauggcccaucugacggucaggcuuccuacaagaucuuccggauugaaaaagggaagaucgucaaaucaguggagaugaacgcccccaauuaucauuacgaagagugcaguuguuacccugauagcuccgagauuacuugcgugugccgcgacaacuggcacggaucuaauagaccaugggucagcuuuaaccagaaucuggaauaucagauaggcuacaucuguucaggcauuuucggggauaacccgaggcccaaugacaagaccggaaguugcgguccuguuuccagcaacggcgcgaauggggugaagggauuuucuuucaaauauggcaacgguguauggaucgggcggacaaagucaaucaguagccgcaacggcuuugagaugauuugggauccaaauggauggaccggcacggacaacaauuucuccauaaaacaagacaucguggggauuaacgaauggucuggauacucggguagcuuuguccagcaucccgagcugacuggccucgauuguauccgaccuugcuucuggguggaauuaauuagagggaggccaaaggagaauacaaucuggaccuccggaucaaguauaucuuucuguggcguuaacagcgacacuguggguugguccuggcccgauggggcagagcugccguuuacaaucgacaaauga

SEQ ID NO: 145560 - RNA, 1410 nt, Artificial Sequence; identical to SEQ ID NO: 144786
  derived and/or modified CDS sequence (opt3) from neuraminidase__InfluenzaA__ACX83579

SEQ ID NO: 145561 - RNA, 1410 nt, Artificial Sequence; identical to SEQ ID NO: 144786
  derived and/or modified CDS sequence (opt3) from neuraminidase__InfluenzaA__ACX85425

SEQ ID NO: 145562 - RNA, 1410 nt, Artificial Sequence; identical to SEQ ID NO: 144786
  derived and/or modified CDS sequence (opt3) from neuraminidase__InfluenzaA__ACX85426

SEQ ID NO: 145563 - RNA, 1410 nt, Artificial Sequence
  derived and/or modified CDS sequence (opt3) from neuraminidase__InfluenzaA__ACY02998
augaaccccaaucagaagaucauuaccauaggcagcgugugcaugacaaucgggauggccaaccugauucuccaaaucggaaauauuaucuccauauggaucucucacucaauucagcuugguaaccagaaucagaucgagacuuguaaccaaagugucauuacguacgaaaauaacaccuggguuaaucagacauaugugaacaucagcaauacuaacuucgcugcaggccaguccguagugucugucaaacuggccggaaauucgucauugugcccugugagcgggugggcgauauacaguaaggacaacuccauuagaaucggcucuaaaggugauguuuuugugauuagggagccauucaucagcuguuccccguuagaaugccggaccuuuuuccugacacagggggcucuacucaaugacaagcauucaaacggaaccaucaaagaucgcagucccuaucgaacucugaugagcuguccuauuggcgaggucccaucucccuacaacucccguuuugaaucaguggccuggagcgcaagugccugccacgacggcauaaauuggcuuacaaucgggauuucuggaccugauaacggugcuguagcaguucugaaguauaauggcaucauaaccgacacgauuaaguccuggagaaacaauaucuugaggacucaagagagcgagugugccugcgugaacgggucguguuucaccgucaugacagauggaccaucuaauggccaggcuuccuacaaaaucuuucggauugaaaaggguaaaaucgugaagucaguggagaugaacgcccccaauuaucauuacgaagagugcaguuguuacccugacagcggggagauuacuugcgucugccgcgauaacuggcacggauccaauagaccauggguuucuuucaaccagaaucucgaauaucagauaggcuacaucuguagcggcauuuuuggggacaacccgaggcccaaugauaaaaccggaucaugcgguccugugaguuccaacggcgcgaacgggguaaagggauucagcuuuaaguauggcaaugguguguggaucgggcggacaaaaucuaucucaagucgcaacggcuucgagaugauuugggacccaaauggauggaccggcacggauaacaauuuuagcauaaagcaagacaucgucgggauuaacgaaugguccggauacucugguucguucgugcagcaucccgagcugacuggccuggacuguauccgaccuugcuucuggguugaacucauuagagggaggccaaaagagaauacaaucuggaccagcggauccucaauaaguuuuuguggcgugaacucugauacugucgguuggagcuggcccgacggggcagaguuaccguucacaaucgauaaguga

SEQ ID NO: 145564 - RNA, 1410 nt, Artificial Sequence; identical to SEQ ID NO: 144786
  derived and/or modified CDS sequence (opt3) from neuraminidase__InfluenzaA__ACY03005

SEQ ID NO: 145565 - RNA, 1410 nt, Artificial Sequence; identical to SEQ ID NO: 144786
  derived and/or modified CDS sequence (opt3) from neuraminidase__InfluenzaA__ACY03008

SEQ ID NO: 145566 - RNA, 1410 nt, Artificial Sequence; identical to SEQ ID NO: 144786
  derived and/or modified CDS sequence (opt3) from neuraminidase__InfluenzaA__ACY03011

SEQ ID NO: 145567 - RNA, 1410 nt, Artificial Sequence; identical to SEQ ID NO: 144786
  derived and/or modified CDS sequence (opt3) from neuraminidase__InfluenzaA__ACY03012

SEQ ID NO: 145568 - RNA, 1410 nt, Artificial Sequence; identical to SEQ ID NO: 144786
  derived and/or modified CDS sequence (opt3) from neuraminidase__InfluenzaA__ACY03016

SEQ ID NO: 145569 - RNA, 1410 nt, Artificial Sequence; identical to SEQ ID NO: 144786
  derived and/or modified CDS sequence (opt3) from neuraminidase__InfluenzaA__ACY26194

SEQ ID NO: 145570 - RNA, 1410 nt, Artificial Sequence; identical to SEQ ID NO: 144786
  derived and/or modified CDS sequence (opt3) from neuraminidase__InfluenzaA__ACY26204

SEQ ID NO: 145571 - RNA, 1410 nt, Artificial Sequence; identical to SEQ ID NO: 144786
  derived and/or modified CDS sequence (opt3) from neuraminidase__InfluenzaA__ACY30123

SEQ ID NO: 145572 - RNA, 1410 nt, Artificial Sequence; identical to SEQ ID NO: 144786
  derived and/or modified CDS sequence (opt3) from neuraminidase__InfluenzaA__ACY30124

SEQ ID NO: 145573 - RNA, 1410 nt, Artificial Sequence; identical to SEQ ID NO: 144786
  derived and/or modified CDS sequence (opt3) from neuraminidase__InfluenzaA__ACY30125

SEQ ID NO: 145574 - RNA, 1410 nt, Artificial Sequence; identical to SEQ ID NO: 144786
  derived and/or modified CDS sequence (opt3) from neuraminidase__InfluenzaA__ACY30127

SEQ ID NO: 145575 - RNA, 1410 nt, Artificial Sequence; identical to SEQ ID NO: 144786
  derived and/or modified CDS sequence (opt3) from neuraminidase__InfluenzaA__ACY30128

SEQ ID NO: 145576 - RNA, 1410 nt, Artificial Sequence; identical to SEQ ID NO: 144786
  derived and/or modified CDS sequence (opt3) from neuraminidase__InfluenzaA__ACY46105

SEQ ID NO: 145577 - RNA, 1410 nt, Artificial Sequence; identical to SEQ ID NO: 144786
  derived and/or modified CDS sequence (opt3) from neuraminidase__InfluenzaA__ACY46165

SEQ ID NO: 145578 - RNA, 1410 nt, Artificial Sequence; identical to SEQ ID NO: 144786
  derived and/or modified CDS sequence (opt3) from neuraminidase__InfluenzaA__ACY46175

SEQ ID NO: 145579 - RNA, 1410 nt, Artificial Sequence; identical to SEQ ID NO: 144786
  derived and/or modified CDS sequence (opt3) from neuraminidase__InfluenzaA__ACY46345

SEQ ID NO: 145580 - RNA, 1410 nt, Artificial Sequence; identical to SEQ ID NO: 144786
  derived and/or modified CDS sequence (opt3) from neuraminidase__InfluenzaA__ACY46385

SEQ ID NO: 145581 - RNA, 1410 nt, Artificial Sequence; identical to SEQ ID NO: 144786
  derived and/or modified CDS sequence (opt3) from neuraminidase__InfluenzaA__ACY46485

SEQ ID NO: 145582 - RNA, 1410 nt, Artificial Sequence; identical to SEQ ID NO: 144816
  derived and/or modified CDS sequence (opt3) from neuraminidase__InfluenzaA__ACY77536

SEQ ID NO: 145583 - RNA, 1410 nt, Artificial Sequence; identical to SEQ ID NO: 144776
  derived and/or modified CDS sequence (opt3) from neuraminidase__InfluenzaA__ACY77546

SEQ ID NO: 145584 - RNA, 1410 nt, Artificial Sequence; identical to SEQ ID NO: 144816
  derived and/or modified CDS sequence (opt3) from neuraminidase__InfluenzaA__ACY77565

SEQ ID NO: 145585 - RNA, 1410 nt, Artificial Sequence
  derived and/or modified CDS sequence (opt3) from neuraminidase__InfluenzaA__ACY77575
augaaccccaaucagaagaucauuaccauaggcagcgugugcaugacaaucgggauggccaaccugauucuccaaaucggaaauauuaucuccauauggaucucucacucaauucagcuugguaaccagaaucagaucgagacuuguaaccaaagugucauuacguacgaaaauaacaccuggguuaaucagacauaugugaacaucagcaauacuaacuucgcugcaggccaguccguagugucugucaaacuggccgggaauagcucauugugcccugugagcggaugggcgauauacaguaaggacaacuccauuagaaucggcucuaaaggugauguuuuugugauuagggagccauucaucagcuguuccccguuagaaugccggaccuuuuuccugacacagggggcucuacucaaugacaagcauucaaacggaaccaucaaagaucgcagucccuaucgaacucugaugagcuguccuauuggcgaggucccaucucccuacaacucccguuuugaaucaguggccuggagcgcaagugccugccacgacggcauaaauuggcuuacaaucgggauuucuggaccugauaacggugcuguagcaguucugaaguauaauggcaucauaaccgacacgauuaaguccuggagaaacaauaucuugaggacucaagagagcgagugugccugcgugaacgggucguguuucaccgucaugacagauggaccaucugacggccaggcuuccuacaaaaucuuucggauugaaaaggguaaaaucgugaagucaguggagaugaaugcccccaacuaucauuacgaagagugcaguuguuacccugauagcuccgagauuacuugcgucugccgcgacaauuggcacgggucuaacagaccauggguuagcuucaaucagaaccucgaauaucagauaggauacaucuguucaggcauuuuuggcgauaauccgaggcccagugacaaaaccggguccugcggaccugugagcucuaacggugcgaauggcguaaagggguucucauuuaaguauggaaacggcguguggaucggucggacaaaaaguaucagcucccgcaacggguucgagaugauuugggauccaaauggcuggaccggaacggacaacaauuuuucuauaaagcaagacaucgucggcauuaacgaauggucgggguacagcggauccuucgugcagcaucccgagcugacuggucuggauuguauccgaccuugcuucuggguugaacucauuagaggcaggccaaaagagaauacaaucuggaccucagggaguucuauaucguuuuguggagugaacuccgacacugucggcuggucauggcccgauggugcagaguuaccguucacaaucgacaaguga

SEQ ID NO: 145586 - RNA, 1410 nt, Artificial Sequence; identical to SEQ ID NO: 144786
  derived and/or modified CDS sequence (opt3) from neuraminidase__InfluenzaA__ACY77585

SEQ ID NO: 145587 - RNA, 1410 nt, Artificial Sequence; identical to SEQ ID NO: 144816
  derived and/or modified CDS sequence (opt3) from neuraminidase__InfluenzaA__ACY77595

SEQ ID NO: 145588 - RNA, 1410 nt, Artificial Sequence; identical to SEQ ID NO: 144816
  derived and/or modified CDS sequence (opt3) from neuraminidase__InfluenzaA__ACY77605

SEQ ID NO: 145589 - RNA, 1410 nt, Artificial Sequence; identical to SEQ ID NO: 144786
  derived and/or modified CDS sequence (opt3) from neuraminidase__InfluenzaA__ACY77625

SEQ ID NO: 145590 - RNA, 1410 nt, Artificial Sequence
  derived and/or modified CDS sequence (opt3) from neuraminidase__InfluenzaA__ACY77655
augaaccccaaucagaagaucauuaccauaggcagcgugugcaugacaaucgggauggccaaccugauucuccaaaucggaaauauuaucuccauauggaucucucacucaauucagcuugguaaccagaaucagaucgagacuuguaaccaaagugucauuacguacgaaaauaacaccuggguuaaucagacauaugugaacaucagcaauacuaacuucgcugcaggccaguccguagugucugucaaacuggccggaaauucgucauugugcccugugagcgggugggcgauauacaguaaggacaacuccguuagaauuggcucuaaaggugauguguuugucaucagggagccauucauuagcuguuccccguuagaaugccggaccuuuuuccugacacagggggcucuacucaaugacaagcauucaaacggaaccaucaaagaucgcagucccuaucgaacucugaugagcuguccuaucggcgaggugccaucucccuacaacucccguuuugaaucaguagccuggagcgcaagugccugccacgacggcauuaauuggcuuacaauagggaucucuggaccugauaacggugcuguugcagugcugaaguauaauggcauuaucaccgacacgauaaaguccuggagaaacaauauuuugaggacucaagagagcgagugugccugcgucaacgggucguguuucaccgugaugacagauggaccaucuaauggccaggcuuccuacaaaaucuuucggaucgaaaaggguaaaauugugaagucagucgagaugaacgcccccaauuaucauuacgaagagugcaguuguuacccugacagcuccgagaucacuugcguuugccgcgauaacuggcacgggucuaauagaccaugggugagcuucaaccagaaucucgaauaucagauuggauacauauguucaggcaucuuuggcgacaacccgaggcccaaugauaaaaccgggaguugcggaccuguauccuucaacggugcgaacggcgugaagggguuuagcuucaaguauggaaauggcgucuggauuggucggacaaaaucuaucucaagucgcaacggguuugagaugaucugggacccaaauggcuggaccggaacggauaacaauuucagcauuaagcaagacauagugggcaucaacgaaugguccggguacucuggaucguucguucagcaucccgagcugacuggucuggacuguauucgaccuugcuuuuggguggaacucaucagaggcaggccaaaagagaauacaauuuggaccagcggguccucaaucaguuucuguggagucaacucugauacugugggcuggagcuggcccgacggugcagaguuaccguuuacaauagauaaguga

SEQ ID NO: 145591 - RNA, 1410 nt, Artificial Sequence; identical to SEQ ID NO: 144786
  derived and/or modified CDS sequence (opt3) from neuraminidase__InfluenzaA__ACY77665

SEQ ID NO: 145592 - RNA, 1410 nt, Artificial Sequence; identical to SEQ ID NO: 144786
  derived and/or modified CDS sequence (opt3) from neuraminidase__InfluenzaA__ACY77675

SEQ ID NO: 145593 - RNA, 1410 nt, Artificial Sequence; identical to SEQ ID NO: 144776
  derived and/or modified CDS sequence (opt3) from neuraminidase__InfluenzaA__ACY77685

SEQ ID NO: 145594 - RNA, 1410 nt, Artificial Sequence; identical to SEQ ID NO: 144776
  derived and/or modified CDS sequence (opt3) from neuraminidase__InfluenzaA__ACY77695

SEQ ID NO: 145595 - RNA, 1410 nt, Artificial Sequence; identical to SEQ ID NO: 144776
  derived and/or modified CDS sequence (opt3) from neuraminidase__InfluenzaA__ACY77705

SEQ ID NO: 145596 - RNA, 1410 nt, Artificial Sequence; identical to SEQ ID NO: 144776
  derived and/or modified CDS sequence (opt3) from neuraminidase__InfluenzaA__ACY77725

SEQ ID NO: 145597 - RNA, 1410 nt, Artificial Sequence; identical to SEQ ID NO: 144776
  derived and/or modified CDS sequence (opt3) from neuraminidase__InfluenzaA__ACY77735

SEQ ID NO: 145598 - RNA, 1410 nt, Artificial Sequence; identical to SEQ ID NO: 144786
  derived and/or modified CDS sequence (opt3) from neuraminidase__InfluenzaA__ACY77745

SEQ ID NO: 145599 - RNA, 1410 nt, Artificial Sequence; identical to SEQ ID NO: 144786
  derived and/or modified CDS sequence (opt3) from neuraminidase__InfluenzaA__ACY77755

SEQ ID NO: 145600 - RNA, 1410 nt, Artificial Sequence; identical to SEQ ID NO: 144786
  derived and/or modified CDS sequence (opt3) from neuraminidase__InfluenzaA__ACY77775

SEQ ID NO: 145601 - RNA, 1410 nt, Artificial Sequence; identical to SEQ ID NO: 144786
  derived and/or modified CDS sequence (opt3) from neuraminidase__InfluenzaA__ACY77785

SEQ ID NO: 145602 - RNA, 1410 nt, Artificial Sequence; identical to SEQ ID NO: 144786
  derived and/or modified CDS sequence (opt3) from neuraminidase__InfluenzaA__ACY77795

SEQ ID NO: 145603 - RNA, 1410 nt, Artificial Sequence
  derived and/or modified CDS sequence (opt3) from neuraminidase__InfluenzaA__ACY77825
augaaccccaaucagaagaucauuaccauaggcagcgugugcaugacaaucgggauggccaaccugauucuccaaaucggaaauauuaucuccauauggaucucucacucaauucagcuugguaaccagaaucagaucgagacuuguaaccaaagugucauuacguacgaaaauaacaccuggguuaaucagacauaugugaacaucagcaauacuaacuucgcugcaggccaguccguagugucugccaaacuggcgggaaauucgucauugugcccugucagcgggugggcuauauacaguaaggacaacuccauuagaaucggcucuaaaggugauguguuuguuauuagggagccauucaucagcuguuccccguuagaaugccggaccuuuuuccugacacagggggcccuacucaaugacaagcauucaaacggaaccaucaaagaucgcagucccuaucgaacucugaugagcuguccuauuggcgaggugccaucucccuacaacucccguuuugaaucagucgcauggagcgccagugcuugccacgacggcauaaauuggcuuacaaucgggauuucuggaccugauaacggugcaguggccguacugaaguauaauggcaucauaaccgacacgauuaaguccuggagaaacaauaucuugaggacucaagagagcgagugugcuugcguuaacgggucguguuucaccgugaugacagauggaccaucugacggccaggccuccuacaaaaucuuucggauugaaaaggguaaaaucgucaagucaguggagaugaaugcgcccaacuaucauuacgaagagugcaguuguuacccugauagcuccgagauuacuugcgugugccgcgacaauuggcacgggucuaacagaccaugggucagcuucaaucagaaccucgaauaucagauaggauacaucuguucaggcauuuuuggcgauaauccgaggcccaacgacaaaaccgggaguugcggaccuguuuccagcaauggugcaaacggcgugaagggguucucuuuuaaguauggaaacggcguauggaucggucggacaaaaucaaucaauagucgcaacggguucgagaugauuugggauccaaauggcuggaccggaacggacaacaauuuuagcauaaagcaagacaucgugggcauuaacgaaugguccggguacucuggaucguucguccagcaucccgagcugacuggucuggauuguauccgaccuugcuucuggguggaacucauuagaggcaggccaaaagagaauacaaucuggaccagcggguccucaauaaguuuuuguggaguuaacucugacacugugggcuggagcuggcccgauggugccgaguuaccguucacaaucgacaaguga

SEQ ID NO: 145604 - RNA, 1410 nt, Artificial Sequence; identical to SEQ ID NO: 145603
  derived and/or modified CDS sequence (opt3) from neuraminidase__InfluenzaA__ACY77835

SEQ ID NO: 145605 - RNA, 1410 nt, Artificial Sequence; identical to SEQ ID NO: 144816
  derived and/or modified CDS sequence (opt3) from neuraminidase__InfluenzaA__ACY77845

SEQ ID NO: 145606 - RNA, 1410 nt, Artificial Sequence; identical to SEQ ID NO: 144786
  derived and/or modified CDS sequence (opt3) from neuraminidase__InfluenzaA__ACY77865

SEQ ID NO: 145607 - RNA, 1410 nt, Artificial Sequence
  derived and/or modified CDS sequence (opt3) from neuraminidase__InfluenzaA__ACY77870
augaaccccaaucagaagaucauuaccauaggcagcgugugcaugacaaucgggauggccaaccugauucuccaaaucggaaauauuaucuccauauggaucucucacucaauucagcuugguaaccagaaucagaucgagacuuguaaccaaagugucauuacguacgaaaauaacaccuggguuaaucagacauaugugaacaucagcaauacuaaccuggcugcaggccaguccguagugucugucaaauuggccggaaauucgucauuaugcccugugagcggaugggcgauauacaguaaggacaacuccauuagaaucggcucuaaaggugauguuuucgugauuagggagccauuuaucagcuguuccccgcuggaaugccggaccuucuuucuaacacagggggcucuccugaaugacaagcauucaaacggaaccaucaaagaucgcagucccuaucgaacucuuaugagcuguccuauuggcgaggucccaucucccuacaacucccguuucgaaucaguggccuggagcgcaagugccugccacgacggcauaaauuggcugacaaucgggauuucuggaccugauaacggugcuguagcaguuuugaaguauaauggcaucauaaccgacacgauuaaguccuggagaaacaauauccucaggacucaagagagcgagugugccugcgugaacgggucguguuuuaccgucaugacagauggaccaucugacggccaggcuuccuacaaaaucuuccggauugaaaaggguaaaaucgugaagucaguggagaugaaugcccccaacuaucauuacgaagagugcaguuguuacccugauagcuccgagauuacuugcgucugccgcgacaauuggcacgggucuaacagaccauggguuagcuuuaaucagaaccuggaauaucagauaggauacaucuguucaggcauuuucggcgauaauccgaggcccaacgacaaaaccgggaguugcggaccuguguccagcaauggugcgaacggcguaaagggguuuucuuucaaguauggaaacggcguguggaucggucggacaaaaucaaucaguagccgcaauggguuugagaugauuugggauccaaacggcuggaccggaacggacaauaacuucuccauaaagcaagacaucgucggcauuaaugaauggucuggguacucggggagcuuugugcagcaucccgagcugacuggucucgauuguauccgaccuugcuucuggguugaauuaauuagaggcaggccaaaagagaacacaaucuggaccuccgggucaaguauaucuuucuguggagugaauagcgacacugucggcugguccuggcccgauggugcagagcugccguuuacaaucgacaaguga

SEQ ID NO: 145608 - RNA, 1410 nt, Artificial Sequence; identical to SEQ ID NO: 144786
  derived and/or modified CDS sequence (opt3) from neuraminidase__InfluenzaA__ACY77877

SEQ ID NO: 145609 - RNA, 1410 nt, Artificial Sequence; identical to SEQ ID NO: 144786
  derived and/or modified CDS sequence (opt3) from neuraminidase__InfluenzaA__ACY77887

SEQ ID NO: 145610 - RNA, 1410 nt, Artificial Sequence; identical to SEQ ID NO: 144786
  derived and/or modified CDS sequence (opt3) from neuraminidase__InfluenzaA__ACY77907

SEQ ID NO: 145611 - RNA, 1410 nt, Artificial Sequence; identical to SEQ ID NO: 144816
  derived and/or modified CDS sequence (opt3) from neuraminidase__InfluenzaA__ACY77917

SEQ ID NO: 145612 - RNA, 1410 nt, Artificial Sequence
  derived and/or modified CDS sequence (opt3) from neuraminidase__InfluenzaA__ACY77927
augaaccccaaucagaagaucauuaccauaggcagcgugugcaugacaaucgggauggccaaccugauucuccaaaucggaaauauuaucuccauauggaucucucacucaauucagcuugguaaccagaaucagaucgagacuuguaaccaaagugucauuacguacgaaaauaacaccuggguuaaucagacauaugugaacaucagcaauacuaacuucgcugcaggccaguccguagugucugucaaacuggccggaaauucgucauugugcccugugagcggaugggcgauauacaguaaggacaacuccauuagaaucggcucuaaaggugauguuuuugugauuagggagccauucaucagcuguuccccguuagaaugccggaccuuuuuccugacacagggggcucuacucaaugacaagcauucaaacggaaccaucaaagaucgcagucccuaucgaacucugaugagcuguccuauuggcgaggucccaucucccuacaacucccguuuugaaucaguggccuggagcgcaagugccugccacgacggcauaaauuggcuuacaaucgggauuucuggaccuaacaauggugcuguagcaguucugaaguauaacggcaucauaaccgauacgauuaaguccuggagaaauaacaucuugaggacucaagagagcgagugugccugcgugaaugggucguguuucaccgucaugacagacggaccaucugauggccaggcuuccuacaaaaucuuucggauugaaaaggguaaaaucgugaagucaguggagaugaacgcccccaauuaucauuacgaagagugcaguuguuacccugacagcuccgagauuacuugcgucugccgcgauaacuggcacgggucuaauagaccauggguuagcuucaaccagaaucucgaauaucagauaggauacaucuguucaggcauuuuuggcgacaacccgaggcccaaugauaaaaccgggaguugcggaccuguguccagcaacggugcgaacggcguaaagggguucucuuuuaaguauggaaauggcguguggaucggucggacaaaaucaaucaguagccgcaacggguucgagaugauuugggacccaaauggcuggaccggaacggauaacaauuuuuccauaaagcaagacaucgucggcauuaacgaauggucuggguacucggggagcuucgugcagcaucccgagcugacuggucuggacuguauccgaccuugcuucuggguugaacucauuagaggcaggccaaaagagaauacaaucuggaccuccgggucaaguauaucuuuuuguggagugaacagcgauacugucggcugguccuggcccgacggugcagaguuaccguucacaaucgauaaguga

SEQ ID NO: 145613 - RNA, 1410 nt, Artificial Sequence; identical to SEQ ID NO: 144786
  derived and/or modified CDS sequence (opt3) from neuraminidase__InfluenzaA__ACY77937

SEQ ID NO: 145614 - RNA, 1410 nt, Artificial Sequence; identical to SEQ ID NO: 144786
  derived and/or modified CDS sequence (opt3) from neuraminidase__InfluenzaA__ACY77947

SEQ ID NO: 145615 - RNA, 1410 nt, Artificial Sequence; identical to SEQ ID NO: 144786
  derived and/or modified CDS sequence (opt3) from neuraminidase__InfluenzaA__ACY77967

SEQ ID NO: 145616 - RNA, 1410 nt, Artificial Sequence; identical to SEQ ID NO: 144776
  derived and/or modified CDS sequence (opt3) from neuraminidase__InfluenzaA__ACY77977

SEQ ID NO: 145617 - RNA, 1410 nt, Artificial Sequence; identical to SEQ ID NO: 144786
  derived and/or modified CDS sequence (opt3) from neuraminidase__InfluenzaA__ACY77987

SEQ ID NO: 145618 - RNA, 1410 nt, Artificial Sequence
  derived and/or modified CDS sequence (opt3) from neuraminidase__InfluenzaA__ACY77997
augaaccccaaucagaagaucauuaccauaggcagcgugugcaugacaaucgggauggccaaccugauucuccaaaucggaaauauuaucuccauauggaucucucacucaauucagcuugguaaccagaaucagaucgagacuuguaaccaaagugucauuacguacgaaaauaacaccuggguuaaucagacauaugugaacaucagcaauacuaacuucgcugcaggccaguccguagugucugucacccuggccggaaauucgucauugugcccugugagcggaugggcgauauacaguaaagacaacuccauuagaaucggcucuaagggugauguuuuugugauuagggagccauucaucagcuguuccccguuagaaugccggacauuuuuccugacccagggggcucuacucaaugacaaacauucaaacggaacuaucaaggaucgcagucccuaucgaacacugaugagcuguccuauuggcgaggucccaucucccuacaacucccguuuugaaucaguggccuggagcgcaagugccugccacgacggcauaaauuggcuuaccaucgggauuucuggaccugauaacggugcuguagcaguucugaaauauaauggcaucauaacggacacuauuaaguccuggagaaacaauaucuugaggacccaagagagcgagugugccugcgugaacgggucguguuucacagucaugacugauggaccaucugacggccaggcuuccuacaagaucuuucggauugaaaaagguaagaucgugaaaucaguggagaugaaugcccccaacuaucauuacgaagagugcaguuguuacccugauagcuccgagauuaccugcgucugccgcgacaauuggcacgggucuaacagaccauggguuagcuucaaucagaaccucgaauaucagauaggauacaucuguucaggcauuuuuggcgauaauccgaggcccaacgacaagacagggaguugcggaccuguguccagcaauggugcgaacggcguaaaaggguucucuuuuaaguauggaaacggcguguggaucggucggaccaagucaaucaguagccgcaauggguucgagaugauuugggauccaaacggcuggacgggaacugacaauaacuuuuccauaaaacaagacaucgucggcauuaaugaauggucuggguacucggggagcuucgugcagcaucccgagcugacaggucuggauuguauccgaccuugcuucuggguugaacucauuagaggcaggccaaaggagaacaccaucuggacuuccgggucaaguauaucuuuuuguggagugaauagcgacacagucggcugguccuggcccgauggugcagaguuaccguucaccaucgacaaauga

SEQ ID NO: 145619 - RNA, 1410 nt, Artificial Sequence; identical to SEQ ID NO: 144786
  derived and/or modified CDS sequence (opt3) from neuraminidase__InfluenzaA__ACY78017

SEQ ID NO: 145620 - RNA, 1410 nt, Artificial Sequence
  derived and/or modified CDS sequence (opt3) from neuraminidase__InfluenzaA__ACZ01955
augaaccccaaucagaagaucauuaccauaggcagcgugugcaugacaaucgggauggccaaccugauucuccaaaucggaaauauuaucuccauauggaucucucacucaauucagcuugguaaccagaaucagaucgagacuuguaaccaaagugucauuacguacgaaaauaacaccuggguuaaucagacauaugugaacaucagcaauacuaacuucgcugcaggccaguccguagugucugucaaacuggccggaaauucgucauugugcccugugagcgggugggcgauauacaguaaggacaacuccauuagaaucggcucuaaaggugauguuuuugugauuagggagccauucaucagcuguuccccguuagaaugccggaccuuuuuccugacacagggggcucuacucaaugacaagcauucaaacggaaccaucaaagaucgcagucccuaucgaacucugaugagcuguccuauuggcgaggucccaucucccuacaacucccguuuugaaucaguggccuggagcgcaagugccugccacgacggcauaaauuggcuuacaaucgggauuucuggaccugguaacggcgcuguagcaguucugaaguauaaugggaucauaaccgauacgauuaaguccuggagaaacaauaucuugaggacucaagagagcgagugugccugcgugaacggaucguguuucaccgucaugacagacggcccaucugauggucaggcuuccuacaaaaucuuucggauugaaaaggggaaaaucgugaagucaguggagaugaaugcccccaacuaucauuacgaagagugcaguuguuacccugacagcuccgagauuacuugcgucugccgcgauaauuggcacggaucuaacagaccauggguuagcuucaaucagaaccucgaauaucagauaggcuacaucuguucaggcauuuuuggggacaauccgaggcccaacgauaaaaccggaaguugcgguccuguguccagcaauggcgcgaacgggguaaagggauucucuuuuaaguauggcaacgguguguggaucgggcggacaaaaucaaucaguagccgcaauggcuucgagaugauuugggacccaaacggauggaccggcacggauaauaacuuuuccauaaagcaagacaucgucgggauuaaugaauggucuggauacucggguagcuucgugcagcaucccgagcugacuggccuggacuguauccgaccuugcuucuggguugaacucauuagagggaggccaaaagagaacacaaucuggaccuccggaucaaguauaucuuuuuguggcgugaauagcgauacugucgguugguccuggcccgacggggcagaguuaccguucacaaucgauaaguga

SEQ ID NO: 145621 - RNA, 1410 nt, Artificial Sequence; identical to SEQ ID NO: 144786
  derived and/or modified CDS sequence (opt3) from neuraminidase__InfluenzaA__ACZ05053

SEQ ID NO: 145622 - RNA, 1410 nt, Artificial Sequence; identical to SEQ ID NO: 144776
  derived and/or modified CDS sequence (opt3) from neuraminidase__InfluenzaA__ACZ05064

SEQ ID NO: 145623 - RNA, 1410 nt, Artificial Sequence; identical to SEQ ID NO: 144786
  derived and/or modified CDS sequence (opt3) from neuraminidase__InfluenzaA__ACZ05074

SEQ ID NO: 145624 - RNA, 1410 nt, Artificial Sequence; identical to SEQ ID NO: 144786
  derived and/or modified CDS sequence (opt3) from neuraminidase__InfluenzaA__ACZ05084

SEQ ID NO: 145625 - RNA, 1410 nt, Artificial Sequence; identical to SEQ ID NO: 144786
  derived and/or modified CDS sequence (opt3) from neuraminidase__InfluenzaA__ACZ05094

SEQ ID NO: 145626 - RNA, 1410 nt, Artificial Sequence; identical to SEQ ID NO: 144786
  derived and/or modified CDS sequence (opt3) from neuraminidase__InfluenzaA__ACZ05104

SEQ ID NO: 145627 - RNA, 1410 nt, Artificial Sequence; identical to SEQ ID NO: 144786
  derived and/or modified CDS sequence (opt3) from neuraminidase__InfluenzaA__ACZ05114

SEQ ID NO: 145628 - RNA, 1410 nt, Artificial Sequence; identical to SEQ ID NO: 144786
  derived and/or modified CDS sequence (opt3) from neuraminidase__InfluenzaA__ACZ05124

SEQ ID NO: 145629 - RNA, 1410 nt, Artificial Sequence; identical to SEQ ID NO: 144786
  derived and/or modified CDS sequence (opt3) from neuraminidase__InfluenzaA__ACZ05144

SEQ ID NO: 145630 - RNA, 1410 nt, Artificial Sequence; identical to SEQ ID NO: 144786
  derived and/or modified CDS sequence (opt3) from neuraminidase__InfluenzaA__ACZ05154

SEQ ID NO: 145631 - RNA, 1410 nt, Artificial Sequence; identical to SEQ ID NO: 144647
  derived and/or modified CDS sequence (opt3) from neuraminidase__InfluenzaA__ACZ05164

SEQ ID NO: 145632 - RNA, 1410 nt, Artificial Sequence; identical to SEQ ID NO: 144647
  derived and/or modified CDS sequence (opt3) from neuraminidase__InfluenzaA__ACZ05175

SEQ ID NO: 145633 - RNA, 1413 nt, Artificial Sequence
  derived and/or modified CDS sequence (opt3) from neuraminidase__InfluenzaA__ACZ05197
augaaccccaaucagaagaucaugaccauuggcagcauauccaucgccauugggaucauuucucugaugcuccaaaucggaaacauaaucucaauuugggcuagucacagcauccagacagguucccagaauaacacuggcauuugcaaucagagaaucauaacguacgagaacucuaccugggugaaucauacauaugucaacauuaauaacacuaauguuguggcaggggaagacaaaaccucgguaacacuugccggaaacucaagccuguguaguaucuccggcugggcgauuuacaccaaggauaauucuaucaggaucgguagcaaaggggacguguucgucauucgggagccuuuuauauccugcucacacuuggaaugucgcacuuucuuuuuaacacaaggagcucugcuaaacgauaagcauaguaauggcaccgugaaagaccgaagcccauaucgugcccucaugucuugcccgcugggcgaggcacccuccccuuacaacucaaaguucgaaagcguugccuggagugcuucugcaugucacgaugggaugggauggcuuacgaucgguauuuccggcccagacaacggggccguggcuguccugaaguauaauggaaucauaacuggcaccauuaaaagcuggaagaaacagaucuugagaacacaggagucggagugcguguguaugaacgguucuugcuuuacuaucaugaccgaugggcccuccaauaaggccgcgucauacaaaauuuucaagaucgaaaagggaaaaguaacaaagaguauugagcucaacgcaccuaauuuuuauuacgaagaguguagcugcuacccagacaccggcauaguuaugugugugugcagggauaacuggcauggcuccaaucggcccugggucucuuucaaccagaaucuggacuaucaaaucggguacauuugcagcggaguguuuggugauaacccucgcccagaggacggcgaagggucauguaauccggugacggucgauggagccaacggcguuaaagguuucaguuauaaguacgggaauggcguguggaucggaagaacuaaauccaacaggcugcggaagggcuuugagaugaucugggaccccaauggguggacaaacaccgacagcgauuucucuguaaaacaggacguggucgcuauuacugauuggucaggauauagugguagcuuugugcagcacccugaacucacaggcuuagacugcauacgcccauguuucuggguugagcuggugcgagggcuucccagagaaaacaccacgaucuggaccuccggaucuucgauuagcuucugcggcgucaauuccgauacagccaacuggucauggccugacggugcagaguugccauuuacuaucgauaaguga

SEQ ID NO: 145634 - RNA, 1410 nt, Artificial Sequence
  derived and/or modified CDS sequence (opt3) from neuraminidase__InfluenzaA__ACZ05208
augaaccccaaucagaagaucauuaccauaggcagcgugucccugacaaucucuacuauuugcuucuuuaugcagaucgccauucucaucacgaccgucacacuucacuucaaacaguacgaguuuaacucaccuccaaauaaccagguuaugcugugugaaccgacuauaaucgagagaaauauuaccgaaaucguguauuugacaaacaccacuauugagaaggaaaucugccccaaauuagcugaguacaggaauuggaguaagccucagugugacauaacaggguucgcaccauuuagcaaagauaacuccauucggcugucugccggaggugacaucuggguaacccgcgagcccuaugugucgugcgauccugacaaguguuaccaauucgcgcuaggccaggggacgacucucaauaacguccauucaaauaacaccgugcgagaucguacaccauauagaacucugcuuaugaaugaacugggaguucccuuucacuugggcaccaaacaggugugcauugcuuggagcaguuccucuugucaugacgguaaggccuggcuccacgucugcaucacaggggaugacaagaacgcaaccgccagcuucaucuacaauggaaggcugguggauuccguaguuucauggaguaaagagauucugcggacgcaggaaagcgagugugugugcauaaacggcacuuguacagucgugaugaccgacggcucugcuuccgggaaggcagauacuaaaauccucuuuauugaggaaggaaagaucgugcauacaucaaccuuaagcgguagugcccaacacgucgaggaaugcucuugcuauccucgcuacccaggcguuagaugugugugcagggacaacuggaagggguccaaucggccgauaguagauauuaacaucaaagaccacagcaucgugucgucuuacgucuguuccggacuggugggcgacacgccccgcaagaaugauucaaguagcuccucucauugcagcgacccuaacaaugaggaaggugggcacggaguuaaaggcugggcuuucgauucaggcaacgacguguggauggggcgaaccauuagugagaaguccagacuuggauaugagacauuuaaagucaucgaagguuggagcaauccaaagucuaaauugcagauuaacaggcaagugauaguagaucggggcaaucguucaggguacaguggaaucuucagcguugagggcaaguccuguauuaaccgcugcuuuuauguggaacugaucagagguaggaaggaggaaacugagguccuauggaccucuaauucgaucguggucuucugugggacaagcggcacuuacggaaccggcuccuggcccgacggggccgauauuaaccucaugccuauauga

SEQ ID NO: 145635 - RNA, 1410 nt, Artificial Sequence
  derived and/or modified CDS sequence (opt3) from neuraminidase__InfluenzaA__ACZ05219
augaaccccaaucagaagaucauuaccauaggcagcgugucccugacaaucucuacuauuugcuucuuuaugcagaucgccauucucaucacgaccgucacacuucacuucaaacaguacgaguuuaacucaccuccaaauaaccagguuaugcugugugaaccgacuauaaucgagagaaauauuaccgaaaucguguauuugacaaacaccacuauugagaaggaaaucugccccaaauuagcugaguacaggaauuggaguaagccucagugugggauaacaggauucgcaccauuuagcaaagacaacuccauucggcugucugccgguggcgauaucuggguaacccgcgagcccuaugugucgugcgacccugauaaguguuaccaauucgcgcuagggcagggaacgacucucaauaacguccauucaaauaacaccgugcgagaccguacaccauauagaacucugcuuaugaaugaacugggcguucccuuucacuuggguaccaaacaggugugcauugcuuggagcaguuccucuugucaugaugggaaggccuggcuccacgucugcaucacaggagacgauaagaacgcaaccgccagcuucaucuacaauggcaggcugguggacuccguaguuucauggaguaaagagauucugcggacgcaggaaagcgagugugugugcauaaacggcacuuguacagucgugaugaccgaugggucugcuuccggaaaggcagacacuaaaauccucuuuauugaggaagguaagaucgugcauacaucaaccuuaagcggcagugcccaacacgucgaggaaugcucuugcuauccucgcuacccagggguuagaugugugugcagggauaacuggaagggauccaaucggccgauaguagacauuaacaucaaagaucacagcaucgugucgucuuacgucuguuccggccuggugggugacacgccccgcaagaaugacucaaguagcuccucucauugccuugauccuaacaaugaggaagggggacacggcguuaaaggcugggcuuucgacgaugggaacgacguguggaugggacgaaccauuagcgagaagucaagauuggguuaugagacauuuaaagucaucgaaggcuggaguaauccaaaguccaaacugcagauuaacaggcaagugauaguagaucgggggaaucguagcggauacucuggcaucuucucaguugaggguaagaguuguauuaaccgcugcuuuuauguggaacuaaucagagggaggaaggaggaaacugagguccucuggaccagcaauuccaucguggucuucuguggcacaucuggaacuuacggcaccgggucguggcccgacggagccgauauuaaccugaugccuauauga

SEQ ID NO: 145636 - RNA, 1410 nt, Artificial Sequence; identical to SEQ ID NO: 144647
  derived and/or modified CDS sequence (opt3) from neuraminidase__InfluenzaA__ACZ05230

SEQ ID NO: 145637 - RNA, 1410 nt, Artificial Sequence
  derived and/or modified CDS sequence (opt3) from neuraminidase__InfluenzaA__ACZ05241
augaaccccaaucagaagaucauuaccauaggcagcgugucccugacaaucucuacuauuugcuucuuuaugcaaaucgccauucucaucacgaccgucacacuucacuucaaacaguacgaguuuaacucaccuccaaauaaccagguuaugcugugugaaccgacuauaaucgagagaaauauuaccgaaaucguguauuugacaaacaccacuauugagaaggaaaucugccccaaauuagcugaguacaggaauuggaguaagccucagugugacauaacaggguucgcaccauuuagcaaagauaacuccauucggcugucugccggaggugacaucuggguaacccgcgagcccuaugugucgugcgauccugacaaguguuaccaauucgcgcuaggccaggggacgacucucaauaacguccauucaaauaacaccgugcgagaucguacaccauauagaacucugcuuaugaaugaacugggaguucccuuucacuugggcaccaaacaggugugcauugcuuggagcaguuccucuugucaugacgguaaggccuggcuccacgucugcaucacaggggaugacaagaacgcaaccgccagcuucaucuacaauggaaggcugguggauuccguaguuucauggaguaaagagauucugcggacgcaggaaagcgagugugugugcauaaacggcacuuguacagucgugaugaccgacggcucugcuuccgggaaggcagauacuaaaauccucuuuauugaggaaggaaagaucgugcauacaucaaaguuaagcgguagugcccaacacgucgaggaaugcucuugcuauccucgcuacccaggcguuagaugugugugcagggacaacuggaaaggguccaaucggccgauaguagauauuaacaucaaggaccacagcaucgugucgucuuacgucuguuccggacuggugggcgacacccccaggaaaaaugauucaaguagcuccucucauugccuugacccuaacaaugaggaaggugggcacggaguuaagggcugggcuuucgaugacggcaacgauguguggauggggcgaacgauuagcgagaaaucaagauugggauaugagaccuuuaaggucaucgaagguuggaguaauccaaaauccaagcugcagauuaaccgccaggugauaguagaccggggcaaucguagcggguacucuggaaucuucucaguugagggcaagaguuguauuaaccgcugcuuuuauguggaacuaaucagagguaggaaagaggaaacagagguccucuggacuagcaauuccaucguggucuucugugggaccucuggcacauacggaacuggcucguggcccgauggggccgacauuaaccugaugccuauauga

SEQ ID NO: 145638 - RNA, 1413 nt, Artificial Sequence
  derived and/or modified CDS sequence (opt3) from neuraminidase__InfluenzaA__ACZ05296
augaaccccaaucagaagaucauuaccauaggcagcaucuccauugccaucgggauuaucucucugaugcuccaaauaggaaacaucauuucaaucugggcuagucacagcauucagacagguucccagaauaacacuggcaucugcaaucagagaauaauuacguacgagaacucuaccugggugaaucauacauaugucaacaucaauaacacuaauguuguggcaggggaagacaaaaccucgguaacacuugccggaaacucaagccuguguaguauuuccggcugggcgaucuacaccaaggauaauucuaucaggauugguagcaaaggggacguguucgucauacgggagccuuuuaucuccugcucacacuuggaaugucgcacuuucuuuuuaacacaaggagcucugcuaaacgauaagcauaguaauggcaccgugaaagaccgaagcccauaucgugcccucaugucuugcccgcugggcgaggcacccuccccuuacaacucaaaguucgaaagcguugccuggagugcuucugcaugucacgaugggaugggauggcuuacgauugguaucuccggcccagacaacggggccguggcuguccugaaguauaauggaauaauuacuggcaccaucaaaagcuggaagaaacagaucuugagaacacaggagucggagugcguguguaugaacgguucuugcuuuacuauuaugaccgaugggcccuccaauaaggccgcgucauacaaaaucuucaagauugaaaagggaaaaguaacaaagaguauagagcucaacgcaccuaauuuuuauuacgaagaguguagcugcuacccagacaccggcaucguuaugugugugugcagggauaacuggcauggcuccaaucggcccugggucucuuucaaccagaaucuggacuaucaaauuggguacaucugcagcggaguguuuggugauaacccucgcccagaggacggcgaagggucauguaauccgguggccgucgauggagcuaacggcguuaaagguuucaguuauaaguacgggaauggcguguggaucggaagaacgaaauccaacaggcugcggaagggcuuugagaugauuugggaccccaauggguggacuaacacagacagcgauuucucuguaaaacaggacguggucgccauaaccgauuggucaggauauagugguagcuuugugcagcacccugaacucacuggcuuagacugcauccgcccauguuucuggguugagcuggugcgagggcuucccagagaaaacacaaccauuuggacguccggaucuucgaucagcuucugcggcgucaauuccgauaccgcaaacuggucauggccugacggugcugaguugccauuuacaauugauaaguga

SEQ ID NO: 145639 - RNA, 1410 nt, Artificial Sequence; identical to SEQ ID NO: 144647
  derived and/or modified CDS sequence (opt3) from neuraminidase__InfluenzaA__ACZ05307

SEQ ID NO: 145640 - RNA, 1410 nt, Artificial Sequence
  derived and/or modified CDS sequence (opt3) from neuraminidase__InfluenzaA__ACZ05318
augaaccccaaucagaagaucauuaccauaggcagcgugucccugacaaucucuacuauuugcuucuuuaugcaaacggccauccucauuaccacagucacucuucacuucaaacagugugaguuuaacucaccuccaaauaaccagguuaugcugugcgaaccgaccaucauagagagaaauaucacagaaauuguguacuugaccaacacuacaaucgagaaggaaauuugucccaaauuagcugaguauaggaauuggaguaagccucagugcgacaucaccggguucgcaccauuuagcaaagauaacuccauacggcugucugccggaggugacauuuggguaacgcgcgagcccuacgugucgugugauccugacaagugcuaucaauucgcgcuaggccaggggacuacccucaauaacguccauucaaauaacacagugcgagaucguacuccauacagaacccugcuuaugaaugaacugggaguucccuuucacuugggcacaaaacagguguguaucgcuuggagcaguuccucuugccaugacgguaaggccuggcuccacgucuguauuaccggggaugacaagaacgcaacggccagcuucaucuauaauggaaggcugguggauuccguaguuucauggaguaaagagauccugcggacucaggaaagcgagugcguguguauuaacggcacaugcaccgucgugaugacugacggcucugcuuccgggaaggcagauacaaaaauacucuuuaucgaggaaggaaagauugugcauaccucaacguuaagcgguagugcccaacacgucgaggaaugcucuuguuacccucgcuauccaggcguuagaugcguguguagggacaacuggaagggguccaaucggccgaucguagauauaaacauuaaagaccacagcaucgugucgucuuacgucugcuccggacuggugggcgacacccccaggaagaaugauucaaguagcuccucucauugucuugacccuaacaaugaggaaggugggcacggaguuaaaggcugggcuuucgaugacggcaacgauguguggauggggcgaacaaucagcgagaagucaagauugggauacgagacuuuuaaagucauugaagguuggaguaauccaaaguccaaacugcagaucaaccgccaggugauuguagaccggggcaaucguagcggguauucuggaauauucucaguugagggcaagaguugcaucaaccgcuguuuuuacguggaacuaauuagagguaggaaggaggaaaccgagguccucuggacaagcaauuccaucguggucuucugcgggacuucuggcaccuauggaacaggcucguggcccgauggggccgacaucaaccugaugccuauuuga

SEQ ID NO: 145641 - RNA, 1410 nt, Artificial Sequence; identical to SEQ ID NO: 144647
  derived and/or modified CDS sequence (opt3) from neuraminidase__InfluenzaA__ACZ05329

SEQ ID NO: 145642 - RNA, 1410 nt, Artificial Sequence; identical to SEQ ID NO: 144560
  derived and/or modified CDS sequence (opt3) from neuraminidase__InfluenzaA__ACZ05340

SEQ ID NO: 145643 - RNA, 1410 nt, Artificial Sequence; identical to SEQ ID NO: 145637
  derived and/or modified CDS sequence (opt3) from neuraminidase__InfluenzaA__ACZ05362

SEQ ID NO: 145644 - RNA, 1410 nt, Artificial Sequence; identical to SEQ ID NO: 144647
  derived and/or modified CDS sequence (opt3) from neuraminidase__InfluenzaA__ACZ05373

SEQ ID NO: 145645 - RNA, 1410 nt, Artificial Sequence; identical to SEQ ID NO: 144647
  derived and/or modified CDS sequence (opt3) from neuraminidase__InfluenzaA__ACZ05395

SEQ ID NO: 145646 - RNA, 1410 nt, Artificial Sequence; identical to SEQ ID NO: 144647
  derived and/or modified CDS sequence (opt3) from neuraminidase__InfluenzaA__ACZ05406

SEQ ID NO: 145647 - RNA, 1413 nt, Artificial Sequence
  derived and/or modified CDS sequence (opt3) from neuraminidase__InfluenzaA__ACZ05450
augaaccccaaucagaagaucauuaccauaggcagcaucuccauugccaucgggauuaucucucugaugcuccaaauaggaucaaucauuaguaucugggcuagccacuccauucagacagguucucagaacaauacuggcaucugcaaccagagaauaauuacguacgaaaauucgaccugggugaaccauacauaugucaauaucaacaauacuaacguuguggcaggggaggacaaaaccucaguaacacuugccggaaauagcagucuguguuccauuucuggcugggcgaucuacaccaaggauaacagcgugaggaucgguuccaaaggggacgucuucgugauucgggagccuuuuauaucaugcagucacuuggaaugucgcacuuucuuuuuaacacaaggagcucugcuaaaugauaagcauagcaacggcaccguuaaagaccgaucuccauaucgugcccucauguccugcccgcugggcgaggcacccucaccuuacaauagcaaguucgaaaguguggccuggucugcuuccgcaugucacgaugggaugggauggcuuacgaucgguauuagcggcccagacaacggggccgucgcugugcugaaguauaacggaaucauaacuggcaccauuaaaucguggaagaaacagaucuugagaacacaggagucugagugcguauguaugaaugguuccugcuuuacuaucaugaccgaugggcccucaaacaaggccgcgaguuacaaaauuuucaagaucgaaaagggaaaaguuacaaagagcauugagcucaaugcaccuaacuuuuauuacgaagaguguuccugcuacccagacaccggcauagugaugugugucugcagggauaauuggcauggcucuaaccggcccugggugagcuucaaucagaaccuggacuaucaaaucggguacauuugcucaggaguguuuggugauaauccucgcccagaggacggcgaagggaguuguaacccggucacgguugauggagccaauggcgugaaagguuucuccuauaaguacgggaacggcguauggaucggaagaacuaaaagcaauaggcugcggaagggcuuugagaugaucugggaccccaacggguggacaaauaccgacucugauuucucagugaaacaggacgucguggcuauuacugauuggaguggauauagcgguuccuuuguucagcacccugaacucacaggcuuagacugcauacgcccauguuucuggguggagcugguccgagggcuucccagagaaaacaccacgaucuggaccucuggaucgagcauuuccuucugcggcgugaacucagauacagccaauuggaguuggccugacggugcagaguugccauuuacuaucgauaaguga

SEQ ID NO: 145648 - RNA, 1410 nt, Artificial Sequence; identical to SEQ ID NO: 144647
  derived and/or modified CDS sequence (opt3) from neuraminidase__InfluenzaA__ACZ05461

SEQ ID NO: 145649 - RNA, 1410 nt, Artificial Sequence; identical to SEQ ID NO: 144647
  derived and/or modified CDS sequence (opt3) from neuraminidase__InfluenzaA__ACZ05472

SEQ ID NO: 145650 - RNA, 1410 nt, Artificial Sequence
  derived and/or modified CDS sequence (opt3) from neuraminidase__InfluenzaA__ACZ05483
augaaccccaaucagaagaucauuaccauaggcagcgugucccugacaaucucuacuauuugcuucuuuaugcaaaucgccauucucaucacgaccgucacacuucacuucaaacaguacgaguuuaacucaccuccaaauaaccagguuaugcugugugaaccgacuauaaucgagagaaauauuaccgaaaucguguauuugacaaacaccacuguagagaaggaaauuugccccaaauuagcugaguacaggaauuggaguaagccucagugugacaucacaggguucgcaccauuuagcaaagauaacuccauacggcugucugccggaggugacauuugggugacccgcgagcccuaugucucgugcgauccugacaaguguuaccaauucgcgcuaggccaggggacgacucucaauaacgugcauucaaauaacaccguucgagaucguacaccauauagaacucugcuuaugaaugaacugggagugcccuuucacuugggcaccaagcaggucugcaucgcuuggagcaguuccucuugucaugacgguaaagccuggcuccacgugugcauuacaggggaugacaagaacgcaaccgccagcuucaucuacaauggaaggcugguagauuccguugugucauggaguaaagagauccugcggacgcaggaaagcgagugugucugcauuaacggcacuuguacaguggugaugaccgacggcucugcuuccgggaaggcagauacuaaaauacucuuuaucgaggaaggaaagauuguccauacaucaaccuuaagcgguagugcccaacacguugaggaaugcucuugcuauccucgcuacccaggcgugagauguguaugcagggacaacuggaagggguccaaucggccgaucguggauauaaacauuaaagaccacagcaucgucucgucuuacguguguuccggacugguuggcgacacgccccgcaagaaugauucaaguagcuccucucauugccuugacccuaacaaugaggaaggugggcacggagugaaaggcugggcuuucgaugacggcaacgaugucuggauggggcgaaccaucagcgagaagucaagauugggauaugagacauuuaaagugauugaagguuggaguaauccaaaguccaaacugcagaucaacaggcagguaauuguugaccggggcaaucguagcggguacucuggaauauucucaguggagggcaagaguuguaucaaccgcugcuuuuaugucgaacuaauuagagguaggaaggaggaaacugaggugcucuggaccagcaauuccaucgucguguucugugggacaucuggcacuuacggaaccggcucguggcccgauggggccgacaucaaccugaugccuauuuga

SEQ ID NO: 145651 - RNA, 1410 nt, Artificial Sequence; identical to SEQ ID NO: 144647
  derived and/or modified CDS sequence (opt3) from neuraminidase__InfluenzaA__ACZ05494

SEQ ID NO: 145652 - RNA, 1410 nt, Artificial Sequence; identical to SEQ ID NO: 145640
  derived and/or modified CDS sequence (opt3) from neuraminidase__InfluenzaA__ACZ05516

SEQ ID NO: 145653 - RNA, 1410 nt, Artificial Sequence
  derived and/or modified CDS sequence (opt3) from neuraminidase__InfluenzaA__ACZ05527
augaaccccaaucagaagaucauuaccauaggcagcgugucccugacaaucucuacuauuugcuucuuuaugcagaucgccauucucaucacgaccgucacacuucacuucaaacaguacgaguuuaacucaccuccaaauaaccagguuaugcugugugaaccgacuauaaucgagagaaauauuaccgaaaucguguauuugacaaacaccacuauugagaaggaaaucugccccaaauuagcugaguacaggaauuggaguaagccucagugugacauaacaggguucgcaccauuuagcaaagauaacuccauucggcugucugccggaggugacaucuggguaacccgcgagcccuaugugucgugcgauccugacaaguguuaccaauucgcgcuaggccaggggacgacucucaauaacguccauucaaauaacaccgugcgagaucguacaccauauagaacucugcuuaugaaugaacugggaguucccuuucacuugggcaccaaacaggugugcauugcuuggagcaguuccucuugucaugacgguaaggccuggcuccacgucugcaucacaggggaugacaagaacgcaaccgccagcuucaucuacaauggaaggcugguggauuccguaguuucauggaguaaagagauucugcggacgcaggaaagcgagugugugugcauaaacggcacuuguacagucgugaugaccgacggcucugcuuccgggaaggcagauacuaaaauccucuuuauugaggaaggaaagaucgugcauacaucaaccuuaagcgguagugcccaacacgucgaggaaugcucuugcuauccucgcuacccaggcguuagaugugugugcagggacaacuggaagggguccaaucggccgauaguagauauuaacaucaaagaccacagcaucgugucgucuuacgucuguuccggacuggugggcgacacgccccgcaagaaugauucaaguagcuccucucauugcagcgacccuaacaaugaggaaggugggcacggaguuaaaggcugggcuuucgaugacggcaacgauguguggauggggcgaaccauuucagagaagaguagacuuggauaugagacauuuaaagucaucgaagguugguccaauccaaagagcaaauugcagauuaacaggcaagugauaguagaccggggcaaucguucuggguacucaggaaucuucaguguugagggcaagagcuguauuaaccgcugcuuuuauguggaacugaucagagguaggaaggaggaaacugagguccuauggaccuccaauucuaucguggucuucugugggacaucgggcacuuacggaaccggcagcuggcccgauggggccgacauuaaccucaugccuauauga

SEQ ID NO: 145654 - RNA, 1410 nt, Artificial Sequence; identical to SEQ ID NO: 145637
  derived and/or modified CDS sequence (opt3) from neuraminidase__InfluenzaA__ACZ05538

SEQ ID NO: 145655 - RNA, 1413 nt, Artificial Sequence; identical to SEQ ID NO: 145509
  derived and/or modified CDS sequence (opt3) from neuraminidase__InfluenzaA__ACZ05593

SEQ ID NO: 145656 - RNA, 1413 nt, Artificial Sequence
  derived and/or modified CDS sequence (opt3) from neuraminidase__InfluenzaA__ACZ05604
augaaccccaaucagaagaucauuaccauaggcagcaucuccauugccaucgggauuaucucucugaugcuccaaauaggaaacaucauuucaaucugggcuagucacagcauucagacagguucccagaauaacacuggcaucugcaaucagagaauaauuacguacgagaacucuaccugggugaaucauacauaugucaacaucaauaacacuaauguuguggcaggggaagacaaaaccucgguaacacuugccggaaacucaagccuguguaguauuaggggcugggcgaucuacaccaaggauaauuccauccggauugguucuaaaggggacguguucgucauacgcgagccuuuuaucagcugcucccacuuggaaugucgaacuuucuuuuuaacacaaggagcucugcuaaacgauaagcauucaaauggcaccgugaaagaccguaguccauauagagcccucaugagcugcccgcugggcgaggcacccucuccuuacaacuccaaguucgaaucaguugccuggagcgcuagugcaugucacgaugggaugggauggcuuacgauugguaucucuggcccagacaacggggccguggcuguccugaaguauaauggaauaauuacuggcaccaucaaauccuggaagaaacagaucuugaggacacaggagagcgagugcguguguaugaacgguucgugcuuuacuauuaugaccgaugggcccucuaauaaggccgcguccuacaaaaucuucaagauugaaaagggaaaaguaacaaagucaauagagcucaacgcaccuaauuuuuauuacgaagaguguaguugcuacccagacaccggcaucguuaugugugugugccgggauaacuggcauggcagcaaucgccccugggucuccuucaaccagaaucuggacuaucaaauuggguacaucugcucuggaguguuuggugauaacccuagaccagaggacggcgaagggagcuguaauccggugacggucgauggagccaacggcguuaaagguuucucauauaaguacgggaauggcguguggaucggaaggacuaaaaguaaccggcugcgcaagggcuuugagaugauuugggaccccaauggguggacaaacaccgacuccgauuucagcguaaaacaggacguggucgcuauaacugauuggucuggauauucagguaguuuugugcagcacccugaacucacaggcuuagacugcauccgaccauguuucuggguugagcuggugagagggcuucccagggaaaacaccacgauuuggaccagcggauccucuaucucguucugcggcgucaauagcgauacagccaacugguccuggccugacggugcagaguugccauuuacuauugauaaguga

SEQ ID NO: 145657 - RNA, 1410 nt, Artificial Sequence; identical to SEQ ID NO: 144647
  derived and/or modified CDS sequence (opt3) from neuraminidase__InfluenzaA__ACZ05953

SEQ ID NO: 145658 - RNA, 1410 nt, Artificial Sequence; identical to SEQ ID NO: 145653
  derived and/or modified CDS sequence (opt3) from neuraminidase__InfluenzaA__ACZ05964

SEQ ID NO: 145659 - RNA, 1410 nt, Artificial Sequence; identical to SEQ ID NO: 144647
  derived and/or modified CDS sequence (opt3) from neuraminidase__InfluenzaA__ACZ05997

SEQ ID NO: 145660 - RNA, 1410 nt, Artificial Sequence; identical to SEQ ID NO: 145653
  derived and/or modified CDS sequence (opt3) from neuraminidase__InfluenzaA__ACZ06008

SEQ ID NO: 145661 - RNA, 1410 nt, Artificial Sequence; identical to SEQ ID NO: 145653
  derived and/or modified CDS sequence (opt3) from neuraminidase__InfluenzaA__ACZ06019

SEQ ID NO: 145662 - RNA, 1413 nt, Artificial Sequence
  derived and/or modified CDS sequence (opt3) from neuraminidase__InfluenzaA__ACZ16015
augaaccccaaucagaagaucauuaccauaggcagcaucuccauugccaucgggauuaucucucugaugcuccaaauaggaaacaucauuucaaucugggcuagucacagcauucagacagguucccagaauaacacuggcaucugcaaucagagaauaauuacguacgagaacucuaccugggugaaucauacauaugucaacaucaauaacacuaauguuguggcaggggaagacaaaaccucgguaacacuugccggaaacucaagccuguguaguauuuccggcugggcgaucuacaccaaggauaauucuaucaggauugguagcaaaggggacguguucgucauacgggagccuuuuaucuccugcucacacuuggaaugucgcacuuucuuuuuaacacaaggagcucugcuaaacgauaagcauaguaauggcaccgugaaagaccgaagcccauaucgugcccucaugucuugcccgcugggcgaggcacccuccccuuacaacucaaaguucgaaagcguugccuggagugcuucugcaugucacgaugggaugggauggcuuacgauugguaucuccggcccagacaacggggccguggcuguccugaaguauaauggaauaauuacuggcaccaucaaaagcuggaagaaacagaucuugagaacacaggagucggagugcguguguaugaacgguucuugcuuuacuauuaugaccgaugggcccuccaauaaggccgcgucauacaaaaucuucaagauugaaaagggaaaaguaaguaagagcauagagcucaacgcaccuaauuuuuauuacgaagaguguuccugcuacccagacacaggcaucguuaugugugugugcagggauaacuggcauggcucuaaucggcccugggucagcuucaaccagaaucuggacuaucaaauuggguacaucugcucaggaguguuuggugauaacccucgcccagaggacggcgaagggaguuguaauccggugaccgucgauggagccaacggcguuaaagguuucuccuauaaguacgggaauggcguguggaucggaagaacgaaaagcaacaggcugcggaagggcuuugagaugauuugggaccccaauggguggacuaacacagacucugauuucucaguaaaacaggacguggucgcuauaaccgauuggaguggauauagcgguuccuuugugcagcacccugaacucacuggcuuagacugcauccgcccauguuucuggguugagcuggugcgagggcuucccagagaaaacacaaccauuuggacgucuggaucgagcaucuccuucugcggcgucaauucagauaccgccaacuggaguuggccugacggugcagaguugccauuuacaauugauaaguga

SEQ ID NO: 145663 - RNA, 1413 nt, Artificial Sequence
  derived and/or modified CDS sequence (opt3) from neuraminidase__InfluenzaA__ACZ16025
augaaccccaaucagaagaucauuaccauaggcagcaucuccauugccaucgggauuaucucucugaugcuccaaauaggaaacaucauuucaaucugggcuagucacagcauucagacagguucccagaauaacacuggcaucugcaaucagagaauaauuacguacgagaacucuaccugggugaaucauacauaugugaacaucaauaacacuaauguuguggcaggggaagacaaaaccucgguaacacuugccggaaacucaagccuguguaguauuuccggcugggcgaucuacaccaaggauaauucuaucaggauugguagcaaaggggacguguucgucauacgggagccuuuuaucuccugcucacacuuggaaugucgcacuuucuuuuuaacacaaggagcucugcuaaacgauaagcauaguaauggcaccauuaaagaccgaagcccauaucgugcccucaugucuugcccgcugggcgaggcacccuccccuuacaacucaaaguucgaaagcguggccuggagugcuucugcaugucacgaugggaugggauggcuuacgaucgguauauccggcccagacaacggggccguugcugugcugaaguauaauggaauuaucacuggcaccaucaaaagcuggaagaaacagauuuugagaacacaggagucggagugcgucuguaugaacgguucuugcuuuacuaucaugaccgaugggcccuccaauaaggccgcgucauacaaaauuuucaagauagaaaagggaaaagugacaaagaguaucgagcucaacgcaccuaauuuuuauuacgaagaguguagcugcuacccagacaccggcauuguaauguguguuugcagggauaacuggcauggcuccaaucggcccugggugucuuucaaccagaaucuggacuaucaaaucggguacaucugcagcggagucuuuggugauaacccucgcccagaggacggcgaagggucauguaauccggugacgguggauggagccaacggcgucaaagguuucaguuauaaguacgggaauggcguuuggauuggaagaacuaaauccaacaggcugcggaagggcuuugagaugauaugggaccccaauggguggacaaacaccgacagcgauuucucugugaaacaggacguaguggcuaucacugauuggucaggauauagugguagcuuuguccagcacccugaacucacaggcuuagacugcauucgcccauguuucuggguggagcugguucgagggcuucccagagaaaacaccacgaucuggaccuccggaucuucgauuagcuucugcggcgucaauuccgauacagccaacuggucauggccugacggugcagaguugccauuuacuaucgauaaguga

SEQ ID NO: 145664 - RNA, 1413 nt, Artificial Sequence; identical to SEQ ID NO: 145509
  derived and/or modified CDS sequence (opt3) from neuraminidase__InfluenzaA__ACZ16035

SEQ ID NO: 145665 - RNA, 1410 nt, Artificial Sequence
  derived and/or modified CDS sequence (opt3) from neuraminidase__InfluenzaA__ACZ16043
augaaccccaaucagaagaucauuaccauaggcagcgugugcaugacaaucgggauggccaaccugauucuccaaaucggaaauauuaucuccauauggaucucucacucaauucagcuugguaaccagaaucagaucgagacuuguaaccaaagugucauuacguacgaaaauaacaccuggguuaaucagacauaugugaacaucagcaauacuaacuucgcugcaggccaguccguagugucugucaaacuggccggaaauucgucauugugcccugugagcgggugggcgauauacaguaaggacaacaauauuagaaucggcuccaaaggugauguuuuugugauuagggagccauucaucucuuguagcccguuagaaugccggaccuuuuuccugacacagggggcucuacucaacgacaagcauuccaacggaaccaucaaagaucgcucacccuaucgaacucugaugaguuguccuauuggcgaggucccaagccccuacaauucucguuuugaauccguggccuggucagcaagcgccugccacgacggcauaaacuggcuuacaaucgggauuaguggaccugauaauggugcuguagcaguucugaaguauaacggcaucauaaccgacacgauuaagucuuggagaaauaacaucuugaggacucaagaguccgagugugccugcgugaaugggagcuguuucaccgucaugacagauggaccaucggacggccaggcuucuuacaaaaucuuucggauugaaaaggguaaaaucgugaaguccguggagaugaacgcccccaauuaucauuacgaagagugcucauguuacccugauaguagcgagauuacuugcgucugccgcgacaacuggcacggguccaauagaccauggguuucuuucaaccagaaucucgaauaucagauaggauacaucuguagcggcauuuuuggcgauaacccgaggcccaaugacaaaaccgggucaugcggaccugugaguuccaacggugcgaacggcguaaagggguucagcuuuaaguauggaaauggcguguggaucggucggacaaaaucuaucucaagucgcaacggguucgagaugauuugggauccaaauggcuggaccggaacggacaacaauuuuagcauaaagcaagacaucgucggcauuaacgaaugguccggguacucuggaucguucgugcagcaucccgagcugacuggucuggauuguauccgaccuugcuucuggguugaacucauuagaggcaggccaaaagagaauacaaucuggaccagcggguccucaauaaguuuuuguggagugaacucugacacugucggcuggagcuggcccgauggugcagaguuaccguucacaaucgacaaguga

SEQ ID NO: 145666 - RNA, 1410 nt, Artificial Sequence
  derived and/or modified CDS sequence (opt3) from neuraminidase__InfluenzaA__ACZ16053
augaaccccaaucagaagaucauuaccauaggcagcgugugcaugacaaucgggauggccaaccugauucuccaaaucggaaauauuaucuccauauggaucucucacucaauucagcuugguaaccagaaucagaucgagacuuguaaccaaagugucauuacguacgaaaauaacaccuggguuaaucagacauaugugaacaucagcaauacuaacuucgcugcaggccaguccguagugucugucaaacuggccggaaauucgucauugugcccugugagcggaugggcgauauacaguaaggacaacuccguuagaauuggcucuaaaggugauguguuugucaucagggagccauucauuagcuguuccccguuagaaugccggaccuuuuuccugacacagggggcucuacucaaugacaagcauucaaacggaaccaucaaagaucgcagucccuaucgaacucugaugagcuguccuaucggcgaggugccaucucccuacaacucccguuuugaaucaguagccuggagcgcaagugccugccacgacggcauuaauuggcuuacaauagggaucucuggaccugauaacggugcuguugcagugcugaaguauaauggcauuaucaccgacacgauaaaguccuggagaaacaauauuuugaggacucaagagagcgagugugccugcgucaacgggucguguuucaccgugaugacagauggaccaucuaauggccaggcuuccuacaaaaucuuucggaucgaaaaggguaaaauugugaagucagucgagaugaacgcccccaauuaucauuacgaagagugcaguuguuacccugacagcuccgagaucacuugcguuugccgcgauaacuggcacgggucuaauagaccaugggugagcuucaaccagaaucucgaauaucagauuggauacauauguucaggcaucuuuggcgacaacccgaggcccaaugauaaaaccgggaguugcggaccuguauccagcaacggugcgaacggcgugaagggguucucuuuuaaguauggaaauggcgucuggauuggucggacaaaaucaaucaguagccgcaacggguucgagaugaucugggacccaaauggcuggaccggaacggauaacaauuuuuccacuaagcaagacauugugggcauaaacgaauggucuggguacucggggagcuucguucagcaucccgagcugacaggucuggacuguauccgaccuugcuucuggguggaacucauuagaggcaggccaaaagagaauaccaucuggacuuccgggucaaguauuucuuuuuguggagucaacagcgauacagugggcugguccuggcccgacggugcagaguuaccguucaccaucgauaaguga

SEQ ID NO: 145667 - RNA, 1410 nt, Artificial Sequence; identical to SEQ ID NO: 144776
  derived and/or modified CDS sequence (opt3) from neuraminidase__InfluenzaA__ACZ16073

SEQ ID NO: 145668 - RNA, 1410 nt, Artificial Sequence
  derived and/or modified CDS sequence (opt3) from neuraminidase__InfluenzaA__ACZ16083
augaaccccaaucagaagaucauuaccauaggcagcgugugcaugacaaucgggauggccaaccugauucuccaaaucggaaauauuaucuccauauggaucucucacucaauucagcuugguaaccagaaucagaucgagacuuguaaccaaagugucauuacguacgaaaauaacaccuggguuaaucagacauaugugaacaucagcaauacuaacuucgcugcaagacaguccguagugucugucaaacuggccggcaauucgucauugugcccugugagcgggugggcgauauacaguaaggacaacuccguuaggauuggaucuaaaggcgauguguuugucauccgggagccauucauuagcuguuccccguuagguugccgcaccuuuuuccugacacagggggcucuacucaaugacaagcauucaaacggaaccaucaaagaucgaagucccuaucguacucugaugagcuguccuaucggcgaagugccaucucccuacaacuccagauuugagucaguagccuggagcgcaagugccugccacgacggcauuaauuggcuuacaauagggaucucuggaccugauaacggugcuguugcagugcugaaguauaauggcauuaucaccgacacgauaaaguccuggaggaacaauauuuugcggacucaagaaagcgagugugccugcgucaacgggucguguuucaccgugaugacagauggaccaucuaauggccaggcuuccuacaaaaucuuucgcaucgagaaggguaaaauugugaagucagucgaaaugaacgcccccaauuaucauuacgaggaaugcaguuguuacccugacagcuccgagaucacuugcguuugcagagauaacuggcacgggucuaauaggccaugggugagcuucaaccagaaucucgaguaucagauuggauacauauguucaggcaucuuuggcgacaacccgcggcccaaugauaaaaccgggaguugcggaccuguauccagcaacggugcgaacggcgugaagggguucucuuuuaaguauggaaauggcgucuggauuggucgcacaaaaucaaucaguagccgaaacggguucgaaaugaucugggacccaaauggcuggaccggaacggauaacaauuuuuccauuaagcaagacauagugggcaucaacgaguggucuggguacucggguagcuucguucagcaucccgaacugacuggacuggacuguauuagaccuugcuucuggaucgagcucauuaggggccggccaaaagaaaauacaaucuggaccuccgggucaaguauaucuuuuuguggagugaacagcgauacugucggcugguccuggcccgacggugcagaguuaccguucacaaucgauaaguga

SEQ ID NO: 145669 - RNA, 1410 nt, Artificial Sequence; identical to SEQ ID NO: 144776
  derived and/or modified CDS sequence (opt3) from neuraminidase__InfluenzaA__ACZ16093

SEQ ID NO: 145670 - RNA, 1410 nt, Artificial Sequence; identical to SEQ ID NO: 144786
  derived and/or modified CDS sequence (opt3) from neuraminidase__InfluenzaA__ACZ16103

SEQ ID NO: 145671 - RNA, 1410 nt, Artificial Sequence; identical to SEQ ID NO: 144786
  derived and/or modified CDS sequence (opt3) from neuraminidase__InfluenzaA__ACZ16113

SEQ ID NO: 145672 - RNA, 1410 nt, Artificial Sequence; identical to SEQ ID NO: 144786
  derived and/or modified CDS sequence (opt3) from neuraminidase__InfluenzaA__ACZ16123

SEQ ID NO: 145673 - RNA, 1410 nt, Artificial Sequence
  derived and/or modified CDS sequence (opt3) from neuraminidase__InfluenzaA__ACZ16133
augaaccccaaucagaagaucauuaccauaggcagcgugugcaugacaaucgggauggccaaccugauucuccaaaucggaaauauuaucuccauauggaucucucacucaauucagcuugguaaccagaaucagaucgagacuuguaaccaaagugucauuacguacgaaaauaacaccuggguuaaucagacauaugugaacaucagcaauacuaacuucgcugcaggccaguccguagugucugucaaacuggccggaaauucgucauugugcccugugagcggaugggcgauauacaguaaggacaacuccauuagaaucggcucuaaaggugauguuuuugugauuagggagccauucaucagcuguuccccguuagaaugccggaccuuuuuccugacacagggggcucuacucaaugacaagcauucaaacggaaccaucaaagaucgcagucccuaucgaacucugaugagcuguccuauuggcgaggucccaucucccuacaacucccguuuugaaucaguggccuggagcgcaagugccugccacgacggcauaaauuggcuuacaaucgggauuucuggaccugauaacggugcuguagcaguucugaaguauaauggcaucauaaccgacacgauuaaguccuggagaaacaauaucuugaggacucaagagagcgagugugccugcgugaacgggucguguuucaccaucaugacagauggaccaucugacggccaggcuuccuacaaaauuuuucggaucgaaaaggguaaaauugucaagucaguggagaugaaugcccccaacuaucauuacgaagagugcaguuguuacccugauagcuccgagauaacuugcgugugccgcgacaauuggcacgggucuaacagaccaugggucagcuucaaucagaaccucgaauaucagaucggauacauuuguucaggcaucuuuggcgauaauccgaggcccaacgacaaaaccgggaguugcggaccuguuuccagcaauggugcgaacggcgugaagggguucucuuuuaaguauggaaacggcguauggaucggucggacaaaaucaauuaguagccgcaauggguucgagaugauaugggauccaaacggcuggaccggaacggacaauaacuuuuccaucaagcaagacauugugggcaucaaugaauggucuggguacucggggagcuucguccagcaucccgagcugacuggucuggauuguauucgaccuugcuucuggguggaacucaucagaggcaggccaaaagagaacacaauauggaccuccgggucaaguaucucuuuuuguggaguuaauagcgacacugugggcugguccuggcccgauggugcagaguuaccguucacaauugacaaguga

SEQ ID NO: 145674 - RNA, 1410 nt, Artificial Sequence
  derived and/or modified CDS sequence (opt3) from neuraminidase__InfluenzaA__ACZ16143
augaaccccaaucagaagaucauuaccauaggcagcgugugcaugacaaucgggauggccaaccugauucuccaaaucggaaauauuaucuccauauggaucucucacucaauucagcuugguaaccagaaucagaucgagacuuguaaccaaagugucauuacguacgaaaauaacaccuggguuaaucagacauaugugaacaucagcaauacuaacuucgcugcaggccaguccguagugucugucaaacuggccggaaauucgucauugugcccugugagcggaugggcgauauacaguaaggacaacuccauuagaaucggcucuaaaggugauguuuuugugauuagggagccauucaucagcuguuccccguuagaaugccggaccuuuuuccugacacagggggcucuacucaaugacaagcauucaaacggaaccaucaaagaucgcagucccuaucgaacucugaugagcuguccuauuggcgaggucccaucucccuacaacucccguuuugaaucaguggccuggagcgcaagugccugccacgacggcauaaauuggcuuacaaucgggauuucuggaccugauaacggugcuguagcaguucugaaguauaauggcaucauaaccgacacgauuaaguccuggagaaacaauaucuugaggacucaagagagcgagugugccugcgugaacgggucguguuucaccgucaugacagauggaccaucugacggccaggcuuccuacaaaaucuuucggauugaaaaggguaaaaucgugaagucaguggagaugaaugcccccaacuaucauuacgaagagugcaguuguuacccugauagcuccgagauuacuugcgucugccgcgacaauuggcacgggucuaacagaccauggguuagcuucaaucagaaccucgaauaucagauaggauacaucuguucaggcauuuuuggcgauaauccgaggcccaacgacaaaaccgggaguugcggaccucuguccagcaauggugcgaacggcgugaagggguucucuuuuaaguauggaaacggcguauggaucggucggacaaaaucaaucaguagccgcaauggguucgagaugauuugggauccaaacggcuggaccggaacggacaauaacuuuuccauaaagcaagacaucgugggcauuaaugaauggucuggguacucggggagcuucguccagcaucccgagcugacuggucucgauuguauccgaccuugcuucuggguggaauuaauuagaggcaggccaaaagagaacacaaucuggaccuccgggucaaguauaucuuuuuguggaguuaauagcgacacugugggcugguccuggcccgauggugcagagcugccguucacaaucgacaaguga

SEQ ID NO: 145675 - RNA, 1410 nt, Artificial Sequence; identical to SEQ ID NO: 144786
  derived and/or modified CDS sequence (opt3) from neuraminidase__InfluenzaA__ACZ16153

SEQ ID NO: 145676 - RNA, 1410 nt, Artificial Sequence; identical to SEQ ID NO: 144786
  derived and/or modified CDS sequence (opt3) from neuraminidase__InfluenzaA__ACZ16163

SEQ ID NO: 145677 - RNA, 1410 nt, Artificial Sequence; identical to SEQ ID NO: 144776
  derived and/or modified CDS sequence (opt3) from neuraminidase__InfluenzaA__ACZ16173

SEQ ID NO: 145678 - RNA, 1410 nt, Artificial Sequence; identical to SEQ ID NO: 144786
  derived and/or modified CDS sequence (opt3) from neuraminidase__InfluenzaA__ACZ16193

SEQ ID NO: 145679 - RNA, 1410 nt, Artificial Sequence; identical to SEQ ID NO: 144786
  derived and/or modified CDS sequence (opt3) from neuraminidase__InfluenzaA__ACZ16203

SEQ ID NO: 145680 - RNA, 1410 nt, Artificial Sequence; identical to SEQ ID NO: 144786
  derived and/or modified CDS sequence (opt3) from neuraminidase__InfluenzaA__ACZ16213

SEQ ID NO: 145681 - RNA, 1410 nt, Artificial Sequence
  derived and/or modified CDS sequence (opt3) from neuraminidase__InfluenzaA__ACZ16223
augaaccccaaucagaagaucauuaccauaggcagcgugugcaugacaaucgggauggccaaccugauucuccaaaucggaaauauuaucuccauauggaucucucacucaauucagcuugguaaccagaaucagaucgagacuuguaaccaaagugucauuacguacgaaaauaacaccuggguuaaucagacauaugugaacaucagcaauacuaacuucgcugcaggccaguccguagugucugucaaacuggccggaaauucgucauugugcccugugagcgggugggcgauauacaguaaggacaacuccauuagaaucggcucuaaaggugauguuuuugugauuagggagccauucaucagcuguuccccguuagaaugccggaccuuuuuccugacacagggggcucuacucaaugacaagcauucaaacgagaccaucaaagaucgcagucccuaucgaacucugaugagcuguccuauuggagaagucccaucucccuacaacucccguuuugagucaguggccuggagcgcaagugccugccacgacggcauaaauuggcuuacaaucggcauuucugggccugauaacggagcuguagcaguucugaaguauaaugguaucauaaccgacacgauuaaguccuggagaaacaauaucuugaggacucaagagagcgaaugugccugcgugaacggcucguguuucaccgucaugacagaugggccaucugacggacaggcuuccuacaaaaucuuucggauugagaagggcaaaaucgugaagucaguggaaaugaaugcccccaacuaucauuacgaggagugcaguuguuacccugauagcuccgaaauuacuugcgucugccgcgacaauuggcacgguucuaacagaccauggguuagcuucaaucagaaccucgaguaucagauaggguacaucuguucaggaauuuuuggcgauaauccgaggcccaacgacaaaaccggcaguugcgggccuguguccagcaauggagcgaacgguguaaagggcuucucuuuuaaguaugggaacggaguguggaucggccggacaaaaucaaucaguagccgcaaugguuucgaaaugauuugggauccaaacggguggaccggcacggacaauaacuuuuccauaaagcaagacaucauuggaaucaaugaguggucuggcuacucggggagcuucguccagcaucccgaacugacuggacuggauuguauucgaccuugcuucuggguggagcucaucagagguaggccaaaagagaacacaauauggaccuccggcucaaguaucucuuuuugugggguuaauagcgacacugugggaugguccuggcccgauggcgcagaauuaccguucacaauugacaaguga

SEQ ID NO: 145682 - RNA, 1410 nt, Artificial Sequence; identical to SEQ ID NO: 144786
  derived and/or modified CDS sequence (opt3) from neuraminidase__InfluenzaA__ACZ16233

SEQ ID NO: 145683 - RNA, 1410 nt, Artificial Sequence; identical to SEQ ID NO: 145494
  derived and/or modified CDS sequence (opt3) from neuraminidase__InfluenzaA__ACZ16243

SEQ ID NO: 145684 - RNA, 1410 nt, Artificial Sequence
  derived and/or modified CDS sequence (opt3) from neuraminidase__InfluenzaA__ACZ16253
augaaccccaaucagaagaucauuaccauaggcagcgugugcaugacaaucgggauggccaaccugauucuccaaaucggaaauauuaucuccauauggaucucucacucaauucagcuugguaaccagaaucagaucgagacuuguaaccaaagugucauuacguacgaaaauaacaccuggguuaaucagacauaugugaacaucagcaauacuaacuucgcugcaggccaguccguagugucugucaaacuggccggaaauucgucauugugcccugugagcggaugggcgauauacaguaaggacaacuccauuagaaucggcucuaaaggugauguuuuugugauuagggagccauucaucagcuguuccccguuagaaugccggaccuuuuuccugacacagggggcucuacucaaugacaagcauucaaacggaaccaucaaagaucgcagucccuaucgaacucugaugagcuguccuauuggcgaggucccaucucccuacaacucccguuuugaaucaguggccuggagcgcaagugccugccacgacggcauaaauuggcuuacaaucgggauuucuggaccugauaacggugcuguagcaguucugaaguauaauggcaucauaaccgacacgauuaaguccuggagaaacaauaucuugaggacucaagagagcgagugugccugcgugaacgggucguguuucaccgucaugacagauggaccaucugacggccaggcuuccuacaaaaucuuucggauugaaaaggguaaaaucgugaagucaguggagaugaaugcccccaacuaucauuacgaagagugcaguuguuacccugauagcuccgagauuacuugcgucugccgcgacaauuggcacgggucuaacagaccauggguuagcuucaaucagaaccucgaauaucagauaggauacaucuguucaggcauuuuuggcgauaauccgaggcccaacgacaaaaccgggaguugcggaccuguguccagcaauggugcgaacggcguaaagggguucucuuuuaaguauggaaacggcguguggaucggucggacaaaaucaaucaguagccgcaauggguucgagaugauuugggauccaaacggcuggaccggaacggacaauaacuuuuccauaaagcaagacaucgucggcauuaaugaauggucuggguacucggggagcuucgugcagcaucccgagcugacuggucuggauuguauccgaccuugcuucuggguugaacucauuagaggcaggccaaaagagaacacaaucuggaccuccgggucaaguauaucuuuuuguggagugaauagcgacacugucggcugguccuggcccgauggugcagaguuaccguucaacaucgacaaguga

SEQ ID NO: 145685 - RNA, 1410 nt, Artificial Sequence; identical to SEQ ID NO: 144786
  derived and/or modified CDS sequence (opt3) from neuraminidase__InfluenzaA__ACZ16263

SEQ ID NO: 145686 - RNA, 1410 nt, Artificial Sequence; identical to SEQ ID NO: 144776
  derived and/or modified CDS sequence (opt3) from neuraminidase__InfluenzaA__ACZ16283

SEQ ID NO: 145687 - RNA, 1410 nt, Artificial Sequence; identical to SEQ ID NO: 144786
  derived and/or modified CDS sequence (opt3) from neuraminidase__InfluenzaA__ACZ16293

SEQ ID NO: 145688 - RNA, 1410 nt, Artificial Sequence; identical to SEQ ID NO: 144786
  derived and/or modified CDS sequence (opt3) from neuraminidase__InfluenzaA__ACZ16303

SEQ ID NO: 145689 - RNA, 1410 nt, Artificial Sequence; identical to SEQ ID NO: 144786
  derived and/or modified CDS sequence (opt3) from neuraminidase__InfluenzaA__ACZ16313

SEQ ID NO: 145690 - RNA, 1410 nt, Artificial Sequence; identical to SEQ ID NO: 144786
  derived and/or modified CDS sequence (opt3) from neuraminidase__InfluenzaA__ACZ16323

SEQ ID NO: 145691 - RNA, 1410 nt, Artificial Sequence; identical to SEQ ID NO: 144786
  derived and/or modified CDS sequence (opt3) from neuraminidase__InfluenzaA__ACZ16333

SEQ ID NO: 145692 - RNA, 1410 nt, Artificial Sequence; identical to SEQ ID NO: 145494
  derived and/or modified CDS sequence (opt3) from neuraminidase__InfluenzaA__ACZ16343

SEQ ID NO: 145693 - RNA, 1410 nt, Artificial Sequence; identical to SEQ ID NO: 144786
  derived and/or modified CDS sequence (opt3) from neuraminidase__InfluenzaA__ACZ16353

SEQ ID NO: 145694 - RNA, 1410 nt, Artificial Sequence; identical to SEQ ID NO: 144786
  derived and/or modified CDS sequence (opt3) from neuraminidase__InfluenzaA__ACZ16363

SEQ ID NO: 145695 - RNA, 1410 nt, Artificial Sequence; identical to SEQ ID NO: 144776
  derived and/or modified CDS sequence (opt3) from neuraminidase__InfluenzaA__ACZ16373

SEQ ID NO: 145696 - RNA, 1410 nt, Artificial Sequence; identical to SEQ ID NO: 144786
  derived and/or modified CDS sequence (opt3) from neuraminidase__InfluenzaA__ACZ16383

SEQ ID NO: 145697 - RNA, 1410 nt, Artificial Sequence; identical to SEQ ID NO: 144786
  derived and/or modified CDS sequence (opt3) from neuraminidase__InfluenzaA__ACZ16393

SEQ ID NO: 145698 - RNA, 1410 nt, Artificial Sequence; identical to SEQ ID NO: 144786
  derived and/or modified CDS sequence (opt3) from neuraminidase__InfluenzaA__ACZ16403

SEQ ID NO: 145699 - RNA, 1410 nt, Artificial Sequence; identical to SEQ ID NO: 144786
  derived and/or modified CDS sequence (opt3) from neuraminidase__InfluenzaA__ACZ16423

SEQ ID NO: 145700 - RNA, 1410 nt, Artificial Sequence; identical to SEQ ID NO: 144786
  derived and/or modified CDS sequence (opt3) from neuraminidase__InfluenzaA__ACZ16433

SEQ ID NO: 145701 - RNA, 1410 nt, Artificial Sequence; identical to SEQ ID NO: 144786
  derived and/or modified CDS sequence (opt3) from neuraminidase__InfluenzaA__ACZ16443

SEQ ID NO: 145702 - RNA, 1410 nt, Artificial Sequence; identical to SEQ ID NO: 144786
  derived and/or modified CDS sequence (opt3) from neuraminidase__InfluenzaA__ACZ16453

SEQ ID NO: 145703 - RNA, 1410 nt, Artificial Sequence; identical to SEQ ID NO: 145494
  derived and/or modified CDS sequence (opt3) from neuraminidase__InfluenzaA__ACZ16463

SEQ ID NO: 145704 - RNA, 1410 nt, Artificial Sequence; identical to SEQ ID NO: 144786
  derived and/or modified CDS sequence (opt3) from neuraminidase__InfluenzaA__ACZ16483

SEQ ID NO: 145705 - RNA, 1410 nt, Artificial Sequence; identical to SEQ ID NO: 144786
  derived and/or modified CDS sequence (opt3) from neuraminidase__InfluenzaA__ACZ16493

SEQ ID NO: 145706 - RNA, 1410 nt, Artificial Sequence
  derived and/or modified CDS sequence (opt3) from neuraminidase__InfluenzaA__ACZ16503
augaaccccaaucagaagaucauuaccauaggcagcgugugcaugacaaucgggauggccaaccugauucuccaaaucggaaauauuaucuccauauggaucucucacucaauucagcuugguaaccagaaucagaucgagacuuguaaccaaagugucauuacguacgaaaauaacaccuggguuaaucagacauaugugaacaucagcaauacuaacuucgcugcaggccaguccguagugucugucaaacuggccggaaauucgucauugugcccugugagcggaugggcgauauacaguaaggacaacuccauuagaaucggcucuaaaggugauguuuuugugauuagggagccauucaucagcuguuccccguuagaaugccggaccuuuuuccugacacagggggcucuacucaaugacaagcauucaaacggaaccaucaaagaucgcagucccuaucgaacucugaugagcuguccuauuggcgaggucccaucucccuacaacucccguuuugaaucaguggccuggagcgcaagugccugccacgacggcauaaauuggcuuacaaucgggauuucuggaccugauaacggugcuguagcaguucugaaguauaauggcaucauaaccgacacgauuaaguccuggagaaacaauaucuugaggacucaagagagcgagugugccugcgugaacgggucguguuucaccgucaugacagauggaccaucugacggccaggcuuccuacaaaaucuuucggauugaaaaggguaaaaucgugaagucaguggagauggaugcccccaauuaucauuacgaagagugcaguuguuacccugacagcuccgagauuacuugcgucugccgcgauaacuggcacgggucuaauagaccauggguuagcuucaaccagaaucucgaauaucagauaggauacaucuguucaggcauuuuuggcgacaacccgaggcccaaugauaaaaccgggaguugcggaccuguguccagcaacggugcgaauggcguaaagggguucucuuuuaaguauggaaacggcguguggaucggucggacaaaaucaaucaguagccgcaacggguucgagaugauuugggacccaaauggcuggaccggaacggacaacaauuuuuccauaaagcaagauaucgucggcauuaacgaauggucuggguacucggggagcuucgugcagcaucccgagcugacuggucuggacuguauccgaccuugcuucuggguugaacucauuagaggcaggccaaaagagaauacaaucuggaccuccgggucaaguauaucuuuuuguggagugaacagcgauacugucggcugguccuggcccgacggugcagaguuaccguucacaaucgauaaguga

SEQ ID NO: 145707 - RNA, 1410 nt, Artificial Sequence; identical to SEQ ID NO: 145494
  derived and/or modified CDS sequence (opt3) from neuraminidase__InfluenzaA__ACZ16513

SEQ ID NO: 145708 - RNA, 1410 nt, Artificial Sequence; identical to SEQ ID NO: 144786
  derived and/or modified CDS sequence (opt3) from neuraminidase__InfluenzaA__ACZ16523

SEQ ID NO: 145709 - RNA, 1410 nt, Artificial Sequence; identical to SEQ ID NO: 144786
  derived and/or modified CDS sequence (opt3) from neuraminidase__InfluenzaA__ACZ16533

SEQ ID NO: 145710 - RNA, 1410 nt, Artificial Sequence; identical to SEQ ID NO: 144776
  derived and/or modified CDS sequence (opt3) from neuraminidase__InfluenzaA__ACZ16543

SEQ ID NO: 145711 - RNA, 1410 nt, Artificial Sequence; identical to SEQ ID NO: 144786
  derived and/or modified CDS sequence (opt3) from neuraminidase__InfluenzaA__ACZ16553

SEQ ID NO: 145712 - RNA, 1410 nt, Artificial Sequence; identical to SEQ ID NO: 144786
  derived and/or modified CDS sequence (opt3) from neuraminidase__InfluenzaA__ACZ16586

SEQ ID NO: 145713 - RNA, 1410 nt, Artificial Sequence; identical to SEQ ID NO: 144786
  derived and/or modified CDS sequence (opt3) from neuraminidase__InfluenzaA__ACZ16596

SEQ ID NO: 145714 - RNA, 1410 nt, Artificial Sequence; identical to SEQ ID NO: 144786
  derived and/or modified CDS sequence (opt3) from neuraminidase__InfluenzaA__ACZ16606

SEQ ID NO: 145715 - RNA, 1410 nt, Artificial Sequence; identical to SEQ ID NO: 144786
  derived and/or modified CDS sequence (opt3) from neuraminidase__InfluenzaA__ACZ16633

SEQ ID NO: 145716 - RNA, 1410 nt, Artificial Sequence
  derived and/or modified CDS sequence (opt3) from neuraminidase__InfluenzaA__ACZ16643
augaaccccaaucagaagaucauuaccauaggcagcgugugcaugacaaucgggauggccaaccugauucuccaaaucggaaauauuaucuccauauggaucucucacucaauucagcuugguaaccagaaucagaucgagacuuguaaccaaagugucauuacguacgaaaauaacaccuggguuaaucagacauaugugaacaucagcaauacuaacuucgcugcaggccaguccguagugucugucaaacuggccggaaauucgucauugugcccugugagcggaugggcgauauacaguaaggacaacuccauuagaaucggcucuaaaggugauguuuuugugauuagggagccauucaucagcuguuccccguuagaaugccggaccuuuuuccugacacagggggcucuacucaaugacaagcauucaaacggaaccaucaaagaucgcagucccuaucgaacucugaugagcuguccuauuggcgaggucccaucucccuacaacucccguuuugaaucaguggccuggagcgcaagugccugccacgacggcauaaauuggcuuacaaucgggauuucuggaccugauaacggugcuguagcaguucugagauauaauggcaucauaaccgacacgauuaaguccuggaggaacaauaucuugcggacucaagagagcgagugugccugcgugaacgggucguguuucaccgucaugacagauggaccaucugacggccaggcuuccuacaagaucuuucgcauugaaaaagguaagaucgugaaaucaguggagaugaaugcccccaacuaucauuacgaagagugcaguuguuacccugauagcuccgagauuacuugcgucugcagagacaauuggcacgggucuaacaggccauggguuagcuucaaucagaaccucgaauaucagauaggauacaucuguucaggcauuuuuggcgauaauccgcggcccaacgacaagaccgggaguugcggaccuguguccagcaauggugcgaacggcguaaaaggguucucuuuuaaguauggaaacggcguguggaucggucgcacaaagucaaucaguagccgaaauggguucgagaugauuugggauccaaacggcuggaccggaacggacaauaacuuuuccauaaaacaagacaucgucggcauuaaugaauggucuggguacucggggagcuucgugcagcaucccgagcugacuggucuggauuguaucagaccuugcuucuggguugaacucauuaggggccggccaaaggagaacacaaucuggaccuccgggucaaguauaucuuuuuguggagugaauagcgacacugucggcugguccuggcccgauggugcagaguuaccguucacaaucgacaaauga

SEQ ID NO: 145717 - RNA, 1410 nt, Artificial Sequence; identical to SEQ ID NO: 144786
  derived and/or modified CDS sequence (opt3) from neuraminidase__InfluenzaA__ACZ16653

SEQ ID NO: 145718 - RNA, 1410 nt, Artificial Sequence; identical to SEQ ID NO: 144786
  derived and/or modified CDS sequence (opt3) from neuraminidase__InfluenzaA__ACZ16663

SEQ ID NO: 145719 - RNA, 1410 nt, Artificial Sequence; identical to SEQ ID NO: 144786
  derived and/or modified CDS sequence (opt3) from neuraminidase__InfluenzaA__ACZ16673

SEQ ID NO: 145720 - RNA, 1410 nt, Artificial Sequence; identical to SEQ ID NO: 144786
  derived and/or modified CDS sequence (opt3) from neuraminidase__InfluenzaA__ACZ16683

SEQ ID NO: 145721 - RNA, 1410 nt, Artificial Sequence; identical to SEQ ID NO: 144786
  derived and/or modified CDS sequence (opt3) from neuraminidase__InfluenzaA__ACZ16693

SEQ ID NO: 145722 - RNA, 1410 nt, Artificial Sequence; identical to SEQ ID NO: 144786
  derived and/or modified CDS sequence (opt3) from neuraminidase__InfluenzaA__ACZ16703

SEQ ID NO: 145723 - RNA, 1410 nt, Artificial Sequence; identical to SEQ ID NO: 144786
  derived and/or modified CDS sequence (opt3) from neuraminidase__InfluenzaA__ACZ16713

SEQ ID NO: 145724 - RNA, 1410 nt, Artificial Sequence; identical to SEQ ID NO: 144786
  derived and/or modified CDS sequence (opt3) from neuraminidase__InfluenzaA__ACZ16723

SEQ ID NO: 145725 - RNA, 1410 nt, Artificial Sequence; identical to SEQ ID NO: 144786
  derived and/or modified CDS sequence (opt3) from neuraminidase__InfluenzaA__ACZ16733

SEQ ID NO: 145726 - RNA, 1410 nt, Artificial Sequence; identical to SEQ ID NO: 144786
  derived and/or modified CDS sequence (opt3) from neuraminidase__InfluenzaA__ACZ16743

SEQ ID NO: 145727 - RNA, 1410 nt, Artificial Sequence; identical to SEQ ID NO: 144786
  derived and/or modified CDS sequence (opt3) from neuraminidase__InfluenzaA__ACZ16753

SEQ ID NO: 145728 - RNA, 1410 nt, Artificial Sequence; identical to SEQ ID NO: 144786
  derived and/or modified CDS sequence (opt3) from neuraminidase__InfluenzaA__ACZ16763

SEQ ID NO: 145729 - RNA, 1410 nt, Artificial Sequence; identical to SEQ ID NO: 144776
  derived and/or modified CDS sequence (opt3) from neuraminidase__InfluenzaA__ACZ16773

SEQ ID NO: 145730 - RNA, 1410 nt, Artificial Sequence; identical to SEQ ID NO: 144786
  derived and/or modified CDS sequence (opt3) from neuraminidase__InfluenzaA__ACZ16783

SEQ ID NO: 145731 - RNA, 1410 nt, Artificial Sequence; identical to SEQ ID NO: 144786
  derived and/or modified CDS sequence (opt3) from neuraminidase__InfluenzaA__ACZ16793

SEQ ID NO: 145732 - RNA, 1410 nt, Artificial Sequence; identical to SEQ ID NO: 144786
  derived and/or modified CDS sequence (opt3) from neuraminidase__InfluenzaA__ACZ16803

SEQ ID NO: 145733 - RNA, 1410 nt, Artificial Sequence; identical to SEQ ID NO: 144786
  derived and/or modified CDS sequence (opt3) from neuraminidase__InfluenzaA__ACZ16813

SEQ ID NO: 145734 - RNA, 1410 nt, Artificial Sequence; identical to SEQ ID NO: 144776
  derived and/or modified CDS sequence (opt3) from neuraminidase__InfluenzaA__ACZ16823

SEQ ID NO: 145735 - RNA, 1410 nt, Artificial Sequence; identical to SEQ ID NO: 144786
  derived and/or modified CDS sequence (opt3) from neuraminidase__InfluenzaA__ACZ16833

SEQ ID NO: 145736 - RNA, 1410 nt, Artificial Sequence; identical to SEQ ID NO: 144786
  derived and/or modified CDS sequence (opt3) from neuraminidase__InfluenzaA__ACZ16843

SEQ ID NO: 145737 - RNA, 1410 nt, Artificial Sequence; identical to SEQ ID NO: 145706
  derived and/or modified CDS sequence (opt3) from neuraminidase__InfluenzaA__ACZ16853

SEQ ID NO: 145738 - RNA, 1410 nt, Artificial Sequence; identical to SEQ ID NO: 144786
  derived and/or modified CDS sequence (opt3) from neuraminidase__InfluenzaA__ACZ16863

SEQ ID NO: 145739 - RNA, 1410 nt, Artificial Sequence; identical to SEQ ID NO: 144786
  derived and/or modified CDS sequence (opt3) from neuraminidase__InfluenzaA__ACZ16873

SEQ ID NO: 145740 - RNA, 1410 nt, Artificial Sequence; identical to SEQ ID NO: 144786
  derived and/or modified CDS sequence (opt3) from neuraminidase__InfluenzaA__ACZ16883

SEQ ID NO: 145741 - RNA, 1410 nt, Artificial Sequence; identical to SEQ ID NO: 144786
  derived and/or modified CDS sequence (opt3) from neuraminidase__InfluenzaA__ACZ16893

SEQ ID NO: 145742 - RNA, 1410 nt, Artificial Sequence; identical to SEQ ID NO: 144786
  derived and/or modified CDS sequence (opt3) from neuraminidase__InfluenzaA__ACZ16903

SEQ ID NO: 145743 - RNA, 1410 nt, Artificial Sequence; identical to SEQ ID NO: 144786
  derived and/or modified CDS sequence (opt3) from neuraminidase__InfluenzaA__ACZ16913

SEQ ID NO: 145744 - RNA, 1410 nt, Artificial Sequence; identical to SEQ ID NO: 144786
  derived and/or modified CDS sequence (opt3) from neuraminidase__InfluenzaA__ACZ16923

SEQ ID NO: 145745 - RNA, 1410 nt, Artificial Sequence; identical to SEQ ID NO: 144786
  derived and/or modified CDS sequence (opt3) from neuraminidase__InfluenzaA__ACZ16933

SEQ ID NO: 145746 - RNA, 1410 nt, Artificial Sequence; identical to SEQ ID NO: 144786
  derived and/or modified CDS sequence (opt3) from neuraminidase__InfluenzaA__ACZ16943

SEQ ID NO: 145747 - RNA, 1410 nt, Artificial Sequence; identical to SEQ ID NO: 144776
  derived and/or modified CDS sequence (opt3) from neuraminidase__InfluenzaA__ACZ16953

SEQ ID NO: 145748 - RNA, 1410 nt, Artificial Sequence; identical to SEQ ID NO: 144786
  derived and/or modified CDS sequence (opt3) from neuraminidase__InfluenzaA__ACZ16963

SEQ ID NO: 145749 - RNA, 1410 nt, Artificial Sequence; identical to SEQ ID NO: 144786
  derived and/or modified CDS sequence (opt3) from neuraminidase__InfluenzaA__ACZ16973

SEQ ID NO: 145750 - RNA, 1410 nt, Artificial Sequence; identical to SEQ ID NO: 144786
  derived and/or modified CDS sequence (opt3) from neuraminidase__InfluenzaA__ACZ16983

SEQ ID NO: 145751 - RNA, 1410 nt, Artificial Sequence; identical to SEQ ID NO: 144786
  derived and/or modified CDS sequence (opt3) from neuraminidase__InfluenzaA__ACZ16993

SEQ ID NO: 145752 - RNA, 1410 nt, Artificial Sequence; identical to SEQ ID NO: 144786
  derived and/or modified CDS sequence (opt3) from neuraminidase__InfluenzaA__ACZ17003

SEQ ID NO: 145753 - RNA, 1410 nt, Artificial Sequence; identical to SEQ ID NO: 144786
  derived and/or modified CDS sequence (opt3) from neuraminidase__InfluenzaA__ACZ17023

SEQ ID NO: 145754 - RNA, 1410 nt, Artificial Sequence; identical to SEQ ID NO: 144786
  derived and/or modified CDS sequence (opt3) from neuraminidase__InfluenzaA__ACZ17043

SEQ ID NO: 145755 - RNA, 1410 nt, Artificial Sequence; identical to SEQ ID NO: 144786
  derived and/or modified CDS sequence (opt3) from neuraminidase__InfluenzaA__ACZ17053

SEQ ID NO: 145756 - RNA, 1410 nt, Artificial Sequence
  derived and/or modified CDS sequence (opt3) from neuraminidase__InfluenzaA__ACZ17063
augaaccccaaucagaagaucauuaccauaggcagcgugugcaugacaaucgggauggccaaccugauucuccaaaucggaaauauuaucuccauauggaucucucacucaauucagcuuggugaccagaaccagaucgagacuuguaaucaaagugucauuacguacgaaaacaauaccuggguuaaccagacauaugugaauaucagcaacacuaauuucgcugcaggccaguccguagugucugucaaacuggccgggaacucgucauugugcccugugagcggaugggcgauauacaguaaggauaauuccauuagaaucggcucuaaaggugacguuuuugugauuagggagccauucaucagcuguuccccguuagaaugccggaccuuuuuccugacacagggggcucuacucaacgauaagcauucaaauggaaccaucaaagaccgcagucccuaucgaacucugaugagcuguccuauuggcgaggucccaucucccuacaacucccguuuugaaucaguggccuggagcgcaagugccugccacgauggcauaaacuggcuuacaaucgggauuucuggaccugacaauggugcuguagcaguucugaaguauaacggcaucauaaccgauacgauuaaguccuggagaaauaacaucuugaggacucaagagagcgagugugccugcgugaaugggucguguuucaccgucaugacagacggaccaucugauggccaggcuuccuacaaaaucuuucggauugaaaaggguaaaaucgugaagucaguggagaugaacgcccccaauuaucauuacgaagagugcaguuguuacccugacagcuccgagauuacuugcgucugccgcgauaacuggcacgggucuaauagaccauggguuagcuucaaccagaaucucgaauaucagauaggauacaucuguucaggcauuuuuggcgacaacccgaggcccaaugauaaaaccgggaguugcggaccuguguccagcaacggugcgaauggcguaaagggguucucuuuuaaguauggaaacggcguguggaucggucggacaaaaucaaucaguagccgcaacggguucgagaugauuugggacccaaauggcuggaccggaacggacaacaauuuuuccauaaagcaagauaucgucggcauuaacgaauggucuggguacucggguagcuucgugcagcaucccgagcugacuggacuggacuguauccgaccuugcuucuggguugaacucauuagaggcaggccaaaagagaauacaaucuggaccuccgggucaaguauaucuuuuuguggagugaacagcgauacugucggcugguccuggcccgacggugcagaguuaccguucacaaucgauaaguga

SEQ ID NO: 145757 - RNA, 1410 nt, Artificial Sequence; identical to SEQ ID NO: 144786
  derived and/or modified CDS sequence (opt3) from neuraminidase__InfluenzaA__ACZ17073

SEQ ID NO: 145758 - RNA, 1410 nt, Artificial Sequence; identical to SEQ ID NO: 145494
  derived and/or modified CDS sequence (opt3) from neuraminidase__InfluenzaA__ACZ17083

SEQ ID NO: 145759 - RNA, 1410 nt, Artificial Sequence
  derived and/or modified CDS sequence (opt3) from neuraminidase__InfluenzaA__ACZ17093
augaaccccaaucagaagaucauuaccauaggcagcgugugcaugacaaucgggauggccaaccugauucuccaaaucggaaauauuaucuccauauggaucucucacucaauucagcuugguaaccagaaucagaucgagacuuguaaccaaagugucauuacguacgaaaauaacaccuggguuaaucagacauaugugaacaucagcaauacuaacuucgcugcaggccaguccguagugucugucaaacuggccggaaauucgucauugugcccugugagcggaugggcgauauacaguaaggacaacuccauuagaaucggcucuaaaggugauguuuuugugauuagggagccauucaucagcuguuccccguuugaaugccggaccuucuuuuuaacacagggggcucugcuaaaugacaagcauucaaacggaaccaucaaagaucgcagucccuaucgaacucucaugagcuguccuauuggcgaggucccaucucccuacaacucccguuucgaaucaguggccuggagcgcaagugccugccacgacggcauaaauuggcugacaaucgggauuucuggaccugauaacggugcuguagcaguucuuaaguauaauggcaucauaaccgacacgauuaaguccuggagaaacaauauccugaggacucaagagagcgagugugccugcgugaacgggucguguuuuaccgucaugacagauggaccaucugacggccaggcuuccuacaaaaucuuccggauugaaaaggguaaaaucgugaagucaguggagaugaaugcccccaacuaucauuacgaagagugcaguuguuacccugauagcuccgagauuacuugcgucugccgcgacaauuggcacgggucuaacagaccauggguuagcuuuaaucagaacuuggaauaucagauaggauacaucuguucaggcauuuucggcgauaauccgaggcccaacgacaaaaccgggaguugcggaccuguguccagcaauggugcgaacggcguaaagggguuuucuuucaaguauggaaacggcguguggaucggucggacaaaaucaaucaguagccgcaauggguuugagaugauuugggauccaaacggcuggaccggaacggacaauaacuucuccauaaagcaagacaucgucggcauuaaugaauggucuggguacucggggagcuucgugcagcaucccgagcucacuggucuggauuguauccgaccuugcuuuuggguugaacugauuagaggcaggccaaaagagaacacaaucuggaccuccgggucaaguauaucuuucuguggagugaauagcgacacugucggcugguccuggcccgauggugcagagcucccguuuacaaucgacaaguga

SEQ ID NO: 145760 - RNA, 1410 nt, Artificial Sequence
  derived and/or modified CDS sequence (opt3) from neuraminidase__InfluenzaA__ACZ17113
augaaccccaaucagaagaucauuaccauaggcagcgugugcaugacaaucgggauggccaaccugauucuccaaaucggaaauauuaucuccauauggaucucucacucaauucagcuugguaaccagaaucagaucgagacuuguaaccaaagugucauuacguacgaaaauaacaccuggguuaaucagacauaugugaacaucagcaauacuaacuucgcugcaggccaguccguagugucugucaaacuggccggaaauucgucauugugcccugugaacgggugggcgauauacagcaaggacaauaguauuagaaucggcuccaaaggugauguuuuugugauuagggagccauucaucucuuguagcccguuagaaugccggaccuuuuuccugacacagggggcucuacucaacgacaagcauuccaacggaaccaucaaagaucgcucacccuaucgaacucugaugaguuguccuauuggcgaggucccaagccccuacaauucucguuuugaauccguggccuggucagcaagcgccugccacgacggcauaaacuggcuuacaaucgggauuaguggaccugauaauggugcuguagcaguucugaaguauaacggcaucauaaccgacacgauuaagucuuggagaaauaacaucuugaggacucaagaguccgagugugccugcgugaaugggagcuguuucaccgucaugacagauggaccaucggacggccaggcuucuuacaaaaucuuucggauugaaaaggguaaaaucgugaaguccguggagaugaacgcccccaauuaucauuacgaagagugcucauguuacccugauaguagcgagauuacuugcgucugccgcgacaacuggcacggguccaauagaccauggguuucuuucaaccagaaucucgaauaucagauaggauacaucuguagcggcauuuuuggcgauaacccgaggcccaaugacaaaaccgggucaugcggaccugugaguuccaacggugcgaacggcguaaagggguucagcuuuaaguauggaaauggcguguggaucggucggacaaaaucuaucucaagucgcaacggguucgagaugauuugggauccaaauggcuggaccggaacggacaacaauuuuagcauaaagcaagacaucgucggcauuaacgaaugguccggguacucuggaucguucgugcagcaucccgagcugacuggucuggauuguauccgaccuugcuucuggguugaacucauuagaggcaggccaaaagagaauacaaucuggaccagcggguccucaauaaguuuuuguggagugaacucugacacugucggcuggagcuggcccgauggugcagaguuaccguucacaaucgacaaguga

SEQ ID NO: 145761 - RNA, 1410 nt, Artificial Sequence; identical to SEQ ID NO: 144786
  derived and/or modified CDS sequence (opt3) from neuraminidase__InfluenzaA__ACZ17123

SEQ ID NO: 145762 - RNA, 1410 nt, Artificial Sequence; identical to SEQ ID NO: 144786
  derived and/or modified CDS sequence (opt3) from neuraminidase__InfluenzaA__ACZ17133

SEQ ID NO: 145763 - RNA, 1410 nt, Artificial Sequence
  derived and/or modified CDS sequence (opt3) from neuraminidase__InfluenzaA__ACZ17163
augaaccccaaucagaagaucauuaccauaggcagcgugugcaugacaaucgggauggccaaccugauucuccaaaucggaaauauuaucuccauauggaucucucacucaauucagcuugguaaccagaaucagaucgagacuuguaaccaaagugucauuacguacgaaaauaacaccuggguuaaucagacauaugugaacaucagcaauacuaacuucgcugcaggccaguccguagugucugucaaacuggccggaaauucgucauugugcccugugagcggaugggcgauauacaguaaggacaacuccauuagaaucggcucuaaaggugauguuuuugugauuagggagccauucaucagcuguuccccguuagaaugccggaccuuuuuccugacacagggggcucuacucaaugacaagcauucaaacggaaccaucaaagaucgcagucccuaucgaacucugaugagcuguccuauuggcgaggucccaucucccuacaacucccguuuugaaucaguggccuggagcgcaagugccugccacgacggcauaaauuggcuuacaaucgggauuucuggaccugauaacggugcuguagcaguucugaaguauaauggcaucauaaccgacacgauuaaguccuggagaaacaauaucuugaggacucaagagagcgagugugccugcgugaacgggucguguuucaccgucaugacagauggaccaucugacggccaggcuuccuacaaaaucuuucggauugaaaaggguaaaaucgugaagucaguggagaugaaugcccccaacuaucauuacgaagagugcaguuguuacccugauagcuccgagauuacuugcgucugccgcgacaauuggcacgggucuaacagaccauggguuagcuucaauaggaaccucgaauaucagauaggauacaucuguucaggcauuuuuggcgauaauccgcggcccaacgacaaaaccgggaguugcggaccuguguccagcaauggugcgaacggcguaaagggguucucuuuuaaguauggaaacggcguguggaucggucgcacaaaaucaaucaguagccgaaauggguucgagaugauuugggauccaaacggcuggaccggaacggacaauaacuuuuccauaaagcaggacaucgucggcauuaaugaauggucuggguacucggggagcuucgugcaacaucccgagcugacuggucuggauuguaucagaccuugcuucuggguugaacucauuaggggccggccaaaagagaacacaaucuggaccuccgggucaaguauaucuuuuuguggagugaauagcgacacugucggcugguccuggcccgauggugcagaguuaccguucacaaucgacaaguga

SEQ ID NO: 145764 - RNA, 1410 nt, Artificial Sequence; identical to SEQ ID NO: 145763
  derived and/or modified CDS sequence (opt3) from neuraminidase__InfluenzaA__ACZ17173

SEQ ID NO: 145765 - RNA, 1410 nt, Artificial Sequence; identical to SEQ ID NO: 145763
  derived and/or modified CDS sequence (opt3) from neuraminidase__InfluenzaA__ACZ17183

SEQ ID NO: 145766 - RNA, 1410 nt, Artificial Sequence; identical to SEQ ID NO: 145763
  derived and/or modified CDS sequence (opt3) from neuraminidase__InfluenzaA__ACZ17193

SEQ ID NO: 145767 - RNA, 1410 nt, Artificial Sequence; identical to SEQ ID NO: 145763
  derived and/or modified CDS sequence (opt3) from neuraminidase__InfluenzaA__ACZ17203

SEQ ID NO: 145768 - RNA, 1410 nt, Artificial Sequence; identical to SEQ ID NO: 144786
  derived and/or modified CDS sequence (opt3) from neuraminidase__InfluenzaA__ACZ17213

SEQ ID NO: 145769 - RNA, 1410 nt, Artificial Sequence; identical to SEQ ID NO: 144786
  derived and/or modified CDS sequence (opt3) from neuraminidase__InfluenzaA__ACZ17223

SEQ ID NO: 145770 - RNA, 1410 nt, Artificial Sequence; identical to SEQ ID NO: 144786
  derived and/or modified CDS sequence (opt3) from neuraminidase__InfluenzaA__ACZ17233

SEQ ID NO: 145771 - RNA, 1410 nt, Artificial Sequence; identical to SEQ ID NO: 144786
  derived and/or modified CDS sequence (opt3) from neuraminidase__InfluenzaA__ACZ17243

SEQ ID NO: 145772 - RNA, 1410 nt, Artificial Sequence; identical to SEQ ID NO: 144786
  derived and/or modified CDS sequence (opt3) from neuraminidase__InfluenzaA__ACZ17263

SEQ ID NO: 145773 - RNA, 1410 nt, Artificial Sequence
  derived and/or modified CDS sequence (opt3) from neuraminidase__InfluenzaA__ACZ17273
augaaccccaaucagaagaucauuaccauaggcagcgugugcaugacaaucgggauggccaaccugauucuccaaaucggaaauauuaucuccauauggaucucucacucaauucagcuugguaaccagaaucagaucgagacuuguaaccaaagugucauuacguacgaaaauaacaccuggguuaaucagacauaugugaacaucagcaauacuaacuucgcugcaggccaguccguagugucugucaaacuggccggaaauucgucauugugcccugugagcgggugggcgauauacaguaaggacaacuccauuagaaucggcucuaaaggugauguuuuugugauuagggagccauucaucagcuguuccccguuagaaugccggaccuuuuuccugacacagggggcucuacucaaugacaagcauucaaacggaaccaucaaagaucgcagucccuaucgaacucugaugagcuguccuauuggcgaggucccaucucccuacaacucccguuuugaaucaguggccuggagcgcaagugccugccacgacggcuucaauuggcuuacaauagggaucucuggaccugauaacggugcuguagcaguucugaaguauaauggcauuaucaccgacacgauaaaguccuggagaaacaauauuuugaggacucaagagagcgagugugccugcgugaacgggucguguuuuaccgucaugacagauggaccaucugacggccaggcuuccuacaaaaucuuccggaucgaaaaggguaaaauugugaagucaguggagaugaaugcccccaacuaucauuacgaagagugcaguuguuacccugauagcuccgagaucacuugcgucugccgcgacaauuggcacgggucuaacagaccauggguuagcuuuaaucagaaccucgaauaucagauuggauacauauguucaggcaucuucggcgauaauccgaggcccaacgacaaaaccgggaguugcggaccugugcuguccaauggugcgaacggcguaaagggguuuagcuucaaguauggaaacggcguguggauuggucggacaaaaucuaucucaagucgcaauggguuugagaugaucugggauccaaacggcuggaccggaacggacaauaacuucagcauuaagcaagacauagucggcaucaaugaaugguccggguacucuggaucguucgugcagcaucccgagcugacuggucucgauuguauucgaccuugcuuuuggguugaauuaaucagaggcaggccaaaagagaacacaauuuggaccagcggguccucaaucaguuucuguggagucaauucugacacugugggcuggagcuggcccgauggugcagagcugccguuuacaauagacaaguga

SEQ ID NO: 145774 - RNA, 1410 nt, Artificial Sequence; identical to SEQ ID NO: 144786
  derived and/or modified CDS sequence (opt3) from neuraminidase__InfluenzaA__ACZ17283

SEQ ID NO: 145775 - RNA, 1410 nt, Artificial Sequence; identical to SEQ ID NO: 144816
  derived and/or modified CDS sequence (opt3) from neuraminidase__InfluenzaA__ACZ17293

SEQ ID NO: 145776 - RNA, 1410 nt, Artificial Sequence; identical to SEQ ID NO: 144816
  derived and/or modified CDS sequence (opt3) from neuraminidase__InfluenzaA__ACZ17303

SEQ ID NO: 145777 - RNA, 1410 nt, Artificial Sequence; identical to SEQ ID NO: 144816
  derived and/or modified CDS sequence (opt3) from neuraminidase__InfluenzaA__ACZ17313

SEQ ID NO: 145778 - RNA, 1410 nt, Artificial Sequence; identical to SEQ ID NO: 144786
  derived and/or modified CDS sequence (opt3) from neuraminidase__InfluenzaA__ACZ17401

SEQ ID NO: 145779 - RNA, 1410 nt, Artificial Sequence; identical to SEQ ID NO: 144786
  derived and/or modified CDS sequence (opt3) from neuraminidase__InfluenzaA__ACZ17411

SEQ ID NO: 145780 - RNA, 1410 nt, Artificial Sequence; identical to SEQ ID NO: 144786
  derived and/or modified CDS sequence (opt3) from neuraminidase__InfluenzaA__ACZ17421

SEQ ID NO: 145781 - RNA, 1410 nt, Artificial Sequence
  derived and/or modified CDS sequence (opt3) from neuraminidase__InfluenzaA__ACZ17431
augaaccccaaucagaagaucauuaccauaggcagcgugugcaugacaaucgggauggccaaccugauucuccaaaucggaaauauuaucuccauauggaucucucacucaauucagcuugguaaccagaaucagaucgagacuuguaaccaaagugucauuacguacgaaaauaacaccuggguuaaucagacauaugugaacaucagcaauacuaacuucgcugcaggccaguccguagugucugucaaacuggccggaaauucgucauugugcccugugagcgggugggcgauauacaguaaggacaacuccguuagaauuggcucuaaaggugauguguuugucaucagggagccauucauuagcuguuccccguuagaaugccggaccuuuuuccugacacagggggcucuacucaaugacaagcauucaaacggaaccaucaaagaucgcagucccuaucgaacucugaugagcuguccuaucggcgaggugccaucucccuacaacucccguuuugaaucaguagccuggagcgcaagugccugccacgacggcauuaauuggcuuacaauagggaucucuggaccugauaacggugcuguugcagugcugaaguauaauggcauuaucaccgacacgauaaaguccuggagaaacaauauuuugaggacucaagagagcgagugugccugcgucaacgggucguguuucaccgugaugacagauggaccaucuaauggccaggcuuccuacaaaaucuuucggaucgaaaaggguaaaauugugaagucagucgagaugaacgcccccaauuaucauuacgaagagugcaguuguuacccugacagcuccgagaucacuugcguuugccgcgauaacuggcacgggucuaauagaccaugggugagcuucaaccagaaucucgaauaucagauuggauacauauguucaggcaucuuuggcgacaacccgaggcccaaugauaaaaccgggaguugcggaccuguauccagcaacggugcgaacggcgugaagggguucucuuuuaaguauggaaauggcgucuggauuggucggacaaaaucaaucaacagucgcaauggguucgagaugaucugggacccaaacggcuggaccggaacggauaauaacuuuagcauuaagcaagacauagugggcaucaaugaaugguccggguacucuggaucguucguucagcaucccgagcugacuggucuggacuguauucgaccuugcuucuggguggaacucaucagaggcaggccaaaagagaacacaauuuggaccagcggguccucaaucaguuuuuguggagucaauucugauacugugggcuggagcuggcccgacggugcagaguuaccguucacaauagauaaguga

SEQ ID NO: 145782 - RNA, 1410 nt, Artificial Sequence; identical to SEQ ID NO: 145781
  derived and/or modified CDS sequence (opt3) from neuraminidase__InfluenzaA__ACZ17441

SEQ ID NO: 145783 - RNA, 1410 nt, Artificial Sequence; identical to SEQ ID NO: 144776
  derived and/or modified CDS sequence (opt3) from neuraminidase__InfluenzaA__ACZ17451

SEQ ID NO: 145784 - RNA, 1410 nt, Artificial Sequence; identical to SEQ ID NO: 144786
  derived and/or modified CDS sequence (opt3) from neuraminidase__InfluenzaA__ACZ17461

SEQ ID NO: 145785 - RNA, 1410 nt, Artificial Sequence; identical to SEQ ID NO: 144786
  derived and/or modified CDS sequence (opt3) from neuraminidase__InfluenzaA__ACZ17471

SEQ ID NO: 145786 - RNA, 1410 nt, Artificial Sequence; identical to SEQ ID NO: 144816
  derived and/or modified CDS sequence (opt3) from neuraminidase__InfluenzaA__ACZ17481

SEQ ID NO: 145787 - RNA, 1410 nt, Artificial Sequence; identical to SEQ ID NO: 144786
  derived and/or modified CDS sequence (opt3) from neuraminidase__InfluenzaA__ACZ17491

SEQ ID NO: 145788 - RNA, 1410 nt, Artificial Sequence; identical to SEQ ID NO: 145252
  derived and/or modified CDS sequence (opt3) from neuraminidase__InfluenzaA__ACZ27803

SEQ ID NO: 145789 - RNA, 1410 nt, Artificial Sequence; identical to SEQ ID NO: 144776
  derived and/or modified CDS sequence (opt3) from neuraminidase__InfluenzaA__ACZ27813

SEQ ID NO: 145790 - RNA, 1410 nt, Artificial Sequence; identical to SEQ ID NO: 144786
  derived and/or modified CDS sequence (opt3) from neuraminidase__InfluenzaA__ACZ27823

SEQ ID NO: 145791 - RNA, 1410 nt, Artificial Sequence; identical to SEQ ID NO: 144776
  derived and/or modified CDS sequence (opt3) from neuraminidase__InfluenzaA__ACZ27833

SEQ ID NO: 145792 - RNA, 1410 nt, Artificial Sequence; identical to SEQ ID NO: 144786
  derived and/or modified CDS sequence (opt3) from neuraminidase__InfluenzaA__ACZ45022

SEQ ID NO: 145793 - RNA, 1410 nt, Artificial Sequence
  derived and/or modified CDS sequence (opt3) from neuraminidase__InfluenzaA__ACZ53958
augaaccccaaucagaagaucauuaccauaggcagcgugucccugacaaucgccacuauuugcuuccucaugcaaaucgcuauucuugucacgaccguuacacugcacuuuaaacaguacgaguguaacucuccuccaaauaaccaggugauguugugcgaaccgacuaucauagagagaaauaucaccgaaauuguauauuuaacaaacaccacuaucgagaaggaaauuugucccaaacuggcagaguacaggaauuggucaaagccucagugcaacaucacaggguucgccccauuuaguaaagacaauagcauacggcuauccgcgggaggugauauuugggugacccgcgagcccuaugucucuugugacccugauaagugcuaccaauucgcucucggccaggggacgacucugaacaauggacauucgaacgacaccgugcacgaucgaacaccauaucguacucuucugaugaaugaauugggcguucccuuucaucucgguaccaaacagguguguaucgccuggucaagcaguuccugccacgacgggaaggcauggcugcaugucugugugacaggagaugacgagaacgccaccgcuucuuucauuuacaauggcagacugguagauagcaucggcuccuggucaaagaaaauccucaggacgcaggaaagugagugcguuuguauuaacgggacuugcacaguggucaugaccgacggaagcgcaucugguaaggccgauacuaaaauauuauuuaucgaggaaggcaagauugugcacacauccucacugagcgggagugcucaacacguggaggaaugcucuuguuauccucgguacccaggaguccgcugcguuuguagagacaacuggaagggcuccaauaggccgaucguggauauaaacguaaaagacuacagcauugugucgucuuaugucugcuccggucuugugggggacacgccccggaagaaugauucaaguagcuccucucauuguuuggacccuaacaaugaggaaggaggccacggcguuaaagggugggccuucgaugacggaaacgauguguggaugggucgcaccaucagcgagaagcugcgaucaggcuacgagaccuuuaaagucaucgaaggguggaguaagccaaauuccaaacuacagauuaacagacaggugaucguagacaggggaaaucggagcggcuauucugguauuuucucaguugaggggaagaguugcauaaaccguuguuuuuacguggaacucauccgcggcagaaagcaggagacagaaguccuguggacuagcaauuccauuguggucuucugcggaaccucuggcacauaugggacuggaucgugucccgaugguagcgugcuuaaccugaugccuaucuga

SEQ ID NO: 145794 - RNA, 1410 nt, Artificial Sequence
  derived and/or modified CDS sequence (opt3) from neuraminidase__InfluenzaA__ACZ53969
augaaccccaaucagaagaucauuaccauaggcagcgugucccugacaaucgccacuauuugcuuccucaugcaaaucgcuauucuugucacgaccguuacacugcacuuuaaacaguacgaguguaacucuccuccaaauaaccaggugauguugugcgaaccgacuaucauagagagaaauaucaccgaaauuguauauuuaacaaacaccacuaucgagaaggaaauuugucccaaacuggcagaguacaggaauuggucaaagccucagugcaacaucacaggguucgccccauuuaguaaagacaauagcauacggcuauccgcgggaggugauauuugggugacccgcgagcccuaugucucuugugacccugauaagugcuaccaauucgcucucggccaggggacgacucugaacaauggacauucgaacgacaccgugcacgaucgaacaccauaucguacucuucugaugaaugaauugggcguucccuuucaucucgguaccaaacagguguguaucgccuggucaagcaguuccugccacgacgggaaggcauggcugcaugucugugugacaggagaugacgagaacgccaccgcuucuuucauuuacaauggcagacugguagauagcaucggcuccuggucaaagaaaauccucaggacgcaggaaagugagugcguuuguauuaacgggacuugcacaguggucaugaccgacggaagcgcaucugguaaggccgauacuaaaauauuauuuaucgaggaaggcgagauugugcacacauccccucugucagggagcgcucaacacguggaagagugcaguuguuauccacgguacccgggaguccgcugcguuuguagagacaacuggaagggcucuaauaggcccaucguggauauaaacguaaaggacuacuccauugugagcucguaugucugcucuggucuugugggggacaccccucggaaaaaugauuccucaaguagcucccauuguuuggacccaaacaaugaagagggaggccacggcguuaaggggugggccuucgaugacggaaacgauguguggaugggucgcacgaucucugagaaaagccgaucaggcuacgaaaccuuuaaggucaucgagggguggaguaaacccaauuccaagcugcagauuaacagacaggugaucguagacaggggaaaucggagcggcuauucugguauuuucucaguugaagggaaaaguugcauaaaccguuguuuuuacguggagcuaauccgcggcagaaagcaggaaacagagguccucuggacuagcaauuccauuguggucuucugcggaaccucuggcacauaugggacuggaucguggccugaugguagcgugcugaaccuuaugccaaucuga

SEQ ID NO: 145795 - RNA, 1410 nt, Artificial Sequence
  derived and/or modified CDS sequence (opt3) from neuraminidase__InfluenzaA__ACZ53980
augaaccccaaucagaacaagcugccuaucggcagcgugucccucaccauugccacaauaugcuuccuuaugcaaaucgcuauucugaaaacuacggucaccuugcacuuuaagcaguacgaguguaauucuccaccgaacaaucagguuauguuaugcgaacccacaaucauugagagaaaccugacuaaaaucguguaucuaaccaauacaaccauaaagaaagaaaucuguccuaagcagccaaaguacaggaacuggucaaaacccaagugcaaaauuacugagcucgcaccuuucaguaaggacaauagcauccggcuguccgccgggggagauauuuggguaacacgcgaaccauaugugucuugugaccccgauaaaugcuaccaauuugcgcuuggucagggcaccacgcugaacaaugggcauucgaacgacacuguccacgaucgaaccccuuaucguacauugcucaugaaugagcugggagugccauuccaucugggcacuaagcagguuuguaucgcuuggucaagcaguuccugccacgacgguaaggccuggcuccauguguguauaaccggggaugacaaaaacgcaacagccucuuuuauuuacaauggaagauuagucgauagcaucguguccuggucaaaggagauucugaggacccaggaaagugagugcguauguaucaacggcacgugcacuguugugaugacagacggcagcgcuucugggaaagcagauaccaagauccuuuucauugaagagggaaaaauaguccacaucuccccguugucagguagcgcccaacacguggaggaaugcaguuguuauccccgguacccuggcgugcgcugcauuuguagagacaacuggaaggggucuaauaggccagucguugauaucaacauggaggacuacuccauagacagcucguaugugugcucuggacugguaggcgauacuccccggaaaaaugacuccucaaguagcucccauugucuagauccuaacaaugaagagggugggcacggagugaagggcugggcuuuugacgauggcaacgacgucuggauggggcgcacaauuucugaaaagcuccgaagcggauacgagaccuucaaagugaucgguggcuggucaaagccaaauaguaaacugcagaucaacagacagguuauuguggauagggggaaucgguccggauauagcggcaucuuuucugucgaggguaagucaugcauuaaccguuguuucuacguggaacuuauacgcgggagaaaacaggagacggaaguacuguggaccaguaauagcaucguuguguuuugcggcacauccggaacuuauggcaccgggucuuggcccgacggaucggucuugaaccucaugccgauuuga

SEQ ID NO: 145796 - RNA, 1410 nt, Artificial Sequence; identical to SEQ ID NO: 144786
  derived and/or modified CDS sequence (opt3) from neuraminidase__InfluenzaA__ACZ56082

SEQ ID NO: 145797 - RNA, 1410 nt, Artificial Sequence; identical to SEQ ID NO: 145369
  derived and/or modified CDS sequence (opt3) from neuraminidase__InfluenzaA__ACZ57183

SEQ ID NO: 145798 - RNA, 1413 nt, Artificial Sequence
  derived and/or modified CDS sequence (opt3) from neuraminidase__InfluenzaA__ACZ81542
augaaccccaaucagaaggugaucaccauuggcagcauauccaucgccauugggaucauuucucugaugcuccaaaucggaaacauaaucucaauuugggcuagucacagcauccagacagguucccagaauaacacuggcauuugcaaucagagaaucauaacguacgagaacucuaccugggugaaucauacauauguuaacauuaauaacacuaaugugguagcaggggaagacaaaaccucggugacacuugccggaaacucaagccuguguaguaucuccggcugggcgauuuacaccaaggauaauucuaucaggaucgguagcaaaggggacgucuucgugauucgggagccuuuuauauccugcucacacuuggaaugucgcacuuucuuuuuaacacaaggagcucugcuaaacgauaagcauaguaauggcaccguuaaagaccgaagcccauaucgugcccucaugucuugcccgcugggcgaggcacccuccccuuacaacucaaaguucgaaagcguggccuggagugcuucugcaugucacgaugggaugggauggcuuacgaucgguauuuccggcccagacaacggggccgucgcugugcugaaguauaauggaaucauaacuggcaccauuaaaagcuggaagaaacagaucuugagaacacaggagucggagugcguauguaugaacgguucuugcuuuacuaucaugaccgaugggcccuccaauaaggccgcgucauacaaaauuuucaagaucgaaaagggaaaaguuacaaagaguauugagcucaacgcaccuaauuuuuauuacgaagaguguagcugcuacccagacaccggcauagugaugugugucugcagggauaacuggcauggcuccaaucggcccugggugucuuucaaccagaaucuggacuaucaaaucggguacauuugcagcggaguguuuggugauaacccucgcccagaggacggcgaagggucauguaauccggucacgguugauggagccaacggcgugaaagguuucaguuauaaguacgggaauggcguauggaucggaagaacuaaauccaacaggcugcggaagggcuuugagaugaucugggaccccaauggguggacaaacaccgacagcgauuucucugugaaacaggacgucguggcuauuacugauuggucaggauauagugguagcuuuguucagcacccugaacucacaggcuuagacugcauacgcccauguuucuggguggagcugguccgagggcuucccagagaaaacaccacgaucuggaccuccggaucuucgauuagcuucugcggcgucaauuccgauacagccaacuggucauggccugacggugcagaguugccauuuacuaucgauaaguga

SEQ ID NO: 145799 - RNA, 1413 nt, Artificial Sequence
  derived and/or modified CDS sequence (opt3) from neuraminidase__InfluenzaA__ACZ81543
augaaccccaaucagaagaucauuaccauaggcagcaucuccauugccaucgggauuaucucucugaugcuccaaauaggaaacaucauuucaaucugggcuagucacagcauucagacagguucccagaauaacacuggcaucugcaaucagagaauaauuacguacgagaacaauaccugggugaaccauacauaugucaauaucaacaauacuaacguuguggcaggggaagacaaaaccucuguaacacuugccggaaauucgucacuguguagcauuaguggcugggcgaucuacaccaaggauaacuccaucaggauugguucuaaaggggacguguucgucauacgggagccuuuuaucagcugcucccacuuggaaugucgcacuuucuuuuuaacacaaggagcucugcuaaaugauaagcauucaaacggcaccgugaaagaccgaaguccauaucgugcccucaugagcugcccgcugggcgaggcacccucuccuuacaacuccaaguucgaaucaguugccuggagcgcuagugcaugucacgaugggaugggauggcuuacgauugguaucucuggcccagacaauggggccguggcuguccugaaguauaacggaauaauuacuggcaccaucaaauccuggaaggagcagaucuugagaacacaggagagcgaaugcguguguaugaaugguucgugcuuuacuauuaugaccgaugggcccucuaacaaagccgcguccuacaagaucuucaaaauugagaagggaaagguaacaaaaucaauagaacucaaugcaccuaacuuuuauuacgaggaguguaguugcuacccagacaccggcaucguuaugugugugugcagggauaauuggcauggcagcaaccggcccugggucuccuucaaucagaaccuggacuaucaaacgggguacauuugcucuggaguguuuggugauaauccucgcccagaagacggcgaggggagcuguaacccggugacugucgauggagccaauggcguuaaggguuucucauauaaauacgggaacggcguguggaucggaagaacaaagaguaauaggcugcggaaaggcuuugaaaugaucugggaccccaacggguggaccaacacugacuccgauuucagcguaaagcaggacguggucgcuauuacagauuggucuggauauucagguaguuuugugcagcacccugagcucaccggcuuagacugcauacgcccauguuucuggguugaacuggugcgagggcuucccagagagaauacgaccaucuggacaagcggauccucuauuucguucugcggcgucaacagcgauacugccaauugguccuggccugacggugcagaguugccauuuaccaucgauaaauga

SEQ ID NO: 145800 - RNA, 1410 nt, Artificial Sequence
  derived and/or modified CDS sequence (opt3) from neuraminidase__InfluenzaA__ACZ81546
augaaccccaaucagaagaucauuaccauaggcagcgugucccugacaaucucuacuauuugcuucuuuaugcaaaucgccauucucaucacgaccgucacacuucacuucaaacaguacgaguuuaacucaccuccaaauaaccagguuaugcugugugaaccgacuauaaucgagagaaauauuaccgaaaucguguauuugacaaacaccacuauugagaaggaaaucugccccaaauuagcugaguacaggaauuggaguaagccucagugugacauaacagggagcgcaccauucuccaaagauaacucuauucggcugucggccggaggugacaucuggguaacccgcgagcccuaugugucaugcgauccugacaaguguuaccaauuugcgcuaggccaggggacgacucucaauaacguccauagcaauaacaccgugcacgaucgaacaccauaucguacucugcuuaugaaugaacugggaguucccuuccauuugggcaccaaacaggugugcauugcuuggaguuccucuagcugucacgacgguaaggccuggcuccaugucugcaucacaggggaugacaagaacgcaaccgccuccuuuaucuacaauggaagacugguggauucaguaguuaguuggagcaaagagauucugaggacgcaggaaucugagugugugugcauaaacggcacuuguacagucgugaugaccgacggcuccgcuucagggaaggcagauacuaaaauccucuucauugaggaaggaaagaucgugcacacaagcaccuuaagugguucugcccaacacgucgaggaaugcuccugcuauccucgguacccaggcguucgcugugugugcagagacaacuggaaggggagcaauaggccgauaguagauauuaacaucaaagaccauucgaucgugucuuccuacgucuguucaggacuggugggcgacacgccccggaagaaugauaguagcuccucuagccacugccuugacccuaacaaugaggaaggugggcauggaguuaaaggcugggcuuuugaugacggcaacgauguguggauggggcgcaccauuucagagaagagucgauugggauaugagacauucaaagucaucgaagguugguccaauccaaagagcaaacugcagauuaacagacaggugauaguagacaggggcaaucggucuggguacucaggaaucuuuaguguugagggcaagagcuguauuaaccguugcuucuauguggaacuaauccgcgguagaaaggaggaaacugagguccucuggaccuccaauucuaucguggucuuuugugggacaucgggcacuuacggaaccggcagcuggcccgauggggccgacauuaaccugaugccuauauga

SEQ ID NO: 145801 - RNA, 1410 nt, Artificial Sequence
  derived and/or modified CDS sequence (opt3) from neuraminidase__InfluenzaA__ACZ81547
augaaccccaaucagaagaucauuaccauaggcagcgugucccugacaaucucuacuauuugcuucuuuaugcaaaucgccauucucaucacgaccgucacacuucacuucaaacaguacgaguuuaacucaccuccaaauaaccagguuaugcugugugaaccgacuauaaucgagagaaauauuaccgaaaucguguauuugacaaacaccacuauugagaaggaaaucugccccaaauuagcugaguacaggaauuggaguaagccucagugugacauaacaggguucgcaccauuuagcaaagauaacuccauucggcugucugccggaggugacaucuggguaacccgcgagcccuaugugucgugcgauccugacaaguguuaccaauucgcgcuaggccaggggacgacucucaauaacguccauucaaauaacaccgugcgagaucguacaccauauagaacucugcuuaugaaugaacugggaguucccuuucacuugggcaccaaacaggugugcauugcuuggagcaguuccucuugucaugacgguaaggccuggcuccacgucugcaucacaggggaugacaagaacgcaaccgccagcuucaucuacaauggaaggcugguggauuccguaguuucauggaguaaagagauucugcggacgcaggaaagcgagugugugugcauaaacggcacuuguacagucgugaugaccgacggcucugcuuccgggaaggcagauacuaaaauccucuuuauugaggaaggaaagaucgugcauacaucaaccuuaagcgguagugcccaacacgucgaggaaugcucuugcuauccucgcuacccaggcguuagaugugugugcagggacaacuggaagggguccaaucggccgauaguagauauuaacacgaaagaccacagcaucgugucgucuuacgucuguuccggacuggugggcgacacccccaggaagaaugauucaaguagcuccucucauugccuugacccuaacaaugaggaaggugggcacggaguuaaaggcugggcuuucgaugacggcaacgauguguggauggggcgaacaaucagcgagaagucaagauugggauaugagacuuuuaaagucauugaagguuggaguaauccaaaguccaaacugcagaucaaccgccaggugauuguagacaagggcaaucggagcggguacucuggaauauucucaguugagggcaagaguuguaucaaccguugcuuuuauguggaacuaauucgcgguagaaaagaggaaaccgagguccucuggacaagcaauuccaucguggucuucugugggacuucuggcaccuacggaacaggcucguggcccgauggggccgacaucaaccugaugccuauuuga

SEQ ID NO: 145802 - RNA, 1410 nt, Artificial Sequence; identical to SEQ ID NO: 144786
  derived and/or modified CDS sequence (opt3) from neuraminidase__InfluenzaA__ACZ81634

SEQ ID NO: 145803 - RNA, 1410 nt, Artificial Sequence
  derived and/or modified CDS sequence (opt3) from neuraminidase__InfluenzaA__ACZ81644
augaaccccaaucagaagaucauuaccauaggcagcgugugcaugacaaucgggauggccaaccugauucuccaaaucggaaauauuaucuccauauggaucucucacucaauucagcuugguaaccagaaucagaucgagacuuguaaccaaagugucauuacguacgaaaauaacaccuggguuaaucagacauaugugaacaucagcaauacuaacuucgcugcaggccaguccguagugucugucaaacuggccggaaauucgucauugugcccugugagcggaugggcgauauacaguaaggacaacuccauuagaaucggcucuaaaggugauguuuuugugauuagggagccauucaucagcuguuccccguuagaaugccggaccuuuuuccugacacagggggcucuacucaaugacaagcauucaaacggaaccaucaaagaucgcagucccuaucgaacucugaugagcuguccuauuggcgaggucccaucucccuacaacucccguuuugaaucaguggccuggagcgcaagugccugccacgacggcauaaauuggcuuacaaucgggauuucuggaccugauaacggugcuguagcaguucugaaguauaauggcaucauaaccgacacgauuaaguccuggagaaacaauaucuugaggacucaagagagcgagugugccugcgugaacgggucguguuucaccgucaugacagauggaccaucugacggccaggcuuccuacaaaaucuuucggauugaaaaggguaaaaucgugaagucaguggagaugaaugcccccaacuaucauuacgaagagugcaguuguuacccugauagcuccgagauuacuugcgucugccgcgacaauuggcacgggucuaacagaccauggguuagcuucaaucagaaccucgaauaucagauaggauacaucuguucaggcauuuuuggcgauaauccgaggcccaacgacaaaaccgggaguugcggaccuguguccagcaauggugcgaacggcguaaagggguucucuuuuaaguauggaaacggcguguggaucggucggacaaaaucaaucaguagccgcaauggguucgagaugauuugggauccaaacggcuggaccggaacggacaauaacuuuuccauaaagcaagacaucauuggcaucaaugaauggucuggguacucggggagcuucguccagcaucccgagcugacuggucuggauuguauucgaccuugcuucuggguggaacucaucagaggcaggccaaaagagaacacaauauggaccuccgggucaaguaucucuuuuuguggaguuaauagcgacacugugggcugguccuggcccgauggugcagaguuaccguucacaauugacaaguga

SEQ ID NO: 145804 - RNA, 1410 nt, Artificial Sequence
  derived and/or modified CDS sequence (opt3) from neuraminidase__InfluenzaA__ACZ81653
augaaccccaaucagaagaucauuaccauaggcagcgugugcaugacaaucgggauggccaaccugauucuccaaaucggaaauauuaucuccauauggaucucucacucaauucagcuugguaaccagaaucagaucgagacuuguaaccaaagugucauuacguacgaaaauaacaccuggguuaaucagacauaugugaacaucagcaauacuaacuucgcugcaggccaguccguagugucugucaaacuggccggaaauucgucauugugcccugugagcggaugggcgauauacaguaaggacaacuccauuagaaucggcucuaaaggugauguuuuugugauuagggagccauucaucagcuguuccccguuagaaugccggaccuuuuuccugacacagggggcucuacucaaugacaagcauucaaacggaaccaucaaagaucgcagucccuaucgaacucugaugagcuguccuauuggcgaggucccaucucccuacaacucccguuuugaaucaguggccuggagcgcaagugccugccacgacggcauaaauuggcuuacaaucgggauuucuggaccugauaacggugcuguagcaguucugaaguauaauggcaucauaaccgacacgauuaaguccuggagaaacaauaucuugaggacucaagagagcgagugugccugcgugaacgggucguguuucaccgucaugacagauggaccaucugacggccaggcuuccuacaaaaucuuucggauugaaaaggguaaaaucgugaagucaguggagaugaaugcccccaacuaucauuacgaagagugcaguuguuacccugauagcuccgagauuacuugcgucugccgcgacaauuggcacgggucuaacagaccauggguuagcuucaaucagaaccucgaauaucagauaggauacaucuguucaggcauuuuuggcgauaauccgaggcccaacgacaaaaccgggaguugcggaccuguguccagcaauggugcgaacggcguaaagggguucucuuuuaaguauggaaacggcguguggaucggucggacaaaaucaaucaguagccgcaauggguucgagaugauuugggauccaaacggcuggaccggaacggacaauaacuuuuccauaaagcaagacaucgucggcauuaaugaauggucuggguacucggggagcuucgugcagcaucccgagcugacuggucugaacuguauccgaccuugcuucuggguugaacucauuagaggcaggccaaaagagaauacaaucuggaccuccgggucaaguauaucuuuuuguggagugaacagcgauacugucggcugguccuggcccgacggugcagaguuaccguucacaaucgauaaguga

SEQ ID NO: 145805 - RNA, 1410 nt, Artificial Sequence; identical to SEQ ID NO: 144786
  derived and/or modified CDS sequence (opt3) from neuraminidase__InfluenzaA__ACZ95840

SEQ ID NO: 145806 - RNA, 1410 nt, Artificial Sequence; identical to SEQ ID NO: 144786
  derived and/or modified CDS sequence (opt3) from neuraminidase__InfluenzaA__ACZ95850

SEQ ID NO: 145807 - RNA, 1410 nt, Artificial Sequence; identical to SEQ ID NO: 144786
  derived and/or modified CDS sequence (opt3) from neuraminidase__InfluenzaA__ACZ95860

SEQ ID NO: 145808 - RNA, 1410 nt, Artificial Sequence; identical to SEQ ID NO: 144786
  derived and/or modified CDS sequence (opt3) from neuraminidase__InfluenzaA__ACZ95870

SEQ ID NO: 145809 - RNA, 1410 nt, Artificial Sequence; identical to SEQ ID NO: 144786
  derived and/or modified CDS sequence (opt3) from neuraminidase__InfluenzaA__ACZ95880

SEQ ID NO: 145810 - RNA, 1410 nt, Artificial Sequence; identical to SEQ ID NO: 144786
  derived and/or modified CDS sequence (opt3) from neuraminidase__InfluenzaA__ACZ95890

SEQ ID NO: 145811 - RNA, 1410 nt, Artificial Sequence; identical to SEQ ID NO: 144786
  derived and/or modified CDS sequence (opt3) from neuraminidase__InfluenzaA__ACZ95900

SEQ ID NO: 145812 - RNA, 1410 nt, Artificial Sequence; identical to SEQ ID NO: 144786
  derived and/or modified CDS sequence (opt3) from neuraminidase__InfluenzaA__ACZ95910

SEQ ID NO: 145813 - RNA, 1410 nt, Artificial Sequence; identical to SEQ ID NO: 144786
  derived and/or modified CDS sequence (opt3) from neuraminidase__InfluenzaA__ACZ95920

SEQ ID NO: 145814 - RNA, 1410 nt, Artificial Sequence; identical to SEQ ID NO: 145673
  derived and/or modified CDS sequence (opt3) from neuraminidase__InfluenzaA__ACZ95930

SEQ ID NO: 145815 - RNA, 1410 nt, Artificial Sequence; identical to SEQ ID NO: 144786
  derived and/or modified CDS sequence (opt3) from neuraminidase__InfluenzaA__ACZ95940

SEQ ID NO: 145816 - RNA, 1410 nt, Artificial Sequence; identical to SEQ ID NO: 145803
  derived and/or modified CDS sequence (opt3) from neuraminidase__InfluenzaA__ACZ95950

SEQ ID NO: 145817 - RNA, 1410 nt, Artificial Sequence; identical to SEQ ID NO: 144786
  derived and/or modified CDS sequence (opt3) from neuraminidase__InfluenzaA__ACZ95960

SEQ ID NO: 145818 - RNA, 1410 nt, Artificial Sequence; identical to SEQ ID NO: 145803
  derived and/or modified CDS sequence (opt3) from neuraminidase__InfluenzaA__ACZ95970

SEQ ID NO: 145819 - RNA, 1410 nt, Artificial Sequence; identical to SEQ ID NO: 144786
  derived and/or modified CDS sequence (opt3) from neuraminidase__InfluenzaA__ACZ95980

SEQ ID NO: 145820 - RNA, 1410 nt, Artificial Sequence; identical to SEQ ID NO: 144786
  derived and/or modified CDS sequence (opt3) from neuraminidase__InfluenzaA__ACZ95990

SEQ ID NO: 145821 - RNA, 1410 nt, Artificial Sequence; identical to SEQ ID NO: 144786
  derived and/or modified CDS sequence (opt3) from neuraminidase__InfluenzaA__ACZ96000

SEQ ID NO: 145822 - RNA, 1410 nt, Artificial Sequence; identical to SEQ ID NO: 144786
  derived and/or modified CDS sequence (opt3) from neuraminidase__InfluenzaA__ACZ96010

SEQ ID NO: 145823 - RNA, 1410 nt, Artificial Sequence
  derived and/or modified CDS sequence (opt3) from neuraminidase__InfluenzaA__ACZ96020
augaaccccaaucagaagaucauuaccauaggcagcgugugcaugacaaucgggauggccaaccugauucuccaaaucggaaauauuauccuuauauggaucucccacucuauucagcuggguaaccagaaucagacugagacguguaaccaaucagucaucaccuacgaaaauaacacauggguuaaucagacuuaugugaacauuaguaauaccaacuucgcugcaggccagagcguaguguccgucaaauuggccggaaauucuucguuaugcccugugucagggugggcgaucuacagcaaggacaacaguguuagaauaggcuccaaaggugauguguuugucauuagggagccauucaucucuuguagcccgcuggaaugccggacauuuuuccuaacccagggggcucuccugaaugacaagcauuccaacggaacuauuaaagaucgcucacccuaucgaacacuuaugaguuguccuaucggcgaggugccaagccccuacaacucucguuuugaauccguagccuggucagcaagcgccugccacgacggcaucaauuggcugaccauugggauaaguggaccugauaacggugcuguugcaguguugaaguauaauggcaucauuacggacacuaucaagucuuggagaaacaauauacucaggacccaagaguccgagugugccugcgucaacgggagcuguuucacagugaugacugauggaccaucgaauggccaggcuucuuacaaaauuuuucggaucgaaaaggguaaaaucgugaaguccgucgagaugaacgcccccaauuaucauuacgaagagugcucauguuacccugacaguagcgagauuaccugcguuugccgcgauaacuggcacggguccaauagaccaugggugucuuucaaccagaaucuggaauaucagaucggauacauuuguagcggcauauuuggcgacaacccgaggcccaucgauaaaacagggucaugcggaccuguaaguuccaauggugcgaacggcgugaagggguucagcuuuaaguauggaaacggcgucuggauuggucggaccaaaucuaucucaagucgcaauggguucgagaugaucugggacccaaacggcuggacgggaacugauaauaacuuuagcauuaagcaagacauagugggcaucaaugaaugguccggguacucuggaucguucguucagcaucccgagcugacaggucucgacuguauucgaccuugcuucuggguggaauuaaucagaggcaggccaaaagagaacaccauuuggacuagcggguccucaaucaguuuuuguggagucaauucugauacagugggcuggagcuggcccgacggugcagagcugccguucaccauagauaaguga

SEQ ID NO: 145824 - RNA, 1410 nt, Artificial Sequence; identical to SEQ ID NO: 144786
  derived and/or modified CDS sequence (opt3) from neuraminidase__InfluenzaA__ACZ96050

SEQ ID NO: 145825 - RNA, 1410 nt, Artificial Sequence; identical to SEQ ID NO: 144786
  derived and/or modified CDS sequence (opt3) from neuraminidase__InfluenzaA__ACZ96060

SEQ ID NO: 145826 - RNA, 1410 nt, Artificial Sequence; identical to SEQ ID NO: 144786
  derived and/or modified CDS sequence (opt3) from neuraminidase__InfluenzaA__ACZ96072

SEQ ID NO: 145827 - RNA, 1410 nt, Artificial Sequence; identical to SEQ ID NO: 144786
  derived and/or modified CDS sequence (opt3) from neuraminidase__InfluenzaA__ACZ96082

SEQ ID NO: 145828 - RNA, 1410 nt, Artificial Sequence; identical to SEQ ID NO: 144786
  derived and/or modified CDS sequence (opt3) from neuraminidase__InfluenzaA__ACZ96092

SEQ ID NO: 145829 - RNA, 1410 nt, Artificial Sequence; identical to SEQ ID NO: 144786
  derived and/or modified CDS sequence (opt3) from neuraminidase__InfluenzaA__ACZ96102

SEQ ID NO: 145830 - RNA, 1410 nt, Artificial Sequence; identical to SEQ ID NO: 144786
  derived and/or modified CDS sequence (opt3) from neuraminidase__InfluenzaA__ACZ96112

SEQ ID NO: 145831 - RNA, 1410 nt, Artificial Sequence
  derived and/or modified CDS sequence (opt3) from neuraminidase__InfluenzaA__ACZ96122
augaaccccaaucagaagaucauuaccauaggcagcgugugcaugacaaucgggauggccaaccugauucuccaaaucggaaauauuaucuccauauggaucucucacucaauucagcuugguaaccagaaucagaucgaggcuuguaaccaaagugucauuacuuacgaaaauaacacguggguuaaucagaccuaugugaacaucagcaauacaaacuucgcagccggccaguccguagugucugucaaacuggcgggaaauucgucauugugcccugugagcggaugggcuauauacaguaaggacaacuccauuagaaucggcucuaaaggugauguuuuugugauuagggagccauucaucagcuguuccccguuagaaugccggaccuuuuuccugacucagggggcccuacucaaugacaagcauucaaacggaacaaucaaagaucgcagucccuaucgaacccugaugagcuguccuauuggcgaggucccaucucccuacaacucccguuuugaaucaguggcauggagcgccagugcuugccacgacggcauaaauuggcuuacuaucgggauuucuggaccugauaacggugcaguagccguucugaaguauaauggcaucauaacagacaccauuaaguccuggagaaacaauaucuugaggacgcaagagagcgagugugcuugcgugaacgggucguguuucacugucaugaccgauggaccaucugacggccaggccuccuacaaaaucuuucggauugaaaaggguaaaaucgugaagucaguggagaugaaugcgcccaacuaucauuacgaagagugcaguuguuacccugauagcuccgagauuacaugcgucugccgcgacaauuggcacgggucuaacagaccauggguuagcuucaaucagaaccucgaauaucagauaggauacaucuguucaggcauuuuuggcgauaauccgaggcccaacgacaaaacugggaguugcggaccuguguccagcaauggugcaaacggcguaaagggguucucuuuuaaguauggaaacggcguguggaucggucggaccaaaucaaucaguagccgcaauggguucgagaugauuugggauccaaacggcuggacaggaaaggacaauaacuuuuccauaaaacaagacaucgucggcauuaaugaauggucuggguacucggggagcuucgugcagcaucccgagcugaccggucuggauuguauccgaccuugcuucuggguugaacucauuagaggcaggccaaaggagaacacgaucuggacuuccgggucaaguauaucuuuuuguggaaucaauagcgacacagugggcugguccuggcccgauggugccgaguuaccguucaccauugacaaauga

SEQ ID NO: 145832 - RNA, 1410 nt, Artificial Sequence; identical to SEQ ID NO: 144786
  derived and/or modified CDS sequence (opt3) from neuraminidase__InfluenzaA__ACZ96132

SEQ ID NO: 145833 - RNA, 1410 nt, Artificial Sequence; identical to SEQ ID NO: 144786
  derived and/or modified CDS sequence (opt3) from neuraminidase__InfluenzaA__ACZ96142

SEQ ID NO: 145834 - RNA, 1410 nt, Artificial Sequence; identical to SEQ ID NO: 144786
  derived and/or modified CDS sequence (opt3) from neuraminidase__InfluenzaA__ACZ96152

SEQ ID NO: 145835 - RNA, 1410 nt, Artificial Sequence; identical to SEQ ID NO: 144786
  derived and/or modified CDS sequence (opt3) from neuraminidase__InfluenzaA__ACZ96162

SEQ ID NO: 145836 - RNA, 1410 nt, Artificial Sequence; identical to SEQ ID NO: 144786
  derived and/or modified CDS sequence (opt3) from neuraminidase__InfluenzaA__ACZ96172

SEQ ID NO: 145837 - RNA, 1410 nt, Artificial Sequence
  derived and/or modified CDS sequence (opt3) from neuraminidase__InfluenzaA__ACZ96182
augaaccccaaucagaagaucauuaccauaggcagcgugugcaugacaaucgggauggccaaccugauucuccaaaucggaaauauuaucuccauauggaucucucacucaauucagcuugguaaccagaaucagaucgagacuuguaaccaaagugucauuacguacgaaaauaacaccuggguuaaucagacauaugugaacaucagcaauacuaacuucgcugcaggccaguccguagugucugucaaacuggccggaaauucgucauugugcccugugagcggaugggcgauauacaguaaggacaacuccauuagaaucggcucuaaaggugauguuuuugugauuagggagccauucaucagcuguuccccguuagaaugccggaccuuuuuccugacacagggggcucuacucaaugaccgccauucaaacggaaccaucaaggaucgaagucccuaucguacucugaugagcuguccuauuggcgaggucccaucucccuacaacuccagauuugaaucaguggccuggagcgcaagugccugccacgacggcauaaauuggcuuacaaucgggauuucuggaccugauaacggugcuguagcaguucugaaauauaauggcaucauaaccgacacgauuaaguccuggaggaacaauaucuugcggacucaagagagcgagugugccugcgugaacgggucguguuucaccgucaugacagauggaccaucugacggccaggcuuccuacaagaucuuucgcauugaaaaagguaagaucgugaaaucaguggagaugaaugcccccaacuaucauuacgaagagugcaguuguuacccugauagcuccgagauuacuugcgucugcagagacaauuggcacgggucuaacaggccauggguuagcuucaaucagaaccucgaauaucagauaggauacaucuguucaggcauuuuuggcgauaauccgcggcccaacgacaagaccgggaguugcggaccuguguccagcaauggugcgaacggcguaaaaggguucucuuuuaaguauggaaacggcguguggaucggucgcacaaagucaaucaguagccgaaauggguucgagaugauuugggauccaaacggcuggaccggaacggacaauaacuuuuccauaaaacaagacaucgucggcauuaaugaauggucuggguacucggggagcuucgugcagcaucccgagcugacuggucuggauuguaucagaccuugcuucuggguugaacucauuaggggccggccaaaggagaacacaaucuggaccuccgggucaaguauaucuuuuuguggagugaauagcgacacugucggcugguccuggcccgauggugcagaguuaccguucacaaucgacaaauga

SEQ ID NO: 145838 - RNA, 1410 nt, Artificial Sequence
  derived and/or modified CDS sequence (opt3) from neuraminidase__InfluenzaA__ACZ96192
augaaccccaaucagaagaucauuaccauaggcagcgugugcaugacaaucgggauggccaaccugauucuccaaaucggaaauauuaucuccauauggaucucucacucaauucagcuugguaaccagaaucagaucgagacuuguaaccaaagugucauuacguacgaaaauaacaccuggguuaaucagacauaugugaacaucagcaauacuaacuucgcugcaggccaguccguagugucugucaaacuggccgggaauagcucauugugcccugugagcggaugggcgauauacaguaaggacaacuccauuagaaucggcucuaaaggugauguuuuugugauuagggagccauucaucagcuguuccccguuagaaugccggaccuuuuuccugacacagggggcucuacucaaugacaagcauucaaacggaaccaucaaagaucgcagucccuaucgaacucugaugagcuguccuauuggcgaggucccaucucccuacaacucccguuuugaaucaguggccuggagcgcaagugccugccacgacggcauaaauuggcuuacaaucgggauuucuggaccugauaacggugcuguagcaguucugaaguauaauggcaucauaaccgacacgauuaaguccuggagaaacaauaucuugaggacucaagagagcgagugugccugcgugaacgggucguguuucaccgucaugacagauggaccaucugacggccaggcuuccuacaaaaucuuucggauugaaaaggguaaaaucgugaagucaguggagaugaaugcccccaacuaucauuacgaagagugcaguuguuacccugauagcuccgagauuacuugcgucugccgcgacaauuggcacgggucuaacagaccauggguuagcuucaaucagaaccucgaauaucagauaggauacaucuguucaggcauuuuuggcgauaauccgaggaguaacgacaaaaccggguccugcggacccgugagcucuaauggugcgaacggcguaaagggguucucauuuaaguauggaaacggcguguggaucggucggacaaaaaguaucagcucccgcaauggguucgagaugauuugggauccuaacggcuggaccggaacggacaauaacuuuucuauaaagcaagacaucgucggcauuaaugaauggucgggguacagcggauccuucgugcagcauccagagcugacuggucuggauuguauccgacccugcuucuggguugaacucauuagaggcaggccuaaagagaacacaaucuggaccucagggaguucuauaucguuuuguggagucaauuccgacacugugggcuggucauggccagauggugcagaguuacccuucacaaucgacaaguga

SEQ ID NO: 145839 - RNA, 1410 nt, Artificial Sequence
  derived and/or modified CDS sequence (opt3) from neuraminidase__InfluenzaA__ACZ96232
augaaccccaaucagaagaucauuaccauaggcagcgugugcaugacagucgggauggccaaccugauccuccaaauuggaaauaucauuuccaucuggauaucucacucaauccagcuugguaaccagaaucagauugagacuuguaaccaaaguguuaucacguacgaaaauaacaccugggugaaucagacauauguaaacauuagcaauacuaacuucgcugcaggccaguccguggucucugugaaacuggccggaaauucgucauugugcccuguuagcggaugggcgaucuacaguaaggacaacuccauaagaauuggcucuaaaggugauguguuugucaucagggagccauucauuagcuguuccccguuagaaugccggaccuuuuuccugacacagggggcucuacucaaugacaagcauucaaacggaaccaucaaagaucgcagucccuaucgaacucugaugagcuguccuaucggcgaggugccaucucccuacaacucccguuuugaaucaguagccuggagcgcaagugccugccacgacggcauuaauuggcuuacaauagggaucucuggaccugauaacggugcuguugcagugcugaaguauaauggcauuaucaccgacacgauaaaguccuggagaaacaauauuuugaggacucaagagagcgagugugccugcgucaacgggucguguuucaccgugaugacagauggaccaucugacggccaggcuuccuacaaaaucuuucggaucgaaaaggguaaaauugugaagucagucgagaugaaugcccccaacuaucauuacgaagagugcaguuguuacccugauagcuccgagaucacuugcguuugccgcgacaauuggcacgggucuaacagaccaugggugagcuucaaucagaaccucgaauaucagauuggauacauauguucaggcaucuuuggcgauaauccgaggcccaacgacaaaaccgggaguugcggaccuguauccagcaauggugcgaacggcgugaagggguucucuuuuaaguauggaaacggcgucuggauuggucggacaaaaucaaucaguagccgcaauggguucgagaugaucugggauccaaacggcuggaccggaacggacaaugacuuuuccauuaagcaagauauagugggcaucaacgaauggucuggguacucggggagcuucguucagcaucccgagcugacuggucuggacuguauucgaccuugcuucuggguggaacucaucagaggcaggccaaaagagaauacaauuuggaccuccgggucaaguaucucuuuuuguggagucaacagcgauacugugggcugguccuggcccgacggugcagaguuaccguucacaauagauaaguga

SEQ ID NO: 145840 - RNA, 1410 nt, Artificial Sequence
  derived and/or modified CDS sequence (opt3) from neuraminidase__InfluenzaA__ACZ96242
augaaccccaaucagaagaucauuaccauaggcagcgugugcaugacaaucgggauggccaaccugauucuccaaaucggaaauauuaucuccauauggaucucucacucaauucagcuugguaaccagaaucagaucgagacuuguaaccaaagugucauuacguacgaaaauaacaccuggguuaaucagacauaugugaacaucagcaauacuaacuucgcugcaggccaguccguagugucugucaaacuggccggaaauucgucauugugcccugugagcggaugggcgauauacaguaaggacaacuccauuagaaucggcucuaaaggugauguuuuugugauuagggagccauucaucagcuguuccccguuagaaugccggaccuuuuuccugacacagggggcucuacucaaugacaagcauucaaacggaaccaucaaagaucgcagucccuaucgaacucugaugagcuguccuauuggcgaggucccaucucccuacaacucccguuuugaaucaguggccuggagcgcaagugccugccacgacggcauaaauuggcuuacaaucgggauuucuggaccugauaacggugcuguagcaguucugaaguauaauggcaucauaaccgacacgauuaaguccuggagaaacaauaucuugaggacucaagagagcgagugugccugcgugaacgggucguguuucaccgucaugacagauggaccaucugacggccaggcuuccuacaaaaucuuucggauugaaaaggguaaaaucgugaagucaguggagaugaaugcccccaacuaucauuacgaagagugcaguuguuacccugauagcuccgagauuacuugcgucugccgcgacaauuggcacgggucuaacagaccauggguuagcuucaaucagaaccucgaauaucagauaggauacaucuguucaggcauuuuuggcgauaauccgaggcccaacgacaaaaccgggaguugcggaccuguguccagcaauggugcgaacggcguaaagggguucucuuuuaaguauggaaacggcguguggaucggucggacaaaaucaaucaguagccgcaauggguucgagaugauuugggauccaaacggcuggaccggaacggacaauaacuuuuccauaaagcaagacaucgucggcauuaaugaauggucuggguacucggggagcuucgugcagcaucccgagcugacuggucuggauuguauccgaccuugcuucuggguugaacucauuagaggcaggccaaaagaguccacaaucuggaccucagggaguucuaucagcuuuuguggagugaacuccgacacugucggcuggucauggcccgauggugcagaguuaccguucacaauagacaaguga

SEQ ID NO: 145841 - RNA, 1410 nt, Artificial Sequence; identical to SEQ ID NO: 144786
  derived and/or modified CDS sequence (opt3) from neuraminidase__InfluenzaA__ACZ96252

SEQ ID NO: 145842 - RNA, 1410 nt, Artificial Sequence; identical to SEQ ID NO: 144786
  derived and/or modified CDS sequence (opt3) from neuraminidase__InfluenzaA__ACZ96292

SEQ ID NO: 145843 - RNA, 1410 nt, Artificial Sequence; identical to SEQ ID NO: 144786
  derived and/or modified CDS sequence (opt3) from neuraminidase__InfluenzaA__ACZ96302

SEQ ID NO: 145844 - RNA, 1410 nt, Artificial Sequence; identical to SEQ ID NO: 144786
  derived and/or modified CDS sequence (opt3) from neuraminidase__InfluenzaA__ACZ96312

SEQ ID NO: 145845 - RNA, 1410 nt, Artificial Sequence
  derived and/or modified CDS sequence (opt3) from neuraminidase__InfluenzaA__ACZ96322
augaaccccaaucagaagaucauuaccauaggcagcgugugcaugacaaucgggauggccaaccugauucuccaaaucggaaauauuaucuccauauggaucucucacucaauucagcuugguaaccagaaucagaucgagacuuguaaccaaagugucauuacguacgaaaauaacaccuggguuaaucagacauaugugaacaucagcaauacuaacuucgcugcaggccaguccguagugucugucaaacugaccggaaauucgucauugugcccugugagcggaugggccauauacaguaaggacaacuccauuagaaucggcucuaaaggugauguuuuugugauuagggagccauucaucagcuguuccccguuagaaugccggacauuuuuccugacccagggggcgcuacucaaugacaagcauucaaacggaacuaucaaagaucgcagucccuaucgaacacugaugagcuguccuauuggcgaggucccaucucccuacaacucccguuuugaaucaguggcuuggagcgccagugcaugccacgacggcauaaauuggcuuaccaucgggauuucuggaccugauaacggugccguagcuguucugaaguauaauggcaucauaacggacacuauuaaguccuggagaaacaauaucuugaggacccaagagagcgagugugcaugcgugaacgggucguguuucacagucaugacugauggaccaucugacggccaggccuccuacaaaaucuuucggauugaaaaggguaaaaucgugaagucaguggagaugaaugcucccaacuaucauuacgaagagugcaguuguuacccugauagcuccgagauuaccugcgucugccgcgacaauuggcacgggucuaacagaccauggguuagcuucaaucagaaccucgaauaucagauaggauacaucuguucaggcauuuuuggcgauaauccgaggcccaacgacaaaacagggaguugcggaccuguguccagcaauggugccaacggcguaaagggguucucuuuuaaguauggaaacggcguguggaucggucggaccaaaucaaucaguagccgcaauggguucgagaugauuugggauccaaacggcuggacgggaacugacaauaacuuuuccauaaagcaagacaucgucggcauuaaugaauggucuggguacucggggagcuucgugcagcaucccgagcugacaggucuggauuguauccgaccuugcuucuggguugaacucauuagaggcaggccaaaagagaacaccaucuggacuuccgggucaaguauaucuuuuuguggagugaauagcgacacagucggcugguccuggcccgauggugcggaguuaccguucaccaucgacaaguga

SEQ ID NO: 145846 - RNA, 1410 nt, Artificial Sequence; identical to SEQ ID NO: 145845
  derived and/or modified CDS sequence (opt3) from neuraminidase__InfluenzaA__ACZ96332

SEQ ID NO: 145847 - RNA, 1410 nt, Artificial Sequence; identical to SEQ ID NO: 144786
  derived and/or modified CDS sequence (opt3) from neuraminidase__InfluenzaA__ACZ96352

SEQ ID NO: 145848 - RNA, 1410 nt, Artificial Sequence; identical to SEQ ID NO: 145845
  derived and/or modified CDS sequence (opt3) from neuraminidase__InfluenzaA__ACZ96362

SEQ ID NO: 145849 - RNA, 1410 nt, Artificial Sequence; identical to SEQ ID NO: 144786
  derived and/or modified CDS sequence (opt3) from neuraminidase__InfluenzaA__ACZ96375

SEQ ID NO: 145850 - RNA, 1410 nt, Artificial Sequence; identical to SEQ ID NO: 145845
  derived and/or modified CDS sequence (opt3) from neuraminidase__InfluenzaA__ACZ96385

SEQ ID NO: 145851 - RNA, 1410 nt, Artificial Sequence
  derived and/or modified CDS sequence (opt3) from neuraminidase__InfluenzaA__ACZ96395
augaaccccaaucagaagaucauuaccauaggcagcgugugcaugacaaucgggauggccaaccugauucuccaaaucggaaauauuaucuccauauggaucucucacucaauucagcuugguaaccagaaucagacugagacguguaaccaaagugucaucaccuacgaaaauaacacauggguuaaucagacuuaugugaacauuagcaauaccaacuucgcugcaggccaguccguagugucugucaaacuggccggaaauucgucauugugcccugugagcggaugggcgaucuacaguaaggacaacuccguuagaauaggcucuaaaggugauguguuugucauuagggagccauucaucagcuguuccccguuagaaugccggacauuuuuccugacccagggggcucuacucaaugacaagcauucaaacggaacuauuaaagaucgcagucccuaucgaacacugaugagcuguccuaucggcgaggugccaucucccuacaacucccguuuugaaucaguagccuggagcgcaagugccugccacgacggcaucaauuggcuuaccauugggauaucuggaccugauaacggugcuguugcagugcugaaguauaauggcaucauuacggacacuaucaaguccuggagaaacaauauauugaggacccaagagagcgagugugccugcgucaacgggucguguuucacagugaugacugauggaccaucuaauggccaggcuuccuacaaaauuuuucggaucgaaaaggguaaaaucgugaagucagucgagaugaacgcccccaauuaucauuacgaagagugcaguuguuacccugacagcuccgagauuaccugcguuugccgcgauaacuggcacgggucuaauagaccaugggugagcuucaaccagaaucucgaauaucagaucggauacauuuguucaggcauauuuggcgacaacccgaggcccaucgauaaaacagggaguugcggaccuguauccagcaauggugcgaacggcgugaagggguucucuuuuaaguauggaaacggcgucuggauuggucggaccaaaucaaucaguagccgcaauggguucgagaugaucugggacccaaacggcuggacgggaacugauaauaacuuuuccauuaagcaagacauagugggcaucaaugaauggucuggguacucggggagcuucguucagcaucccgagcugacaggucuggacuguauucgaccuugcuucuggguggaacucaucagaggcaggccaaaagagaacaccauuuggacuuccgggucaaguaucucuuuuuguggagucaauagcgauacagugggcugguccuggcccgacggugcagaguuaccguucaccauagauaaguga

SEQ ID NO: 145852 - RNA, 1410 nt, Artificial Sequence; identical to SEQ ID NO: 144786
  derived and/or modified CDS sequence (opt3) from neuraminidase__InfluenzaA__ACZ96408

SEQ ID NO: 145853 - RNA, 1410 nt, Artificial Sequence; identical to SEQ ID NO: 144786
  derived and/or modified CDS sequence (opt3) from neuraminidase__InfluenzaA__ACZ96428

SEQ ID NO: 145854 - RNA, 1410 nt, Artificial Sequence; identical to SEQ ID NO: 144786
  derived and/or modified CDS sequence (opt3) from neuraminidase__InfluenzaA__ACZ96438

SEQ ID NO: 145855 - RNA, 1410 nt, Artificial Sequence; identical to SEQ ID NO: 144786
  derived and/or modified CDS sequence (opt3) from neuraminidase__InfluenzaA__ACZ96448

SEQ ID NO: 145856 - RNA, 1410 nt, Artificial Sequence; identical to SEQ ID NO: 144786
  derived and/or modified CDS sequence (opt3) from neuraminidase__InfluenzaA__ACZ96479

SEQ ID NO: 145857 - RNA, 1410 nt, Artificial Sequence; identical to SEQ ID NO: 145803
  derived and/or modified CDS sequence (opt3) from neuraminidase__InfluenzaA__ACZ96489

SEQ ID NO: 145858 - RNA, 1410 nt, Artificial Sequence; identical to SEQ ID NO: 144786
  derived and/or modified CDS sequence (opt3) from neuraminidase__InfluenzaA__ACZ96499

SEQ ID NO: 145859 - RNA, 1410 nt, Artificial Sequence
  derived and/or modified CDS sequence (opt3) from neuraminidase__InfluenzaA__ACZ96509
augaaccccaaucagaagaucauuaccauaggcagcgugugcaugacaaucgggauggccaaccugauucuccaaaucggaaauauuaucuccauauggaucucucacucaauucagcuugguaaccagaaucagaucgagacuuguaaccaaagugucauuacguacgaaaauaacaccuggaucaaucagacauauguuaacauaagcaauacuaacuucgcugcaggccaguccgugguaucugugaaacuggccggaaauucgucauugugcccugucagcggaugggcgauuuacaguaaggacaacuccaucagaauuggcucuaaaggugauguguuuguuaucagggagccauucaucagcuguuccccguuagaaugccggaccuuuuuccugacacagggggcucuacucaaugacaagcauucaaacggaaccauuaaagaucgcagucccuaucgaacucugaugagcuguccuauaggcgaggugccaucucccuacaacucccguuuugaaucagucgccuggagcgcaagugccugccacgacggcaucaauuggcuuacaauugggaucucuggaccugauaacggugcuguggcaguacugaaguauaauggcauaauuaccgacacgaucaaguccuggagaaacaauaucuugaggacucaagagagcgagugugccugcguuaacgggucguguuucaccgugaugacagauggaccaucugacggccaggcuuccuacaaaauuuuucggaucgaaaaggguaaaauugucaagucaguggagaugaaugcccccaacuaucauuacgaagagugcaguuguuacccugauagcuccgagauaacuugcgugugccgcgacaauuggcacgggucuaacagaccaugggucagcuucaaucagaaccucgaauaucagaucggauacauuuguucaggcaucuuuggcgauaauccgaggcccaacgacaaaaccgggaguugcggaccuguuuccagcaauggugcgaacggcgugaagggguucucuuuuaaguauggaaacggcguauggaucggucggacaaaaucaauuaguagccgcaauggguucgagaugauaugggauccaaacggcuggaccggaacggacaauaacuuuuccaucaagcaagacauugugggcaucaaugaauggucuggguacucggggagcuucguccagcaucccgagcugacuggucuggauuguauucgaccuugcuucuggguggaacucaucagaggcaggccaaaagagaacacaauauggaccuccgggucaaguaucucuuuuuguggaguuaauagcgacacugugggcugguccuggcccgauggugcagaguuaccguucacaauugacaaguga

SEQ ID NO: 145860 - RNA, 1410 nt, Artificial Sequence; identical to SEQ ID NO: 144786
  derived and/or modified CDS sequence (opt3) from neuraminidase__InfluenzaA__ACZ96519

SEQ ID NO: 145861 - RNA, 1410 nt, Artificial Sequence; identical to SEQ ID NO: 144786
  derived and/or modified CDS sequence (opt3) from neuraminidase__InfluenzaA__ACZ96529

SEQ ID NO: 145862 - RNA, 1410 nt, Artificial Sequence
  derived and/or modified CDS sequence (opt3) from neuraminidase__InfluenzaA__ACZ96552
augaaccccaaucagaagaucauuaccauaggcagcgugugcaugacaaucgggauggccaaccugauucuccaaaucggaaauauuaucuccauauggaucucucacucaagucagcuugguaaccagaaucagauugagacuuguaaccaaagcgucaucacguacgaaaauaacaccuggguuaaucagacauaugugaacauuuccaauacuaacuucgcugcaggccagucuguagugucggucaaacuggccgggaauagcucauugugcccugugaguggaugggcgaucuacuccaaggacaacucuauaagaauuggcagcaaaggugauguuuuugugaucagggagccauucauuuccuguucaccguuagaaugccggaccuuuuuccugacacagggggcucuacucaaugacaagcauaguaacggaaccaucaaagaucgcagccccuaucgaacucugaugucuuguccuaucggcgaggucccaucccccuacaacucacguuuugaaagcguggccuggagugcaucugccugccacgacggcauuaauuggcuuacaauagggaucuccggaccugauaacggugcuguagcaguucugaaguauaauggcauuaucaccgacacgauaaagagcuggagaaacaauauuuugaggacucaagagucggagugugccugcgugaacgggucuuguuucaccgucaugacagauggaccauccgacggccaggcuucauacaaaaucuuucggaucgaaaaggguaaaauugugaagaguguggagaugaaugcccccaacuaucauuacgaagagugcagcuguuacccugauuccucugagaucacuugcgucugccgcgacaauuggcacgggagcaacagaccauggguuucauucaaucagaaccucgaauaucagauuggauacauauguaguggcaucuuuggcgauaauccgaggcccaacgacaaaaccggguccugcggaccugugagcucuaauggugcgaacggcguaaagggguucucauuuaaguauggaaacggcguguggauuggucggacaaaaaguaucagcucccgcaauggguucgagaugaucugggauccaaacggcuggaccggaacggacaauaacuuuucuauuaagcaagacauagucggcaucaaugaauggucgggguacagcggauccuucgugcagcaucccgagcugacuggucuggauuguauucgaccuugcuucuggguugaacucaucagaggcaggccaaaagagaacacaauuuggaccucagggaguucuaucagcuuuuguggagucaauuccgacacugugggcuggucauggcccgauggugcagaguuaccguucacaauagacaaguga

SEQ ID NO: 145863 - RNA, 1410 nt, Artificial Sequence; identical to SEQ ID NO: 144786
  derived and/or modified CDS sequence (opt3) from neuraminidase__InfluenzaA__ACZ96562

SEQ ID NO: 145864 - RNA, 1410 nt, Artificial Sequence; identical to SEQ ID NO: 144786
  derived and/or modified CDS sequence (opt3) from neuraminidase__InfluenzaA__ACZ96572

SEQ ID NO: 145865 - RNA, 1410 nt, Artificial Sequence; identical to SEQ ID NO: 144786
  derived and/or modified CDS sequence (opt3) from neuraminidase__InfluenzaA__ACZ96582

SEQ ID NO: 145866 - RNA, 1410 nt, Artificial Sequence
  derived and/or modified CDS sequence (opt3) from neuraminidase__InfluenzaA__ACZ96592
augaaccccaaucagaagaucauuaccauaggcagcgugugcaugacaaucgggauggccaaccugauucuccaaaucggaaauauuaucuccauauggaucucucacucaauucagcuugguaaccagaaucagaucgagacuuguaaccaaagugucauuacguacgaaaauaacaccuggguuaaucagacauaugugaacaucagcaauacuaacuucgcugcaggccaguccguagugucugucaaacuggccgggaauagcucauugugcccugugagcggaugggcgauauacaguaaggacaacuccauuagaaucggcucuaaaggugauguuuuugugauuagggagccauucaucagcuguuccccguuagaaugccggaccuuuuuccugacacagggggcucuacucaaugacaagcauucaaacggaaccaucaaagaucgcagucccuaucgaacucugaugagcuguccuauuggcgaggucccaucucccuacaacucccguuuugaaucaguggccuggagcgcaagugccugccacgacggcauaaauuggcuuacaaucgggauuucuggaccugauaacggugcuguagcaguucugaaguauaauggcaucauaaccgacacgauuaaguccuggagaaacaauaucuugaggacucaagagagcgagugugccugcgugaacgggucguguuucaccgucaugacagauggaccaucugacggccaguccucauacaaaaucuuuaagauugaaaaagguaagaucgugaaaaguguggagaugaaugcucccaacuaucauuacgaagagugcagcuguuacccugauuccucugagauuacuugcgucugccgggacaauuggcacgggagcaaccgcccauggguuucauucaaucagaaccucgaauaucagauaggauacaucuguaguggcauuuuuggcgauaauccgagacccaacgacaagaccggguccugcggaccugugagcucuaauggugccaacggcguaaagggguucucauuuaaauauggaaacggcguguggaucgguaggacaaagaguaucagcucccggaauggguucgagaugauuugggauccaaacggcuggaccggaacggacaauaacuuuucuauaaaacaagacaucgucggcauuaaugaauggucgggguacagcggauccuucgugcagcaucccgagcugacuggucuggauuguauccgcccuugcuucuggguugaacucauucgaggcagaccaaaggagaacacaaucuggaccucagggaguucuauaucguuuuguggagucaauuccgacacugugggcuggucauggcccgauggugcggaguuaccguucacaaucgacaaauga

SEQ ID NO: 145867 - RNA, 1410 nt, Artificial Sequence; identical to SEQ ID NO: 144786
  derived and/or modified CDS sequence (opt3) from neuraminidase__InfluenzaA__ACZ96602

SEQ ID NO: 145868 - RNA, 1410 nt, Artificial Sequence
  derived and/or modified CDS sequence (opt3) from neuraminidase__InfluenzaA__ACZ96612
augaaccccaaucagaagaucauuaccauaggcagcgugugcaugacaaucgggauggccaaccugauucuccaaaucggaaauauuaucuccauauggaucucucacucaauucagcuugguaaccagaaucagaucgagacuuguaaccaaagugucguuacguacgaaaauaacaccugggugaaucagacauauguaaacauuagcaauacuaacuucgcugcaggccaguccguggucucugugaaacuggccggaaauucgucauugugcccuguuagcggaugggcgaucuacaguaaggacaacuccgugagaauaggcucuaaaggugaugucuuugugauuagggagccauucaucagcuguuccccguuagaaugccggaccuuuuuccugacacagggggcucuacucaaugacaagcauucaaacggaaccauuaaagaucgcagucccuaucgaacucugaugagcuguccuaucggcgagguaccaucucccuacaacucccguuuugaaucaguugccuggagcgcaagugccugccacgacggcaucaauuggcuuacaauugggauaucuggaccugauaacggugcuguggcaguccugaaguauaauggcaucauuaccgacacgaucaaguccuggagaaacaauauauugaggacucaagagagcgagugugccugcgugaacgggucguguuucaccgugaugacagauggaccaucuaauggccaggcuuccuacaaaauuuuucggaucgaaaaggguaaaaucgucaagucaguugagaugaacgcccccaauuaucauuacgaagagugcaguuguuacccugacagcuccgagauuacuugcgugugccgcgauaacuggcacgggucuaauagaccaugggugagcuucaaccagaaucucgaauaucagaucggauacauuuguucaggcauauuuggcgacaacccgaggcccaaugauaaaaccgggaguugcggaccuguauccagcaacggugcgaacggcgucaagggguucucuuuuaaguauggaaauggcguguggaucggucggacaaaaucaauuaguagccgcaacggguucgagaugaucugggacccaaauggcuggaccggaacggauaacaauuuuuccaucaagcaagacauuguuggcauaaacgaauggucuggguacucggggagcuucgugcagcaucccgagcugacuggucuggacuguauccgaccuugcuucugggucgaacucauuagaggcaggccaaaagagaauacaaucuggaccuccgggucaaguauuucuuuuuguggagugaacagcgauacuguaggcugguccuggcccgacggugcagaguuaccguucacaaucgauaaguga

SEQ ID NO: 145869 - RNA, 1410 nt, Artificial Sequence; identical to SEQ ID NO: 144816
  derived and/or modified CDS sequence (opt3) from neuraminidase__InfluenzaA__ACZ96622

SEQ ID NO: 145870 - RNA, 1410 nt, Artificial Sequence; identical to SEQ ID NO: 144816
  derived and/or modified CDS sequence (opt3) from neuraminidase__InfluenzaA__ACZ96632

SEQ ID NO: 145871 - RNA, 1410 nt, Artificial Sequence; identical to SEQ ID NO: 144816
  derived and/or modified CDS sequence (opt3) from neuraminidase__InfluenzaA__ACZ96642

SEQ ID NO: 145872 - RNA, 1410 nt, Artificial Sequence; identical to SEQ ID NO: 144816
  derived and/or modified CDS sequence (opt3) from neuraminidase__InfluenzaA__ACZ96652

SEQ ID NO: 145873 - RNA, 1410 nt, Artificial Sequence; identical to SEQ ID NO: 144816
  derived and/or modified CDS sequence (opt3) from neuraminidase__InfluenzaA__ACZ96662

SEQ ID NO: 145874 - RNA, 1410 nt, Artificial Sequence; identical to SEQ ID NO: 144816
  derived and/or modified CDS sequence (opt3) from neuraminidase__InfluenzaA__ACZ96672

SEQ ID NO: 145875 - RNA, 1410 nt, Artificial Sequence; identical to SEQ ID NO: 144816
  derived and/or modified CDS sequence (opt3) from neuraminidase__InfluenzaA__ACZ96682

SEQ ID NO: 145876 - RNA, 1410 nt, Artificial Sequence; identical to SEQ ID NO: 144816
  derived and/or modified CDS sequence (opt3) from neuraminidase__InfluenzaA__ACZ96692

SEQ ID NO: 145877 - RNA, 1410 nt, Artificial Sequence; identical to SEQ ID NO: 144816
  derived and/or modified CDS sequence (opt3) from neuraminidase__InfluenzaA__ACZ96702

SEQ ID NO: 145878 - RNA, 1410 nt, Artificial Sequence; identical to SEQ ID NO: 144816
  derived and/or modified CDS sequence (opt3) from neuraminidase__InfluenzaA__ACZ96712

SEQ ID NO: 145879 - RNA, 1410 nt, Artificial Sequence; identical to SEQ ID NO: 144816
  derived and/or modified CDS sequence (opt3) from neuraminidase__InfluenzaA__ACZ96722

SEQ ID NO: 145880 - RNA, 1410 nt, Artificial Sequence; identical to SEQ ID NO: 144816
  derived and/or modified CDS sequence (opt3) from neuraminidase__InfluenzaA__ACZ96732

SEQ ID NO: 145881 - RNA, 1410 nt, Artificial Sequence; identical to SEQ ID NO: 144816
  derived and/or modified CDS sequence (opt3) from neuraminidase__InfluenzaA__ACZ96742

SEQ ID NO: 145882 - RNA, 1410 nt, Artificial Sequence; identical to SEQ ID NO: 144776
  derived and/or modified CDS sequence (opt3) from neuraminidase__InfluenzaA__ACZ96752

SEQ ID NO: 145883 - RNA, 1410 nt, Artificial Sequence; identical to SEQ ID NO: 144776
  derived and/or modified CDS sequence (opt3) from neuraminidase__InfluenzaA__ACZ96762

SEQ ID NO: 145884 - RNA, 1410 nt, Artificial Sequence; identical to SEQ ID NO: 144776
  derived and/or modified CDS sequence (opt3) from neuraminidase__InfluenzaA__ACZ96772

SEQ ID NO: 145885 - RNA, 1410 nt, Artificial Sequence; identical to SEQ ID NO: 144776
  derived and/or modified CDS sequence (opt3) from neuraminidase__InfluenzaA__ACZ96782

SEQ ID NO: 145886 - RNA, 1410 nt, Artificial Sequence; identical to SEQ ID NO: 144776
  derived and/or modified CDS sequence (opt3) from neuraminidase__InfluenzaA__ACZ96792

SEQ ID NO: 145887 - RNA, 1410 nt, Artificial Sequence; identical to SEQ ID NO: 144786
  derived and/or modified CDS sequence (opt3) from neuraminidase__InfluenzaA__ACZ96802

SEQ ID NO: 145888 - RNA, 1410 nt, Artificial Sequence; identical to SEQ ID NO: 144786
  derived and/or modified CDS sequence (opt3) from neuraminidase__InfluenzaA__ACZ96812

SEQ ID NO: 145889 - RNA, 1410 nt, Artificial Sequence; identical to SEQ ID NO: 145369
  derived and/or modified CDS sequence (opt3) from neuraminidase__InfluenzaA__ACZ96822

SEQ ID NO: 145890 - RNA, 1410 nt, Artificial Sequence
  derived and/or modified CDS sequence (opt3) from neuraminidase__InfluenzaA__ACZ96842
augaaccccaaucagaagaucauuaccauaggcagcgugugcaugacaaucgggauggccaaccugauucuccaaaucggaaauauuaucuccauauggaucucucacucaauucagcuugguaaccagaaucagaucgagacuuguaaccaaagugucauuacguacgaaaauaacaccuggguuaaucagacauaugugaacaucagcaauacuaacuucgcugcaggccaguccguagugucugucaaacuggccggaaauucgucauugugcccugugagcggaugggcgauauacaguaaggacaacuccguuagaauuggcucuaaaggugauguguuugucaucagggagccauucauuagcuguuccccguuagaaugccggaccuuuuuccugacacagggggcucuacucaaugacaagcauucaaacggaaccaucaaagaucgcagucccuaucgaacucugaugagcuguccuaucggcgaggugccaucucccuacaacucccguuuugaaucaguagccuggagcgcaagugccugccacgacggcauuaauuggcuuacaauagggaucucuggaccugauaacggugcuguugcagugcugaaguauaauggcauuaucaccgacacgauaaaguccuggagaaacaauauuuugaggacucaagagagcgagugugccugcgucaacgggucguguuucaccgugaugacagauggaccaucuaauggccaggcuuccuacaaaaucuuucggaucgaaaaggguaaaauugugaagucagucgagaugaucgcccccaacuaucauuacgaagagugcaguuguuacccugacagcuccgagauuacuugcguuugccgcgauaauuggcacgggucuaacagaccaugggugagcuucaaucagaaccucgaauaucagauaggauacaucuguucaggcauuuuuggcgacaauccgaggcccaacgauaaaaccgggaguugcggaccuguauccagcaauggugcgaacggcgugaagggguucucuuuuaaguauggaaacggcgucuggaucggucggacaaaaucaaucaguagccgcaauggguucgagaugauuugggacccaaacggcuggaccggaacggauaauaacuuuuccauaaagcaagacaucgugggcauuaaugaauggucuggguacucggggagcuucguucagcaucccgagcugacuggucuggacuguauccgaccuugcuucuggguggaacucauuagaggcaggccaaaagagaacacaaucuggaccuccgggucaaguauaucuuuuuguggagucaauagcgauacugugggcugguccuggcccgacggugcagaguuaccguucacaaucgauaaguga

SEQ ID NO: 145891 - RNA, 1410 nt, Artificial Sequence; identical to SEQ ID NO: 144786
  derived and/or modified CDS sequence (opt3) from neuraminidase__InfluenzaA__ACZ96852

SEQ ID NO: 145892 - RNA, 1410 nt, Artificial Sequence; identical to SEQ ID NO: 144786
  derived and/or modified CDS sequence (opt3) from neuraminidase__InfluenzaA__ACZ96862

SEQ ID NO: 145893 - RNA, 1410 nt, Artificial Sequence
  derived and/or modified CDS sequence (opt3) from neuraminidase__InfluenzaA__ACZ96872
augaaccccaaucagaagaucauuaccauaggcagcgugugcaugacaaucgggauggccaaccugauucuccaaaucggaaauauuaucuccauauggaucucucacucaauucagcuugguaaccagaaucagaucgagacuuguaaccaaagugucauuacguacgaaaauaacaccuggguuaaucagacauaugugaacaucagcaauacuaacuucgcugcaggccaguccguagugucuaugaaacuggccggaaauucgucauugugcccugucagcggaugggcgauauacaguaaggacaacuccauuagaaucggcucuaaaggugauguguuuguuauuagggagccauucaucagcuguuccccguuagaaugccggaccuuuuuccugacacagggggcucuacucaaugacaagcauucaaacggaaccaucaaagaucgcagucccuaucgaacucugaugagcuguccuauuggcgaggugccaucucccuacaacucccguuuugaaucagucgccuggagcgcaagugccugccacgacggcauaaauuggcuuacaaucgggauuucuggaccugauaacggugcuguggcaguacugaaguauaauggcaucauaaccgacacgauuaaguccuggagaaacaauaucuugaggacucaagagagcgagugugccugcguuaacgggucguguuucaccgugaugacagauggaccaucugacggccaggcuuccuacaaaaucuuucggauugaaaaggguaaaaucgucaagucaguggagaugaaugcccccaacuaucauuacgaagagugcaguuguuacccugauagcuccgagauuacuugcgugugccgcgacaauuggcacgggucuaacagaccaugggucagcuucaaucagaaccucgaauaucagauaggauacaucuguucaggcauuuuuggcgauaauccgaggcccaacgacaaaaccgggaguugcggaccuguuuccagcaauggugcgaacggcgugaagggguucucuuuuaaguauggaaacggcguauggaucggucggacaaaaucaaucaguagccgcaauggguucgagaugauuugggauccaaacggcuggaccggaacggacaauaacuuuuccauaaagcaagacaucgugggcauuaaugaauggucuggguacucggggagcuucguccagcaucccgagcugacuggucuggauuguauccgaccuugcuucuggguggaacucauuagaggcaggccaaaagagaacacaaucuggaccuccgggucaaguauaucuuuuuguggaguuaauagcgacacugugggcugguccuggcccgauggugcagaguuaccguucacaaucgacaaguga

SEQ ID NO: 145894 - RNA, 1410 nt, Artificial Sequence; identical to SEQ ID NO: 144776
  derived and/or modified CDS sequence (opt3) from neuraminidase__InfluenzaA__ACZ96882

SEQ ID NO: 145895 - RNA, 1410 nt, Artificial Sequence; identical to SEQ ID NO: 145893
  derived and/or modified CDS sequence (opt3) from neuraminidase__InfluenzaA__ACZ96892

SEQ ID NO: 145896 - RNA, 1410 nt, Artificial Sequence; identical to SEQ ID NO: 145893
  derived and/or modified CDS sequence (opt3) from neuraminidase__InfluenzaA__ACZ96902

SEQ ID NO: 145897 - RNA, 1410 nt, Artificial Sequence; identical to SEQ ID NO: 144776
  derived and/or modified CDS sequence (opt3) from neuraminidase__InfluenzaA__ACZ96912

SEQ ID NO: 145898 - RNA, 1410 nt, Artificial Sequence; identical to SEQ ID NO: 144776
  derived and/or modified CDS sequence (opt3) from neuraminidase__InfluenzaA__ACZ96922

SEQ ID NO: 145899 - RNA, 1410 nt, Artificial Sequence; identical to SEQ ID NO: 145893
  derived and/or modified CDS sequence (opt3) from neuraminidase__InfluenzaA__ACZ96932

SEQ ID NO: 145900 - RNA, 1410 nt, Artificial Sequence; identical to SEQ ID NO: 145893
  derived and/or modified CDS sequence (opt3) from neuraminidase__InfluenzaA__ACZ96942

SEQ ID NO: 145901 - RNA, 1410 nt, Artificial Sequence; identical to SEQ ID NO: 144776
  derived and/or modified CDS sequence (opt3) from neuraminidase__InfluenzaA__ACZ96952

SEQ ID NO: 145902 - RNA, 1410 nt, Artificial Sequence; identical to SEQ ID NO: 144776
  derived and/or modified CDS sequence (opt3) from neuraminidase__InfluenzaA__ACZ97024

SEQ ID NO: 145903 - RNA, 1410 nt, Artificial Sequence; identical to SEQ ID NO: 145893
  derived and/or modified CDS sequence (opt3) from neuraminidase__InfluenzaA__ACZ97336

SEQ ID NO: 145904 - RNA, 1410 nt, Artificial Sequence; identical to SEQ ID NO: 145893
  derived and/or modified CDS sequence (opt3) from neuraminidase__InfluenzaA__ACZ97346

SEQ ID NO: 145905 - RNA, 1410 nt, Artificial Sequence; identical to SEQ ID NO: 144786
  derived and/or modified CDS sequence (opt3) from neuraminidase__InfluenzaA__ACZ97366

SEQ ID NO: 145906 - RNA, 1410 nt, Artificial Sequence; identical to SEQ ID NO: 144786
  derived and/or modified CDS sequence (opt3) from neuraminidase__InfluenzaA__ACZ97376

SEQ ID NO: 145907 - RNA, 1410 nt, Artificial Sequence; identical to SEQ ID NO: 144786
  derived and/or modified CDS sequence (opt3) from neuraminidase__InfluenzaA__ACZ97386

SEQ ID NO: 145908 - RNA, 1410 nt, Artificial Sequence; identical to SEQ ID NO: 145893
  derived and/or modified CDS sequence (opt3) from neuraminidase__InfluenzaA__ACZ97396

SEQ ID NO: 145909 - RNA, 1410 nt, Artificial Sequence; identical to SEQ ID NO: 144786
  derived and/or modified CDS sequence (opt3) from neuraminidase__InfluenzaA__ACZ98171

SEQ ID NO: 145910 - RNA, 1410 nt, Artificial Sequence; identical to SEQ ID NO: 144786
  derived and/or modified CDS sequence (opt3) from neuraminidase__InfluenzaA__ACZ98181

SEQ ID NO: 145911 - RNA, 1410 nt, Artificial Sequence
  derived and/or modified CDS sequence (opt3) from neuraminidase__InfluenzaA__ACZ98191
augaaccccaaucagaagaucauuaccauaggcagcgugugcaugacaaucgggauggccaaccugauucuccaaaucggaaauauuaucuccauauggaucucucacucaauucagcuugguaaccagaaucagaucgagacuuguaaccaaagugucauuagcuacgaaaauaacacguggguuaaucagaccuaugugaacaucuccaauacaaacuucgcugcaggccagucuguagugucggucaaacuggccgggaauagcagcuugugcccugugaguggaugggcgauauacuccaaggacaacucuauuagaaucggcagcaaaggugauguuuuugugauuagggagccauucaucuccuguucaccguuagaaugccggaccuuuuuccugacucagggggcucuacucaaugacaagcauaguaacggaacaaucaaagaucgcagccccuaucgaacccugaugucuuguccuauuggcgaggucccaucccccuacaacucacguuuugaaagcguggccuggagugcaucugccugccacgacggcauaaauuggcuuacuaucgggauuuccggaccugauaacggugcuguagcaguucugaaguauaauggcaucauaacagacaccauuaagagcuggagaaacaauaucuugaggacgcaagagucggagugugccugcgugaacgggucuuguuucacugucaugaccgauggaccauccgacggccaggcuucauacaaaaucuuucggauugaaaaggguaaaaucgugaagaguguggagaugaaugcccccaacuaucauuacgaagagugcagcuguuacccugauuccucugagauuacaugcgucugccgcgacaauuggcacgggagcaacagaccauggguuucauucaaucagaaccucgaauaucagauaggauacaucuguaguggcauuuuuggcgauaauccgaggcccaacgacaaaacuggguccugcggaccugugagcucuaauggugcgaacggcguaaagggguucucauuuaaguauggaaacggcguguggaucggucggaccaaaaguaucagcucccgcaauggguucgagaugauuugggauccaaacggcuggacaggaaccgacaauaacuuuucuauaaagcaagacaucgucggcauuaaugaauggucgggguacagcggauccuucgugcagcaucccgagcugacgggucuggauuguauccgaccuugcuucuggguugaacucauuagaggcaggccaaaagagaacacuaucuggacaucagggaguucuauaucauuuuguggagucaauuccgacaccgugggcuggucauggcccgauggugcagaguuaccguucacuaucgacaaguga

SEQ ID NO: 145912 - RNA, 1410 nt, Artificial Sequence; identical to SEQ ID NO: 144776
  derived and/or modified CDS sequence (opt3) from neuraminidase__InfluenzaA__ACZ98201

SEQ ID NO: 145913 - RNA, 1410 nt, Artificial Sequence; identical to SEQ ID NO: 144786
  derived and/or modified CDS sequence (opt3) from neuraminidase__InfluenzaA__ACZ98211

SEQ ID NO: 145914 - RNA, 1410 nt, Artificial Sequence; identical to SEQ ID NO: 144786
  derived and/or modified CDS sequence (opt3) from neuraminidase__InfluenzaA__ACZ98221

SEQ ID NO: 145915 - RNA, 1410 nt, Artificial Sequence; identical to SEQ ID NO: 144786
  derived and/or modified CDS sequence (opt3) from neuraminidase__InfluenzaA__ACZ98231

SEQ ID NO: 145916 - RNA, 1410 nt, Artificial Sequence; identical to SEQ ID NO: 144786
  derived and/or modified CDS sequence (opt3) from neuraminidase__InfluenzaA__ACZ98241

SEQ ID NO: 145917 - RNA, 1410 nt, Artificial Sequence; identical to SEQ ID NO: 145763
  derived and/or modified CDS sequence (opt3) from neuraminidase__InfluenzaA__ACZ98251

SEQ ID NO: 145918 - RNA, 1410 nt, Artificial Sequence; identical to SEQ ID NO: 144786
  derived and/or modified CDS sequence (opt3) from neuraminidase__InfluenzaA__ACZ98261

SEQ ID NO: 145919 - RNA, 1410 nt, Artificial Sequence; identical to SEQ ID NO: 144786
  derived and/or modified CDS sequence (opt3) from neuraminidase__InfluenzaA__ACZ98271

SEQ ID NO: 145920 - RNA, 1410 nt, Artificial Sequence; identical to SEQ ID NO: 144786
  derived and/or modified CDS sequence (opt3) from neuraminidase__InfluenzaA__ACZ98281

SEQ ID NO: 145921 - RNA, 1410 nt, Artificial Sequence; identical to SEQ ID NO: 144786
  derived and/or modified CDS sequence (opt3) from neuraminidase__InfluenzaA__ACZ98291

SEQ ID NO: 145922 - RNA, 1410 nt, Artificial Sequence; identical to SEQ ID NO: 144776
  derived and/or modified CDS sequence (opt3) from neuraminidase__InfluenzaA__ACZ98301

SEQ ID NO: 145923 - RNA, 1410 nt, Artificial Sequence
  derived and/or modified CDS sequence (opt3) from neuraminidase__InfluenzaA__ACZ98321
augaaccccaaucagaagaucauuaccauaggcagcgugugcaugacaaucgggauggccaaccugauucuccaaaucggaaauauuaucuccauauggaucucucacucaauucagcuugguaaccagaaucagaucgagacuuguaaccaaagugucauuacguacgaaaauaacaccuggguuaaucagacauaugugaacaucagcaauacuaacuucgcugcaggccaguccguagugucugucaaacuggccggaaauucgucauugugcccugugagcgggugggcgauauacaguaaggacaacuccauuagaaucggcucuaaaggugauguuuuugugauuagggagccauucaucagcuguuccccguuagaaugccggaccuuuuuccugacacagggggcucuacucaaugacaagcauucaaacggaaccaucaaagaucgcagucccuaucgaacucugaugagcuguccuauuggcgaggucccaucucccuacaacucccguuuugaaucaguggccuggagcgcaagugccugccacgacggcauaaauuggcuuacaaucgggauuucuggaccugauaacggugcuguagcaguucugaaguauaauggcaucauaaccgacacgauuaaguccuggagaaacaauaucuugaggacucaagagagcgagugugccugcgugaacgggucguguuucaccgucaugacagauggaccaucugacggccaggcuuccuacaaaaucuuucggauugaaaaggguaaaaucgugaagucaguggagaugaaugcccccaacuaucauuacgaagagugcaguuguuacccugauagcuccgagauuacuugcgucugccgcgacaauuggcacgggucuaacagaccauggguuagcuucaaucagaaccucgaauaucagauaggauacaucuguucaggcauuuuuggcgauaauccgaggcccaacgacaaaaccgggaguugcggaccuguguccagcaauggugcgaacggcguaaagggguucucuuuuaaguauggaaacggcguguggaucggucggacaaaaucaaucaauagucgcaacggguucgagaugauuugggauccaaauggcuggaccggaacggacaacaauuuuagcauaaagcaagacaucgucggcauuaacgaaugguccggguacucuggaucguucgugcagcaucccgagcugacuggucuggauuguauccgaccuugcuucuggguugaacucauuagaggcaggccaaaagagaauacaaucuggaccagcggguccucaauaaguuuuuguggagugaacucugacacugucggcuggagcuggcccgauggugcagaguuaccguucacaaucgacaaguga

SEQ ID NO: 145924 - RNA, 1410 nt, Artificial Sequence; identical to SEQ ID NO: 144786
  derived and/or modified CDS sequence (opt3) from neuraminidase__InfluenzaA__ACZ98331

SEQ ID NO: 145925 - RNA, 1410 nt, Artificial Sequence
  derived and/or modified CDS sequence (opt3) from neuraminidase__InfluenzaA__ACZ98341
augaaccccaaucagaagaucauuaccauaggcagcgugugcaucacaauugggauggccaaccugauccuccaaauuggaaauaucauauccaucuggauuucucacccuauccagcuugguaaccagaaucagauugagacuuguaaccaaucagucaucacguacgaaaauaacaccuggguuaaucagacauaugugaacauaaguaauacuaaccuggcugcaggccagagcguaguguccgucaaauuggccggaaauucuucguuaugcccagugucagggugggcgauuuacagcaaggacaacaguaucagaauuggcuccaaaggugauguuuucgugaucagggagccguuuaucucuuguagcccccuggaaugccggaccuucuuucuaacacagggggcucuccugaaugacaagcauuccaacggaaccauuaaagaucgcucaccuuaucgaacucuuaugaguuguccaauaggcgagguccccagcccuuacaacucucguuucgaauccguggccuggucagcaagcgccugccacgacggcaucaauuggcugacaauugggaucaguggaccagauaacggugcuguagcaguuuugaaguauaauggcauaauuaccgacacgaucaagucuuggagaaacaauauccucaggacucaagaguccgagugugccugcgugaacgggagcuguuuuaccgucaugacagauggacccucggacggccaggcuucuuacaaaauuuuccggaucgaaaaggguaaaauugugaaguccguggagaugaaugccccuaacuaucauuacgaagagugcucauguuacccagauaguagcgagauaacuugcgucugccgcgacaauuggcacggguccaacagaccguggguuucuuuuaaucagaaccuggaauaucagaucggauacauuuguagcggcaucuucggcgauaaucccaggccuaacgacaaaaccgggucaugcggaccagugaguuccaauggugcgaacggcguaaagggguuuagcuucaaguauggaaacggcguguggaucggucggacaaaaucuauuucaagucgcaauggguuugagaugauaugggaucccaacggcuggaccggaacggacaauaacuucagcaucaagcaagacauugucggcaucaaugaaugguccggguacucuggaucguuugugcagcauccugagcugacuggucucgauuguauucgaccaugcuucuggguugaauuaaucagaggcaggcccaaagagaacacaauauggaccagcggguccucaaucaguuucuguggagucaauucugacacugugggcuggagcuggccggauggugcagagcugccuuuuacaauugacaaguga

SEQ ID NO: 145926 - RNA, 1410 nt, Artificial Sequence; identical to SEQ ID NO: 144786
  derived and/or modified CDS sequence (opt3) from neuraminidase__InfluenzaA__ACZ98351

SEQ ID NO: 145927 - RNA, 1410 nt, Artificial Sequence; identical to SEQ ID NO: 144786
  derived and/or modified CDS sequence (opt3) from neuraminidase__InfluenzaA__ACZ98361

SEQ ID NO: 145928 - RNA, 1410 nt, Artificial Sequence; identical to SEQ ID NO: 144786
  derived and/or modified CDS sequence (opt3) from neuraminidase__InfluenzaA__ACZ98371

SEQ ID NO: 145929 - RNA, 1410 nt, Artificial Sequence; identical to SEQ ID NO: 144786
  derived and/or modified CDS sequence (opt3) from neuraminidase__InfluenzaA__ACZ98381

SEQ ID NO: 145930 - RNA, 1410 nt, Artificial Sequence; identical to SEQ ID NO: 144786
  derived and/or modified CDS sequence (opt3) from neuraminidase__InfluenzaA__ACZ98391

SEQ ID NO: 145931 - RNA, 1410 nt, Artificial Sequence; identical to SEQ ID NO: 144786
  derived and/or modified CDS sequence (opt3) from neuraminidase__InfluenzaA__ACZ98401

SEQ ID NO: 145932 - RNA, 1410 nt, Artificial Sequence; identical to SEQ ID NO: 144786
  derived and/or modified CDS sequence (opt3) from neuraminidase__InfluenzaA__ACZ98411

SEQ ID NO: 145933 - RNA, 1410 nt, Artificial Sequence; identical to SEQ ID NO: 144816
  derived and/or modified CDS sequence (opt3) from neuraminidase__InfluenzaA__ACZ98421

SEQ ID NO: 145934 - RNA, 1410 nt, Artificial Sequence; identical to SEQ ID NO: 144786
  derived and/or modified CDS sequence (opt3) from neuraminidase__InfluenzaA__ACZ98431

SEQ ID NO: 145935 - RNA, 1410 nt, Artificial Sequence; identical to SEQ ID NO: 144786
  derived and/or modified CDS sequence (opt3) from neuraminidase__InfluenzaA__ACZ98441

SEQ ID NO: 145936 - RNA, 1410 nt, Artificial Sequence; identical to SEQ ID NO: 144786
  derived and/or modified CDS sequence (opt3) from neuraminidase__InfluenzaA__ACZ98451

SEQ ID NO: 145937 - RNA, 1410 nt, Artificial Sequence; identical to SEQ ID NO: 144786
  derived and/or modified CDS sequence (opt3) from neuraminidase__InfluenzaA__ACZ98461

SEQ ID NO: 145938 - RNA, 1410 nt, Artificial Sequence; identical to SEQ ID NO: 145369
  derived and/or modified CDS sequence (opt3) from neuraminidase__InfluenzaA__ACZ98674

SEQ ID NO: 145939 - RNA, 1410 nt, Artificial Sequence; identical to SEQ ID NO: 145893
  derived and/or modified CDS sequence (opt3) from neuraminidase__InfluenzaA__ACZ98684

SEQ ID NO: 145940 - RNA, 1410 nt, Artificial Sequence; identical to SEQ ID NO: 145839
  derived and/or modified CDS sequence (opt3) from neuraminidase__InfluenzaA__ACZ98694

SEQ ID NO: 145941 - RNA, 1410 nt, Artificial Sequence; identical to SEQ ID NO: 144786
  derived and/or modified CDS sequence (opt3) from neuraminidase__InfluenzaA__ADA60801

SEQ ID NO: 145942 - RNA, 1410 nt, Artificial Sequence; identical to SEQ ID NO: 144786
  derived and/or modified CDS sequence (opt3) from neuraminidase__InfluenzaA__ADA69294

SEQ ID NO: 145943 - RNA, 1410 nt, Artificial Sequence; identical to SEQ ID NO: 144786
  derived and/or modified CDS sequence (opt3) from neuraminidase__InfluenzaA__ADA69304

SEQ ID NO: 145944 - RNA, 1410 nt, Artificial Sequence; identical to SEQ ID NO: 144786
  derived and/or modified CDS sequence (opt3) from neuraminidase__InfluenzaA__ADA69314

SEQ ID NO: 145945 - RNA, 1410 nt, Artificial Sequence; identical to SEQ ID NO: 144786
  derived and/or modified CDS sequence (opt3) from neuraminidase__InfluenzaA__ADA69324

SEQ ID NO: 145946 - RNA, 1410 nt, Artificial Sequence; identical to SEQ ID NO: 144786
  derived and/or modified CDS sequence (opt3) from neuraminidase__InfluenzaA__ADA69334

SEQ ID NO: 145947 - RNA, 1410 nt, Artificial Sequence; identical to SEQ ID NO: 144786
  derived and/or modified CDS sequence (opt3) from neuraminidase__InfluenzaA__ADA69451

SEQ ID NO: 145948 - RNA, 1410 nt, Artificial Sequence; identical to SEQ ID NO: 144786
  derived and/or modified CDS sequence (opt3) from neuraminidase__InfluenzaA__ADA69453

SEQ ID NO: 145949 - RNA, 1410 nt, Artificial Sequence
  derived and/or modified CDS sequence (opt3) from neuraminidase__InfluenzaA__ADA71153
augaaccccaaucagaagaucauuaccauaggcagcgugucccugacaaucucuacuauuugcuucuuuaugcaaaucgccauucucgucacgaccguuacacuucacuucaaacaguacgaguuuaacucaccuccaaauaaccaggugaugcugugugaaccgacuaucauagagagaaauaucaccgaaauuguauauuugacaaacaccacuaucgagaaggaaauuugccccaaauuagcugaguacaggaauuggaguaagccucagugugacaucacaggguucgcaccauuuagcaaagauaacuccauacggcugucugccggaggugacauuugggugacccgcgagcccuaugucucgugcgauccugacaaguguuaccaauucgcgcuaggccaggggacgacucucaauaacgugcauucaaauaacaccguucgagaucguacaccauauagaacucugcuuaugaaugaacugggagugcccuuucacuugggcaccaagcaggucugcaucgcuuggagcaguuccucuugucaugacgguaaagccuggcuccacgugugcauuacaggggaugacaagaacgcaaccgccagcuucaucuacaauggaaggcugguagauuccguugugucauggaguaaagacauccugcggacgcaggagagcgaaugugucugcauuaacggcacuuguacaguggugaugaccgauggcucugcuuccgggaaggcagacacuaaaauacucuuuaucgaggagggaaagauuguccauacaucaaccuuaagcgguagugcccaacacguugaagagugcucuugcuauccucgcuacccaggcgugagauguguaugcagggauaacuggaagggguccaaucggccgaucguggacauaaacauuaaagaccacagcaucgucucgcgcuacguguguucuggacugguuggcgaucccccucgaaagaaugacuccucaaguagcucccauugccuugauccaaacaaugaagagggugggcacggagugaaaggcugggcuuucgacgauggcaacgacgucuggauggggagaacgaucucugaaaagagcagguugggauaugagaccuuuaaagugauugaggguuggucaaaucccaagaguaaacugcagaucaaccggcagguaauuguugaucguggcaaucgcuccggguacagcggaauauucucuguggaaggcaagucauguaucaacagaugcuuuuaugucgagcuaauuaggggucggaaggaagagacagaagugcucuggaccaguaauagcaucgucguguucugugggacuuccggcacauacggaacuggcucuuggccugacggggccaacaucaaucugaugccaauuuga

SEQ ID NO: 145950 - RNA, 1413 nt, Artificial Sequence
  derived and/or modified CDS sequence (opt3) from neuraminidase__InfluenzaA__ADA71155
augaaccccaaucagaagaucauuaccauaggcagcaucuccauugccaucgggauuaucucucugaugcuccaaauaggaaacaucauuucaaucugggcuagucacagcauucagaucgguucccagaauaacacaggcauaugcaaucagagaauuaucacuuacgagaacucuacgugggugaaucauaccuaugucaacauuaauaacacaaaaguuguggcaggggaagacaagacuucgguaacccuugccggaaauucaagccuguguaguaucuccggcugggcgaucuacacaaaagauaacucuauuaggauagguagcaagggggacguguucgucauccgggagccuuuuauuuccugcucacacuuggaaugucgcaccuucuuuuuaacucaaggagcucugcuaaaugauaaacauaguaacggcacagugaaggaccgaagcccauaucgugcccucaugucuugcccgcugggcgaggcacccuccccuuacaauucaaaguucgaaagcguugccuggagugcuucugcaugucacgaugggaugggauggcuuaccaucgguauauccggcccagacaacggggccguggcuguccugaaauauaacggaauuaucacgggcacuaucaagagcuggaaaaagcagauuuugagaacccaggagucggagugcguguguaugaaugguucuugcuuuacaaucaugacugaugggcccuccaacaaagccgcgucauacaagauuuucaagauagaaaaaggaaagguaaccaaaaguaucgagcucaaugcaccuaacuuuuauuacgaagaguguagcugcuacccagacacaggcauuguuaugugugugugcagggauaauuggcauggcuccaaccggcccugggucucuuucaaucagaaccuggacuaucaaaucggguacaucugcagcggaguguuuggugauaauccucgcccagaggacggcgaagggucauguaacccggugaccgucgauggagccaauggcguuaaggguuucaguuauaaauacgggaacggcguguggauuggaagaacgaaguccaauaggcugcggaaaggcuuugagaugauaugggaccccaacggguggacuaauacagacagcgauuucucuguaaagcaggacguggucgcuaucaccgauuggucaggauauagugguagcuuugugcagcacccugaacucacuggcuuagacugcauucgcccauguuucuggguugagcuggugcgagggcuucccagagaaaacacaaccaucuggacguccggaucuucgauuagcuucugcggcgucaacuccgauaccgccaauuggucauggccugacggugcagaguugccauuuacaaucgauaaguga

SEQ ID NO: 145951 - RNA, 1413 nt, Artificial Sequence; identical to SEQ ID NO: 145509
  derived and/or modified CDS sequence (opt3) from neuraminidase__InfluenzaA__ADA71157

SEQ ID NO: 145952 - RNA, 1413 nt, Artificial Sequence
  derived and/or modified CDS sequence (opt3) from neuraminidase__InfluenzaA__ADA71159
augaaccccaaucagaagaucauuaccauaggcagcaucuccauugccaucgggauuaucucucugaugcuccaaauaggaaacaucauuucaaucugggcuagucacagcauucagaucgguucccagaauaacacaggcauaugcaaucagagaauuaucacuuacgagaacucuacgugggugaaucauaccuaugucaacauuaauaacacaaaaguuguggcaggggaaggaaagacuucgguaacccuugccggcaauucaagccuguguaguaucuccgguugggcgaucaacacaaaagacaauucuauuaggauagggagcaagggagauguguucgucauccgggagccuuuuauuuccugcucacacuuggaaugucgcaccuucuuuuuaacucaaggcgcucugcuaaacgacaaacauaguaaucgaacagugaaggaucguagcccauacagagcccucaugucuugcccgcugggcgaggcacccuccccuuauaacucaaaguucgaaagcguugccuggagugcuucugcaugucacgacgggaugggauggcuuaccaucgguauauccggcccagauaacggggccguggcuguccugaaauacaauggaauuaucacgggcacuaucaagagcuggaaaaagcagauuuugaggacccaggagucggagugcguguguaugaacgguucuugcuuuacaaucaugacugacgggcccuccaauaaagccgcgucauauaagauuuucaagauagaaaaaggaaagguaaccaaaaguaucgagcucaacgcaccuaauuuuuacuaugaagaguguagcugcuacccagauacaggcauuguuaugugugugugccgggacaacuggcauggcuccaaucgccccugggucucuuucaaccagaaucuggauuaccaaaucggguauaucugcagcggaguguuuggugacaacccuagaccagaggauggcgaagggucauguaauccggugaccgucgacggagccaacggcguuaaggguuucaguuacaaauaugggaauggcguguggauuggaaggacgaaguccaaccggcugcgcaaaggcuuugagaugauaugggaucccaauggguggacuaacacagacagcgacuucucuguaaagcaggauguggucgcuaucaccgacuggucaggauacagugguagcuuugugcagcacccugaacucacuggcuuagauugcauucgaccauguuucuggguugagcuggugagagggcuucccagggaaaacacaaccaucuggacguccggaucuucgauuagcuucugcggcgucaauuccgacaccgccaacuggucauggccugauggugcagaguugccauuuacaaucgacaaguga

SEQ ID NO: 145953 - RNA, 1410 nt, Artificial Sequence
  derived and/or modified CDS sequence (opt3) from neuraminidase__InfluenzaA__ADA71161
augaaccccaaucagaagaucauuaccauaggcagcgugucccugacaaucucuacuauuugcuucuuuaugcagaucgccauucucaucacgaccgucacacuucacuucaaacaguacgaguuuaacucaccuccaaauaaccagguuaugcugugugaaccgacuauaaucgagagaaauauuaccgaaaucguguauuugacaaacaccacuauugagaaggaaaucugccccaaauuagcugaguacaggaauuggaguaagccucagugugacauaacaggguucgcaccauuuagcaaagauaacuccauucggcugucugccggaggugacaucuggguaacccgcgagcccuaugugucgugcgauccugacaaguguuaccaauucgcgcuaggccaggggacgacucucaauaacguccauucaaauaacaccgugcgagaucguacaccauauagaacucugcuuaugaaugaacugggaguucccuuucacuugggcaccaaacaggugugcauugcuuggagcaguuccucuugucaugacgguaaggccuggcuccacgucugcaucacaggggaugacaagaacgcaaccgccagcuucaucuacaauggaaggcugguggauuccguaguuucauggaguaaagagauucugcggacgcaggaaagcgagugugugugcauaaacggcacuuguacagucgugaugaccgacggcucugcuuccgggaaggcagauacuaaaauccucuuuauugaggaaggaaagaucgugcauacaucaaccuuaagcgguagugcccaacacgucgaggaaugcucuugcuauccucgcuacccaggcguuagaugugugugcagggacaacuggaagggguccaaucggccgauaguagauauuaacaucaaagaccacagcaucgugucgucuuacgucuguuccggacuggugggcgacacgccccgcaagaaugauucaaguagcuccucucauugccuugacccuaacaaugaggaaggugggcacggaguuaaaggcugggcuuucgaugacggcaacgauguguggauggggcgaaccauuagcgagaagucaagauugggauaugagacauuuaaagucaucgaagguuggaguaaucauaaguccaaacugcagauuaacaggcaagugauaguagaccggggcaaucguagcggguacucuggaaucuucucaguugagggcaagaguuguauuaaccgcugcuuuuauguggaacuaaucagagguaggaaggaggaaacugagguccucuggaccagcaauuccaucguggucuucugugggacaucuggcacuuacggaaccggcucguggccagauggggccgaccugaaccuuaugcccauuuga

SEQ ID NO: 145954 - RNA, 1413 nt, Artificial Sequence
  derived and/or modified CDS sequence (opt3) from neuraminidase__InfluenzaA__ADA71165
augaaccccaaucagaagaucauuaccauaggcagcaucuccauugccaucgggauuaucucucugaugcuccaaauaggaaacaucauuucaaucugggcuagucacagcauucagacagguucccagaauaacacuggcaucugcaaucagagaauaauuacguacgagaacucuaccugggugaaucauacauaugucaacaucaauaacacuaauguuguggcaggggaagacaaaaccucgguaacacuugccggaaacucaagccuguguaguauuuccggcugggcgaucuacaccaaggauaauucuaucaggauugguagcaaaggggacguguucgucauacgggagccuuuuaucuccugcucacacuuggaaugucgcacuuucuuuuuaacacaaggagcucugcuaaacgauaagcauaguaauggcaccgugaaagaccgaagcccauaucgugcccucaugucuugcccgcugggcgaggcacccuccccuuacaacucaaaguucgaaagcguugccuggagugcuucugcaugucacgaugggaugggauggcuuacgauugguaucuccggcccagacaacggggccguggcuguccugaaguauaauggaauaauuacuggcaccaucaaaagcuggaagaaacagaucuugagaacacaggagucggagugcguguguaugaacgguucuugcuuuacuauuaugaccgaugggcccuccaauaaggccgcgucauacaaaaucaguaagauugaaaagggaaaaguaacaaagagcauagagcucaacgcaccuaauuucuauuacgaagaguguuccugcuacccagacaccggcaucguuaugugugugugcagggauaacuggcauggcucuaaucggcccugggucagcuuuaaccagaaucuggacuaucaaauuggguacaucugcucaggaguguucggugauaacccucgcccagaggacggcgaagggaguuguaauccggugacggucgauggagccaacggcguuaaagguuuuuccuauaaguacgggaauggcguguggaucggaagaacuaaaagcaacaggcugcggaagggcuucgagaugauuugggaccccaauggguggacaaacaccgacucugauuuuucaguaaaacaggacguggucgcuauaacugauuggaguggauauagcgguuccuucgugcagcacccugaacucacaggcuuagacugcauccgcccauguuuuuggguugagcuggugcgagggcuucccagagaaaacaccacgauuuggaccucuggaucgagcaucuccuucugcggcgucaauucagauacagccaacuggaguuggccugacggugcagaguugccauucacuauugauaaguga

SEQ ID NO: 145955 - RNA, 1410 nt, Artificial Sequence
  derived and/or modified CDS sequence (opt3) from neuraminidase__InfluenzaA__ADA71167
augaaccccaaucagaagaucauuaccauaggcagcgugucccugacaaucucuacuauuugcuucuuuaugcagaucgccauucucaucacgaccgucacacuucacuucaaacaguacgaguuuaacucaccuccaaauaaccagguuaugcugugugaaccgacuauaaucgagagaaauauuaccgaaaucguguauuugacaaacaccacuauugagaaggaaaucugccccaaauuagcugaguacaggaauuggaguaagccucagugugacauaacaggguucgcaccauuuagcaaagauaacuccauucggcugucugccggaggugacaucuggguaacccgcgagcccuaugugucgugcgauccugacaaguguuaccaauucgcgcuaggccaggggacgacucucaauaacguccauucaaauaacaccgugcgaggacguacaccauauagaacucugcuuaugaaugaacugggcguucccuuucacuuggguaccaaacaggugugcauugcuuggagcaguuccucuugucaugaugggaaggccuggcuccacgucugcaucacaggagacgauaagaacgcaaccgccagcuucaucuacaauggcaggcugguggacuccguaguuucauggaguaaagauauucugcggacgcaggagagcgaaugugugugcauaaacggcacuuguacagucgugaugaccgacgggucugcuuccggaaaggcagauacuaaaauccucuuuauugaggaggguaagaucgugcauacaucaaccuuaagcggcagugcccaacacgucgaagagugcucuugcuauccucgcuacccagggguuagaugugugugcagggacaacuggaagggauccaaucggccgauaguagauauuaacaucaaagaccacagcaucgugucgucuuacgucuguuccggccuggugggugacacgccccgcaagaaugauucaaguagcuccucucauugccuuaacccuaauaacgaagaagggggacacggcguuaaaggcugggcuuucgacgaugggaaugacguguggaugggacgaaccauuagcgagaagucaagauuggguuaugagacauuuaaagucaucgagggcuggaguaacccaaaguccaaacugcagauuaauaggcaagugauaguagaucgggggaaccguagcggauacucuggcaucuucucaguugaagguaagaguuguauuaaucgcugcuuuuauguggagcuaaucagagggaggaaggaagagacugaaguccucuggaccagcaacuccaucguggucuucuguggcacaucuggaacuuacggcaccgggucguggcccgacggagccaauauuaaccugaugccuauauga

SEQ ID NO: 145956 - RNA, 1413 nt, Artificial Sequence
  derived and/or modified CDS sequence (opt3) from neuraminidase__InfluenzaA__ADA71169
augaaccccaaucagaagaucauuaccauaggcagcaucuccauugccaucgggauuaucucucugaugcuccaaauaggaaacaucauuucaaucugggcuagucacagcauucagacagguucccagaaucauacuggcaucugcaaccagagaauaauuacguacgaaaauucuaccugggugaaccacacauaugucaauaucaacaauacuaacguuguggcagggaaagacaagaccccuguaacacuugugggaaauucgucacuguguagcauuaguggcugggccaucuacaccaaagauaacuccaucaggauugguucuaagggggacgucuucgugauacgggagccauuuaucagcugcucccauuuggaguguaaaacuuucuuuuuaacacaaggagcgcugcuaaaugauaagcacucaaacggcaccguuaaggaccgcaguccguaucgagcucucaugagcugcccccugggcgaagccccuucuccauacaauuccaaauucgagucaguggcauggagcgccagugcuugucaugaugggauuggauggcuuacgaucgguauaucuggccccgacaacggggcagucgccgugcugaaguauaaaggaauuaucacuggcaccaucaaguccuggaaaaagcagauuuugcguacacaggaaagcgagugcguauguaucaacgguucgugcuuuacuauuaugaccgaugggccuucugacggagcugccuccuacaagauauucaaaaucgagaagggcaaaguuacaaagucaauggaacucaaugcgccaaacuuucacuaugaggaauguaguugcuaccccgauaccggcacggugaugugugucugcagagacaauuggcacgggagcaacaggccuuggguguccuucaaucagaaccuggauuaccaaauuggauauaucugcucugguguguuuggcgacaauccacggccgaaagauggggagggaagcuguaaccccgucacuguugacggcgcaaauggugugaagggguucucauacaaauauggcaacggaguauggaucggccgcacaaagaguaauagaauuaggaagggguuugagaugauaugggacccuaacggauggaccaauacugauuccgacuucagcgugaaacaggauaucgucgccauuacagacuggucugguuacucaggcaguuuugugcagcauccagaacugaccgggcucgauugcauccggcccuguuucuggguugaguuagugcgcggacugccucgagaaaacacgaccauuuggacaagcggcuccucuaucucguucugcggugucaauggggacauagcuaacuggagcuggccagauggcgccgagcuucccuuuacuaucgacaaguga

SEQ ID NO: 145957 - RNA, 1413 nt, Artificial Sequence; identical to SEQ ID NO: 145509
  derived and/or modified CDS sequence (opt3) from neuraminidase__InfluenzaA__ADA71171

SEQ ID NO: 145958 - RNA, 1410 nt, Artificial Sequence
  derived and/or modified CDS sequence (opt3) from neuraminidase__InfluenzaA__ADA71173
augaaccccaaucagaagaucauuaccauaggcagcgugucccugacaaucucuacuauuugcuucuuuaugcagaucgccauucucaucacgaccgucacacuucacuucaaacaguacgaguuuaacucaccuccaaauaaccagguuaugcugugugaaccgacuauaaucgagagaaauauuaccgaaaucguguauuugacaaacaccacuauugagaaggaaaucugccccaaauuagcugaguacaggaauuggaguaagccucagugugacauaacaggguucgcaccauuuagcaaagauaacuccauucggcugucugccggaggugacaucuggguaacccgcgagcccuaugugucgugcgauccugacaaguguuaccaauucgcgcuaggccaggggacgacucucaauaacguccauucaaauaacaccgugcgagcucguacaccauauagaacucugcuuaugaaugaacugggaguucccuuucacuugggcaccaaacaggugugcauugccuggagcaguuccucuugucaugaugguaaggcauggcuccacgucugcaucacaggggacgauaagaacgccaccgcuagcuucaucuacaauggaaggcugguggacuccguaguuucauggaguaaagauauucugcggacgcaggagagcgaaugugugugcauaaacggcacuuguacagucgugaugaccgacggcucugcauccgggaaggccgauacuaaaauccucuuuauugaggagggaaagaucgugcauacaucaaccuuaagcgguagugcucaacacgucgaagagugcucuugcuauccucgcuacccaggcguuagaugugugugcagggacaacuggaagggguccaaucggccgauaguagauauuaacaucaaagaccacagcaucgugucgucuuacgucuguuccggacuggugggcgacacgccccgcaagaaugauucaaguagcuccucucauugccuuaacccuaauaacgaagagggugggcacggaguuaaaggcugggccuucgacgauggcaaugacguguggauggggcgaaccauuagcgaaaagucaagauugggauaugagacauuuaaagucaucgaggguuggaguaacccaaaguccaaacugcagauuaauaggcaagugauaguagaucggggcaaccguagcggguacucuggaaucuucucaguugaaggcaagaguuguauuaaucgcugcuuuuauguggagcuaaucagagguaggaaggaagagacugaaguccucuggaccagcaacuccaucguggucuucugugggacaucuggcacuuacggaaccggcucguggcccgacggggcgaauauuaaccugaugccuauauga

SEQ ID NO: 145959 - RNA, 1413 nt, Artificial Sequence
  derived and/or modified CDS sequence (opt3) from neuraminidase__InfluenzaA__ADA71175
augaaccccaaucagaagaucauuaccauaggcagcaucuccauugccaucgggauuaucucucugaugcuccaaauaggaaacaucauuucaaucugggcuagucacagcauucagaucgguucccagaauaacacaggcauaugcaaucagagaauuaucacuuacgagaacucuacgugggugaaucauaccuaugucaacauuaauaacacaaaaguuguggcaggggaagacaagacuucgguaacccuugccggaaauucaagccuguguaguaucuccggcugggcgaucaacacaaaagauaauucuauuaggauagguagcaagggggacguguucgucauccgggagccuuuuauuuccugcucacacuuggaaugucgcaccuucuuuuuaacucaaggagcucugcuaaacgauaaacauaguaauggcacagugaaggaccgaagcccauaccgugcccucaugucuugcccgcugggcgaggcacccuccccuuauaacucaaaguucgaaagcguugccuggagugcuucugcaugucacgaugggaugggauggcuuaccaucgguauauccggcccagacaacggggccguggcuguccugaaauacaauggaauuaucacgggcacuaucaagagcuggaaaaagcagauuuugagaacccaggagucggagugcguguguaugaacgguucuugcuuuacaaucaugacugaugggcccuccaauaaagccgcgucauauaagauuuucaagauagaaaaaggaaagguaaccaaaaguaucgagcucaacgcaccuaauuuuuacuaugaagaguguagcugcuacccagacacaggcauuguuaugugugugugcagggauaacuggcauggcuccaaucggcccugggucucuuucaaccagaaucuggacuaccaaaucggguauaucugcagcggaguguuuggugauaacccucgcccagaggacggcgaagggucauguaauccggugaccgucgauggagccaacggcguuaaggguuucaguuacaaauaugggaauggcguguggauuggaagaacgaaguccaacaggcugcggaaaggcuuugagaugauaugggaccccaauggguggacuaacacagacagcgauuucucuguaaagcaggacguggucgcuaucaccgauuggucaggauacagugguagcuuugugcagcacccugaacucacuggcuuagacugcauucgcccauguuucuggguugagcuggugcgagggcuucccagagaaaacacaaccaucuggacguccggaucuucgauuagcuucugcggcgucaauuccgauaccgccaacuggucauggccugacggugcagaguugccauuuacaaucgauaaguga

SEQ ID NO: 145960 - RNA, 1413 nt, Artificial Sequence; identical to SEQ ID NO: 145509
  derived and/or modified CDS sequence (opt3) from neuraminidase__InfluenzaA__ADA71177

SEQ ID NO: 145961 - RNA, 1410 nt, Artificial Sequence
  derived and/or modified CDS sequence (opt3) from neuraminidase__InfluenzaA__ADA71193
augaaccccaaucagaagaucauuaccauaggcagcgugugcaugacaaucgggauggccaaccugauucuccaaaucggaaauauuaucuccauauggaucucucacucaauucagcuugguaaccagaaucagaucgagacuuguaaccaaagugucauuacguacgaaaauaacaccuggguuaaucagacauaugugaacaucagcaauacuaacuucgcugcaggccaguccguagugucugucaaacuggccggaaauucgucauugugcccugugagcggaugggcgauauacaguaaggacaacuccauuagaaucggcucuaaaggugauguuuuugugauuagggagccauucaucagcuguuccccguuagaaugccggaccuuuuuccugacacagggggcucuacucaaugacaagcauucaaacggaaccaucaaagaucgcagucccuaucgaacucugaugagcuguccuauuggcgaggucccaucucccuacaacucccguuuugaaucaguggccuggagcgcaagugccugccacgacggcauaaauuggcuuacaaucgggauuucuggaccugauaacggugcuguagcaguucugaaguauaauggcaucauaaccgacacgauuaaguccuggagaaacaauaucuugaggacucaagagagcgagugugccugcgugaacgggucguguuucaccgucaugacagauggaccaucugacggccaggcuuccuacaaaaucuuucggauugaaaaggguaaaguggugaagucagucgagaugaaugcccccaacuaucauuacgaagagugcaguuguuacccugauagcuccgagaucacuugcguuugccgcgacaauuggcacgggucuaacagaccaugggugagcuucaaucagaaccucgaauaucagauuggauacauauguucaggcaucuuuggcgauaauccgaggcccaacgacaaaaccgggaguugcggaccuguauccagcaauggugcgaacggcgugaagggguucucuuuuaaguauggaaacggcgucuggauuggucggacaaaaucaaucaguagccgcaauggguucgagaugaucugggauccaaacggcuggaccggaacggacaauaacuuuuccauuaagcaagacauagugggcaucaaugaauggucuggguacucggggagcuucguucagcaucccgagcugacuggucuggauuguauucgaccuugcuucuggguggaacucaucagaggcaggccaaaagagaacacaauuuggaccuccgggucaaguaucucuuuuuguggagucaauagcgacacugugggcugguccuggcccgauggugcagaguuaccguucacaauagacaaguga

SEQ ID NO: 145962 - RNA, 1410 nt, Artificial Sequence
  derived and/or modified CDS sequence (opt3) from neuraminidase__InfluenzaA__ADA79589
augaaccccaaucagaagaucauuaccauaggcagcgugugcaugacaaucgggauggccaaccugauucuccaaaucggaaauauuaucuccauauggaucucucacucaauucagcuugguaaccagaaucagaucgagacuuguaaccaaagugucauuacguacgaaaauaacaccuggguuaaucagacauaugugaacaucagcaauacuaacuucgcugcaggccaguccguagugucugucaaacuggccgggucgagcagcuugugcccugugaguggaugggcgauauacuccaaggacaauucuauuagaaucggcagcaaaggugauguuuuugugauuagggagccauucaucuccuguucaccguuagaaugccggaccuuuuuccugacacagggggcucuacucaacgacaagcauaguaauggaaccaucaaagaucgcagccccuaucgaacucugaugucuuguccuauuggcgaggucccaucccccuacaagucacguuuugaaagcguggccuggagugcaucugccugccacgacggcauaaacuggcuuacaaucgggauuuccggaccugauaacggugcuguagcaguucugaaguauaauggcaucauaaccgacacgauuaaaagcuggagaaacaauaucuugaggacucaagagucggagugugccugcgugaacgggucuuguuucaccgucaugacagauggaccauccgacggccaggcuucauacaagaucuuucggauugaaaaagguaagaucgugaaaaguguggagaugaaugcccccaacuaucauuacgaagagugcagcuguuacccugauuccucugagauuacuugcgucugccgcgacaauuggcacgggagcaacagaccauggguuucauucaaucagaaccucgaauaucagauaggauacaucuguaguggcauuuuuggcgauaauccgaggcccaacgacaagaccggguccugcggaccugugagcucuaauggugcgaacggcguaaagggguucucauuuaaauauggaaauggcguguggaucggucggacaaagaguaucagcucccgcaacggguucgagaugauuugggauccaaacggcuggaccggaacggacaauaacuuuucuauaaaacaagacaucgucggcauuaaugaauggucgggguacagcggauccuucgugcagcaucccgagcugacuggucuggauuguauccgaccuugcuucuggguugaacucauuagaggcaggccaaaggagaacacaaucuggaccucagggaguucuauaucauuuuguggagucaauuccgacacugugggcuggucauggcccgauggugcagaguuaccguucacaaucgacaaauga

SEQ ID NO: 145963 - RNA, 1410 nt, Artificial Sequence
  derived and/or modified CDS sequence (opt3) from neuraminidase__InfluenzaA__ADA79599
augaaccccaaucagaagaucauuaccauaggcagcgugugcaugacaaucgggauggccaaccugauucuccaaaucggaaauauuaucuccauauggaucucucacucaauucagcuugguaaccagaaucagaucgagacuuguaaccaaagugucauuacguacgaaaauaacaccuggguuaaucagacauaugugaacaucagcaauacuaacuucgcugcaggccaguccguagugucugucaaacuggccggaaauucgucauugugcccugugagcggaugggcgauauacaguaaggacaacuccauuagaaucggcucuaaaggugauguuuuugugauuagggagccauucaucagcuguuccccguuagaaugccggaccuuuuuccugacacagggggcucuacucaaugacaagcauucaaacggaaccaucaaagaucgcagucccuaucgaacucugaugagcuguccuauuggcgaggucccaucucccuacaacucccguuuugaaucaguggccuggagcgcaagugccugccacgacggcauaaauuggcuuacaaucgggauuucuggaccugauaacggugcuguagcaguucugaaguauaauggcaucauaaccgacacgauuaaguccuggagaaacaauaucuugaggacucaagagagcgagugugccugcgugaacgggucguguuucaccgucaugacagauggaccaucugacggccaggcuuccuacaaaaucuuucggauugaaaaggguaaaaucgugaagucaguggagaugaaugcccccaacuaucauuacgaagagugcaguuguuacccugauagcuccgagauuacuugcgucugccgcgacaauuggcacgggucuaacagaccauggguuagcuucaaucagaaccucgaauaucagauaggauacaucuguucaggcauuuuuggcgauaauccgaggcccaacgacaaaaccgggaguugcggaccuguguccagcaauggugcgaacggcguaaagggguucucuuuuaaguauggaaacggcguguggaucggucggacaaaaucaaucaguagccgcaauggguucgagaugauuugggauccaaacggcuggaccggaacggacaauaaguuuuccauaaaacaagacaucgucggcauuaacgaauggucuggguacucggggagcuucgugcagcaucccgagcugacuggucuggauuguauccgaccuugcuucuggguugaacucauuagaggcaggccaaaggagaauacaaucuggaccuccgggucaaguauaucuuuuuguggagugaacagcgacacugucggcugguccuggcccgauggugcagaguuaccguucacaaucgacaaauga

SEQ ID NO: 145964 - RNA, 1410 nt, Artificial Sequence; identical to SEQ ID NO: 145963
  derived and/or modified CDS sequence (opt3) from neuraminidase__InfluenzaA__ADA79609

SEQ ID NO: 145965 - RNA, 1410 nt, Artificial Sequence
  derived and/or modified CDS sequence (opt3) from neuraminidase__InfluenzaA__ADA79619
augaaccccaaucagaagaucauuaccauaggcagcaucugcaugacaauugggauggccaaccugauccuccaaauuggaaauaucauauccaucuggauuucucacucaauccagcuugguaaccagaaucagauugagacuuguaaccaaagugugaucacguacgaaaauaacaccugggucaaucagacauauguuaacauaagcaauacuaacuucgcugcaggccaguccguggccucuguaaaacuggcgggaaauucgucauugugcccugugagcggaugggcuauuuacaguaaggacaacuccaucagaauuggcucuaaaggugaugucuuugugaucagggagccauucaucagcuguuccccguuagaaugccggaccuuuuuccugacacagggggcccuacucaaugacaagcauucaaacggaaccauuaaagaucgcagucccuaucgaacucugaugagcuguccuauaggcgagguuccaucucccuacaacucccguuuugaaucaguggcauggagcgccagugcuugccacgacggcaucaauuggcuuacaauugggaucucuggaccugauaacggugcagucgccgugcugaaguauaauggcauaauuaccgacacgaucaaguccuggagaaacaauaucuugaggacucaagagagcgagugugcuugcguaaacgggucguguuucaccguuaugacagauggaccaucugacggccaggccuccuacaaaauuuuucggaucgaaaaggguaaaauugugaagucagucgagaugaaugcgcccaacuaucauuacgaagagugcaguuguuacccugauagcuccgagauaacuugcgugugccgcgacaauuggcacgggucuaacagaccaugggugagcuucaaucagaaccucgaauaucagaucggauacauuuguucaggcaucuuuggcgauaauccgaggcccaacgacaaaaccgggaguugcggaccugucuccagcaauggugcaaacggcguuaagggguucucuuuuaaguauggaaacggcguguggaucggucggacaaaaucaauuaguagccgcaauggguucgagaugauaugggauccaaacggcuggaccggaacggacaauaacuuuuccaucaagcaagacauuguaggcaucaaugaauggucuggguacucggggagcuucgugcagcaucccgagcugacuggucuggauuguauucgaccuugcuucugggucgaacucaucagaggcaggccaaaagagaacacaauauggaccuccgggucaaguaucucuuuuuguggagugaauagcgacacuguuggcugguccuggcccgauggugccgaguuaccguucacaauugacaaguga

SEQ ID NO: 145966 - RNA, 1410 nt, Artificial Sequence; identical to SEQ ID NO: 144786
  derived and/or modified CDS sequence (opt3) from neuraminidase__InfluenzaA__ADA81211

SEQ ID NO: 145967 - RNA, 1410 nt, Artificial Sequence
  derived and/or modified CDS sequence (opt3) from neuraminidase__InfluenzaA__ADA83035
augaaccccaaucagaagaucauuaccauaggcagcgugugcaugacaaucgggauggccaaccugauucuccaaaucggaaauauuaucuccauauggaucucucacucaauucagcuugguaaccagaaucagaucgagacuuguaaccaaagugucauuacguacgaaaauaacaccuggguuaaucagacauaugugaacaucagcaauacuaacuucgcugcaggccaguccguagugucugucaaacuggccgggaauagcucauugugcccugugagcggaugggcgauauacaguaaggacaacuccauuagaaucggcucuaaaggugauguuuuugugauuagggagccauucaucagcuguuccccguuagaaugcucaaccuuuuuccugacacagggggcucuacucaaugacaagcauaguaacggaaccaucaaagaucggagccccuaucgcacucugaugucuuguccuauuggcgaggucccaucccccuacaacucacgauuugaaagcguggccuggagugcaucugccugccacgacggcauaaauuggcuuacaaucgggauuuccggaccugauaacggugcuguagcaguucugaaguauaauggcaucauaaccgacacgauuaagagcuggcguaacaauaucuugagaacucaagagucggagugugccugcgugaacgggucuuguuucaccgucaugacagauggaccauccgacggccaggcuucauacaaaaucuuuaggauugaaaaggguaaaaucgugaagaguguggagaugaaugcccccaacuaucauuacgaagagugcagcuguuacccugauuccucugagauuacuugcgucugccgggacaauuggcacgggagcaaccgcccauggguuucauucaaucagaaccucgaauaucagauaggauacaucuguaguggcauuuuuggcgauaauccgagacccaacgacaaaaccggguccugcggaccugugagcucuaauggugcgaacggcguaaagggguucucauuuaaguauggaaacggcguguggaucgguaggacaaaaaguaucagcucccggaauggguucgagaugauuugggauccaaacggcuggaccggaacggacaauaacuuuucuauaaagcaagacaucgucggcauuaaugaauggucgggguacagcggauccuucgugcagcaucccgagcugacuggucuggauuguauccgcccuugcuucuggguugaacucauucgaggcagaccaaaagagaacacaaucuggaccucagggaguucuauaucguuuuguggagucaauuccgacacugugggcuggucauggcccgauggugcagaguuaccguucacaaucgacaaguga

SEQ ID NO: 145968 - RNA, 1410 nt, Artificial Sequence
  derived and/or modified CDS sequence (opt3) from neuraminidase__InfluenzaA__ADA83037
augaaccccaaucagaagaucauuaccauaggcagcgugugcaugacaaucgggauggccaaccugauucuccaaaucggaaauauuaucuccauauggaucucucacucaauucagcuugguaaccaggaccagaucgagacuuguaaucaaagugucauuacguacgaaaacaauaccuggguuaaccagacauaugugaauaucagcaacacuaauuucgcugcaggccaguccguagugucugucaaacuggccgggaacucgucauugugcccugugagcggaugggcgauauacaguaaggauaauuccauuagaaucggcucuaaaggugacguuuuugugauuagggagccauucaucagcuguuccccguuagaaugccggaccuuuuuccugacacagggggcucuacucaacgauaagcauucaaauggaaccaucaaagaccgcagucccuaucgaacucugaugagcuguccuauuggcgaggucccaucucccuacaacucccguuuugaaucaguggccuggagcgcaagugccugccacgauggcauaaacuggcuuacaaucgggauuucuggaccugacaauggugcuguagcaguucugaaguauaacggcaucauaaccgauacgauuaaguccuggagaaauaacaucuugaggacucaagagagcgagugugccugcgugaaugggucguguuucaccgucaugacagacggaccaucugauggccaggcuuccuacaaaaucuuucggauugaaaaggguaaaaucgugaagucaguggagaugaacgcccccaauuaucauuacgaagagugcaguuguuacccugacagcuccgagauuacuugcgucugccgcgauaacuggcacgggucuaauagaccauggguuagcuucaaccagaaucucgaauaucagauaggauacaucuguucaggcauuuuuggcgacaacccgaggcccaaugauaaaaccgggaguugcggaccuguguccagcaacggugcgaauggcguaaagggguucucuuuuaaguauggaaacggcguguggaucggucggacaaaaucaaucaguagccgcaacggguucgagaugauuugggacccaaauggcuggaccggaacggacaacaaguuuuccauaaaacaagauaucgucggcauuaaugaauggucuggguacucggguagcuucgugcagcaucccgagcugacuggacuggacuguauccgaccuugcuucuggguugaacucauuagaggcaggccaaaggagaacacaaucuggaccuccgggucaaguauaucuuuuuguggagugaauagcgauacugucggcugguccuggcccgacggugcagaguuaccguucacaaucgauaaauga

SEQ ID NO: 145969 - RNA, 1410 nt, Artificial Sequence; identical to SEQ ID NO: 144786
  derived and/or modified CDS sequence (opt3) from neuraminidase__InfluenzaA__ADA83588

SEQ ID NO: 145970 - RNA, 1410 nt, Artificial Sequence; identical to SEQ ID NO: 144786
  derived and/or modified CDS sequence (opt3) from neuraminidase__InfluenzaA__ADA83592

SEQ ID NO: 145971 - RNA, 1410 nt, Artificial Sequence; identical to SEQ ID NO: 144786
  derived and/or modified CDS sequence (opt3) from neuraminidase__InfluenzaA__ADA83596

SEQ ID NO: 145972 - RNA, 1410 nt, Artificial Sequence; identical to SEQ ID NO: 144786
  derived and/or modified CDS sequence (opt3) from neuraminidase__InfluenzaA__ADA83600

SEQ ID NO: 145973 - RNA, 1410 nt, Artificial Sequence; identical to SEQ ID NO: 144786
  derived and/or modified CDS sequence (opt3) from neuraminidase__InfluenzaA__ADA83604

SEQ ID NO: 145974 - RNA, 1410 nt, Artificial Sequence; identical to SEQ ID NO: 144786
  derived and/or modified CDS sequence (opt3) from neuraminidase__InfluenzaA__ADA83608

SEQ ID NO: 145975 - RNA, 1410 nt, Artificial Sequence; identical to SEQ ID NO: 144786
  derived and/or modified CDS sequence (opt3) from neuraminidase__InfluenzaA__ADA83612

SEQ ID NO: 145976 - RNA, 1410 nt, Artificial Sequence; identical to SEQ ID NO: 145140
  derived and/or modified CDS sequence (opt3) from neuraminidase__InfluenzaA__ADA83616

SEQ ID NO: 145977 - RNA, 1410 nt, Artificial Sequence; identical to SEQ ID NO: 144786
  derived and/or modified CDS sequence (opt3) from neuraminidase__InfluenzaA__ADA83624

SEQ ID NO: 145978 - RNA, 1410 nt, Artificial Sequence; identical to SEQ ID NO: 144786
  derived and/or modified CDS sequence (opt3) from neuraminidase__InfluenzaA__ADA83630

SEQ ID NO: 145979 - RNA, 1410 nt, Artificial Sequence; identical to SEQ ID NO: 144786
  derived and/or modified CDS sequence (opt3) from neuraminidase__InfluenzaA__ADA83634

SEQ ID NO: 145980 - RNA, 1410 nt, Artificial Sequence; identical to SEQ ID NO: 144786
  derived and/or modified CDS sequence (opt3) from neuraminidase__InfluenzaA__ADA83638

SEQ ID NO: 145981 - RNA, 1410 nt, Artificial Sequence; identical to SEQ ID NO: 144786
  derived and/or modified CDS sequence (opt3) from neuraminidase__InfluenzaA__ADA83642

SEQ ID NO: 145982 - RNA, 1410 nt, Artificial Sequence; identical to SEQ ID NO: 144786
  derived and/or modified CDS sequence (opt3) from neuraminidase__InfluenzaA__ADA83649

SEQ ID NO: 145983 - RNA, 1410 nt, Artificial Sequence; identical to SEQ ID NO: 144786
  derived and/or modified CDS sequence (opt3) from neuraminidase__InfluenzaA__ADA83653

SEQ ID NO: 145984 - RNA, 1410 nt, Artificial Sequence; identical to SEQ ID NO: 144786
  derived and/or modified CDS sequence (opt3) from neuraminidase__InfluenzaA__ADA83657

SEQ ID NO: 145985 - RNA, 1410 nt, Artificial Sequence; identical to SEQ ID NO: 144786
  derived and/or modified CDS sequence (opt3) from neuraminidase__InfluenzaA__ADA83661

SEQ ID NO: 145986 - RNA, 1410 nt, Artificial Sequence; identical to SEQ ID NO: 144786
  derived and/or modified CDS sequence (opt3) from neuraminidase__InfluenzaA__ADA83669

SEQ ID NO: 145987 - RNA, 1410 nt, Artificial Sequence; identical to SEQ ID NO: 144786
  derived and/or modified CDS sequence (opt3) from neuraminidase__InfluenzaA__ADA83673

SEQ ID NO: 145988 - RNA, 1410 nt, Artificial Sequence; identical to SEQ ID NO: 144786
  derived and/or modified CDS sequence (opt3) from neuraminidase__InfluenzaA__ADA83677

SEQ ID NO: 145989 - RNA, 1410 nt, Artificial Sequence; identical to SEQ ID NO: 144786
  derived and/or modified CDS sequence (opt3) from neuraminidase__InfluenzaA__ADA83681

SEQ ID NO: 145990 - RNA, 1410 nt, Artificial Sequence; identical to SEQ ID NO: 144786
  derived and/or modified CDS sequence (opt3) from neuraminidase__InfluenzaA__ADA83685

SEQ ID NO: 145991 - RNA, 1410 nt, Artificial Sequence; identical to SEQ ID NO: 144786
  derived and/or modified CDS sequence (opt3) from neuraminidase__InfluenzaA__ADA86069

SEQ ID NO: 145992 - RNA, 1410 nt, Artificial Sequence; identical to SEQ ID NO: 144786
  derived and/or modified CDS sequence (opt3) from neuraminidase__InfluenzaA__ADB27973

SEQ ID NO: 145993 - RNA, 1410 nt, Artificial Sequence; identical to SEQ ID NO: 144786
  derived and/or modified CDS sequence (opt3) from neuraminidase__InfluenzaA__ADB27983

SEQ ID NO: 145994 - RNA, 1410 nt, Artificial Sequence
  derived and/or modified CDS sequence (opt3) from neuraminidase__InfluenzaA__ADB66693
augaaccccaaucagaagaucauuaccauaggcagcgugugcaugacaaucgggauggccaaccugauucuccaaaucggaaauauuaucuccauauggaucauucacucuauccagcuugguaaccagaaucagauugagacuuguaaccaaucagucaucacguacgaaaauaacaccuggguuaaucagacauaugugaacauaaguaauacuaacuucgcugcaggccagagcguaguguccgucaaacuggccggaaauucuucguugugcccugugucagggugggcgauuuacagcaaggacaacaguaucagaauuggcuccaaaggugauguuuuugugaucagggagccauucaucucuuguagcccguuagaaugccggaccuuuuuccugacacagggggcucuacucaaugacaagcauuccaacggaaccauuaaagaucgcucacccuaucgaacucugaugaguuguccuauaggcgaggucccaagccccuacaacucucguuuugaauccguggccuggucagcaagcgccugccacgacggcaucaauuggcuuacaauugggaucaguggaccugauaacggugcuguagcaguucugaaguauaauggcauaauuaccgacacgaucaagucuuggagaaacaauaucuugaggacucaagaguccgagugugccugcgugaacgggagcuguuucaccgucaugacagauggaccaucggacggccaggcuucuuacaaaauuuuucggaucgaaaaggguaaaauugugaaguccguggagaugaaugcccccaacuaucauuacgaagagugcucauguuacccugauaguagcgagauaacuugcgucugccgcgacaauuggcacggguccaacagaccauggguuucuuucaaucagaaccucgaauaucagaucggauacauuuguagcggcaucuuuggcgauaauccgaggcccaacgacaaaaccgggucaugcggaccugugaguuccaauggugcgaacggcguaaagggguucagcuuuaaguauggaaacggcguguggaucggucggacaaaaucuauuucaagucgcaauggguucgagaugauaugggauccaaacggcuggaccggaacggacaauaacuuuagcaucaagcaagacauugucggcaucaaugaaugguccggguacucuggaucguucgugcagcaucccgagcugacuggucuggauuguauucgaccuugcuucuggguugaacucaucagaggcaggccaaaagagaacacaauauggaccagcggguccucaaucaguuuuuguggagucaauucugacacugugggcuggagcuggcccgauggugcagaguuaccguucacaauugacaaguga

SEQ ID NO: 145995 - RNA, 1410 nt, Artificial Sequence; identical to SEQ ID NO: 144786
  derived and/or modified CDS sequence (opt3) from neuraminidase__InfluenzaA__ADB66695

SEQ ID NO: 145996 - RNA, 1410 nt, Artificial Sequence; identical to SEQ ID NO: 144786
  derived and/or modified CDS sequence (opt3) from neuraminidase__InfluenzaA__ADB66696

SEQ ID NO: 145997 - RNA, 1410 nt, Artificial Sequence
  derived and/or modified CDS sequence (opt3) from neuraminidase__InfluenzaA__ADB66697
augaaccccaaucagaagaucauuaccauaggcagcgugugcaucacaauugggauggccaaccugauccuccaaauuggaaauaucauauccaucuggauuucucacucaauccagcuugguaaccagaaucagauugagacuuguaaccaaagugucaucacguacgaaaauaacaccuggguuaaucagacauaugugaacauaagcaauacuaacuucgcugcaggccaguccguagugucugucaaacuggccggaaauucgucauugugcccugugagcgggugggcgauuuacaguaaggacaacuccaucagaauuggcucuaaaggugauguuuuugugaucagggagccauucaucagcuguuccccguuagaaugccggaccuuuuuccugacacagggggcucuacucaaugacaagcauucaaacggaaccauuaaagaucgcagucccuaucgaacucugaugagcuguccuauaggcgaggucccaucucccuacaacucccguuuugaaucaguggccuggagcgcaagugccugccacgacggcaucaauuggcuuacaauugggaucucuggaccugauaacggugcuguagcaguucugaaguauaauggcauaauuaccgacacgaucaaguccuggagaaacaauaucuugaggacucaagagagcgagugugccugcgugaacgggucguguuucaccgucaugacagauggaccaucugacgaacaggcuuccuacaaaauuuuucggaucgagaagggcaaaauugugaagucaguggaaaugaaugcccccaacuaucauuacgaggagugcaguuguuacccugauagcuccgaaauaacuugcgucugccgcgacaauuggcacgguucuaacagaccauggguuagcuucaaucagaaccucgaguauaggaucggguacauuuguucaggaaucuuuggcgauaauccgcggcccaacgacaaaaccggcaguugcgggccuguguccagcaauggagcgaacgguguaaagggcuucucuuuuaaguaugggaacggaguguggaucggccgcacaaaaucaauuaguagccgaaaugguuucgaaaugauaugggauccaaacggguggaccggcacggacaauaacuuuuccaucaagcaggacauugucggaauccaugaguggucuggcuacucggggagcuucgugcaacaccccgaacugacuggacuggauuguauuagaccuugcuucuggguugagcucaucaggggucggccaaaagagaauacaauauggaccuccggcucaaguaucucuuuuuguggggugaacagcgacacugucggaugguccuggcccgauggcgcagaauuaccguucacaauugacaaguga

SEQ ID NO: 145998 - RNA, 1410 nt, Artificial Sequence; identical to SEQ ID NO: 145961
  derived and/or modified CDS sequence (opt3) from neuraminidase__InfluenzaA__ADB81401

SEQ ID NO: 145999 - RNA, 1410 nt, Artificial Sequence; identical to SEQ ID NO: 145804
  derived and/or modified CDS sequence (opt3) from neuraminidase__InfluenzaA__ADB81421

SEQ ID NO: 146000 - RNA, 1410 nt, Artificial Sequence; identical to SEQ ID NO: 145140
  derived and/or modified CDS sequence (opt3) from neuraminidase__InfluenzaA__ADB81431

SEQ ID NO: 146001 - RNA, 1410 nt, Artificial Sequence; identical to SEQ ID NO: 144786
  derived and/or modified CDS sequence (opt3) from neuraminidase__InfluenzaA__ADB81441

SEQ ID NO: 146002 - RNA, 1410 nt, Artificial Sequence
  derived and/or modified CDS sequence (opt3) from neuraminidase__InfluenzaA__ADB81451
augaaccccaaucagaagaucauuaccauaggcagcgugugcaugacaaucgggauggccaaccugauucuccaaaucggaaauauuaucuccauauggaucucucacucaauucagcuugguaaccagaaucagaucgagacuuguaaccaaagugucauuacguacgaaaauaacaccuggguuaaucagacauaugugaacaucagcaauacuaacuucgcugcaggccaguccguagugucugucaaacuggccggaaauucgucauugugcccugugagcggaugggcgauauacaguaaggacaacuccauuagaaucggcucuaaaggugauguuuuugugauuagggagccauucaucagcuguuccccguuagaaugccggaccuuuuuccugacacagggggcucuacucaaugacaagcauucaaacggaaccaucaaagaucgcagucccuaucgaacucugaugagcuguccuauuggcgaggucccaucucccuacaacucccguuuugaaucaguggccuggagcgcaagugccugccacgacggcauaaauuggcuuacaaucgggauuucuggaccugauaacggugcuguagcaguucugaaguauaauggcaucauaaccgacacgauuaaguccuggagaaacaauaucuugaggacucaagagagcgagugugugugcgucaacgggucguguuucaccgugaugacagauggaccaucugacggccaggccuccuacaaaaucuuucggauugaaaaggguaaaaucgugaagucagucgagaugaaugcucccaacuaucauuacgaagagugcaguuguuacccugauagcuccgagauuacuugcguuugccgcgacaauuggcacgggucuaacagaccaugggugagcuucaaucagaaccucgaauaucagauaggauacaucuguucaggcauuuuuggcgauaauccgaggcccaacgacaaaaccgggaguugcggaccuguauccagcaauggugccaacggcgugaagggguucucuuuuaaguauggaaacggcgucuggaucggucggacaaaaucaaucaguagccgcaauggguucgagaugauuugggauccaaacggcuggaccggaacggacaauaaguuuuccauaaaacaagacaucgugggcauuaacgaauggucuggguacucggggagcuucguucagcaucccgagcugacuggucuggauuguauccgaccuugcuucuggguggaacucauuagaggcaggccaaaggagaauacaaucuggaccuccgggucaaguauaucuuuuuguggagucaacagcgacacugugggcugguccuggcccgauggugcggaguuaccguucacaaucgacaaauga

SEQ ID NO: 146003 - RNA, 1410 nt, Artificial Sequence; identical to SEQ ID NO: 145963
  derived and/or modified CDS sequence (opt3) from neuraminidase__InfluenzaA__ADB81461

SEQ ID NO: 146004 - RNA, 1410 nt, Artificial Sequence; identical to SEQ ID NO: 145963
  derived and/or modified CDS sequence (opt3) from neuraminidase__InfluenzaA__ADB82942

SEQ ID NO: 146005 - RNA, 1410 nt, Artificial Sequence; identical to SEQ ID NO: 144941
  derived and/or modified CDS sequence (opt3) from neuraminidase__InfluenzaA__ADB82945

SEQ ID NO: 146006 - RNA, 1410 nt, Artificial Sequence; identical to SEQ ID NO: 144786
  derived and/or modified CDS sequence (opt3) from neuraminidase__InfluenzaA__ADB89132

SEQ ID NO: 146007 - RNA, 1410 nt, Artificial Sequence; identical to SEQ ID NO: 145369
  derived and/or modified CDS sequence (opt3) from neuraminidase__InfluenzaA__ADB89142

SEQ ID NO: 146008 - RNA, 1410 nt, Artificial Sequence; identical to SEQ ID NO: 144786
  derived and/or modified CDS sequence (opt3) from neuraminidase__InfluenzaA__ADB89224

SEQ ID NO: 146009 - RNA, 1410 nt, Artificial Sequence
  derived and/or modified CDS sequence (opt3) from neuraminidase__InfluenzaA__ADB89234
augaaccccaaucagaagaucauuaccauaggcagcgugugcaugacaaucgggauggccaaccugauucuccaaaucggaaauauuaucuccauauggaucucucacucaauucagcuugguaaccagaaucagaucgagacuuguaaccaaagugucauuacguacgaaaauaacaccuggguuaaucagacauaugugaacaucagcaauacuaacuucgcugcaggccaguccguagugucugucaaacuggugggaaauucgucauugugcccuguuagcggaugggccauauacaguaaggacaacuccgugagaauuggcucuaaaggugaugucuuugugaucagggagccauucauuagcuguuccccguuagaaugccggaccuuuuuccugacacagggggcgcuacucaaugacaagcauucaaacggaaccaucaaagaucgcagucccuaucgaacucugaugagcuguccuaucggcgagguaccaucucccuacaacucccguuuugaaucaguugcuuggagcgccagugcaugccacgacggcauuaauuggcuuacaauagggaucucuggaccugauaacggugccguggcuguccugaaguauaauggcauuaucaccgacacgauaaaguccuggagaaacaauauuuugaggacucaagagagcgagugugcaugcgugaacgggucguguuucaccgugaugacagauggaccaucuaauggccaggccuccuacaaaaucuuucggaucgaaaaggguaaaauugucaagucaguugagaugaacgcucccaauuaucauuacgaagagugcaguuguuacccugacagcuccgagaucacuugcgugugccgcgauaacuggcacgggucuaauagaccaugggugagcuucaaccagaaucucgaauaucagauuggauacauauguucaggcaucuuuggcgacaacccgaggcccaaugauaaaaccgggaguugcggaccuguauccagcaacggugccaacggcgucaagggguucucuuuuaaguauggaaauggcguguggauuggucggacaaaaucaaucaguagccgcaacggguucgagaugaucugggacccaaauggcuggaccggaacggauaacaauuuuuccauuaagcaagacauaguuggcaucaacgaauggucuggguacucggggagcuucgugcagcaucccgagcugacuggucuggacuguauucgaccuugcuucugggucgaacucaucagaggcaggccaaaagagaauacaauuuggaccuccgggucaaguaucucuuuuuguggagugaacagcgauacuguaggcugguccuggcccgacggugcggaguuaccguucacaauagauaaguga

SEQ ID NO: 146010 - RNA, 1410 nt, Artificial Sequence; identical to SEQ ID NO: 144776
  derived and/or modified CDS sequence (opt3) from neuraminidase__InfluenzaA__ADB89244

SEQ ID NO: 146011 - RNA, 1410 nt, Artificial Sequence; identical to SEQ ID NO: 144786
  derived and/or modified CDS sequence (opt3) from neuraminidase__InfluenzaA__ADB89264

SEQ ID NO: 146012 - RNA, 1410 nt, Artificial Sequence; identical to SEQ ID NO: 145756
  derived and/or modified CDS sequence (opt3) from neuraminidase__InfluenzaA__ADB89274

SEQ ID NO: 146013 - RNA, 1410 nt, Artificial Sequence; identical to SEQ ID NO: 144941
  derived and/or modified CDS sequence (opt3) from neuraminidase__InfluenzaA__ADB89284

SEQ ID NO: 146014 - RNA, 1410 nt, Artificial Sequence; identical to SEQ ID NO: 144786
  derived and/or modified CDS sequence (opt3) from neuraminidase__InfluenzaA__ADB89294

SEQ ID NO: 146015 - RNA, 1410 nt, Artificial Sequence; identical to SEQ ID NO: 144786
  derived and/or modified CDS sequence (opt3) from neuraminidase__InfluenzaA__ADB89304

SEQ ID NO: 146016 - RNA, 1410 nt, Artificial Sequence; identical to SEQ ID NO: 144786
  derived and/or modified CDS sequence (opt3) from neuraminidase__InfluenzaA__ADB89314

SEQ ID NO: 146017 - RNA, 1410 nt, Artificial Sequence; identical to SEQ ID NO: 144786
  derived and/or modified CDS sequence (opt3) from neuraminidase__InfluenzaA__ADB89324

SEQ ID NO: 146018 - RNA, 1410 nt, Artificial Sequence; identical to SEQ ID NO: 144786
  derived and/or modified CDS sequence (opt3) from neuraminidase__InfluenzaA__ADB89334

SEQ ID NO: 146019 - RNA, 1410 nt, Artificial Sequence; identical to SEQ ID NO: 144786
  derived and/or modified CDS sequence (opt3) from neuraminidase__InfluenzaA__ADB89344

SEQ ID NO: 146020 - RNA, 1410 nt, Artificial Sequence; identical to SEQ ID NO: 144786
  derived and/or modified CDS sequence (opt3) from neuraminidase__InfluenzaA__ADB89364

SEQ ID NO: 146021 - RNA, 1410 nt, Artificial Sequence; identical to SEQ ID NO: 144786
  derived and/or modified CDS sequence (opt3) from neuraminidase__InfluenzaA__ADB89374

SEQ ID NO: 146022 - RNA, 1410 nt, Artificial Sequence; identical to SEQ ID NO: 144786
  derived and/or modified CDS sequence (opt3) from neuraminidase__InfluenzaA__ADB89384

SEQ ID NO: 146023 - RNA, 1410 nt, Artificial Sequence; identical to SEQ ID NO: 144786
  derived and/or modified CDS sequence (opt3) from neuraminidase__InfluenzaA__ADB89394

SEQ ID NO: 146024 - RNA, 1410 nt, Artificial Sequence
  derived and/or modified CDS sequence (opt3) from neuraminidase__InfluenzaA__ADB89404
augaaccccaaucagaagaucauuaccauaggcagcgugugcaugacaaucgggauggccaaccugauucuccaaaucggaaauauuaucuccauauggaucucucacucaauucagcuugguaaccagaaucagaucgagacuuguaaccaaagugucauuacguacgaaaauaacaccuggguuaaucagacauaugugaacaucagcaauacuaacuucgcugcaggccaguccguagugucugucaaacuggccggaaauucgucauugugcccugugagcgggugggcgauauacaguaaggacaacuccguuagaauuggcucuaaaggugauguguuugucaucagggagccauucauuagcuguuccccguuagaaugccggaccuuuuuccugacacagggggcucuacucaaugacaagcauucaaacggaaccaucaaagaucgcagucccuaucgaacucugaugagcuguccuaucggcgaggugccaucucccuacaacucccguuuugaaucaguagccuggagcgcaagugccugccacgacggcauuaauuggcuuacaauagggaucucuggaccugauaacggugcuguugcagugcugaaguauaauggcauuaucaccgacacgauaaaguccuggagaaacagcauuuugaggacucaagagucggagugugccugcgucaaugggucuuguuucaccgugaugacagauggaccauccaacggccaggcuucauacaaaaucuuucggaucgaaaaggguaaaauugugaagagugucgagaugaaugcccccaacuaucauuacgaagagugcagcuguuacccugacuccucugagaucacuugcguuugccgcgauaauuggcacgggagcaacagaccaugggugucauucaaucagaaccucgaauaucagauuggauacauauguaguggcaucuuuggcgacaauccgaggcccaacgauaaaaccggguccugcggaccuguaagcucuaauggugcgaacggcgugaagggguucucauuuaaguauggaaacggcgucuggauuggucggacaaaaaguaucagcucccgcaauggguucgagaugaucugggacccaaacggcuggaccggaacggauaauaacuuuucuauuaagcaagacauagugggcaucaaugaauggucgggguacagcggauccuucguucagcaucccgagcugacuggucuggacuguauucgaccuugcuucuggguggaacucaucagaggcaggccaaaagagaacacaauuuggaccucagggaguucuaucagcuuuuguggagucaauuccgauacugugggcuggucauggcccgacggugcagaguuaccguucacaauagauaaguga

SEQ ID NO: 146025 - RNA, 1410 nt, Artificial Sequence; identical to SEQ ID NO: 144786
  derived and/or modified CDS sequence (opt3) from neuraminidase__InfluenzaA__ADB89414

SEQ ID NO: 146026 - RNA, 1410 nt, Artificial Sequence; identical to SEQ ID NO: 144786
  derived and/or modified CDS sequence (opt3) from neuraminidase__InfluenzaA__ADB89424

SEQ ID NO: 146027 - RNA, 1410 nt, Artificial Sequence; identical to SEQ ID NO: 144786
  derived and/or modified CDS sequence (opt3) from neuraminidase__InfluenzaA__ADB89434

SEQ ID NO: 146028 - RNA, 1410 nt, Artificial Sequence; identical to SEQ ID NO: 144786
  derived and/or modified CDS sequence (opt3) from neuraminidase__InfluenzaA__ADB89444

SEQ ID NO: 146029 - RNA, 1410 nt, Artificial Sequence
  derived and/or modified CDS sequence (opt3) from neuraminidase__InfluenzaA__ADB89454
augaaccccaaucagaagaucauuaccauaggcagcgugugcaugacaaucgggauggccaaccugauucuccaaaucggaaauauuaucuccauauggaucucucacucaauucagcuugguaaccagaaucagaucgagacuuguaaccaaagugucauuacguacgaaaauaacaccuggguuaaucagacauaugugaacaucagcaauacuaacuucgcugcaggccaguccguagugucugucaaacuggccggaaauucgucauugugcccugugagcgggugggcgauauacaguaaggacaacuccauuagaaucggcucuaaaggugauguuuuugugauuagggagccauucaucagcuguuccccguuagaaugccggaccuuuuuccugacacagggggcucuacucaaugacaagcauucaaacggaaccaucaaagaucgcagucccuaucgaacucugaugagcuguccuauuggcgaggucccaucucccuacaacucccguuuugaaucaguggccuggagcgcaagugccugccacgacggcauaaauuggcuuacaaucgggauuucuggaccugauaacggugcuguagcaguucugaaguauaauggcaucauaaccgacacgauuaaguccuggagaaacaauaucuugaggacucaagagagcgagugugccugcgugaacgggucguguuucaccgucaugacagauggaccaaaugacggccaggcuucuuacaaaaucuuucggauugaaaaggguaaaaucgugaaguccguggagaugaacgcccccaauuaucauuacgaagagugcucauguuacccugauaguagcgagauuacuugcgucugccgcgacaacuggcacggguccaauagaccauggguuucuuucaaccagaaucucgaauaucagauaggauacaucuguagcggcauuuuuggcgauaacccgaggcccaaugacaaaaccgggucaugcggaccugugaguuccaacggugcgaacggcguaaagggguucagcuuuaaguauggaaauggcguguggaucggucggacaaaaucuaucucaagucgcaacggguucgagaugauuugggauccaaauggcuggaccggaacggacaacaauuuuagcauaaagcaagacaucgucggcauuaacgaaugguccggguacucuggaucguucgugcagcaucccgagcugacuggucuggauuguauccgaccuugcuucuggguugaacucauuagaggcaggccaaaagagaauacaaucuggaccagcggguccucaauaaguuuuuguggagugaacucugacacugucggcuggagcuggcccgauggugcagaguuaccguucacaaucgacaaguga

SEQ ID NO: 146030 - RNA, 1410 nt, Artificial Sequence; identical to SEQ ID NO: 144786
  derived and/or modified CDS sequence (opt3) from neuraminidase__InfluenzaA__ADB89464

SEQ ID NO: 146031 - RNA, 1410 nt, Artificial Sequence; identical to SEQ ID NO: 144786
  derived and/or modified CDS sequence (opt3) from neuraminidase__InfluenzaA__ADB89484

SEQ ID NO: 146032 - RNA, 1410 nt, Artificial Sequence; identical to SEQ ID NO: 144786
  derived and/or modified CDS sequence (opt3) from neuraminidase__InfluenzaA__ADB89494

SEQ ID NO: 146033 - RNA, 1410 nt, Artificial Sequence; identical to SEQ ID NO: 144776
  derived and/or modified CDS sequence (opt3) from neuraminidase__InfluenzaA__ADB89504

SEQ ID NO: 146034 - RNA, 1410 nt, Artificial Sequence; identical to SEQ ID NO: 144786
  derived and/or modified CDS sequence (opt3) from neuraminidase__InfluenzaA__ADB89514

SEQ ID NO: 146035 - RNA, 1410 nt, Artificial Sequence; identical to SEQ ID NO: 144786
  derived and/or modified CDS sequence (opt3) from neuraminidase__InfluenzaA__ADB89524

SEQ ID NO: 146036 - RNA, 1410 nt, Artificial Sequence
  derived and/or modified CDS sequence (opt3) from neuraminidase__InfluenzaA__ADB89544
augaaccccaaucagaagaucauuaccauaggcagcgugugcaugacaaucgggauggccaaccugauucuccaaaucggaaauauuaucuccauauggaucucucacucaauucagcuugguaaccagaaucagaucgagacuuguaaccaaagugucauuacguacgaaaauaacaccuggguuaaucagacauaugugaacaucagcaauacuaacuucgcugcaggccaguccguagugucugucaaacuggccggaaauucgucauugugcccugugagcggaugggcgauauacaguaaggacaacuccauuagaaucggcucuaaaggugauguuuuugugauuagggagccauucaucagcuguuccuuacuggaaugccggaccuuuuuccuaacacagggggcucuccugaaugacaagcauucaaacggaaccaucaaagaucgcaguccguaucgaacucuuaugagcugucccauuggcgaggucccuucuccauacaacucccguuuugaaucaguggccuggagcgcaagugccugccacgacggcauaaauuggcugacaaucgggauuucuggacccgauaacggugcuguagcaguuuugaaguauaauggcaucauaaccgacacgauuaaguccuggagaaacaauauccucaggacucaagagagcgagugugccugcgugaacgggucguguuucaccgucaugacagauggaccuucugacggccaggcuuccuacaaaaucuuucggauugaaaaggguaaaaucgugaagucaguggagaugaaugccccaaacuaucauuacgaagagugcaguuguuaccccgauagcuccgagauuacuugcgucugccgcgacaauuggcacgggucuaacagaccuuggguuagcuucaaucagaaccuggaauaucagauaggauacaucuguucaggcauuuuuggcgauaauccaaggccgaacgacaaaaccgggaguugcggacccguguccagcaauggugcgaacggcguaaagggguucucuuuuaaguauggaaacggcguguggaucggucggacaaaaucaaucaguagccgcaauggguucgagaugauuugggauccuaacggcuggaccggaacggacaauaacuuuuccauaaagcaagacaucgucggcauuaaugaauggucuggguacucggggagcuucgugcagcauccagagcugacuggucucgauuguauccgacccugcuucuggguugaauuaauuagaggcaggccuaaagagaacacaaucuggaccuccgggucaaguauaucuuuuuguggagugaauagcgacacugucggcugguccuggccagauggugcagagcugcccuucacaaucgacaaguga

SEQ ID NO: 146037 - RNA, 1410 nt, Artificial Sequence; identical to SEQ ID NO: 144786
  derived and/or modified CDS sequence (opt3) from neuraminidase__InfluenzaA__ADB89564

SEQ ID NO: 146038 - RNA, 1410 nt, Artificial Sequence; identical to SEQ ID NO: 144786
  derived and/or modified CDS sequence (opt3) from neuraminidase__InfluenzaA__ADB89574

SEQ ID NO: 146039 - RNA, 1410 nt, Artificial Sequence; identical to SEQ ID NO: 144786
  derived and/or modified CDS sequence (opt3) from neuraminidase__InfluenzaA__ADB89594

SEQ ID NO: 146040 - RNA, 1410 nt, Artificial Sequence; identical to SEQ ID NO: 144786
  derived and/or modified CDS sequence (opt3) from neuraminidase__InfluenzaA__ADB89604

SEQ ID NO: 146041 - RNA, 1410 nt, Artificial Sequence
  derived and/or modified CDS sequence (opt3) from neuraminidase__InfluenzaA__ADB89614
augaaccccaaucagaagaucauuaccauaggcagcgugugcaugacaaucgggauggccaaccugauucuccaaaucggaaauauuaucuccauauggaucucucacucaauucagcuugguaaccagaaucagaucgagacuuguaaccaaagugucauuacguacgaaaauaacaccuggguuaaucagacauaugugaacaucagcaauacuaacuucgcugcaggccaguccguagugucugucaaacuggccggaaauucgucauugugcccugugagcggaugggcgauauacaguaaggacaacuccauuagaaucggcucuaaaggugauguuuuugugauuagggagccauucaucagcuguuccccguuagaaugccggaccuuuuuccugacacagggggcucuacucaaugacaagcauucaaacggaaccaucaaagaucgcagucccuaucgaacucugaugagcuguccuauuggcgaggucccaucucccuacaacucccguuuugaaucaguggccuggagcgcaagugccugccacgacggcauaaauuggcuuacaaucgggauuucuggaccugauaacggugcuguagcaguucugaaguauaauggcaucauaaccgacacgauuaaguccuggagaaacaauaucuugaggacucaagagagcgagugugccugcgugaacgggucguguuucaccgucaugacagauggaccaucugacggccaggcuuccuacaaaaucuuucggauugaaaaggguaaaaucgugaagucaguggagaugaaugcccccaacuaucauuacgaagagugcaguuguuacccugauagcuccgagauuacuugcgucugccgcgacaauuggcacgggucuaacagaccauggguuagcuucaaucagaaccucgaauaucagauaggauacaucuguucaggcauuuuuggcgauaauccgaggcccaacgacaaaaccgggaguugcggaccuguguccagcaauggugcgaacggcguaaagggguucucuuuuaaguauggaaacggcaucuggaucggucggacaaaaucaauuaguagccgcaauggguucgagaugauaugggauccaaacggcuggaccggaacggacaauaacuuuuccaucaagcaagacauugugggcaucaaugaauggucuggguacucggggagcuucguccagcaucccgagcugacuggucuggauuguauucgaccuugcuucuggguggaacucaucagaggcaggccaaaagagaacacaauauggaccuccgggucaaguaucucuuuuuguggaguuaauagcgacacugugggcugguccuggcccgauggugcagaguuaccguucacaauugacaaguga

SEQ ID NO: 146042 - RNA, 1410 nt, Artificial Sequence; identical to SEQ ID NO: 144786
  derived and/or modified CDS sequence (opt3) from neuraminidase__InfluenzaA__ADB89624

SEQ ID NO: 146043 - RNA, 1410 nt, Artificial Sequence; identical to SEQ ID NO: 144786
  derived and/or modified CDS sequence (opt3) from neuraminidase__InfluenzaA__ADB89634

SEQ ID NO: 146044 - RNA, 1410 nt, Artificial Sequence; identical to SEQ ID NO: 144786
  derived and/or modified CDS sequence (opt3) from neuraminidase__InfluenzaA__ADB89644

SEQ ID NO: 146045 - RNA, 1410 nt, Artificial Sequence; identical to SEQ ID NO: 145804
  derived and/or modified CDS sequence (opt3) from neuraminidase__InfluenzaA__ADB89664

SEQ ID NO: 146046 - RNA, 1410 nt, Artificial Sequence; identical to SEQ ID NO: 144786
  derived and/or modified CDS sequence (opt3) from neuraminidase__InfluenzaA__ADB89674

SEQ ID NO: 146047 - RNA, 1410 nt, Artificial Sequence; identical to SEQ ID NO: 144786
  derived and/or modified CDS sequence (opt3) from neuraminidase__InfluenzaA__ADB89684

SEQ ID NO: 146048 - RNA, 1410 nt, Artificial Sequence
  derived and/or modified CDS sequence (opt3) from neuraminidase__InfluenzaA__ADB89694
augaaccccaaucagaagaucauuaccauaggcagcgugugcaugacaaucgggauggccaaccugauucuccaaaucggaaauauuaucuccauauggaucucucacucaauucagcuugguaaccagaaucagaucgagacuuguaaccaaagugucauuacguacgaaaauaacaccuggguuaaucagacauaugugaacaucagcaauacuaacuucgcugcaggccaguccguagugucugucaaacuggccggaaauucgucauugugcccugugagcgggugggcgauauacaguaaggacaacuccauuagaaucggcucuaaaggugauguuuuugugauuagggagccauucaucagcuguuccccguuagaaugccggaccuuuuuccugacacagggggcucuacucaaugacaagcauucaaacggaaccaucaaagaucgcagucccuaucgaacucugaugagcuguccuauuggcgaggucccaucucccuacaacucccguuuugaaucaguggccuggagcgcaagugccugccacgacggcauaaauuggcuuacaaucgggauuucuggaccugauaacggugcuguagcaguucugaaguauaauggcaucauaaccgacacgauuaaguccuggagaaacaauaucuugaggacucaagagagcgagugugccugcgugaacgggucguguuucaccgucaugacagauggaccaucugacggccaggcuuccuacaaaaucuuucggauugaaaaggguaaaaucgugaagucaguggagaugaaugcccccaacuaucauuacgaagagugcaguuguuacccugauagcuccgagauuacuugcgucugccgcgacaauuggcacgggucuaacagaccauggguuagcuucaaucagaaccucgaauaucagauaggauacaucuguucaggcauuuuuggcgauaauccgaggcccaacgacaaaaccgggaguugcggaccuguguccagcaauggugcgaacggcguaaagggguucucuuuuaaguauggaaacggcguguggaucggucggacaaaaucaaucaguagccgcaauggguucgagaugauuugggauccaaacggcuggaccggaacggacaauaacuuuacuauaaagcaagacaucgucggcauuaaugaaugguccggguacucuggaucguucgugcagcaucccgagcugacaggucuggauuguauccgaccuugcuucuggguugaacucauuagaggcaggccaaaagagaacaccaucuggacuagcggguccucaauaaguuuuuguggagucaauucugacacagugggcuggagcuggcccgauggugcagaguuaccguucaccaucgacaaguga

SEQ ID NO: 146049 - RNA, 1410 nt, Artificial Sequence; identical to SEQ ID NO: 144786
  derived and/or modified CDS sequence (opt3) from neuraminidase__InfluenzaA__ADB89704

SEQ ID NO: 146050 - RNA, 1410 nt, Artificial Sequence; identical to SEQ ID NO: 144786
  derived and/or modified CDS sequence (opt3) from neuraminidase__InfluenzaA__ADB89714

SEQ ID NO: 146051 - RNA, 1410 nt, Artificial Sequence; identical to SEQ ID NO: 144647
  derived and/or modified CDS sequence (opt3) from neuraminidase__InfluenzaA__ADB89724

SEQ ID NO: 146052 - RNA, 1410 nt, Artificial Sequence; identical to SEQ ID NO: 144647
  derived and/or modified CDS sequence (opt3) from neuraminidase__InfluenzaA__ADB89735

SEQ ID NO: 146053 - RNA, 1410 nt, Artificial Sequence; identical to SEQ ID NO: 144786
  derived and/or modified CDS sequence (opt3) from neuraminidase__InfluenzaA__ADB90357

SEQ ID NO: 146054 - RNA, 1410 nt, Artificial Sequence; identical to SEQ ID NO: 144786
  derived and/or modified CDS sequence (opt3) from neuraminidase__InfluenzaA__ADB90358

SEQ ID NO: 146055 - RNA, 1410 nt, Artificial Sequence
  derived and/or modified CDS sequence (opt3) from neuraminidase__InfluenzaA__ADB90359
augaaccccaaucagaagaucauuaccauaggcagcgugugcaugacaaucgggauggccaaccugauucuccaaaucggaaauauuaucuccauauggaucucucacucaauucagcuugguaaccagaaucagaucgagacuuguaaccaaaguauuaucacguacgaaaauaacaccugggucaaucagacauauguuaacauaagcaauacuaacuucgcugcaggccaguccgugguaucugugaaacuggccggaaauucgucauugugcccugucagcggaugggcgauuuacaguaaggacaacuccaucagaauuggcucuaaaggugauguguuuguuaucagggagccauucaucagcuguuccccguuagaaugccggaccuuuuuccugacacagggggcucuacucaaugacaagcauucaaacggaaccauuaaagaucgcagucccuaucgaacucugaugagcuguccuauaggcgaggugccaucucccuacaacucccguuuugaaucagucgccuggagcgcaagugccugccacgacggcaucaauuggcuuacaauugggaucucuggaccugauaacggugcuguggcaguacugaaguauaauggcauaauuaccgacacgaucaaguccuggagaaacaauaucuugaggacucaagagagcgagugugccugcguuaacgggucguguuucaccgugaugacagauggaccaucugacggccaggcuuccuacaaaauuuuucggaucgaaaaggguaaaauugucaagucaguggagaugaaugcccccaacuaucauuacgaagagugcaguuguuacccugauagcuccgagauaacuugcgugugccgcgacaauuggcacgggucuaacagaccaugggucagcuucaaucagaaccucgaauauaggaucggauacauuuguucaggcaucuuuggcgauaauccgcggcccaacgacaaaaccgggaguugcggaccuguuuccagcaauggugcgaacggcgugaagggguucucuuuuaaguauggaaacggcguauggaucggucgcacaaaaucaauuaguagccgaaauggguucgagaugauaugggauccaaacggcuggaccggaacggacaauaacuuuuccaucaagcaggacauugugggcacuaaugaauggucuggguacucggggagcuucguccaacaucccgagcugacaggucuggauuguaucagaccuugcuucuggguggaacucauuaggggccggccaaaagagaacaccaucuggacuuccgggucaaguauaucuuuuuguggaguuaauagcgacacagugggcugguccuggcccgauggugcagaguuaccguucaccaucgacaaguga

SEQ ID NO: 146056 - RNA, 1410 nt, Artificial Sequence; identical to SEQ ID NO: 144786
  derived and/or modified CDS sequence (opt3) from neuraminidase__InfluenzaA__ADB90363

SEQ ID NO: 146057 - RNA, 1410 nt, Artificial Sequence; identical to SEQ ID NO: 145963
  derived and/or modified CDS sequence (opt3) from neuraminidase__InfluenzaA__ADB90373

SEQ ID NO: 146058 - RNA, 1410 nt, Artificial Sequence; identical to SEQ ID NO: 144786
  derived and/or modified CDS sequence (opt3) from neuraminidase__InfluenzaA__ADB98137

SEQ ID NO: 146059 - RNA, 1410 nt, Artificial Sequence; identical to SEQ ID NO: 145140
  derived and/or modified CDS sequence (opt3) from neuraminidase__InfluenzaA__ADB98138

SEQ ID NO: 146060 - RNA, 1410 nt, Artificial Sequence; identical to SEQ ID NO: 144786
  derived and/or modified CDS sequence (opt3) from neuraminidase__InfluenzaA__ADB98139

SEQ ID NO: 146061 - RNA, 1410 nt, Artificial Sequence; identical to SEQ ID NO: 145140
  derived and/or modified CDS sequence (opt3) from neuraminidase__InfluenzaA__ADB98140

SEQ ID NO: 146062 - RNA, 1410 nt, Artificial Sequence; identical to SEQ ID NO: 145140
  derived and/or modified CDS sequence (opt3) from neuraminidase__InfluenzaA__ADB98141

SEQ ID NO: 146063 - RNA, 1410 nt, Artificial Sequence; identical to SEQ ID NO: 144786
  derived and/or modified CDS sequence (opt3) from neuraminidase__InfluenzaA__ADC32391

SEQ ID NO: 146064 - RNA, 1410 nt, Artificial Sequence; identical to SEQ ID NO: 144786
  derived and/or modified CDS sequence (opt3) from neuraminidase__InfluenzaA__ADC32392

SEQ ID NO: 146065 - RNA, 1410 nt, Artificial Sequence; identical to SEQ ID NO: 144786
  derived and/or modified CDS sequence (opt3) from neuraminidase__InfluenzaA__ADC32393

SEQ ID NO: 146066 - RNA, 1410 nt, Artificial Sequence; identical to SEQ ID NO: 144786
  derived and/or modified CDS sequence (opt3) from neuraminidase__InfluenzaA__ADC32394

SEQ ID NO: 146067 - RNA, 1410 nt, Artificial Sequence; identical to SEQ ID NO: 144786
  derived and/or modified CDS sequence (opt3) from neuraminidase__InfluenzaA__ADC32395

SEQ ID NO: 146068 - RNA, 1410 nt, Artificial Sequence; identical to SEQ ID NO: 144786
  derived and/or modified CDS sequence (opt3) from neuraminidase__InfluenzaA__ADC32396

SEQ ID NO: 146069 - RNA, 1410 nt, Artificial Sequence; identical to SEQ ID NO: 144786
  derived and/or modified CDS sequence (opt3) from neuraminidase__InfluenzaA__ADC32397

SEQ ID NO: 146070 - RNA, 1410 nt, Artificial Sequence; identical to SEQ ID NO: 144786
  derived and/or modified CDS sequence (opt3) from neuraminidase__InfluenzaA__ADC32398

SEQ ID NO: 146071 - RNA, 1410 nt, Artificial Sequence; identical to SEQ ID NO: 144786
  derived and/or modified CDS sequence (opt3) from neuraminidase__InfluenzaA__ADC32399

SEQ ID NO: 146072 - RNA, 1410 nt, Artificial Sequence; identical to SEQ ID NO: 144786
  derived and/or modified CDS sequence (opt3) from neuraminidase__InfluenzaA__ADC32400

SEQ ID NO: 146073 - RNA, 1410 nt, Artificial Sequence; identical to SEQ ID NO: 144786
  derived and/or modified CDS sequence (opt3) from neuraminidase__InfluenzaA__ADC32401

SEQ ID NO: 146074 - RNA, 1410 nt, Artificial Sequence
  derived and/or modified CDS sequence (opt3) from neuraminidase__InfluenzaA__ADC32404
augaaccccaaucagaagaucauuaccauaggcagcgugugcaugacaaucgggauggccaaccugauucuccaaaucggaaauauuaucuccauauggaucucucacucaauucagcuugguaaccagaaucagaucgagacuuguaaccaaagugucauuacguacgaaaauaacaccuggguuaaucagacauaugugaacaucagcaauacuaacuucgcugcaggccaguccguagugucugucaaacuggccggaaauucgucauugugcccugugagcggaugggcgauauacaguaaggacaacuccauuagaaucggcucuaaaggugauguuuuugugauuagggagccauucaucagcuguuccccguuagaaugccggaccuuuuuccugacacagggggcucuacucaaugacaagcauucaaacggaaccaucaaagaucgcagucccuaucgaacucugaugagcuguccuauuggcgaggucccaucucccuacaacucccguuuugaaucaguggccuggagcgcaagugccugccacgacggcauaaauuggcuuacaaucgggauuucuggaccugauaacggugcuguagcaguucugaaguauaauggcaucauaaccgacacgauuaaguccuggagaaacaauaucuugaggacucaagagagcgagugugccugcgugaacgggucguguuucaccgucaugacagauggaccaucugacggccaggcuuccuacaaaaucuuucggauugaaaaggguaaaaucgugaagucaguggagaugaaugcccccaacuaucauuacgaagagugcaguuguuacccugauagcuccgagauuacuugcgucugccgcgacaauuggcacgggucuaacagaccauggguuagcuucaaucagaaccucgaauaucagauaggauacaucuguucaggcauuuuuggcgauaauccgaggcccaacgacaaaaaggggaguugcggaccuguguccagcaauggugcgaacggcguaaagggguucucuuuuaaauauggaaacggcguguggaucggucggaccaagucaaucaguagccgcaauggguucgagaugauuugggauccaaacggcuggacaggaaccgacaauaacuuuuccauaaaacaagacaucgucggcauuaaugaauggucuggguacucggggagcuucgugcagcaucccgagcugacgggucuggauuguauccgaccuugcuucuggguugaacucauuagaggcaggccaaaggagaacacuaucuggacauccgggucaaguauaucuuuuuguggagugaauagcgacaccgucggcugguccuggcccgauggugcagaguuaccguucacuaucgacaaauga

SEQ ID NO: 146075 - RNA, 1410 nt, Artificial Sequence
  derived and/or modified CDS sequence (opt3) from neuraminidase__InfluenzaA__ADC32407
augaaccccaagcagaaaaucauuaccauaggcagcgugugcaugacaaucgggauggccaaucugauucuccaaaucggaaacauuaucuccauauggaucucucacucaauucagcuugguaaucagaaccagaucgagacuuguaaucaaagugucauuacguacgaaaacaauaccuggguuaaccagacauaugugaauaucagcaacacuaauuucgcugcaggccaguccguagugucugucaagcuggccgggaacucgucauugugcccugugagcggaugggcgauauacaguaaagacaauuccauuagaaucggcucuaagggugauguuuuugugauuagggagccauucaucagcuguuccccguuagaaugccggaccuuuuuccugacacagggggcucuacucaacgacaaacauucaaauggaaccaucaaggaucgcagucccuaucgaacucugaugagcuguccuauuggcgaggucccaucucccuacaacucccguuuugaaucaguggccuggagcgcaagugccugccacgacggcauaaacuggcuuacaaucgggauuucuggaccugauaauggugcuguagcaguucugaaguauaacggcaucauaaccgacacgauuaaauccuggagaaauaacaucuugaggacucaagagagcgagugugccugcgugaaugggucguguuucaccgucaugacagauggaccaucugacggccaggcuuccuacaagaucuuucggauugaaaaagguaagaucgugaaaucaguggagaugaacgcccccaauuaucauuacgaagagugcaguuguuacccugauagcuccgagauuacuugcgucugccgcgacaacuggcacgggucuaauagaccauggguuagcuucaaccagaaucucgaauaucagauaggauacaucuguucaggcauuuuuggcgauaacccgaggcccaaugacaagaaggggaguugcggaccuguguccagcaacggugcgaauggcguaaaaggguucucuuuuaaguauggaaacggcguguggaucggucggaccaaaucaaucaguagccgcaacggguucgagaugauuugggauccaaauggcuggacaggaaccgacaacaauuuuuccauaaagcaagacaucgucggcauuaacgaauggucuggguacucggguagcuucgugcagcaucccgagcugacgggacuggauuguauccgaccuugcuucuggguugaacucauuagaggcaggccaaaagagaauacuaucuggacauccgggucaaguauaucuuuuuguggagugaacagcgacaccgucggcugguccuggcccgauggugcagaguuaccguucacuaucgacaaguga

SEQ ID NO: 146076 - RNA, 1410 nt, Artificial Sequence
  derived and/or modified CDS sequence (opt3) from neuraminidase__InfluenzaA__ADC34942
augaaccccaaucagaagaucauuaccauaggcagcgugucccugacaaucucuacuauuugcuucuuuaugcaaaucgccauucucaucacgaccgucacacuucacuucaaacaguacgaguuuaacccuccaccgaauaaccagguuaugcugugugaacccacuauaaucgagagaaauauuaccgaaaucguguauuugacaaacaccacuauugagaaggaaaucugcccuaaauuagcugaguacagggaguggucaaagccacaguguaauauaacaggguucgcacccuuuaguaaagacaacagcauucggcuguccgccggaggugauaucuggguaacccgcgaaccuuaugugucuugcgacccagauaaguguuaccaauucgcgcuaggccaggggacgacucucaauaacguccauucgaaugacauugugcgagaucguacccccuauagaacacugcuuaugaacgagcugggaguuccuuuucacuugggcacuaaacaggugugcaucgcuuggucaagcaguuccugucaugacgguaaggccuggcuccacgucugcgugaccggggaugacaagaaugcaacagccucuuucaucuacaacggaaggcugguagauagcauuguuuccuggucaaaagaaauacugcggacccaggagagugagugugugugcaucaauggcacguguacugucgugaugacagacggcagcgcuucugggaaggcagauaccaaaauucucuuuaucgaagagggaaagauagugcauacuuccacauuaucagguagcgcccaacacgucgaagagugcaguugcuauccacgcuacccgggcguuagaugugugugcagggacaacuggcgggggucuaaccgccccauuguagauaucaauaugaaggacuacuccaucgugagcucguaugucuguucuggacuggugggcgacaccccucggaaaaacgauuccucaaguagcggucacugccuuaauccaaacaaugaagaagggggacauggcguuaagggcugggcuuucgacgaugggaacgacguguggaugggaagaacgauuuccgagaaauugaggucugguuacgagaccuuuaaggucaucgagggcuggagcaaucccaacucaaaacugcagauuaaucgacaggugauaguagaucgugggaaccgcaguggauauuccggcaucuucagcguugaagguaagucuuguauuaauagaugcuuuuacguggagcuaaucagggggcggaaagaagagacagagguccucuggacuucaaacaguaucguggucuucuguggcaccagcggaacauauggcacuggguccuggccugacggagccgauauuaaucugaugccaauauga

SEQ ID NO: 146077 - RNA, 1410 nt, Artificial Sequence
  derived and/or modified CDS sequence (opt3) from neuraminidase__InfluenzaA__ADC39000
augaaccccaaucagaagaucauuaccauaggcagcgugugcaugacaaucgggauggccaaccugauucuccaaaucggaaauauuaucuccauauggaucucucacucaauucagcuugguaaccagaaucagaucgagacuuguaaccaaagugucauuacguacgaaaauaacaccuggguuaaucagacauaugugaacaucagcaauacuaacuucgcugcaggccaguccguagugucugucaaacuggccggaaauucgucauugugcccugugagcggaugggcgauauacaguaaggacaacuccauuagaaucggcucuaaaggugauguuuuugugauuagggagccauucaucagcuguuccccguuagaaugccggaccuuuuuccugacacagggggcucuacucaaugacaagcauucaaacggaaccaucaaagaucgcagucccuaucgaacucugaugagcuguccuauuggcgaggucccaucucccuacaacucccguuuugaaucaguggccuggagcgcaagugccugccacgacggcauaaauuggcuuacaaucgggauuucuggaccugauaacggugcuguagcaguucugaaguauaauggcaucauaaccgacacgauuaaguccuggagaaacaauaucuugaggacucaagagagcgagugugccugcgugaacgggucguguuucaccgucaugacagauggaccaucugacggccaggcuuccuacaaaaucuuucggauugaaaaggguaaaaucgugaagucaguggagaugaaugcccccaacuaucauuacgaagagugcaguuguuacccugauagcuccgagauuacuugcgucugccgcgacaauuggcacgggucuaacagaccauggguuagcuucaaucagaaccucgaauaucagauaggauacaucuguucaggcauuuuuggcgauaauccgaggcccaacgacaaaaccgggaguugcggaccuguguccagcaauggugcgaacggcguaaagggguucucuuuuaaguauggaaacggcguguggaucggucggacaaaaucaaucaguagccgcaauggguucgagaugauuugggauccaaacggcuggaccggaacggacaauaacuuuuccauaaagcaagacaucgucggcauuaaugaauggucuggguacucggggagcuucgugcagcaucccgagcugacuggucuggauuguauccgaccuugcuucuggguugaacucauuagaggcaggccaaaagagaacacaaucuggaccuccgggucaaguauaucuuuuuguggagugaauagcgacaacgucggcugguccuggcccgauggugcagaguuaccguucacuaucgacaaguga

SEQ ID NO: 146078 - RNA, 1410 nt, Artificial Sequence; identical to SEQ ID NO: 144786
  derived and/or modified CDS sequence (opt3) from neuraminidase__InfluenzaA__ADC39010

SEQ ID NO: 146079 - RNA, 1413 nt, Artificial Sequence; identical to SEQ ID NO: 144680
  derived and/or modified CDS sequence (opt3) from neuraminidase__InfluenzaA__ADC45606

SEQ ID NO: 146080 - RNA, 1413 nt, Artificial Sequence
  derived and/or modified CDS sequence (opt3) from neuraminidase__InfluenzaA__ADC45628
augaaccccaaucagaagaucauuaccauaggcagcaucuccauugccaucgggauuaucucucugaugcuccaaaugggaaacauaaucucaauuugggcuagucacagcauccagacagguucccagaaucauacuggcauuugcaaccagagaaucauaacguacgaaaauucuaccugggugaaccacacauaugucaauauuaacaauacuaacguuguggcagggaaagacaagaccccuguaacacuugugggaaauucgucacuguguagcaucaguggcugggccauuuacaccaaagauaacuccaucaggaucgguucuaagggggacgucuucgugauucgggagccauuuauaagcugcucccauuuggaguguaaaacuuucuuuuuaacacaaggagcgcugcuaaaugauaagcacucaaacggcaccguuaaggaccgcaguccguaucgagcucucaugagcugcccccugggcgaagccccuucuccauacaauuccaaauucgagucaguggcauggagcgccagugcuugucaugaugggaucggauggcuuacgauugguaucucuggccccgacaacggggcagucgccgugcugaaguauaaaggaauaauuacuggcaccaucaaguccuggaaaaagcagaucuugcguacacaggaaagcgagugcguauguaugaacgguucgugcuuuacuauuaugaccgaugggccuucuaauggagcugccuccuacaagaucuucaaaauugagaagggcaaaguuacaaagucaauggaacucaacgcgccaaauuuucacuaugaggaauguaguugcuaccccgacaccggcacggugaugugugucugcagagauaacuggcacgggagcaauaggccuuggguguccuucaaccagaaucuggacuaccaaauaggauauaucugcucugguguguuuggcgauaacccacggccgaaagaccgcgaggggagcuguaaucccgucacuguugauggagcaaacggcgugaaggguuucucauacaaauaugggaauggcguauggauuggaagaacaaagaguaacaggauccggaagggcuuugagaugaucugggacccuaauggguggaccaacacugacuccgauuucagcgugaaacaggacauugucgccauaacagauuggucuggauacucagguaguuuugugcagcauccagaacugaccggccucgacugcauccgccccuguuucuggguugaguuagugcgagggcugccuagagaaaauacgaccauuuggacaagcggauccucuaucucguucugcggcgucaacggugauauugcuaacuggagcuggccagacggggccgagcuucccuuuacuaucgauaaguga

SEQ ID NO: 146081 - RNA, 1413 nt, Artificial Sequence
  derived and/or modified CDS sequence (opt3) from neuraminidase__InfluenzaA__ADC45639
augaaccccaaucagaagaucauuaccauaggcagcaucuccauugccaucgggauuaucucucugaugcuccaaauaggaaacaucauuucaaucugggcuagucacagcauucagacagguucccagaaucauacuggcaucugcaaccagagaauaauuacguacgaaaauucuaccugggugaaccacacauaugucaauaucaacaauacuaacguuguggcagggaaagacaagaccccuguaacacuugugggaaauucgucacuguguagcauuaguggcugggccaucuacaccaaagauaacuccaucaggauugguucuaagggggacgucuucgugauacgggagccauuuaucagcugcucccauuuggaguguaaaacuuucuuuuuaacacaaggagcgcugcuaaaugauaagcacucaaacggcaccguuaaggaccgcaguccguaucgagcucucaugagcugcccccugggcgaagccccuucuccauacaauuccaaauucgagucaguggcauggagcgccagugcuugucaugaugggauuggauggcuuacgaucggugucucuggccccgacaacggggcaguggccguacugaaguauaaaggaauaauuacuggcaccaucaaguccuggaaaaagcagaucuugcguacacaggaaagcgagugcguuuguaugaacgguucgugcuuuacuauuaugaccgaugggccuucuaauggagcugccuccuacaagaucuucaaaauugagaagggcaaagugacaaagucaauggaacucaacgcgccaaauuuucacuaugaggaauguaguugcuaccccgacaccggcacggucaugugugugugcagagauaacuggcacgggagcaauaggccuuggguguccuucaaccagaaucuggacuaccaaauaggauauaucugcucuggugucuuuggcgauaacccacggccgaaagaccgcgaggggagcuguaaucccguuacuguggauggagcaaacggcguaaaggguuucucauacaaauaugggaauggcguguggauuggaagaacaaagaguaacaggauccggaagggcuuugagaugaucugggacccuaauggguggaccaacacugacuccgauuucagcgucaaacaggacauuguggccauaacagauuggucuggauacucagguaguuuuguucagcauccagaacugaccggccucgacugcauccgccccuguuucuggguggaguuaguccgagggcugccuagagaaaauacgaccauuuggacaagcggauccucuaucucguucugcggcgugaacggugauauugcuaacuggagcuggccagacggggccgagcuucccuuuacuaucgauaaguga

SEQ ID NO: 146082 - RNA, 1413 nt, Artificial Sequence; identical to SEQ ID NO: 144680
  derived and/or modified CDS sequence (opt3) from neuraminidase__InfluenzaA__ADC45650

SEQ ID NO: 146083 - RNA, 1413 nt, Artificial Sequence; identical to SEQ ID NO: 144680
  derived and/or modified CDS sequence (opt3) from neuraminidase__InfluenzaA__ADC45661

SEQ ID NO: 146084 - RNA, 1413 nt, Artificial Sequence
  derived and/or modified CDS sequence (opt3) from neuraminidase__InfluenzaA__ADC45683
augaaccccaaucagaagaucauuaccauaggcagcaucuccauugccaucgggauuaucucucugaugcuccaaauaggaaacaucauuucaaucugggcuagucacagcauucagacagguucccagaaucauacuggcaucugcaaccagagaauaauuacguacgaaaauucuaccugggugaaccacacauaugucaauaucaacaauacuaacguuguggcaggggaggacaaaaccccuguaacacuugugggaaauucgucacuguguagcauuaguggcugggccaucuacaccaaggauaacuccaucaggauugguucuaaaggggacgucuucgugauacgggagccauuuaucagcugcucccauuuggaauguaagacuuucuuuuuaacacaaggagcgcugcuaaaugauaaacacucaaacggcaccguuaaggaccgcaguccguaucgagcucucaugagcugcccccugggcgaggccccuucuccauacaauuccaaguucgaaucaguggcauggagcgccagugcuugucaugaugggauuggauggcuuacgaucgguauaucuggccccgacaacggggcagucgccgugcugaaauauaagggaauuaucacuggcaccaucaaauccuggaagaaacagauuuugcguacacaggagagcgagugcguauguaugaacgguucgugcuuuacuaucaugaccgaugggccuucuaauggagcugccuccuacaagauuuucaagauagaaaaaggcaagguuacaaaaucaauggagcucaacgcgccaaauuuucacuaugaagaguguaguugcuaccccgacaccggcacggugaugugugucugcagagauaacuggcacgggagcaauaggccuuggguguccuucaaccagaaucuggacuaccaaaucggauauauuugcucugguguguuuggcgauaacccacggccgaaggaccgcgaggggagcuguaaucccgucacuguugauggagcaaacggcgugaaagguuucucauacaaguaugggaauggcguauggaucggaagaacaaaaaguaacaggauccggaagggcuuugaaaugauuugggacccuaauggguggaccaacacugacuccgauuucagcgugaagcaggacauagucgccaucacagauuggucuggauacucagguaguuuugugcagcauccagagcugaccggccucgacugcauucgccccuguuucuggguugaauuagugcgagggcugccuagagagaauacgaccaucuggacaagcggauccucuauuucguucugcggcgucaacggugauaucgcuaacuggagcuggccagacggggccgaacuucccuuuacuauagauaaauga

SEQ ID NO: 146085 - RNA, 1413 nt, Artificial Sequence
  derived and/or modified CDS sequence (opt3) from neuraminidase__InfluenzaA__ADC45705
augaaccccaaucagaagaucauuaccauaggcagcaucuccauugccaucgggauuaucucucugaugcuccaaauaggaaacaucauuucaaucugggcuagucacagcauucagacagguucccagaauaacacuggcaucugcaaucagagaauaauuacguacgagaacucuaccugggugaaucauacauaugucaacaucaauaacacuaauguuguggcaggggaagacaaaaccucgguaacacuugccggaaacucaagccuguguaguauuuccggcugggcgaucuacaccaaggauaauucuaucaggauugguagcaaaggggacguguucgucauacgggagccuuuuaucuccugcucacacuuggaaugucgcacuuucuuuuuaacacaaggagcucugcuaaacgauaagcauaguaauggcaccgugaaaaaccgaagcccauaucgugcccucaugucuugcccgcugggcgaggcacccuccccuuacaacucaaaguucgaaagcguugccuggagugcuucugcaugucacgacgggaugggauggcuuacgauugguaucuccggcccagauaauggggccguggcuguccugaaguauaacggaauaauuacuggcaccaucaaaagcuggaagaaacagaucuugagaacacaggagucggagugcguguguaugaaugguucuugcuuuacuauuaugaccgacgggcccuccaacaaggccgcgucauacaaaaucuucaagauugaaaagggaaaaguaacaaagaguauagagcucaaugcaccuaacuuucauuaugaagaguguagcugcuacccagauaccggcaucguuaugugugugugcagggacaauuggcacggcuccaaccggcccugggucucuuucaaucagaaccuggauuaccaaauuggguauaucugcagcggaguguuuggugacaauccucgcccagaggauggcgaagggucauguaacccggugacggucgacggagccaauggcguuaaagguuucaguuacaaguaugauaacgggguguggaucggcagaacuaaauccaauaggcugcggaagggauuugagaugauuugggaccccaacggcuggacaaacaccgacagcgauuucucuguaaaacaggacguggucgcuauaacugauuggucaggguacagugguagcuuugugcagcacccugaacucacaggauuagacugcauccgcccauguuucuggguugagcuggugcgaggccuucccagagaaaauaccacgauuuggaccuccgggucuucgaucagcuucugcggagucaacuccgauacagccaauuggucauggccugacggcgcagaguugccauuuacuauugauaaguga

SEQ ID NO: 146086 - RNA, 1413 nt, Artificial Sequence
  derived and/or modified CDS sequence (opt3) from neuraminidase__InfluenzaA__ADC45716
augaaccccaaucagaagaucauuaccauaggcagcaucuccauugccaucgggauuaucucucugaugcuccaaauaggaaacaucauuucaaucugggcuagucacagcauucagacagguucccagaaucauacuggcaucugcaaccagagaauaauuacguacgaaaauucuaccugggugaaccacacauaugucaauaucaacaauacuaacguuguggcagggaaagacaagaccccuguaacacuugugggaaauucgucacuguguagcauuaguggcugggccaucuacaccaaagauaacuccaucaggauugguucuaagggggacgucuucgugauacgggagccauuuaucagcugcucccauuuggaguguaaaacuuucuuuuuaacacaaggagcgcugcuaaaugauaagcacucaaacggcaccguuaaggaccgcaguccguaucgagcucucaugagcugcccccugggcgaagccccuucuccauacaauuccaaauucgagucaguggcauggagcgccagugcuugucaugaugggauuggauggcuuacgaucgguauaucuggccccgacaacggggcagucgccgugcugaaguauaaaggaauuaucacuggcaccaucaaguccuggaaaaagcagauuuugcguacacaggaaagcgagugcguauguaugaacgguucgugcuuuacuaucaugaccgaugggccuucuaauggagcugccuccuacaagauuuucaaaauagagaagggcaaaguuacaaagucaauggaacucaacgcgccaaauuuucacuaugaggaauguaguugcuaccccgacaccggcacggugaugugugucugcagagauaacuggcacgggagcaauaggccuuggguguccuucaaccagaaucuggacuaccaaaucggauauauuugcucugguguguuuggcgauaacccacggccgaaagaccgcgaggggagcuguaaucccgucacuguugauggagcaaacggcguggaggguuucucauacaaguaugggaauggcguauggaucggaagaacaaaaaguaacaggauccggaagggcuuugaaaugauuugggacccuaauggguggaccaacacugacuccgauuucagcgugaagcaggacauagucgccaucacaaauuggucuggauacucagguaguuuugugcagcauccagagcugaccggccucgauugcauucgccccuguuucuggguugaauuagugcgagggcugccuagagagaacacgaccaucuggacaagcggauccucuauuucguucugcggcgucaacggugacaucgcuaauuggagcuggccagauggggccgaacuucccuuuacuauagacaaauga

SEQ ID NO: 146087 - RNA, 1413 nt, Artificial Sequence
  derived and/or modified CDS sequence (opt3) from neuraminidase__InfluenzaA__ADC45738
augaaccccaaucagaagaucauuaccauaggcagcaucuccauugccaucgggauuaucucucugaugcuccaaauaggaaacaucauuucaaucugggcuagucacagcauucagacagguucccagaauaacacuggcaucugcaaucagagaauaauuacguacgagaacucuaccugggugaaucauacauaugucaacaucaauaacacuaauguuguggcaggggaagacaaaaccucgguaacacuugccggaaacucaagccuguguaguauuuccggcugggcgaucuacaccaaggauaauucuaucaggauugguagcaaaggggacguguucgucauacgggagccuuuuaucuccugcucacacuuggaaugucgcacuuucuuuuuaacacaaggagcucugcuaaacgauaagcauaguaauggcaccgugaaagaccgaagcccauaucgugcccucaugucuugcccgcugggcgaggcacccuccccuuacaacucaaaguucgaaagcguugccuggagugcuucugcaugucacgaugggaugggauggcuuacgauugguaucuccggcccagacaacggggccguggcuguccugaaguauaauggaauaauuacuggcaccaucaaaagcuggaagaaacagaucuugagaacacaggagucggagugcguguguaugaacgguucuugcuuuacuauuaugaccgaugggcccuccaauaaggccgcgucauacaaaaucuucaagauugaaaagggaaaaguaacaaagaguauagagcucaacgcaccuaauuuuuauuacgaagaguguagcugcuacccagacaccggcaucguuaugugugugugcagggauaacuggcauggcuccaaucggcccugggucucuuucaaccagaaucuggacuaucaaauuggguacaucugcagcggaguguuuggugauaacccucgcccagaggacggcgaagggucauguaauccggugacggucgauggagccaacggcguuaaagguuucaguuauaaguacgacaaugggguguggaucggcagaacuaaauccaacaggcugcggaagggauuugagaugauuugggaccccaauggcuggacaaacaccgauagcgacuucucuguaaaacaggauguggucgcuauaacugacuggucaggguauagugguagcuuugugcagcacccugaacucacaggauuagauugcauccgcccauguuucuggguugagcuggugcgaggccuucccagagaaaacaccacgauuuggaccuccgggucuucgaucagcuucugcggagucaauuccgacacagccaacuggucauggccugauggcgcagaguugccauuuacuauugacaaguga

SEQ ID NO: 146088 - RNA, 1413 nt, Artificial Sequence
  derived and/or modified CDS sequence (opt3) from neuraminidase__InfluenzaA__ADC45760
augaaccccaaucagaagaucauuaccauaggcagcaucuccauugccaucgggauuaucucucugaugcuccaaauaggaaacaucauuucaaucugggcuagucacagcauucagacagguucccagaauaacacuggcaucugcaaucagagaauaauuacguacgagaacucuaccugggugaaucauacauaugugaacaucaauaacacuaauguuguggcaggggaagacaaaaccucgguaacacuugccggaaacucaagccuguguaguauuuccggcugggcgaucuacaccaaggauaauucuaucaggauugguagcaaaggggacguguucgucauacgggagccuuuuaucuccugcucacacuuggaaugucgcacuuucuuuuuaacacaaggagcucugcuaaacgauaagcauaguaauggcaccgccaaagaccgaagcccauaucgugcacucaugucuugcccgcugggcgaggcccccuccccuuacaacucaaaguucgaaagcguggcuuggagugcaucugccugucacgaugggaugggauggcuuacgauugguaucuccggcccagacaacggggcuguugccgugcugaaguauaauggaauaauuacuggcaccaucaaaagcuggaagaaacagaucuugagaacacaggagucggagugcgucuguaugaacgguucuugcuuuacuauuaugaccgaugggcccuccaauaaggcggcaucauacaaaaucuucaagauugaaaagggaaaagugacaaagaguauagagcucaacgccccuaauuuuuauuacgaagaguguagcugcuacccagacaccggcaucguaauguguguuugcagggauaacuggcauggcuccaaucggcccugggugucuuucaaccagaaucuggacuaucaaauuggguacaucugcagcggagucuuuggugauaacccucgcccagaggacggcgaagggucauguaauccggugacgguggauggagcuaacggcgucaaagguuucaguuauaaguacgggaauggcguuuggaucggaagaacuaaauccaacaggcugcggaagggcuuugagaugauuugggaccccaauggguggacaaacaccgacagcgauuucucugugaaacaggacguaguggccauaacugauuggucaggauauagugguagcuuuguccagcacccugaacucacaggcuuagggugcauccgcccauguuucuggguggagcugguucgaggacuucccagagaaaacaccacgauuuggaccuccgguucuucgaucagcuucugcggcgucaauuccgacacagcaaacuggucauggccugauggggcugaguugccauuuacuauugacaaguga

SEQ ID NO: 146089 - RNA, 1413 nt, Artificial Sequence
  derived and/or modified CDS sequence (opt3) from neuraminidase__InfluenzaA__ADC45771
augaaccccaaucagaagaucauuaccauaggcagcaucuccauugccaucgggauuaucucucugaugcuccaaauaggaaacaucauuucaaucugggcuagucacagcauucagacagguucccagaauaacacuggcaucugcaaucagagaauaauuacguacgagaacucuaccugggugaaucauacauaugugaacaucaauaacacuaauguuguggcaggggaagacaaaaccucgguaacacuugccggaaacucaagccuguguaguauuuccggcugggcgaucuacaccaaggauaauucuaucaggauugguagcaaaggggacguguucgucauacgggagccuuuuaucuccugcucacacuuggaaugucgcacuuucuuuuuaacacaaggagcucugcuaaacgauaagcauaguaauggcaccgugaaagaccgaagcccauaucgugcccucaugucuugcccgcugggcgaggcacccuccccuuacaacucaaaguucgaaagcguugccuggagugcuucugcaugucacgaugggaugggauggcuuacgauugguaucuccggcccagacaacggggccguggcuguccugaaguauaauggaauaauuacuggcaccaucaaaagcuggaagaaacagaucuugagaacacaggagucggagugcguguguaugaacgguucuugcuuuacuauuaugaccgaugggcccuccaauaaggccgcgucauacaaaaucuucaagauugaaaagggaaaaguaacaaagaguauagagcucaacgcaccuaauuuuuauuacgaagaguguagcugcuacccagacaccggcaucguuaugugugugugcagggauaacuggcauggcuccaaucggcccugggucucuuucaaccagaaucuggacuaucaaauuggguacaucugcagcggaguguuuggugauaacccucgcccagaggacggcgaagggucauguaauccggugacggucgauggagccaacggcguuaaagguuucaguuauaaguacgggaauggcguguggaucggaagaacuaaauccaacaggcugcggaagggcuuugagaugauuugggaccccaauggguggacaaacaccgacagcgauuucucuaugaaacaggacguaguggcuauaacugauuggucaggauauagugguagcuuuguccagcacccugaacucacaggcuuagacugcauccgcccauguuucuggguggagcugguucgagggcuucccagagaaaacaccacgauuuggaccuccggaucuucgaucagcuucugcggcgucaauuccgauacagccaacuggucauggccugacggugcagaguugccauuuacuauugauaaguga

SEQ ID NO: 146090 - RNA, 1413 nt, Artificial Sequence
  derived and/or modified CDS sequence (opt3) from neuraminidase__InfluenzaA__ADC45782
augaaccccaaucagaagaucauuaccauaggcagcaucuccauugccaucgggauuaucucucugaugcuccaaauaggaaacaucauuucaaucugggcuagucacagcauucagacagguucccagaauaacacuggcaucugcaaucagagaauaauuacguacgagaacucuaccugggugaaucauacauaugucaacaucaauaacacuaauguuguggcaggggaagacaaaaccucgguaacacuugccggaaacucaagccuguguaguauuuccggcugggcgaucuacaccaaggauaauucuaucaggauugguagcaaaggggacguguucgucauacgggagccuuuuaucuccugcucacacuuggaaugucgcacuuucuuuuuaacacaaggagcucugcuaaacgauaagcauaguaaucgaaccgugaaagaccguagcccauauagagcccucaugucuugcccgcugggcgaggcacccuccccuuacaacucaaaguucgaaagcguugccuggagugcuucugcaugucacgauggcaugggguggcuuacgauuggaaucuccgguccagacaacggcgccguggcuguccugaaguauaaugggauaauuacuggaaccaucaaaagcuggaagaaacagaucuugaggacacaggagucggagugcguguguguaaacggcucuugcuuuacuauuaugaccgauggucccuccaauaaggccgcgucauacaaaaucuucaagauugaaaaggggaaaguuacaaagaguauagagcucaacgcaccuaauuuuuauuacgaagaguguagcugcuacccagacaccggaaucgugaugugugucugccgggauaacuggcauggcuccaaucgccccugggugucuuucaaccagaaucuggacuaucaaauuggcuacaucugcagcgggguguuuggagauaacccuagaccagaggacggugaaggcucauguaauccggucacgguugauggggccaacggagugaaaggcuucaguuauaaguacgguaaugggguauggaucggcaggacuaaauccaaccggcugcgcaagggauuugagaugauuugggaccccaauggcuggacaaacaccgacagcgauuucucugugaaacaggacgucguggcuauaacugauuggucaggguauaguggauccuuuguucagcacccugaacucacagguuuagacugcauccgaccauguuucuggguggagcuggucagaggccuucccagggaaaacaccacgauuuggaccuccgggucuucgaucagcuucugcggagugaauagcgauacagccaacuggucauggccugacggcgcagaguugccauuuacuauugauaaguga

SEQ ID NO: 146091 - RNA, 1413 nt, Artificial Sequence
  derived and/or modified CDS sequence (opt3) from neuraminidase__InfluenzaA__ADC45804
augaaccccaaucagaagaucauuaccauaggcagcaucuccauugccaucgggauuaucucucugaugcuccaaauaggaaacaucauuucaaucugggcuagucacagcauucagacagguucccagaauaacacuggcaucugcaaucagagaauaauuacguacgagaacucuaccugggugaaucauacauaugugaacaucaauaacacuaauguuguggcaggggaagacaaaaccucgguaacacuugccggaaacucaagccuguguaguauuuccggcugggcgaucuacaccaaggauaauucuaucaggauugguagcaaaggggacguguucgucauacgggagccuuuuaucuccugcucacacuuggaaugucgcacuuucuuuuuaacacaaggagcucugcuaaacgauaagcauaguaauggcaccgugaaagaccgaagcccauaucgugcccucaugucuugcccgcugggcgaggcacccuccccuuacaacucaaaguucgaaagcguugccuggagugcuucugcaugucacgaugggaugggauggcuuacgauugguaucuccggcccagacaacggggccguggcuguccugaaguauaauggaauaauuacuggcaccaucaaaagcuggaagaaacagaucuugagaacacaggagucggagugcguguguaugaacgguucuugcuuuacuauuaugaccgaugggcccuccaauaaggccgcgucauacaaaaucuucaagauugaaaagggaaaaauaacaaagaguaucgagcucaacgcaccuaauuuuuauuacgaagaguguagcugcuacccagacaccggcauuguaauguguguuugcagggauaacuggcauggcuccaaucggcccugggugucuuucaaccagaaucuggacuaucaaaucggguacaucugcagcggagucuuuggugauaacccucgcccagaggacggcgaagggucauguaauccggugacgguggauggagccaacggcgucaaagguuucaguuauaaguacgggaauggcguuuggauuggaagaacuaaauccaacaggcugcggaagggcuuugagaugauaugggaccccaauggguggacaaacaccgacagcgauuucucugugaaacaggacguaguggcuaucacugauuggucaggauauagugguagcuuuguccagcacccugaacucacaggcuuagacugcauucgcccauguuucuggguggagcugguucgagggcuucccagagaaaacaccacgaucuggaccuccggaucuucgauuagcuucugcggcgucaauuccgauacagccaacuggucauggccugacggugcagaguugccauuuacuaucgauaaguga

SEQ ID NO: 146092 - RNA, 1413 nt, Artificial Sequence
  derived and/or modified CDS sequence (opt3) from neuraminidase__InfluenzaA__ADC45815
augaaccccaaucagaagaucauuaccauaggcagcaucuccauugccaucgggauuaucucucugaugcuccaaauaggaaacaucauuucaaucugggcuagucacagcauucagacagguucccagaauaacacuggcaucugcaaucagagaauaauuacguacgagaacucuaccugggugaaucauacauaugugaacaucaauaacacuaauguuguggcaggggaagacaaaaccucgguaacacuugccggaaacucaagccuguguaguauuuccggcugggcgaucuacaccaaggauaauucuaucaggauugguagcaaaggggacguguucgucauacgggagccuuuuaucuccugcucacacuuggaaugucgcacuuucuuuuuaacacaaggagcucugcuaaacgauaagcauaguaauggcaccgugaaagaccgaagcccauaucgugcccucaugucuugcccgcugggcgaggcacccuccccuuacaacucaaaguucgaaagcguugccuggagugcuucugcaugucacgaugggaugggauggcuuacgauugguaucuccggcccagacaacggggccguggcuguccugaaguauaauggaauaauuacuggcaccgugaaaagcuggaagaaacagaucuugagaacacaggagucggagugcguauguaugaacgguucuugcuuuacuaucaugaccgaugggcccuccaauaaggccgcgucauacaaaauuuucaagaucgaaaagggaaaaguuacaaagaguauugagcucaacgcaccuaauuuuuauuacgaagaguguagcugcuacccagacaccggcauggugaugugugucugcagggauaacuggcauggcuccaaucggcccugggugucuuucaaccagaaucuggacuaucaaauaggguacaucugcagcggaguguuuggugauaacccucgcccagaggacggcgaagggucauguaauccggucacgguugauggagccaacggcgugaaagguuucaguuauaaguacgggaauggcguauggauuggaagaacuaaauccaacaggcugcggaagggcuuugagaugaucugggaccccaauggguggacaaacaccgacagcgauuucucugugaaacaggacgucguggcuaucacugauuggucaggauauagugguagcuuuguucagcacccugaacucacaggcuuagacugcauucgcccauguuucuggguggagcugguccgagggcuucccagagaaaacaccacgauauggaccuccggaucuucgaucagcuucugcggcgucaauuccgauacagccaacuggucauggccugacggugcagaguugccauuuacuauugauaaguga

SEQ ID NO: 146093 - RNA, 1413 nt, Artificial Sequence; identical to SEQ ID NO: 145509
  derived and/or modified CDS sequence (opt3) from neuraminidase__InfluenzaA__ADC45837

SEQ ID NO: 146094 - RNA, 1413 nt, Artificial Sequence; identical to SEQ ID NO: 145509
  derived and/or modified CDS sequence (opt3) from neuraminidase__InfluenzaA__ADC45848

SEQ ID NO: 146095 - RNA, 1410 nt, Artificial Sequence; identical to SEQ ID NO: 144786
  derived and/or modified CDS sequence (opt3) from neuraminidase__InfluenzaA__ADC53559

SEQ ID NO: 146096 - RNA, 1410 nt, Artificial Sequence; identical to SEQ ID NO: 144786
  derived and/or modified CDS sequence (opt3) from neuraminidase__InfluenzaA__ADD14088

SEQ ID NO: 146097 - RNA, 1410 nt, Artificial Sequence; identical to SEQ ID NO: 144786
  derived and/or modified CDS sequence (opt3) from neuraminidase__InfluenzaA__ADD14090

SEQ ID NO: 146098 - RNA, 1410 nt, Artificial Sequence; identical to SEQ ID NO: 144786
  derived and/or modified CDS sequence (opt3) from neuraminidase__InfluenzaA__ADD14094

SEQ ID NO: 146099 - RNA, 1410 nt, Artificial Sequence; identical to SEQ ID NO: 144786
  derived and/or modified CDS sequence (opt3) from neuraminidase__InfluenzaA__ADD14096

SEQ ID NO: 146100 - RNA, 1410 nt, Artificial Sequence; identical to SEQ ID NO: 144786
  derived and/or modified CDS sequence (opt3) from neuraminidase__InfluenzaA__ADD14098

SEQ ID NO: 146101 - RNA, 1410 nt, Artificial Sequence; identical to SEQ ID NO: 144786
  derived and/or modified CDS sequence (opt3) from neuraminidase__InfluenzaA__ADD14100

SEQ ID NO: 146102 - RNA, 1410 nt, Artificial Sequence; identical to SEQ ID NO: 144786
  derived and/or modified CDS sequence (opt3) from neuraminidase__InfluenzaA__ADD14102

SEQ ID NO: 146103 - RNA, 1410 nt, Artificial Sequence; identical to SEQ ID NO: 144786
  derived and/or modified CDS sequence (opt3) from neuraminidase__InfluenzaA__ADD14104

SEQ ID NO: 146104 - RNA, 1410 nt, Artificial Sequence; identical to SEQ ID NO: 144786
  derived and/or modified CDS sequence (opt3) from neuraminidase__InfluenzaA__ADD14106

SEQ ID NO: 146105 - RNA, 1410 nt, Artificial Sequence; identical to SEQ ID NO: 144786
  derived and/or modified CDS sequence (opt3) from neuraminidase__InfluenzaA__ADD14110

SEQ ID NO: 146106 - RNA, 1410 nt, Artificial Sequence; identical to SEQ ID NO: 144786
  derived and/or modified CDS sequence (opt3) from neuraminidase__InfluenzaA__ADD14112

SEQ ID NO: 146107 - RNA, 1410 nt, Artificial Sequence; identical to SEQ ID NO: 145756
  derived and/or modified CDS sequence (opt3) from neuraminidase__InfluenzaA__ADD14114

SEQ ID NO: 146108 - RNA, 1410 nt, Artificial Sequence; identical to SEQ ID NO: 144786
  derived and/or modified CDS sequence (opt3) from neuraminidase__InfluenzaA__ADD14116

SEQ ID NO: 146109 - RNA, 1410 nt, Artificial Sequence; identical to SEQ ID NO: 144786
  derived and/or modified CDS sequence (opt3) from neuraminidase__InfluenzaA__ADD14118

SEQ ID NO: 146110 - RNA, 1410 nt, Artificial Sequence; identical to SEQ ID NO: 144786
  derived and/or modified CDS sequence (opt3) from neuraminidase__InfluenzaA__ADD14120

SEQ ID NO: 146111 - RNA, 1410 nt, Artificial Sequence; identical to SEQ ID NO: 144786
  derived and/or modified CDS sequence (opt3) from neuraminidase__InfluenzaA__ADD14122

SEQ ID NO: 146112 - RNA, 1410 nt, Artificial Sequence; identical to SEQ ID NO: 144786
  derived and/or modified CDS sequence (opt3) from neuraminidase__InfluenzaA__ADD14124

SEQ ID NO: 146113 - RNA, 1410 nt, Artificial Sequence; identical to SEQ ID NO: 145845
  derived and/or modified CDS sequence (opt3) from neuraminidase__InfluenzaA__ADD14126

SEQ ID NO: 146114 - RNA, 1410 nt, Artificial Sequence; identical to SEQ ID NO: 144786
  derived and/or modified CDS sequence (opt3) from neuraminidase__InfluenzaA__ADD14128

SEQ ID NO: 146115 - RNA, 1410 nt, Artificial Sequence; identical to SEQ ID NO: 144786
  derived and/or modified CDS sequence (opt3) from neuraminidase__InfluenzaA__ADD14130

SEQ ID NO: 146116 - RNA, 1410 nt, Artificial Sequence; identical to SEQ ID NO: 144786
  derived and/or modified CDS sequence (opt3) from neuraminidase__InfluenzaA__ADD14132

SEQ ID NO: 146117 - RNA, 1410 nt, Artificial Sequence; identical to SEQ ID NO: 144786
  derived and/or modified CDS sequence (opt3) from neuraminidase__InfluenzaA__ADD14134

SEQ ID NO: 146118 - RNA, 1410 nt, Artificial Sequence; identical to SEQ ID NO: 144786
  derived and/or modified CDS sequence (opt3) from neuraminidase__InfluenzaA__ADD14136

SEQ ID NO: 146119 - RNA, 1410 nt, Artificial Sequence; identical to SEQ ID NO: 144786
  derived and/or modified CDS sequence (opt3) from neuraminidase__InfluenzaA__ADD14138

SEQ ID NO: 146120 - RNA, 1410 nt, Artificial Sequence; identical to SEQ ID NO: 144786
  derived and/or modified CDS sequence (opt3) from neuraminidase__InfluenzaA__ADD14142

SEQ ID NO: 146121 - RNA, 1410 nt, Artificial Sequence; identical to SEQ ID NO: 144786
  derived and/or modified CDS sequence (opt3) from neuraminidase__InfluenzaA__ADD14144

SEQ ID NO: 146122 - RNA, 1410 nt, Artificial Sequence; identical to SEQ ID NO: 144786
  derived and/or modified CDS sequence (opt3) from neuraminidase__InfluenzaA__ADD14146

SEQ ID NO: 146123 - RNA, 1410 nt, Artificial Sequence; identical to SEQ ID NO: 144786
  derived and/or modified CDS sequence (opt3) from neuraminidase__InfluenzaA__ADD14148

SEQ ID NO: 146124 - RNA, 1410 nt, Artificial Sequence
  derived and/or modified CDS sequence (opt3) from neuraminidase__InfluenzaA__ADD14150
augaaccccaaucagaagaucauuaccauaggcagcgugugcaugacaaucgggauggccaaccugauucuccaaaucggaaauauuaucuccauauggaucucucacucaauucagcuugguaaccagaaucagaucgagacuuguaaccaaagugucauuacguacgaaaauaacaccuggguuaaucagacauaugugaacaucagcaauacuaacuucgcugcaggccaguccguagugucugucaaacuggccggaaauucgucauugugcccugugagcggaugggcgauauacaguaaggacaacuccauuagaaucggcucuaaaggugauguuuuugugauuagggagccauucaucagcuguuccccguuagaaugccggaccuuuuuccugacacagggggcucuacucaaugacaagcauucaaacggaaccaucaaagaucgcagucccuaucgaacucugaugagcuguccuauuggcgaggucccaucucccuacaacucccguuuugaaucaguggccuggagcgcaagugccugccacgacggcauaaauuggcuuacaaucgggauuucuggaccugauaacggugcuguagcaguucugaaguauaauggcaucauaaccgacacgauuaaguccuggagaaacaauaucuugaggacucaagagagcgagugugccugcgugaacgggucguguuucaccgucaugacagauggaccaucugacggccaggcuuccuacaaaaucuuucggauugaaaaggguaaaaucgugaagucaguggagaugaaugcccccaacuaucauuacgaagagugcaguuguuacccugauagcuccgagauuacuugcgucugccgcgacaauuggcacgggucuaacagaccauggguuagcuucaaucagaaccucgaauaucagauaggauacaucuguucaggcauuuuuggcgauaauccgaggcccaacgacaaaaccgggaguugcggaccuguguccagcaauggugcgaacggcguaaagggguucucuuuuaaguauggaaacggcguguggaucggucggacaaaaucaaucaguagccgcaauggguucgagaugauuugggauccaaacggcuggaccggaacggacgacaauuuuuccauaaagcaagauaucgucggcauuaacgaauggucuggguacucggggagcuucgugcagcaucccgagcugacuggucuggacuguauccgaccuugcuucuggguugaacucauuagaggcaggccaaaagagaauacaaucuggaccuccgggucaaguauaucuuuuuguggagugaacagcgauacugucggcugguccuggcccgacggugcagaguuaccguucacaaucgauaaguga

SEQ ID NO: 146125 - RNA, 1410 nt, Artificial Sequence; identical to SEQ ID NO: 144786
  derived and/or modified CDS sequence (opt3) from neuraminidase__InfluenzaA__ADD14152

SEQ ID NO: 146126 - RNA, 1410 nt, Artificial Sequence
  derived and/or modified CDS sequence (opt3) from neuraminidase__InfluenzaA__ADD14154
augaaccccaaucagaagaucauuaccauaggcagcgugugcaugacaaucgggauggccaaccugauucuccaaaucggaaauauuaucuccauauggaucucucacucaauucagcuugguaaccagaaucagaucgagacuuguaaccaaagugucauuacguacgaaaauaacaccuggguuaaucagacauaugugaacaucagcauaacuaauuucgcugcaggccaguccguagugucugucaaacuggccgggaacucgucauugugcccugugagcggaugggcgauuuacaguaaggacaauuccaucagaauuggcucuaaaggugauguuuuugugaucagggagccauucaucagcuguuccccguuagaaugccggaccuuuuuccugacacagggggcucuacucaacgacaagcauucaaauggaaccauuaaagaucgcagucccuaucgaacucugaugagcuguccuauaggcgaggucccaucucccuacaacucccguuuugaaucaguggccuggagcgcaagugccugccacgacggcaucaacuggcuuacaauugggaucucuggaccugauaauggugcuguagcaguucugaaguauaacggcauaauuaccgacacgaucaaguccuggagaaauaacaucuugaggacucaagagagcgagugugccugcgugaaugggucguguuucaccgucaugacagauggaccaucugacggccaggcuuccuacaaaauuuuucggaucgaaaaggguaaaauugugaagucaguggagaugaacgcccccaauuaucauuacgaagagugcaguuguuacccugauagcuccgagauaacuugcgucugccgcgacaacuggcacgggucuaauagaccauggguuagcuucaaccagaaucucgaauaucagaucggauacauuuguucaggcaucuuuggcgauaacccgaggcccaaugacaaaaccgggaguugcggaccuguguccagcaacggugcgaauggcguaaagggguucucuuuuaaguauggaaacggcguguggaucggucggacaaaaucaauuaguagccgcaacggguucgagaugauaugggauccaaauggcuggaccggaacggacaacaauuuuuccaucaagcaagacauugucggcaucaacgaauggucuggguacucggguagcuucgugcagcaucccgagcugacuggacuggauuguauucgaccuugcuucuggguugaacucaucagaggcaggccaaaagagaauacaauauggaccuccgggucaaguaucucuuuuuguggagugaacagcgacacugucggcugguccuggcccgauggugcagaguuaccguucacaauugacaaguga

SEQ ID NO: 146127 - RNA, 1410 nt, Artificial Sequence; identical to SEQ ID NO: 144786
  derived and/or modified CDS sequence (opt3) from neuraminidase__InfluenzaA__ADD14156

SEQ ID NO: 146128 - RNA, 1410 nt, Artificial Sequence; identical to SEQ ID NO: 144786
  derived and/or modified CDS sequence (opt3) from neuraminidase__InfluenzaA__ADD14158

SEQ ID NO: 146129 - RNA, 1410 nt, Artificial Sequence; identical to SEQ ID NO: 144786
  derived and/or modified CDS sequence (opt3) from neuraminidase__InfluenzaA__ADD14164

SEQ ID NO: 146130 - RNA, 1410 nt, Artificial Sequence; identical to SEQ ID NO: 144786
  derived and/or modified CDS sequence (opt3) from neuraminidase__InfluenzaA__ADD14174

SEQ ID NO: 146131 - RNA, 1410 nt, Artificial Sequence; identical to SEQ ID NO: 144786
  derived and/or modified CDS sequence (opt3) from neuraminidase__InfluenzaA__ADD14184

SEQ ID NO: 146132 - RNA, 1410 nt, Artificial Sequence; identical to SEQ ID NO: 144786
  derived and/or modified CDS sequence (opt3) from neuraminidase__InfluenzaA__ADD14194

SEQ ID NO: 146133 - RNA, 1410 nt, Artificial Sequence; identical to SEQ ID NO: 145140
  derived and/or modified CDS sequence (opt3) from neuraminidase__InfluenzaA__ADD14204

SEQ ID NO: 146134 - RNA, 1410 nt, Artificial Sequence
  derived and/or modified CDS sequence (opt3) from neuraminidase__InfluenzaA__ADD21449
augaaccccaaucagagaaucauuaccauaggcacagccugccugaucauugggaucgugagccuccuucugcaaauuggaaacaucgucuccuuguggauaucucacucaauccagacuggugagaagaaucauagugaaacguguaacaggaauaccauuacauacgagaacagcacuuggguuaaucagaccuaugugaacaucuccaauauuaacaucgcuggcgggcagggaguagcaucuauaauuuuagccggcaauucgucacugugcccugugaacgguugggcgaucuacagcaaagacaauaguauucggaucggguccaagggagauaucuucgucauucgcgaaccauuuauaucuuguagccaccuagagugccgaacauucuuucucacccaaggcgcucugcuuaacgaccgucauuccaauggcacugugaaagauagaucaccguauaggacacugaugaguugucccaucggggaagccccuagcccauacaacucuaaguucgaguccguugcauggucagccagcgcuugccacgacggaauggguugguugaccauuggcaucagugggcccgauaacggagcaguggccguccucaaauauaauggcauaauuacggacacuaucaagucuuggcggaaccgcauccugagaacccaggaguccgaaugugugugcauuaaugguagcuguuuuacaaucaugacugaugggccuucgaacggacaggcuucuuacaagauuuucaaaauggagaggggcaagauaaucaaauccguagaacuggacgccccaaauuaucauuacgaggagugcucauguuaccccgauaccggcaagguugugugcgucugccgggacaacuggcacgcgaguaaucgcccuugggugagcuuugaucagaaccucgacuaucaaauuggguacaucuccucuggaguguucggugauaauccacgaagcaacgacggcaaagggaauuguggaccggucuuaucaaacggcgcaaaugguguuaaggggcugaguuuuagauauggcaacggaguguggaucggcaggacaaaguccaccaauagccggucuggguucgaaaugauuugggaccccaacggauggacggagacugauucaaacuuuaguaugaaacaggacauaaucgcccuuacagauuggagcgguuacuccggcucuuucguacagcacccugaauugaccgggaugaauugcauucguccauguuuuuggguggagcugauccgcggacagcccaagcaaucgacuauuuggacaagcggcuccucaaucaguuucugcggugucgacucugaaaccgcuagcugguccuggccugauggggccgaccuaccauucacgauagauaaauga

SEQ ID NO: 146135 - RNA, 1413 nt, Artificial Sequence
  derived and/or modified CDS sequence (opt3) from neuraminidase__InfluenzaA__ADD21469
augaaccccaaucagaagaucauuaccauaggcagcaucuccauugccaucgggauuaucucucugaugcuccaaauaggaaacaucauuucagugugggcuagucacagcauccagacagguucccagaaucauacuggcauuugcaaccagagaaucauaacguacgaaaauucuaccugggucaaccacacauauguuaauauuaacaauacuaacgugguagcagggaaagacaagaccucggugacacuugccggaaauucaagccuguguaguaucuccggcugggcgauuuacaccaaagauaacucuaucaggaucgguagcaagggggacgucuucgugauucgggagccuuuuauauccugcucacauuuggagugucgcacuuucuuuuuaacacaaggagcucugcuaaaugauaaacacaguaacggcaccguuaaggaccgaagcccauaucgugcccucaugucuugcccgcugggcgaagcacccuccccuuacaauucaaaguucgagagcguggccuggagugcuucugcaugucaugaugggaugggauggcuuacgaucgguauuuccggcccagacaacggggccgucgcugugcugaaauauaacggaaucauaacugaaaccauuaagagcuggaaaaagagaauguugaggacacaggagucggagugcaucuguguaaauggcucuugcuuuacuaucaugaccgauggucccuccaacggggccgcgucauacaaaauuuucaagaucgaaaagggaaaaguuacaaagaguauugagcucaaugcaccuaacuuucacuaugaagaguguagcugcuacccagacaccggcacggugaugugugucugccgggauaauuggcacggcuccaaccgccccugggugucuuucaaucagaaccuggacuaccagauaggguauaucugcagcggaguguuuggugauaauccuagaccaaaagacggcgaggggucauguaacccggucacuguugauggagccgacggcgugaaggguuucaguuacaaauaugggaauggcguauggauuggaaggacaaaguccaaccggcugcgcaaaggcuuugaaaugaucugggaccccaauggguggaccgauacugacagcaacuucucugugaagcaagaugucguggcuaucacagacuggucaggauacagugguagcuuuguucagcauccugagcucaccggcuuagauugcauucgaccauguuucuggguggaacuggucagagggcuucccagggagaauacgaccauauggacauccggaucuucgaucagcuucugcggcgugaacuccgacacugccaacuggucauggccugauggugcagaauugccauuuaccauugacaaguga

SEQ ID NO: 146136 - RNA, 1410 nt, Artificial Sequence; identical to SEQ ID NO: 144786
  derived and/or modified CDS sequence (opt3) from neuraminidase__InfluenzaA__ADD21747

SEQ ID NO: 146137 - RNA, 1410 nt, Artificial Sequence
  derived and/or modified CDS sequence (opt3) from neuraminidase__InfluenzaA__ADD21767
augaaccccaaucagaagaucauuauaaucggcagcgugugcaugaccauugggauggccaaccugauccuccaaauuggaaauaucauauccaucuggauuucucacucaauccagcuugguaaccagaaucagauugagacauguaaccaaagugucaucacuuacgaaaauaacacguggguuaaucagaccuaugugaacauaagcaauacaaacuucgcugcaggccaguccguagugucugucaaacuggccggaaauucgucauugugcccugugagcggaugggcgauuuacaguaaggacaacuccaucagaauuggcucuaaaggugauguuuuugugaucagggagccauucaucagcuguuccccguuagaaugccggaccuuuuuccugacucagggggcucuacucaaugacaagcauucaaacggaacaauuaaagaucgcagucccuaucgaacccugaugagcuguccuauaggcgaggucccaucucccuacaacucccguuuugaaucaguggccuggagcgcaagugccugccacgacggcaucaauuggcuuacuauugggaucucuggaccugauaacggugcuguagcaguucugaaguauaauggcauaauuacagacaccaucaaguccuggagaaacaauaucuugaggacgcaagagagcgagugugccugcgugaacgggucguguuucacugucaugaccgauggaccaucugacggccaggcuuccuacaaaauuuuucggaucgaaaaggguaaaauugugaagucaguggagaugaaugcccccaacuaucauuacgaagagugcaguuguuacccugauagcuccgagauaacaugcgucugccgcgacaauuggcacgggucuaacagaccauggguuagcuucaaucagaaccucgaauaucagaucggauacauuuguucaggcaucuuuggcgauaauccgaggcccaacgacaaaacugggaguugcggaccuguguccagcaauggugcgaacggcguaaagggguucucuuuuaaguauggaaacggcguguggaucggucggaccaaaucaauuaguagccgcaauggguucgagaugauaugggauccaaacggcuggacaggaaccgacaauaacuuuuccaucaagcaagacauugucggcaucaaugaauggucuggguacucggggagcuucgugcagcaucccgagcugacgggucuggauuguauucgaccuugcuucuggguugaacucaucagaggcaggccaaaagagaacacuauauggacauccgggucaaguaucucuuuuuguggagugaauagcgacaccgucggcugguccuggcccgauggugcagaguuaccguucacuauugacaaguga

SEQ ID NO: 146138 - RNA, 1410 nt, Artificial Sequence
  derived and/or modified CDS sequence (opt3) from neuraminidase__InfluenzaA__ADD21777
augaaccccaaucagaagaucauuaccauaggcagcgugugcaugacaaucgggauggccaaccugauucuccaaaucggaaauauuaucuccauauggaucucucacucaauucagcuugguaaccagaaucagaucgagacuuguaaccaaagugucauuacguacgaaaauaacaccuggguuaaucagacauaugugaacaucagcaauacuaacuucgcugcaggccaguccguagugucugucaaacuggccggaaauucgucauugugcccugugagcggaugggcgauauacaguaaggacaacuccauuagaaucggcucuaaaggugauguuuuugugauuagggagccauucaucagcuguuccccguuagaaugccggaccuuuuuccugacacagggggcucuacucaaugacaagcauucaaacggaaccaucaaagaucgcagucccuaucgaacucugaugagcuguccuauuggcgaggucccaucucccuacaacucccguuuugaaucaguggccuggagcgcaagugccugccacgacggcauaaauuggcuuacaaucgggauuucuggaccugauaacggugcuguagcaguuaucaaguauaauggcauaauuaccgacacgaucaaguccuggagaaacaauauccugaggacucaagagagcgagugugccugcgugaacgggucguguuucaccgucaugacagauggaccaucugacggccaggcuuccuacaaaauuuuucggaucgaaaaggguaaaauugugaagucaguggagaugaaugcccccaacuaucauuacgaagagugcaguuguuacccugauagcuccgagauaacuugcgucugccgcgacaauuggcacgggucuaacagaccauggguuagcuucaaucagaacuuggaauaucagaucggauacauuuguucaggcaucuuuggcgauaauccgaggcccaacgacaaaaccgggaguugcggaccuguguccagcaauggugcgaacggcguaaagggguucucuuuuaaguauggaaacggcguguggaucggucggacaaaaucaauuaguagccgcaauggguucgagaugauaugggauccaaacggcuggaccggaacggacaauaacuuuuccaucaagcaagacauugucggcaucaaugaauggucuggguacucggggagcuucgugcagcaucccgagcucacuggucuggauuguauucgaccuugcuucuggguugaacugaucagaggcaggccaaaagagaacacaauauggaccuccgggucaaguaucucuuuuuguggagugaauagcgacacugucggcugguccuggcccgauggugcagagcucccguucacaauugacaaguga

SEQ ID NO: 146139 - RNA, 1410 nt, Artificial Sequence; identical to SEQ ID NO: 144786
  derived and/or modified CDS sequence (opt3) from neuraminidase__InfluenzaA__ADD21787

SEQ ID NO: 146140 - RNA, 1410 nt, Artificial Sequence; identical to SEQ ID NO: 144786
  derived and/or modified CDS sequence (opt3) from neuraminidase__InfluenzaA__ADD21797

SEQ ID NO: 146141 - RNA, 1410 nt, Artificial Sequence; identical to SEQ ID NO: 144786
  derived and/or modified CDS sequence (opt3) from neuraminidase__InfluenzaA__ADD21817

SEQ ID NO: 146142 - RNA, 1410 nt, Artificial Sequence; identical to SEQ ID NO: 144786
  derived and/or modified CDS sequence (opt3) from neuraminidase__InfluenzaA__ADD21827

SEQ ID NO: 146143 - RNA, 1410 nt, Artificial Sequence; identical to SEQ ID NO: 144786
  derived and/or modified CDS sequence (opt3) from neuraminidase__InfluenzaA__ADD21837

SEQ ID NO: 146144 - RNA, 1410 nt, Artificial Sequence; identical to SEQ ID NO: 144786
  derived and/or modified CDS sequence (opt3) from neuraminidase__InfluenzaA__ADD21847

SEQ ID NO: 146145 - RNA, 1410 nt, Artificial Sequence; identical to SEQ ID NO: 144786
  derived and/or modified CDS sequence (opt3) from neuraminidase__InfluenzaA__ADD21857

SEQ ID NO: 146146 - RNA, 1410 nt, Artificial Sequence; identical to SEQ ID NO: 144786
  derived and/or modified CDS sequence (opt3) from neuraminidase__InfluenzaA__ADD21867

SEQ ID NO: 146147 - RNA, 1410 nt, Artificial Sequence; identical to SEQ ID NO: 144786
  derived and/or modified CDS sequence (opt3) from neuraminidase__InfluenzaA__ADD21877

SEQ ID NO: 146148 - RNA, 1410 nt, Artificial Sequence; identical to SEQ ID NO: 144786
  derived and/or modified CDS sequence (opt3) from neuraminidase__InfluenzaA__ADD21897

SEQ ID NO: 146149 - RNA, 1410 nt, Artificial Sequence; identical to SEQ ID NO: 144786
  derived and/or modified CDS sequence (opt3) from neuraminidase__InfluenzaA__ADD22494

SEQ ID NO: 146150 - RNA, 1410 nt, Artificial Sequence; identical to SEQ ID NO: 144786
  derived and/or modified CDS sequence (opt3) from neuraminidase__InfluenzaA__ADD22504

SEQ ID NO: 146151 - RNA, 1410 nt, Artificial Sequence; identical to SEQ ID NO: 144786
  derived and/or modified CDS sequence (opt3) from neuraminidase__InfluenzaA__ADD22514

SEQ ID NO: 146152 - RNA, 1410 nt, Artificial Sequence; identical to SEQ ID NO: 144786
  derived and/or modified CDS sequence (opt3) from neuraminidase__InfluenzaA__ADD22524

SEQ ID NO: 146153 - RNA, 1410 nt, Artificial Sequence
  derived and/or modified CDS sequence (opt3) from neuraminidase__InfluenzaA__ADD22534
augaaccccaaucagaagaucauuaccauaggcagcgugugcaugacaaucgggauggccaaccugauucuccaaaucggaaauauuaucuccauauggaucucucacucaauucagcuugguaaccagaaucagaucgagacuuguaaccaaagugucauuacguacgaaaauaacaccuggguuaaucagacauaugugaacaucagcaauacuaacuucgcugcaggccaguccguagugucugucaaacuggccgggaauagcucauugugcccugugagcggaugggcgauauacaguaaggacaacuccauuagaaucggcucuaaaggugauguuuuugugauuagggagccauucaucagcuguuccccguuagaaugccggaccuuuuuccugacacagggggcucuacucaaugacaagcauucaaacggaaccaucaaagaucgcagucccuaucgaacucugaugagcuguccuauuggcgaggucccaucucccuacaacucccguuuugaaucaguggccuggagcgcaagugccugccacgacggcauaaauuggcuuacaaucgggauuucuggaccugauaacggugcuguagcaguucugaaguauaauggcaucauaaccgacacgauuaaguccuggagaaacaauaucuugaggacucaagagagcgagugugccugcgugaacgggucguguuucaccgucaugacagauggaccaucugacggccaggcuuccuacaaaaucuuucggauugaaaaggguaaaaucgugaagucaguggagaugaaugcccccaacuaucauuacgaagagugcaguuguuacccugauagcuccgagauuacuugcgucugccgcgacaauuggcacgggucuaacagaccauggguuagcuucaaucagaaccucgaauaucagauaggauacaucuguucaggcauuuuuggcgauaguccgaggcccaaugacaaaaccggguccugcggaccugugagcucuaacggugcgaauggcguaaagggguucucauuuaaguauggaaacggcguguggaucggucggacaaaaaguaucagcucccgcaacggguucgagaugauuugggauccaaauggcuggaccggaacggacaacaauuuuucuauaaagcaagacaucgucggcauuaacgaauggucgggguacagcggauccuucgugcagcaucccgagcugacuggucuggauuguauccgaccuugcuucuggguugaacucauuagaggcaggccaaaagagaauacaaucuggaccucagggaguucuauaucguuuuguggagugaacuccgacacugucggcuggucauggcccgauggugcagaguuaccguucacaaucgacaaguga

SEQ ID NO: 146154 - RNA, 1410 nt, Artificial Sequence; identical to SEQ ID NO: 144786
  derived and/or modified CDS sequence (opt3) from neuraminidase__InfluenzaA__ADD22544

SEQ ID NO: 146155 - RNA, 1410 nt, Artificial Sequence; identical to SEQ ID NO: 144786
  derived and/or modified CDS sequence (opt3) from neuraminidase__InfluenzaA__ADD22557

SEQ ID NO: 146156 - RNA, 1410 nt, Artificial Sequence; identical to SEQ ID NO: 144786
  derived and/or modified CDS sequence (opt3) from neuraminidase__InfluenzaA__ADD22567

SEQ ID NO: 146157 - RNA, 1410 nt, Artificial Sequence; identical to SEQ ID NO: 144786
  derived and/or modified CDS sequence (opt3) from neuraminidase__InfluenzaA__ADD22577

SEQ ID NO: 146158 - RNA, 1410 nt, Artificial Sequence; identical to SEQ ID NO: 144786
  derived and/or modified CDS sequence (opt3) from neuraminidase__InfluenzaA__ADD22587

SEQ ID NO: 146159 - RNA, 1410 nt, Artificial Sequence; identical to SEQ ID NO: 144786
  derived and/or modified CDS sequence (opt3) from neuraminidase__InfluenzaA__ADD22597

SEQ ID NO: 146160 - RNA, 1410 nt, Artificial Sequence; identical to SEQ ID NO: 144786
  derived and/or modified CDS sequence (opt3) from neuraminidase__InfluenzaA__ADD22617

SEQ ID NO: 146161 - RNA, 1410 nt, Artificial Sequence; identical to SEQ ID NO: 144786
  derived and/or modified CDS sequence (opt3) from neuraminidase__InfluenzaA__ADD22627

SEQ ID NO: 146162 - RNA, 1410 nt, Artificial Sequence; identical to SEQ ID NO: 144786
  derived and/or modified CDS sequence (opt3) from neuraminidase__InfluenzaA__ADD22637

SEQ ID NO: 146163 - RNA, 1410 nt, Artificial Sequence; identical to SEQ ID NO: 144786
  derived and/or modified CDS sequence (opt3) from neuraminidase__InfluenzaA__ADD22648

SEQ ID NO: 146164 - RNA, 1410 nt, Artificial Sequence; identical to SEQ ID NO: 144786
  derived and/or modified CDS sequence (opt3) from neuraminidase__InfluenzaA__ADD22658

SEQ ID NO: 146165 - RNA, 1410 nt, Artificial Sequence; identical to SEQ ID NO: 144786
  derived and/or modified CDS sequence (opt3) from neuraminidase__InfluenzaA__ADD22668

SEQ ID NO: 146166 - RNA, 1410 nt, Artificial Sequence
  derived and/or modified CDS sequence (opt3) from neuraminidase__InfluenzaA__ADD22688
augaaccccaaucagaagaucauuaccauaggcagcgugugcaugacaaucgggauggccaaccugauucuccaaaucggaaauauuaucuccauauggaucucucacucaauucagcuugguaaccagaaucagaucgagacuuguaaccaaagugucauuacguacgaaaauaacaccuggguuaaucagacauaugugaacaucagcaauacuaacuucgcugcaggccaguccguagugucugucaaacuggccggaaauucgucauugugcccugugagcggaugggcgauauacaguaaggacaacuccauuagaaucggcucuaaaggugauguuuuugugauuagggagccauucaucagcuguuccccguuagaaugccggaccuuuuuccugacacagggggcucuacucaaugacaagcauucaaacggaaccaucaaagaucgcagucccuaucgaacucugaugagcuguccuauuggcgaggucccaucucccuacaacucccguuuugaaucaguggccuggagcgcaagugccugccacgacggcauaaauuggcuuacaaucgggauuucuggaccugauaacggugcuguagcaguucugaaguauaauggcaucauaaccgacacgauuaaguccuggagaaacaauaucuugaggacucaagagagcgagugugccugcgugaacgggucguguuucaccgucaugacagauggaccaucugacggccaggcuuccuacaaaaucuuucggauugaaaaggguaaaaucgugaagucaguggagaugaaugcccccaacuaucauuacgaagagugcaguuguuacccugauagcuccgagauuacuugcgucugccgcgacaauuggcacgggucuaacagaccauggguuagcuucaaucagaaccucgaauaucagauaggauacaucuguucaggcauuuuuggcgauaauccgaggcccaacgacaaaaccgggaguugcggaccuguguccagcaauggugcgaacggcguaaagggguucucuuuuaaguauggaaacggcguguggaucggucggacaaaaucaaucaguagccgcaauggguucgagaugauuugggauccaaacggcuggaccggaacggacaauaacuuuuccauaaagcaagacaucgucggcauuaaugaauggucuggguacucggggagcuucgugcagcaucccgagcugacuggucuggauuguauccgaccuugcuucuggauugaacucaucagaggcaggccaaaagagaacacaauauggaccuccgggucaaguaucucuuuuuguggaguuaauagcgacacugugggcugguccuggcccgauggugcagaguuaccguucacaauugacaaguga

SEQ ID NO: 146167 - RNA, 1410 nt, Artificial Sequence; identical to SEQ ID NO: 144786
  derived and/or modified CDS sequence (opt3) from neuraminidase__InfluenzaA__ADD22698

SEQ ID NO: 146168 - RNA, 1410 nt, Artificial Sequence; identical to SEQ ID NO: 144786
  derived and/or modified CDS sequence (opt3) from neuraminidase__InfluenzaA__ADD22725

SEQ ID NO: 146169 - RNA, 1410 nt, Artificial Sequence; identical to SEQ ID NO: 144786
  derived and/or modified CDS sequence (opt3) from neuraminidase__InfluenzaA__ADD22735

SEQ ID NO: 146170 - RNA, 1410 nt, Artificial Sequence; identical to SEQ ID NO: 144786
  derived and/or modified CDS sequence (opt3) from neuraminidase__InfluenzaA__ADD22745

SEQ ID NO: 146171 - RNA, 1410 nt, Artificial Sequence
  derived and/or modified CDS sequence (opt3) from neuraminidase__InfluenzaA__ADD22755
augaaccccaaucagaagaucauuaccauaggcagcgugugcaugacaaucgggauggccaaccugauucuccaaaucggaaauauuaucuccauauggaucucucacucaauucagcuugguaaccagaaucagaucgagacuuguaaccaaagugucauuacguacgaaaauaacaccuggguuaaucagacauaugugaacaucagcaauacuaacuucgcugcaggccaguccguagugucugucaaacuggccgggaauagcucauugugcaccgugagcggaugggcgauauacaguaaggacaacuccauuagaaucggcucuaaaggugauguuuuugugauuagggagccuuucaucagcuguuccccauuagaaugccggacauuuuuccugacccagggggcucuacucaaugacaagcauucaaacggaacuaucaaagaucgcaguccguaucgaacacugaugagcugucccauuggcgaggucccuucuccauacaacucccguuuugaaucaguggccuggagcgcaagugccugccacgacggcauaaauuggcuuaccaucgggauuucuggacccgauaacggugcuguagcaguucugaaguauaauggcaucauaacggacacuauuaaguccuggagaaacaauaucuugaggacccaagagagcgagugugccugcgugaacgggucguguuucacagucaugacugauggaccuucugacggccaggcuuccuacaaaaucuuucggauugaaaaggguaaaaucgugaagucaguggagaugaaugccccaaacuaucauuacgaagagugcaguuguuaccccgauagcuccgagauuaccugcgucugccgcgacaauuggcacgggucuaacagaccuuggguuagcuucaaucagaaccucgaauaucagauaggauacaucuguucaggcauuuuuggcgauaguccaaggccgaaugacaaaacaggguccugcggacccgugagcucuaacggugcgaauggcguaaagggguucucauuuaaguauggaaacggcguguggaucggucggaccaaaaguaucagcucccgcaacggguucgagaugauuugggauccuaauggcuggacgggaacugacaacaauuuuucuauaaagcaagacaucgucggcauuaacgaauggucgggguacagcggauccuucgugcagcauccagagcugacaggucuggauuguauccgacccugcuucuggguugaacucauuagaggcaggccuaaagagaauaccaucuggacuucagggaguucuauaucguuuuguggagugaacuccgacacagucggcuggucauggccagauggugcagaguuacccuucaccaucgacaaguga

SEQ ID NO: 146172 - RNA, 1410 nt, Artificial Sequence
  derived and/or modified CDS sequence (opt3) from neuraminidase__InfluenzaA__ADD22765
augaaccccaaucagaagaucauuaccauaggcagcgugugcaugacaaucgggauggccaaccugauucuccaaaucggaaauauuaucuccauauggaucucucacucaauucagcuugguaaccagaaucagaucgagacuuguaaccaaagugucauuacguacgaaaauaacaccuggguuaaucagacauaugugaacaucagcaauacuaacuucgcugcaggccaguccguagugucugucaaacuggccggaaauucgucauugugcccugugagcggaugggcgauauacaguaaggacaacuccauuagaaucggcucuaaaggugauguuuuugugauuagggagccauucaucagcuguuccccguuagaaugccggaccuuuuuccugacacagggggcucuacucaaugacaagcauucaaacggaaccaucaaagaucgcagucccuaucgaacucugaugagcuguccuauuggcgaggucccaucucccuacaacucccguuuugaaucaguggccuggagcgcaagugccugccacgacggcauaaauuggcuuacaaucgggauuucuggaccugauaacggugcuguagcaguucugaaguauaauggcaucauaaccgacacgauuaaguccuggagaaacaauaucuugaggacucaagagagcgagugugccugcgugaacgggucguguuucaccgucaugacagauggaccaucugacggccaggcuuccuacaaaaucuuucggauugaaaaggguaaaaucgugaagucaguggagaugaaugcccccaacuaucauuacgaagagugcaguuguuacccugauagcuccgagauuacuugcgucugccgcgacaauuggcacgggucuaacagaccauggguuagcuucaaucagaaccucgaauaucagauaggauacaucuguucaggcauuuuuggcgauaauccgaggcccaacgacaaaaccgggaguugcggaccuguguccagcaauggugcgaacggcguaaagggguucucuuuuaaguauggaaacggcguguggaucggucggacaaaaucaaucaguagccgcaauggguucgagaugauuugggauccaaacggcuggaccggaacggacaauaacuuuuccauaaagcaagacaucgucggcauuaaugauuggucuggguacucggggagcuucgugcagcaucccgaacugacuggucuggacuguauccgaccuugcuucuggguugagcucauuagaggcaggccaaaagaaaacacaaucuggaccuccgggucaaguauaucuuuuuguggagugaauagcgauacugucggcugguccuggcccgacggugcagaguuaccguucacaaucgauaaguga

SEQ ID NO: 146173 - RNA, 1410 nt, Artificial Sequence; identical to SEQ ID NO: 144786
  derived and/or modified CDS sequence (opt3) from neuraminidase__InfluenzaA__ADD22775

SEQ ID NO: 146174 - RNA, 1410 nt, Artificial Sequence; identical to SEQ ID NO: 144786
  derived and/or modified CDS sequence (opt3) from neuraminidase__InfluenzaA__ADD22785

SEQ ID NO: 146175 - RNA, 1410 nt, Artificial Sequence; identical to SEQ ID NO: 144786
  derived and/or modified CDS sequence (opt3) from neuraminidase__InfluenzaA__ADD22795

SEQ ID NO: 146176 - RNA, 1410 nt, Artificial Sequence; identical to SEQ ID NO: 144786
  derived and/or modified CDS sequence (opt3) from neuraminidase__InfluenzaA__ADD22805

SEQ ID NO: 146177 - RNA, 1410 nt, Artificial Sequence; identical to SEQ ID NO: 144786
  derived and/or modified CDS sequence (opt3) from neuraminidase__InfluenzaA__ADD22815

SEQ ID NO: 146178 - RNA, 1410 nt, Artificial Sequence; identical to SEQ ID NO: 144786
  derived and/or modified CDS sequence (opt3) from neuraminidase__InfluenzaA__ADD22825

SEQ ID NO: 146179 - RNA, 1410 nt, Artificial Sequence; identical to SEQ ID NO: 144786
  derived and/or modified CDS sequence (opt3) from neuraminidase__InfluenzaA__ADD22835

SEQ ID NO: 146180 - RNA, 1410 nt, Artificial Sequence; identical to SEQ ID NO: 144786
  derived and/or modified CDS sequence (opt3) from neuraminidase__InfluenzaA__ADD22845

SEQ ID NO: 146181 - RNA, 1410 nt, Artificial Sequence; identical to SEQ ID NO: 144786
  derived and/or modified CDS sequence (opt3) from neuraminidase__InfluenzaA__ADD22855

SEQ ID NO: 146182 - RNA, 1410 nt, Artificial Sequence; identical to SEQ ID NO: 144786
  derived and/or modified CDS sequence (opt3) from neuraminidase__InfluenzaA__ADD22924

SEQ ID NO: 146183 - RNA, 1410 nt, Artificial Sequence; identical to SEQ ID NO: 144786
  derived and/or modified CDS sequence (opt3) from neuraminidase__InfluenzaA__ADD22934

SEQ ID NO: 146184 - RNA, 1410 nt, Artificial Sequence; identical to SEQ ID NO: 144786
  derived and/or modified CDS sequence (opt3) from neuraminidase__InfluenzaA__ADD22944

SEQ ID NO: 146185 - RNA, 1410 nt, Artificial Sequence; identical to SEQ ID NO: 144786
  derived and/or modified CDS sequence (opt3) from neuraminidase__InfluenzaA__ADD22954

SEQ ID NO: 146186 - RNA, 1410 nt, Artificial Sequence; identical to SEQ ID NO: 144786
  derived and/or modified CDS sequence (opt3) from neuraminidase__InfluenzaA__ADD22974

SEQ ID NO: 146187 - RNA, 1410 nt, Artificial Sequence; identical to SEQ ID NO: 144786
  derived and/or modified CDS sequence (opt3) from neuraminidase__InfluenzaA__ADD23075

SEQ ID NO: 146188 - RNA, 1410 nt, Artificial Sequence
  derived and/or modified CDS sequence (opt3) from neuraminidase__InfluenzaA__ADD23085
augaaccccaaucagaagaucauuaccauaggcagcgugugcaugacaaucgggauggccaaccugauucuccaaaucggaaauauuaucuccauauggaucucucacucaauucagcuugguaaccagaaucagaucgagacuuguaaccaaagugucauuacguacgaaaauaacaccuggguuaaucagacauaugugaacaucagcaauacuaacuucgcugcaggccaguccguagugucugucaaacuggccggaaauucgucauugugcccugugagcggaugggcgauauacaguaaggacaacuccauuagaaucggcucuaaaggugauguuuuugugauuagggaguuauucaucagcuguuccccacuggaaugccggaccuuuuuccuaacacagggggcucuccugaaugacaagcauucaaacggaaccaucaaagaucgcaguccguaucgaacucuuaugagcugucccauuggcgaggucccuucuccauacaacucccguuuugaaucaguggccuggagcgcaagugccugccacgacggcauaaauuggcugacaaucgggauuucuggacccgauaacggugcuguagcaguuuugaaguauaauggcaucauaaccgacacgauuaaguccuggagaaacaauauccucaggacucaagagagcgagugugccugcgugaacgggucguguuucaccgucaugacagauggaccuucugacggccaggcuuccuacaaaaucuuucggauugaaaaggguaaaaucgugaagucaguggagaugaaugccccaaacuaucauuacgaagagugcaguuguuaccccgauagcuccgagauuacuugcgucugccgcgacaauuggcacgggucuaacagaccuuggguuagcuucaaucagaaccuggaauaucagauaggauacaucuguucaggcauuuuuggcgauaauccaaggccgaacgacaaaaccgggaguugcggacccguguccagcaauggugcgaacggcguaaagggguucucuuuuaaguauggaaacggcguguggaucggucggacaaaaucaaucaguagccgcaauggguucgagaugauuugggauccuaacggcuggaccggaacggacaauaacuuuuccauaaagcaagacaucgucggcauuaaugaauggucuggguacucggggagcuucgugcagcauccagagcugacuggucucgauuguauccgacccugcuucuggguugaauuaauuagaggcaggccuaaagagaacacaaucuggaccuccgggucaaguauaucuuuuuguggagugaauagcgacacugucggcugguccuggccagauggugcagagcugcccuucacaaucgacaaguga

SEQ ID NO: 146189 - RNA, 1410 nt, Artificial Sequence; identical to SEQ ID NO: 144786
  derived and/or modified CDS sequence (opt3) from neuraminidase__InfluenzaA__ADD23095

SEQ ID NO: 146190 - RNA, 1410 nt, Artificial Sequence; identical to SEQ ID NO: 144786
  derived and/or modified CDS sequence (opt3) from neuraminidase__InfluenzaA__ADD23105

SEQ ID NO: 146191 - RNA, 1410 nt, Artificial Sequence; identical to SEQ ID NO: 144786
  derived and/or modified CDS sequence (opt3) from neuraminidase__InfluenzaA__ADD23115

SEQ ID NO: 146192 - RNA, 1410 nt, Artificial Sequence; identical to SEQ ID NO: 144786
  derived and/or modified CDS sequence (opt3) from neuraminidase__InfluenzaA__ADD23125

SEQ ID NO: 146193 - RNA, 1410 nt, Artificial Sequence; identical to SEQ ID NO: 144786
  derived and/or modified CDS sequence (opt3) from neuraminidase__InfluenzaA__ADD23135

SEQ ID NO: 146194 - RNA, 1410 nt, Artificial Sequence; identical to SEQ ID NO: 144786
  derived and/or modified CDS sequence (opt3) from neuraminidase__InfluenzaA__ADD23145

SEQ ID NO: 146195 - RNA, 1410 nt, Artificial Sequence; identical to SEQ ID NO: 144786
  derived and/or modified CDS sequence (opt3) from neuraminidase__InfluenzaA__ADD23155

SEQ ID NO: 146196 - RNA, 1410 nt, Artificial Sequence; identical to SEQ ID NO: 144786
  derived and/or modified CDS sequence (opt3) from neuraminidase__InfluenzaA__ADD23165

SEQ ID NO: 146197 - RNA, 1410 nt, Artificial Sequence; identical to SEQ ID NO: 144786
  derived and/or modified CDS sequence (opt3) from neuraminidase__InfluenzaA__ADD23175

SEQ ID NO: 146198 - RNA, 1410 nt, Artificial Sequence; identical to SEQ ID NO: 144786
  derived and/or modified CDS sequence (opt3) from neuraminidase__InfluenzaA__ADD23185

SEQ ID NO: 146199 - RNA, 1410 nt, Artificial Sequence; identical to SEQ ID NO: 144786
  derived and/or modified CDS sequence (opt3) from neuraminidase__InfluenzaA__ADD23195

SEQ ID NO: 146200 - RNA, 1410 nt, Artificial Sequence; identical to SEQ ID NO: 144786
  derived and/or modified CDS sequence (opt3) from neuraminidase__InfluenzaA__ADD23223

SEQ ID NO: 146201 - RNA, 1410 nt, Artificial Sequence
  derived and/or modified CDS sequence (opt3) from neuraminidase__InfluenzaA__ADD23233
augaaccccaaucagaagaucauuaccauaggcagcgugugcaugacaaucgggauggccaaccugauucuccaaaucggaaauauuaucuccauauggaucggucacucuauucagcuuggcaaccagaaucagaucgagacuuguaaccaaucagucauuacguacgaaaauaacaccuggguuaaucagacauaugugaacaucaguaauacuaacuucgcugcagggcagagcguaguguccgucaaacuggccggaaauucuucguugugcccugugucaggcugggcgauauacagcaaggacaacaguauuagaaucgguuccaaaggggauguuuuugugauuagggagccauucaucucuuguagcccguuagaaugccggaccuuuuuccugacacagggagcucuacucaaugacaagcauuccaacggcaccaucaaagaucgcucacccuaucgaacucugaugaguuguccuauuggcgaggucccaagccccuacaacucucguuuugaauccguggccuggucagcaagcgccugccacgacgggauaaauuggcuuacaaucggaauuagugguccugauaacggcgcuguagcaguucugaaguauaaugggaucauaaccgacacgauuaagucuuggagaaacaauaucuugaggacucaagaguccgagugugccugcgugaacggaagcuguuucaccgucaugacagauggcccaucggacggucaggcuucuuacaaaaucuuucggauugaaaaggggaaaaucgugaaguccguggagaugaaugcccccaacuaucauuacgaagagugcucauguuacccugauaguagcgagauuacuugcgucugccgcgacaauuggcacggauccaacagaccauggguuucuuucaaucagaaccucgaauaucagauaggcuacaucuguagcggcauuuuuggggauaauccgaggcccaacgacaaaaccggaucaugcgguccugugaguuccaauggcgcgaacgggguaaagggauucagcuuuaaguauggcaacgguguguggaucgggcggacaaaaucuaucucaagucgcaauggcuucgagaugauuugggauccaaacggauggaccggcacggacaauaacuuuagcauaaagcaagacaucgucgggauuaaugaaugguccggauacucugguucguucgugcagcaucccgagcugacuggccuggauuguauccgaccuugcuucuggguugaacucauuagagggaggccaaaagagaacacaaucuggaccagcggauccucaauaaguuuuuguggcgucaauucugacacuguggguuggagcuggcccgauggggcagaguuaccguucacaaucgacaaguga

SEQ ID NO: 146202 - RNA, 1410 nt, Artificial Sequence; identical to SEQ ID NO: 144786
  derived and/or modified CDS sequence (opt3) from neuraminidase__InfluenzaA__ADD23243

SEQ ID NO: 146203 - RNA, 1410 nt, Artificial Sequence; identical to SEQ ID NO: 146074
  derived and/or modified CDS sequence (opt3) from neuraminidase__InfluenzaA__ADD23253

SEQ ID NO: 146204 - RNA, 1410 nt, Artificial Sequence
  derived and/or modified CDS sequence (opt3) from neuraminidase__InfluenzaA__ADD23273
augaaccccaaucagaagaucauuaccauaggcagcgugugcaugacaaucgggauggccaaccugauucuccaaaucggaaauauuaucuccauauggaucucucacucaauucagcuugguaaccagaaucagaucgagacuuguaaccaaagugucauuacguacgaaaauaacaccuggguuaaucagacauaugugaacaucagcaauacuaacuucgcugcaggccaguccguagugucugucaaacuggccggaaauucgucauugugcccugugagcggaugggcgauauacaguaaggacaacuccauuagaaucggcucugagggugauguuuuugugauuagggaaccauucaucagcuguuccccguuagagugccggaccuuuuuccugacacagggggcucuacucaaugacaaacauucaaacggaaccaucaaggaucgcagucccuaucgaacucugaugagcuguccuauuggcgaagucccaucucccuacaacucccguuuugagucaguggccuggagcgcaagugccugccacgacggcauaaauuggcuuacaaucgggauuucuggaccugauaacggugcuguagcaguucugaaauauaauggcaucauaaccgacacgauuaaguccuggagaaacaauaucuugaggacucaagagagcgaaugugccugcgugaacgggucguguuucaccgucaugacagauggaccaucugacggccaggcuuccuacaagaucuuucggauugagaaagguaagaucgugaaaucaguggaaaugaaugcccccaacuaucauuacgaggagugcaguuguuacccugauagcuccgaaauuacuugcgucugccgcgacaauuggcacgggucuaacagaccauggguuagcuucaaucagaaccucgaguaucagauaggauacaucuguucaggcauuuuuggcgauaauccgaggcccaacgacaagaccgggaguugcggaccuguguccagcaauggugcgaacggcguaaaaggguucucuuuuaaguauggaaacggcguguggaucggucggacaaagucaaucaguagccgcaauggguucgaaaugauuugggauccaaacggcuggaccggaacggacaauaacuuuuccauaaaacaagacaucgucggcauuaaugaguggucuggguacucggggagcuucgugcagcaucccgaacugacuggucuggauuguauccgaccuugcuucuggguugagcucauuagaggcaggccaaaggagaacacaaucuggaccuccgggucaaguauaucuuuuuguggagugaauagcgacacugucggcugguccuggcccgauggugcagaauuaccguucacaaucgacaaauga

SEQ ID NO: 146205 - RNA, 1410 nt, Artificial Sequence; identical to SEQ ID NO: 144786
  derived and/or modified CDS sequence (opt3) from neuraminidase__InfluenzaA__ADD23283

SEQ ID NO: 146206 - RNA, 1410 nt, Artificial Sequence; identical to SEQ ID NO: 144786
  derived and/or modified CDS sequence (opt3) from neuraminidase__InfluenzaA__ADD23293

SEQ ID NO: 146207 - RNA, 1410 nt, Artificial Sequence; identical to SEQ ID NO: 144786
  derived and/or modified CDS sequence (opt3) from neuraminidase__InfluenzaA__ADD23303

SEQ ID NO: 146208 - RNA, 1410 nt, Artificial Sequence; identical to SEQ ID NO: 144786
  derived and/or modified CDS sequence (opt3) from neuraminidase__InfluenzaA__ADD23313

SEQ ID NO: 146209 - RNA, 1410 nt, Artificial Sequence
  derived and/or modified CDS sequence (opt3) from neuraminidase__InfluenzaA__ADD23323
augaaccccaaucagaagaucauuaccauaggcagcgugugcaugacaaucgggauggccaaccugauucuccaaaucggaaauauuaucuccauauggaucucucacucaauucagcuugguaaccagaaucagaucgagacuuguaaccaaagugucauuacguacgaaaauaacaccuggguuaaucagacauaugugaacaucagcaauacuaacuucgcugcaggccaguccguagugucugucaaacuggccggaaauucgucauugugcccugugagcggaugggcgauauacaguaaggacaacuccauuagaaucggcucuaaaggugauguuuuugugauuagggagccauucaucagcuguuccccguuagaaugccggaccuuuuuccugacacagggggcucuacucaaugacaagcauucaaacggaaccaucaaagaucgcagucccuaucgaacucugaugagcuguccuauuggcgaggucccaucucccuacaacucccguuuugaaucaguggccuggagcgcaagugccugccacgacggcauaaauuggcuuacaaucgggauuucuggaccugauaacggugcuguagcaguucugaaguauaauggcaucauaaccgacacgauuaaguccuggagaaacaauaucuugaggacucaagagagcgagugugccugcgugaacgggucguguuucaccguccucacagauggaccaucugacggccaggcuuccuacaaaaucuuucggauugaaaaggguaaaaucgugaagucaguggagaugaaugcccccaacuaucauuacgaagagugcaguuguuacccugauagcuccgagauuacuugcgucugccgcgacaauuggcacgggucuaacagaccauggguuagcuucaaucagaaccuggaauaucagauaggauacaucuguucaggcauuuuuggcgauaauccgaggcccaacgacaaaaccgggaguugcggaccuguguccagcaauggugcgaacggcguaaagggguucucuuuuaaguauggaaacggcguguggaucggucggacaaaaucaaucaguagccgcaauggguucgagaugauuugggauccaaacggcuggaccggaacggacaauaacuuuuccauaaagcaagacaucgucggcauuaaugaauggucuggguacucggggagcuucgugcagcaucccgagcugacuggucucgauuguauccgaccuugcuucuggguugaauuaauuagaggcaggccaaaagagaacacaaucuggaccuccgggucaaguauaucuuuuuguggagugaauagcgacacugucggcugguccuggcccgauggugcagagcugccguucacaaucgacaaguga

SEQ ID NO: 146210 - RNA, 1410 nt, Artificial Sequence; identical to SEQ ID NO: 144786
  derived and/or modified CDS sequence (opt3) from neuraminidase__InfluenzaA__ADD23333

SEQ ID NO: 146211 - RNA, 1410 nt, Artificial Sequence; identical to SEQ ID NO: 144786
  derived and/or modified CDS sequence (opt3) from neuraminidase__InfluenzaA__ADD23358

SEQ ID NO: 146212 - RNA, 1410 nt, Artificial Sequence; identical to SEQ ID NO: 146137
  derived and/or modified CDS sequence (opt3) from neuraminidase__InfluenzaA__ADD23368

SEQ ID NO: 146213 - RNA, 1410 nt, Artificial Sequence; identical to SEQ ID NO: 144786
  derived and/or modified CDS sequence (opt3) from neuraminidase__InfluenzaA__ADD23378

SEQ ID NO: 146214 - RNA, 1410 nt, Artificial Sequence; identical to SEQ ID NO: 144786
  derived and/or modified CDS sequence (opt3) from neuraminidase__InfluenzaA__ADD23388

SEQ ID NO: 146215 - RNA, 1410 nt, Artificial Sequence; identical to SEQ ID NO: 145369
  derived and/or modified CDS sequence (opt3) from neuraminidase__InfluenzaA__ADD23398

SEQ ID NO: 146216 - RNA, 1410 nt, Artificial Sequence
  derived and/or modified CDS sequence (opt3) from neuraminidase__InfluenzaA__ADD23408
augaaccccaaucagaagaucauuaccauaggcagcgugugcaugacaaucgggauggccaaccugauucuccaaaucggaaauauuaucuccauauggaucucucacucaauucagcuugguaaccagaaucagaucgagacuuguaaccaaagugucauuacguacgaaaauaacaccuggguuaaucagacauaugugaacaucagcaauacuaacuucgcugcaggccaguccguagugucugucaaacuggccggaaauucgucauugugcccugugagcggaugggcgauauacaguaaggacaacuccauuagaaucggcucuaaaggugauguuuuugugauuagggagccauucaucagcuguuccccguuagaaugccggaccuuuuuccugacacagggggcucuacucaaugacaagcauucaaacggaaccaucaaagaucgcagucccuaucgaacucugaugagcuguccuauuggcgaggucccaucucccuacaacucccguuuugaaucaguggccuggagcgcaagugccugccacgacggcauaaauuggcuuacaaucgggauuucuggaccugauaacggugcuguagcaguucugaaguauaauggcaucauaaccgacacgauuaaguccuggagaaacaauaucuugaggacucaagagagcgagugugccugcgugaacgggucguguuucaccgucaugacagauggaccaucugacggccaggcuuccuacaaaaucuuucggauugaaaaggguaaaaucgugaagucaguggagaugaaugcccccaacuaucauuacgaagagugcaguuguuacccugauagcuccgagauuacuugcgucugccgcgacaauuggcacgggucuaacagaccauggguuagcuucaaucaggaucucgaauaucagauaggauacaucuguucaggcauuuuuggcgacaacccgaggcccaaugauaaaaccgggaguugcggaccuguguccagcaacggugcgaauggcguaaagggguucucuuuuaaguauggaaacggcguguggaucggucggacaaaaucaaucaguagccgcaacggguucgagaugauuugggacccaaauggcuggaccggaacggacaacaauuuuuccauaaagcaagauaucgucggcauuaacgaauggucuggguacucggggagcuucgugcagcaucccgagcugacuggucuggacuguauccgaccuugcuucuggguugaacucauuagaggcaggccaaaagagaauacaaucuggaccuccgggucaaguauaucuuuuuguggagugaacagcgauacugucggcugguccuggcccgacggugcagaguuaccguucacaaucgauaaguga

SEQ ID NO: 146217 - RNA, 1410 nt, Artificial Sequence
  derived and/or modified CDS sequence (opt3) from neuraminidase__InfluenzaA__ADD23438
augaaccccaaucagaagaucauuaccauaggcagcgugugcaugacaaucgggauggccaaccugauucuccaaaucggaaauauuaucuccauauggaucucucacucaauucagcuugguaaccagaaucagaucgagacuuguaaccaaagugucauuacguacgaaaauaacaccuggguuaaucagacauaugugaacaucagcaauacuaacuucgcugcaggccaguccguagugucugucaaacuggccgggaauagcucauugugcccugugagcggaugggcgauauacaguaaggacaacuccauuagaaucggcucuaaaggugauguuuuugugauuagggagccauucaucagcuguuccccguuagaaugccggaccuuuuuccugacacagggggcucuacucaaugacaagcauucaaacggaaccaucaaagaucgcagucccuaucgaacucugaugagcuguccuauuggcgaggucccaucucccuacaacucccguuuugaaucaguggccuggagcgcaagugccugccacgacggcauaaauuggcuuacaaucgggauuucuggaccugauaacggugcuguagcaguucugaaguauaauggcaucauaaccgacacgauuaaguccuggagaaacaauaucuugaggacucaagagagcgagugugccugcgugaacgggucguguuucaccgucaugacagauggaccaucugacggccaggcuuccuacaaaaucuuucggauugaaaaggguaaaaucgugaagucaguggagaugaaugcccccaacuaucauuacgaagagugcaguuguuacccugauagcuccgagauuacuugcgucugccgcgacaauuggcacgggucuaacagaccauggguuagcuucaaucagaaccucgaauaucagauaggauacaucuguucaggcauuuuuggcgauaauccgaggcccaacgacaaaaccgggaguugcggaccuguguccagcaauggugcgaacggcguaaagggguucucuuuuaaguauggaaacggcguguggaucggucggacaaaaucaaucaguagccgcaauggguucgagaugauuugggauccaaacggcuggaccggaacggacaauuccuuuucuauaaagcaagacaucgucggcauuaacgaauggucgggguacagcggauccuucgugcagcaucccgagcugacuggucuggauuguauccgaccuugcuucuggguugaacucauuagaggcaggccaaaagagaauacaaucuggaccucagggaguucuauaucguuuuguggagugaacuccgacacugucggcuggucauggcccgauggugcagaguuaccguucacaaucgacaaguga

SEQ ID NO: 146218 - RNA, 1410 nt, Artificial Sequence; identical to SEQ ID NO: 144786
  derived and/or modified CDS sequence (opt3) from neuraminidase__InfluenzaA__ADD23448

SEQ ID NO: 146219 - RNA, 1410 nt, Artificial Sequence; identical to SEQ ID NO: 144786
  derived and/or modified CDS sequence (opt3) from neuraminidase__InfluenzaA__ADD23458

SEQ ID NO: 146220 - RNA, 1410 nt, Artificial Sequence
  derived and/or modified CDS sequence (opt3) from neuraminidase__InfluenzaA__ADD23468
augaaccccaaucagaagaucauuaccauaggcagcgugugcaugacaaucgggauggccaaccugauucuccaaaucggaaauauuaucuccauauggaucucucacucaauucagcuugguaaccagaaucagaucgagacuuguaaccaaagugucauuacguacgaaaauaacaccuggguuaaucagacauaugugaacaucagcaauacuaacuucgcugcaggccaguccguagugucugucaaacuggccggaaauucgucauugugcccugugagcggaugggcgauauacaguaaggacaacuccauuagaaucggcucuaaaggugauguuuuugugauuagggagccauucaucagcuguuccccguuagaaugccggaccuuuuuccugacacagggggcucuacucaaugacaagcauucaaacggaaccaucaaagaucgcagucccuaucgaacucugaugagcuguccuauuggcgaggucccaucucccuacaacucccguuuugaaucaguggccuggagcgcaagugccugccacgacggcauaaauuggcuuacaaucgggauuucuggaccugauaacggugcuguagcaguucugaaguauaauggcaucauaaccgacacgauuaaguccuggagaaacaauaucuugaggacucaagagagcgagugugccugcgugaacgggucguguuucaccgucaugacagauggaccaucugacggccaggcuuccuacaaaaucuuucggauugaaaaggguaaaaucgugaagucaguggagaugaaugcccccaacuaucauuacgaagagugcaguuguuacccugauagcuccgagauuacuugcgucugccgcgacaauuggcacgggucuaacagaccauggguuagcuucaaucagaaccucgaauaucagauaggauacaucuguucaggcauuuuuggcgauaauccgaggcccaacgacaaaaccgggaguugcggaccuguguccagcaauggugcgaacggcguaaagggguucucuuuuaaguauggaaacggcguguggaucggucggacaaaaucaaucaguagccgcaauggguucgagaugauuugggauccaaacggcuggaccggaacggacaauaacuuuuccauaaagcaagacaucgucggcgugaaugaauggucuggguacucggggagcuucguucagcaucccgagcugacuggucuggauuguauucgaccuugcuucuggguggaacucaucagaggcaggccaaaagagaacacaauuuggaccuccgggucaaguaucucuuuuuguggagucaauagcgacacugugggcugguccuggcccgauggugcagaguuaccguucacaauagacaaguga

SEQ ID NO: 146221 - RNA, 1410 nt, Artificial Sequence; identical to SEQ ID NO: 144786
  derived and/or modified CDS sequence (opt3) from neuraminidase__InfluenzaA__ADD23478

SEQ ID NO: 146222 - RNA, 1410 nt, Artificial Sequence; identical to SEQ ID NO: 144786
  derived and/or modified CDS sequence (opt3) from neuraminidase__InfluenzaA__ADD23488

SEQ ID NO: 146223 - RNA, 1410 nt, Artificial Sequence
  derived and/or modified CDS sequence (opt3) from neuraminidase__InfluenzaA__ADD23498
augaaccccaaucagaagaucauuaccauaggcagcgugugcaugacaaucgggauggccaaccugauucuccaaaucggaaauauuaucuccauauggaucucucacucaauucagcuugguaaccagaaucauaucgagacuuguaaccagagugucauuacguacgaaaauaacaccuggguuaaucaaacauaugugaacaucagcaauacuaacuucgcugcaggccaguccguagugucugucaaacuggccggaaauucgucauugugcccugugagcggaugggcgauauacaguaaggacaacuccauuagaaucggcucuaaaggugauguuuuugugauuagggagccauucaucagcuguuccccguuagaaugccggaccuuuuuccugacacagggggcucuacucaaugacaagcacucaaacggaaccaucaaagaucgcagucccuaucgaacucugaugagcuguccuauuggcgaggucccaucucccuacaacucccguuuugaaucaguggccuggagcgcaagugccugccaugacggcauaaauuggcuuacaaucgggauuucuggaccugauaacggugcuguagcaguucugaaguauaauggcaucauaaccgacacgauuaaguccuggagaaacaauaucuugaggacucaggagagcgagugugccugcgugaacgggucguguuucaccgucaugacagauggaccaucugacggccaggcuuccuacaaaaucuuucggauugaaaaggguaaaaucgugaagucaguggagaugaaugcccccaacuaucacuacgaagagugcaguuguuacccugauagcuccgagauuacuugcgucugccgcgacaauuggcaugggucuaacagaccauggguuagcuucaaucaaaaccucgaauaucagauaggauacaucuguucaggcauuuuuggcgauaauccgaggcccaacgacaaaaccgggaguugcggaccuguguccagcaauggugcgaacggcguaaagggguucucuuuuaaguauggaaacggcguguggaucggucggacaaaaucaaucaguagccgcaauggguucgagaugauuugggauccaaacggcuggaccggaacggacaauaacuuuuccauaaagcaggacaucgucggcauuaaugaauggucuggguacucggggagcuucgugcaacaccccgagcugacuggucuggauuguauccgaccuugcuucuggguugaacucauuagaggcaggccaaaagagaacacaaucuggaccuccgggucaaguauaucuuuuuguggagugaauagcgacacugucggcugguccuggcccgauggugcagaguuaccguucacaaucgacaaguga

SEQ ID NO: 146224 - RNA, 1410 nt, Artificial Sequence; identical to SEQ ID NO: 144786
  derived and/or modified CDS sequence (opt3) from neuraminidase__InfluenzaA__ADD23508

SEQ ID NO: 146225 - RNA, 1410 nt, Artificial Sequence; identical to SEQ ID NO: 144786
  derived and/or modified CDS sequence (opt3) from neuraminidase__InfluenzaA__ADD23518

SEQ ID NO: 146226 - RNA, 1410 nt, Artificial Sequence; identical to SEQ ID NO: 144786
  derived and/or modified CDS sequence (opt3) from neuraminidase__InfluenzaA__ADD23997

SEQ ID NO: 146227 - RNA, 1410 nt, Artificial Sequence; identical to SEQ ID NO: 144786
  derived and/or modified CDS sequence (opt3) from neuraminidase__InfluenzaA__ADD24007

SEQ ID NO: 146228 - RNA, 1410 nt, Artificial Sequence; identical to SEQ ID NO: 144786
  derived and/or modified CDS sequence (opt3) from neuraminidase__InfluenzaA__ADD24017

SEQ ID NO: 146229 - RNA, 1410 nt, Artificial Sequence; identical to SEQ ID NO: 144786
  derived and/or modified CDS sequence (opt3) from neuraminidase__InfluenzaA__ADD24024

SEQ ID NO: 146230 - RNA, 1410 nt, Artificial Sequence; identical to SEQ ID NO: 144786
  derived and/or modified CDS sequence (opt3) from neuraminidase__InfluenzaA__ADD24025

SEQ ID NO: 146231 - RNA, 1410 nt, Artificial Sequence; identical to SEQ ID NO: 144786
  derived and/or modified CDS sequence (opt3) from neuraminidase__InfluenzaA__ADD24026

SEQ ID NO: 146232 - RNA, 1410 nt, Artificial Sequence; identical to SEQ ID NO: 144786
  derived and/or modified CDS sequence (opt3) from neuraminidase__InfluenzaA__ADD24027

SEQ ID NO: 146233 - RNA, 1410 nt, Artificial Sequence; identical to SEQ ID NO: 144786
  derived and/or modified CDS sequence (opt3) from neuraminidase__InfluenzaA__ADD24028

SEQ ID NO: 146234 - RNA, 1410 nt, Artificial Sequence; identical to SEQ ID NO: 144786
  derived and/or modified CDS sequence (opt3) from neuraminidase__InfluenzaA__ADD24029

SEQ ID NO: 146235 - RNA, 1410 nt, Artificial Sequence; identical to SEQ ID NO: 144786
  derived and/or modified CDS sequence (opt3) from neuraminidase__InfluenzaA__ADD24030

SEQ ID NO: 146236 - RNA, 1410 nt, Artificial Sequence; identical to SEQ ID NO: 144786
  derived and/or modified CDS sequence (opt3) from neuraminidase__InfluenzaA__ADD24031

SEQ ID NO: 146237 - RNA, 1410 nt, Artificial Sequence; identical to SEQ ID NO: 144786
  derived and/or modified CDS sequence (opt3) from neuraminidase__InfluenzaA__ADD24032

SEQ ID NO: 146238 - RNA, 1410 nt, Artificial Sequence; identical to SEQ ID NO: 144786
  derived and/or modified CDS sequence (opt3) from neuraminidase__InfluenzaA__ADD25231

SEQ ID NO: 146239 - RNA, 1410 nt, Artificial Sequence; identical to SEQ ID NO: 144786
  derived and/or modified CDS sequence (opt3) from neuraminidase__InfluenzaA__ADD25233

SEQ ID NO: 146240 - RNA, 1410 nt, Artificial Sequence; identical to SEQ ID NO: 144786
  derived and/or modified CDS sequence (opt3) from neuraminidase__InfluenzaA__ADD25235

SEQ ID NO: 146241 - RNA, 1410 nt, Artificial Sequence; identical to SEQ ID NO: 144786
  derived and/or modified CDS sequence (opt3) from neuraminidase__InfluenzaA__ADD25244

SEQ ID NO: 146242 - RNA, 1410 nt, Artificial Sequence
  derived and/or modified CDS sequence (opt3) from neuraminidase__InfluenzaA__ADD25246
augaaccccaaucagaagaucauuaccauaggcagcgugugcaugacaaucgggauggccaaccugauucuccaaaucggaaauauuaucuccauauggaucucucacucaauucagcuugguaaccagaaucagaucgagacuuguaaccaaagugucauuacguacgaaaauaacaccuggguuaaucagacauaugugaacaucagcaauacuaacuucgcugcaggccaguccguagugucugucaaacuggccggaaauucgucauugugcccugugagcggaugggcgauauacaguaaggacaacuccauuagaaucggcucuaaaggugauguuuuugugauuagggagccauucaucagcuguuccccguuagaaugccggaccuuuuuccugacacagggggcucuacucaaugacaagcauucaaacggaaccaucaaagaucgcagucccuaucgaacucugaugagcuguccuauuggcgaggucccaucucccuacaacucccguuuugaaucaguggccuggagcgcaagugccugccacgacggcacaaauuggcuuaccauagggaucucuggaccugauaacggugcuguagcaguucugaaguauaauggcauuaucacggacacuauaaaguccuggagaaacaauauuuugaggacccaagagagcgagugugccugcgugaacgggucguguuucacagucaugacugauggaccaucugacggccaggcuuccuacaaaaucuuucggaucgaaaaggguaaaauugugaagucaguggagaugaaugcccccaacuaucauuacgaagagugcaguuguuacccugauagcuccgagauuaccugcgucugccgcgacaauuggcacgggucuaacagaccauggguuagcuucaaucagaaccucgaauaucagaucggauacauauguucaggcaucuuuggcgauaauccgaggcccaacgacaaaacagggaguugcggaccuguguccagcaauggugcgaacggcguaaagggguucucuuuuaaguauggaaacggcguguggauuggucggaccaaaucaaucaguagccgcaauggguucgagaugaucugggauccaaacggcuggacgggaacugacaauaacuuuuccauuaagcaagacauagucggcaucaaugaauggucuggguacucggggagcuucgugcagcaucccgagcugacaggucuggauuguauucgaccuugcuucuggguugaacucaucagaggcaggccaaaagagaacaccauuuggacuuccgggucaaguaucucuuuuuguggagugaauagcgacacagucggcugguccuggcccgauggugcagaguuaccguucaccauagacaaguga

SEQ ID NO: 146243 - RNA, 1410 nt, Artificial Sequence; identical to SEQ ID NO: 144786
  derived and/or modified CDS sequence (opt3) from neuraminidase__InfluenzaA__ADD25248

SEQ ID NO: 146244 - RNA, 1410 nt, Artificial Sequence
  derived and/or modified CDS sequence (opt3) from neuraminidase__InfluenzaA__ADD25250
augaaccccaaucagaagaucauuaccauaggcagcgugugcaugacaaucgggauggccaaccugauucuccaaaucggaaauauuaucuccauauggaucucuagaucaauucagcuugguaaccagaaucagaucgagacuuguaaccaaaguauuaucacguacgaaaauaacaccugggucaaucagacauauguuaacauaagcaauacuaacuucgcugcaggccaguccgugguaucugugaaacuggccggaaauucgucauugugcccugucagcgggugggcgauuuacaguaaggacaacuccaucaggauuggcucuaaaggugauguguuuguuauccgggagccauucaucagcuguuccccguuagaaugccgcaccuuuuuccugacacagggggcucuacucaaugacaagcacucaaacggaaccauuaaagaucgaagucccuaucguacucugaugagcuguccuauaggcgaggugccaucucccuacaacuccagauuugaaucagucgccuggagcgcaagugccugccaugacggcaucaauuggcuuacaauugggaucucuggaccugauaacggugcuguggcaguacugaaguauaauggcauaauuaccgacacgaucaaguccuggaggaacaauaucuugcggacucaagagagcgagugugccugcguuaacgggucguguuucaccgugaugacagauggaccaucugacggccaggcuuccuacaaaauuuuucgcaucgaaaaggguaaaauugucaagucaguggagaugaaugcccccaacuaucacuacgaagagugcaguuguuacccugauagcggggagauaacuugcgugugcagagacaauuggcauggauccaacaggccaugggucucuuucaaucagaaccucgaauaucagaucggcuacauuuguagcggcaucuuuggggauaauccgcggcccaacgacaaaaccggaucaugcgguccuguuaguuccaauggcgcgaacggggugaagggauucagcuuuaaguauggcaacgguguauggaucgggcgcacaaaaucuauuucaagucgaaauggcuucgagaugauaugggauccaaacggauggaccggcacggacaauaacuuuagcaucaagcaagacauuguggggaucaaugaaugguccggauacucugguucguucguccagcaccccgagcugacuggccuggauuguauuagaccuugcuucuggguggaacucaucagggggcggccaaaagagaacacaauauggaccagcggauccucaaucaguuuuuguggcguuaauucugacacuauggguuggagcuggcccgauggggcagaguuaccguucacaauugacaaguga

SEQ ID NO: 146245 - RNA, 1410 nt, Artificial Sequence; identical to SEQ ID NO: 144786
  derived and/or modified CDS sequence (opt3) from neuraminidase__InfluenzaA__ADD25255

SEQ ID NO: 146246 - RNA, 1410 nt, Artificial Sequence; identical to SEQ ID NO: 144786
  derived and/or modified CDS sequence (opt3) from neuraminidase__InfluenzaA__ADD25259

SEQ ID NO: 146247 - RNA, 1410 nt, Artificial Sequence
  derived and/or modified CDS sequence (opt3) from neuraminidase__InfluenzaA__ADD25262
augaaccccaaucagaagaucauuaccauaggcagcgugugcaugacaaucgggauggccaaccugauucuccaaaucggaaauauuaucuccauauggaucucucacucaauucagcuugguaaccagaaucagaucgagacuuguaaccaaagugucauuacguacgaaaauaacaccuggguuaaucagacauaugugaacaucagcaauacuaacuucgcugcaggccaguccguagugucugucaaacuggccggaaauucgucauugugcccugugagcggaugggcgauauacaguaaggacaacuccauuagaaucggcucuaaaggugauguuuuugugauuagggagccauucaucagcuguuccccguuagaaugccggaccuuuuuccugacacagggggcucuacucaaugacaagcauucaaacggaaccaucaaagaucgcagucccuaucgaacucugaugagcuguccuauuggcgaggucccaucucccuacaacucccguuuugaaucaguggccuggagcgcaagugccugccacgacggcauaaauuggcuuacaaucgggauuucuggaccugauaacggugcuguagcaguucugaaguauaauggcaucauaaccgacacgauuaaguccuggagaaacaauaucuugaggacucaagagagcgagugugccugcgugaacgggucguguuucaccgucaugacagauggaccaucugacggccaggcuuccuacaaaaucuuucggauugaaaaggguaaaaucgugaagucaguggagaugaaugcccccaacuaucauuacgaagagugcaguuguuacccugauagcuccgagauuacuugcgucugccgcgacaauuggcacgggucuaacagaccauggguuagcuucaaucagaaccucgaauaucagauaggauacaucuguucaggcauuuuuggcgauaauccgaggcccaacgacaaaaaggggaguugcggaccuguguccagcaauggugcggauggcguaaagggguucucuuuuaaauauggaaacggcguguggaucggucggaccaagucaaucaguagccgcaacggguucgagaugauuugggacccaaauggcuggacaggaaccgacaacaauuuuuccauaaaacaagauaucgucggcauuaacgaauggucuggguacucggggagcuucgugcagcaucccgagcugacgggucuggacuguauccgaccuugcuucuggguugaacucauuagaggcaggccaaaggagaauacuaucuggacauccgggucaaguauaucuuuuuguggagugaacagcgauaccgucggcugguccuggcccgacggugcagaguuaccguucacuaucgauaaauga

SEQ ID NO: 146248 - RNA, 1410 nt, Artificial Sequence
  derived and/or modified CDS sequence (opt3) from neuraminidase__InfluenzaA__ADD25266
augaaccccaaucagaagaucauuaccauaggcagcgugugcaugacaaucgggauggccaaccugauucuccaaaucggaaauauuaucuccauauggaucucucacucaauucagcuugguaaccagaaucagaucgagacuuguaaccaaagugucauuacguacgaaaauaacaccuggguuaaucagacauaugugaacaucagcaauacuaacuucgcugcaggccaguccguagugccugucaaacuggccggaaauucuucguugugcccagugucagggugggcgauauacagcaaggacaacaguauuagaaucggcuccaaaggugauguuuuugugauuagggagccguucaucucuuguagccccuuagaaugccggaccuuuuuccugacacagggggcucuacucaaugacaagcauuccaacggaaccaucaaagaucgcucaccuuaucgaacucugaugaguuguccaauuggcgagguccccagcccuuacaacucucguuuugaauccguggccuggucagcaagcgccugccacgacggcauaaauuggcuuacaaucgggauuaguggaccagauaacggugcuguagcaguucugaaguauaauggcaucauaaccgacacgauuaagucuuggagaaacaauaucuugaggacucaagaguccgagugugccugcgugaacgggagcuguuucaccgucaugacagauggacccucggacggccaggcuucuuacaaaaucuuucggauugaaaaggguaaaaucgugaaguccguggagaugaaugccccuaacuaucauuacgaagagugcucauguuacccagauaguagcgagauuacuugcgucugccgcgacaauuggcacggguccaacagaccguggguuucuuucaaucagaaccucgaauaucagauaggauacaucuguagcggcauuuuuggcgauaaucccaggccuaacgacaaaaccgggucaugcggaccagugaguuccaauggugcgaacggcguaaagggguucagcuuuaaguauggaaacggcguguggaucggucggacaaaaucuaucucaagucgcaauggguucgagaugauuugggaucccaacggcuggaccggaacggacaauaacuuuagcauaaagcaagacaucgucggcauuaaugaaugguccggguacucuggaucguucgugcagcauccugagcugacuggucuggauuguauccgaccaugcuucuggguugaacucauuagaggcaggcccaaagagaacacaaucuggaccagcggguccucaauaaguuuuuguggagucaauucugacacugugggcuggagcuggccggauggugcagaguuaccuuucacaaucgacaaguga

SEQ ID NO: 146249 - RNA, 1410 nt, Artificial Sequence; identical to SEQ ID NO: 144786
  derived and/or modified CDS sequence (opt3) from neuraminidase__InfluenzaA__ADD25268

SEQ ID NO: 146250 - RNA, 1410 nt, Artificial Sequence; identical to SEQ ID NO: 144786
  derived and/or modified CDS sequence (opt3) from neuraminidase__InfluenzaA__ADD25271

SEQ ID NO: 146251 - RNA, 1410 nt, Artificial Sequence; identical to SEQ ID NO: 144786
  derived and/or modified CDS sequence (opt3) from neuraminidase__InfluenzaA__ADD25274

SEQ ID NO: 146252 - RNA, 1410 nt, Artificial Sequence; identical to SEQ ID NO: 144786
  derived and/or modified CDS sequence (opt3) from neuraminidase__InfluenzaA__ADD25276

SEQ ID NO: 146253 - RNA, 1410 nt, Artificial Sequence
  derived and/or modified CDS sequence (opt3) from neuraminidase__InfluenzaA__ADD25278
augaaccccaaucagaagaucauuaccauaggcagcgugugcaugacaaucgggauggccaaccugauucuccaaaucggaaauauuaucuccauauggaucucuagaucaauucagcuugguaaccagaaucagaucgagacuuguaaccaaaguauuaucacguacgaaaauaacaccugggucaaucagacauauguuaacauaagcaauacuaacuucgcugcaggccaguccgugguaucugugaaacuggccggaaauucgucauugugcccugucagcgggugggcgauuuacaguaaggacaacuccaucaggauuggcucuaaaggugauguguuuguuauccgggagccauucaucagcuguuccccguuagaaugccgcaccuuuuuccugacacagggggcucuacucaaugacaagcacucaaacggaaccauuaaagaucgaagucccuaucguacucugaugagcuguccuauaggcgaggugccaucucccuacaacuccagauuugaaucagucgccuggagcgcaagugccugccaugacggcaucaauuggcuuacaauugggaucucuggaccugauaacggugcuguggcaguacugaaguauaauggcauaauuaccgacacgaucaaguccuggaggaacaauaucuugcggacucaagagagcgagugugccugcguuaacgggucguguuucaccgugaugacagauggaccaucugacggccaggcuuccuacaaaauuuuucgcaucgaaaaggguaaaauugucaagucaguggagaugaaugcccccaacuaucacuacgaagagugcaguuguuacccugauagcggggagauaacuugcgugugcagagacaauuggcauggauccaacaggccaugggucucuuucaaucagaaccucgaauaucagaucggcuacauuuguagcggcaucuuuggggauaauccgcggcccaacgacaaaaccggaucaugcgguccuguuaguuccaauggcgcgaacggggugaagggauucagcuuuaaguauggcaacgguguauggaucgggcgcacaaaaucuauuucaagucgaaauggcuucgagaugauaugggauccaaacggauggaccggcacggacaauaacuuuagcaucaagcaagacauuguggggaucaaugaaugguccggauacucugguucguucguccagcaccccgagcugacuggccuggauuguauuagaccuugcuucuggguggaacucaucagggggcggccaaaagagaacacaauauggaccagcggauccucaaucaguuuuuguggcguuaauucugacacuguggguuggagcuggcccgauggggcagaguuaccguucacaauugacaaguga

SEQ ID NO: 146254 - RNA, 1410 nt, Artificial Sequence; identical to SEQ ID NO: 144786
  derived and/or modified CDS sequence (opt3) from neuraminidase__InfluenzaA__ADD25280

SEQ ID NO: 146255 - RNA, 1410 nt, Artificial Sequence; identical to SEQ ID NO: 144786
  derived and/or modified CDS sequence (opt3) from neuraminidase__InfluenzaA__ADD25282

SEQ ID NO: 146256 - RNA, 1410 nt, Artificial Sequence; identical to SEQ ID NO: 146074
  derived and/or modified CDS sequence (opt3) from neuraminidase__InfluenzaA__ADD25284

SEQ ID NO: 146257 - RNA, 1410 nt, Artificial Sequence; identical to SEQ ID NO: 144786
  derived and/or modified CDS sequence (opt3) from neuraminidase__InfluenzaA__ADD25287

SEQ ID NO: 146258 - RNA, 1410 nt, Artificial Sequence; identical to SEQ ID NO: 144786
  derived and/or modified CDS sequence (opt3) from neuraminidase__InfluenzaA__ADD25291

SEQ ID NO: 146259 - RNA, 1410 nt, Artificial Sequence; identical to SEQ ID NO: 146074
  derived and/or modified CDS sequence (opt3) from neuraminidase__InfluenzaA__ADD25293

SEQ ID NO: 146260 - RNA, 1410 nt, Artificial Sequence; identical to SEQ ID NO: 144786
  derived and/or modified CDS sequence (opt3) from neuraminidase__InfluenzaA__ADD25300

SEQ ID NO: 146261 - RNA, 1410 nt, Artificial Sequence
  derived and/or modified CDS sequence (opt3) from neuraminidase__InfluenzaA__ADD25304
augaaccccaaucagaagaucauuaccauaggcagcgugugcaugacaaucgggauggccaaccugauucuccaaaucggaaauauugucuccaucuggauaucucacucaauccagcuugguaaccagaaucagauugagacuuguaaccaaaguguuaucacguacgaaaauaacaccugggugaaucagacauauguaaacauuagcaauacuaacuucgcugcaggccaguccguggucucugugaaacuggccggaaauucgucauugugcccuguuagcggaugggcgaucuacaguaaggacaacuccauaagaauuggcucuaaaggugauguguuugucaucagggagccauucauuagcuguuccccguuagaaugccggaccuuuuuccugacacagggggcucuacucaaugacaagcauucaaacggaaccaucaaagaucgcagucccuaucgaacucugaugagcuguccuaucggcgaggugccaucucccuacaacucccguuuugaaucaguagccuggagcgcaagugccugccacgacggcauuaauuggcuuacaauagggaucucuggaccugauaacggugcuguugcagugcugaaguauaauggcauuaucaccgacacgauaaaguccuggagaaacaauauuuugaggacucaagagagcgagugugccugcgucaacgggucguguuucaccgugaugacagauggaccaucugacggccaggcuuccuacaaaaucuuucggaucgaaaaggguaaaauugugaagucagucgagaugaaugcccccaacuaucauuacgaagagugcaguuguuacccugauagcuccgagaucacuugcguuugccgcgacaauuggcacgggucuaacagaccaugggugagcuucaaucagaaccucgaauaucagauuggauacauauguucaggcaucuuuggcgauaauccgaggcccaacgacaaaaccgggaguugcggaccuguauccagcaauggugcgaacggcgugaagggguucucuuuuaaguauggaaacggcgucuggauuggucggacaaaaucaaucaguagccgcaauggguucgagaugaucugggauccaaacggcuggaccggaacggacaauaacuuuuccauuaagcaagacauagugggcaucaaugaauggucuggguacucggggagcuucguucagcaucccgagcugacuggucuggauuguauucgaccuugcuucuggguggaacucaucagaggcaggccaaaagagaacacaauuuggaccuccgggucaaguaucucuuuuuguggagucaauagcgacacugugggcugguccuggcccgauggugcagaguuaccguucacaauagacaaguga

SEQ ID NO: 146262 - RNA, 1410 nt, Artificial Sequence
  derived and/or modified CDS sequence (opt3) from neuraminidase__InfluenzaA__ADD25306
augaaccccaaucagaagaucauuaccauaggcagcgugugcaugacaaucgggauggccaaccugauucuccaaaucggaaauauuaucuccauauggaucucuagaucaauucagcuugguaaccagaaucagaucgagacuuguaaccaaaguauuaucacguacgaaaauaacaccugggucaaucagacauauguuaacauaagcaauacuaacuucgcugcaggccaguccgugguaucugugaaacuggccggaaauucgucauugugcccugucagcgggugggcgauuuacaguaaggacaacuccaucaggauuggcucuaaaggugauguguuuguuauccgggagccauucaucagcuguuccccguuagaaugccgcaccuuuuuccugacacagggggcucuacucaaugacaagcacucaaacggaaccauuaaagaucgaagucccuaucguacucugaugagcuguccuauaggcgaggugccaucucccuacaacuccagauuugaaucagucgccuggagcgcaagugccugccaugacggcaucaauuggcuuacaauugggaucucuggaccugauaacggugcuguggcaguacugaaguauaauggcauaauuaccgacacgaucaaguccuggaggaacaauaucuugcggacucaagagagcgagugugccugcguuaacgggucguguuucaccgugaugacagaugaaccaucugacggacaggcuuccuacaaaauuuuucgcaucgagaagggcaaaauugucaagucaguggaaaugaaugcccccaacuaucacuacgaggagugcaguuguuacccugauagcggugaaauaacuugcgugugcagagacaauuggcauggguccaacaggccaugggucucuuucaaucagaaccucgaguaucagaucggauacauuuguagcggcaucuuuggcgauaauccgcggcccaacgacaaaaccgggucaugcggaccuguuaguuccaauggugcgaacggcgugaagggguucagcuuuaaguauggaaacggcguauggaucggucgcacaaaaucuauuucaagucgaaauggguucgaaaugauaugggauccaaacggcuggaccggaacggacaauaacuuuagcaucaagcaagacauugugggcaucaaugagugguccggguacucuggaucguucguccagcaccccgaacugacuggucuggauuguauuagaccuugcuucuggguggagcucaucaggggccggccaaaagagaacacaauauggaccagcggguccucaaucaguuuuuguggaguuaauucugacacugugggcuggagcuggcccgauggugcagaauuaccguucacaauugacaaguga

SEQ ID NO: 146263 - RNA, 1410 nt, Artificial Sequence; identical to SEQ ID NO: 144786
  derived and/or modified CDS sequence (opt3) from neuraminidase__InfluenzaA__ADD25308

SEQ ID NO: 146264 - RNA, 1410 nt, Artificial Sequence; identical to SEQ ID NO: 144786
  derived and/or modified CDS sequence (opt3) from neuraminidase__InfluenzaA__ADD25310

SEQ ID NO: 146265 - RNA, 1410 nt, Artificial Sequence; identical to SEQ ID NO: 144786
  derived and/or modified CDS sequence (opt3) from neuraminidase__InfluenzaA__ADD25312

SEQ ID NO: 146266 - RNA, 1410 nt, Artificial Sequence; identical to SEQ ID NO: 144786
  derived and/or modified CDS sequence (opt3) from neuraminidase__InfluenzaA__ADD25314

SEQ ID NO: 146267 - RNA, 1410 nt, Artificial Sequence; identical to SEQ ID NO: 144786
  derived and/or modified CDS sequence (opt3) from neuraminidase__InfluenzaA__ADD25316

SEQ ID NO: 146268 - RNA, 1410 nt, Artificial Sequence; identical to SEQ ID NO: 144786
  derived and/or modified CDS sequence (opt3) from neuraminidase__InfluenzaA__ADD29799

SEQ ID NO: 146269 - RNA, 1410 nt, Artificial Sequence; identical to SEQ ID NO: 144786
  derived and/or modified CDS sequence (opt3) from neuraminidase__InfluenzaA__ADD29800

SEQ ID NO: 146270 - RNA, 1410 nt, Artificial Sequence; identical to SEQ ID NO: 144786
  derived and/or modified CDS sequence (opt3) from neuraminidase__InfluenzaA__ADD29801

SEQ ID NO: 146271 - RNA, 1410 nt, Artificial Sequence; identical to SEQ ID NO: 144786
  derived and/or modified CDS sequence (opt3) from neuraminidase__InfluenzaA__ADD29802

SEQ ID NO: 146272 - RNA, 1410 nt, Artificial Sequence; identical to SEQ ID NO: 144786
  derived and/or modified CDS sequence (opt3) from neuraminidase__InfluenzaA__ADD29803

SEQ ID NO: 146273 - RNA, 1410 nt, Artificial Sequence; identical to SEQ ID NO: 144786
  derived and/or modified CDS sequence (opt3) from neuraminidase__InfluenzaA__ADD29804

SEQ ID NO: 146274 - RNA, 1410 nt, Artificial Sequence; identical to SEQ ID NO: 144786
  derived and/or modified CDS sequence (opt3) from neuraminidase__InfluenzaA__ADD29805

SEQ ID NO: 146275 - RNA, 1410 nt, Artificial Sequence; identical to SEQ ID NO: 144786
  derived and/or modified CDS sequence (opt3) from neuraminidase__InfluenzaA__ADD29806

SEQ ID NO: 146276 - RNA, 1410 nt, Artificial Sequence; identical to SEQ ID NO: 144786
  derived and/or modified CDS sequence (opt3) from neuraminidase__InfluenzaA__ADD29807

SEQ ID NO: 146277 - RNA, 1410 nt, Artificial Sequence; identical to SEQ ID NO: 144786
  derived and/or modified CDS sequence (opt3) from neuraminidase__InfluenzaA__ADD29808

SEQ ID NO: 146278 - RNA, 1410 nt, Artificial Sequence; identical to SEQ ID NO: 144786
  derived and/or modified CDS sequence (opt3) from neuraminidase__InfluenzaA__ADD52538

SEQ ID NO: 146279 - RNA, 1410 nt, Artificial Sequence; identical to SEQ ID NO: 146009
  derived and/or modified CDS sequence (opt3) from neuraminidase__InfluenzaA__ADD74353

SEQ ID NO: 146280 - RNA, 1410 nt, Artificial Sequence; identical to SEQ ID NO: 144786
  derived and/or modified CDS sequence (opt3) from neuraminidase__InfluenzaA__ADD74373

SEQ ID NO: 146281 - RNA, 1410 nt, Artificial Sequence; identical to SEQ ID NO: 144786
  derived and/or modified CDS sequence (opt3) from neuraminidase__InfluenzaA__ADD74383

SEQ ID NO: 146282 - RNA, 1410 nt, Artificial Sequence; identical to SEQ ID NO: 144786
  derived and/or modified CDS sequence (opt3) from neuraminidase__InfluenzaA__ADD74401

SEQ ID NO: 146283 - RNA, 1410 nt, Artificial Sequence
  derived and/or modified CDS sequence (opt3) from neuraminidase__InfluenzaA__ADD74411
augaaccccaaucagaagaucauuaccauaggcagcgugugcaugacaaucgggauggccaaccugauucuccaaaucggaaauauuaucuccauauggaucucucacucaauucagcuugguaaccagaaucagaucgagacuuguaaccaaagugucauuacguacgaaaauaacaccuggguuaaucagacauaugugaacaucagcaauacuaacguagcugcaggccaguccguggucucugugaaacuggccggaaauucgucauugugcccuguuagcgggugggcgauauacaguaaggacaacuccauuagaaucggcucuaaaggugauguguucgucauuagggagccauuuaucagcuguuccccguuagaaugccggaccuucuuucugacacagggggcucuacucaaugacaagcauucaaacggaaccaucaaagaucgcagucccuaucgaacucugaugagcuguccuauuggcgaggugccaucucccuacaacucccguuucgaaucaguagccuggagcgcaagugccugccacgacggcauaaauuggcuuacaaucgggauuucuggaccugauaacggugcuguugcagugcugaaguauaauggcaucauaaccgacacgauuaaguccuggagaaacaauaucuugaggacucaagagagcgagugugccugcgucaacgggucguguuuuaccgugaugacagauggaccaucugacggccaggcuuccuacaaaaucuuccggauugaaaaggguaaaaucgugaagucagucgagaugaaugcccccaacuaucauuacgaagagugcaguuguuacccugauagcuccgagauuacuugcguuugccgcgacaauuggcacgggucuaacagaccaugggugagcuuuaaucagaaccucgaauaucagauaggauacaucuguucaggcauuuucggcgauaauccgaggcccaacgacaaaaccgggaguugcggaccuguauccagcaauggugcgaacggcgugaagggguuuucuuucaaguauggaucaggcgucuggaucggucggacaaaaaguaucagcucccgcucuggguuugagaugauuugggauccaaacggcuggaccggaacggacaauaacuucucgauaaagcaagacaucgugggcauuaaugaauggagcggguacuccggaucauuuguucagcaucccgagcugacuggucuggauuguauccgaccuugcuucuggguggaacucauuagaggcaggccaaaagagaacacaaucuggaccagugggucuagcauauccuucuguggagucaauucagacacugugggcuggagcuggcccgauggugcagaguuaccguuuacaaucgacaaguga

SEQ ID NO: 146284 - RNA, 1410 nt, Artificial Sequence; identical to SEQ ID NO: 144786
  derived and/or modified CDS sequence (opt3) from neuraminidase__InfluenzaA__ADD74421

SEQ ID NO: 146285 - RNA, 1410 nt, Artificial Sequence; identical to SEQ ID NO: 144786
  derived and/or modified CDS sequence (opt3) from neuraminidase__InfluenzaA__ADD74431

SEQ ID NO: 146286 - RNA, 1410 nt, Artificial Sequence
  derived and/or modified CDS sequence (opt3) from neuraminidase__InfluenzaA__ADD74441
augaaccccaaucagaagaucauuaccauaggcagcgugugcaugacaaucgggauggccaaccugauucuccaaaucggaaauauuaucuccauauggaucucucacucaauucagcuugguaaccagaaucagaucgagacuuguaaccaaagugucauuacguacgaaaauaacaccuggguuaaucagacauaugugaacaucagcaauacuaacuucgcugcaggccaguccguagugucugucaaacuggccggaaauucgucauugugcccugugagcggaugggcgauauacaguaaggacaacuccauuagaaucggcucuaaaggugauguuuuugugauuagggagccauucaucagcuguuccccguuagaaugccggaccuuuuuccugacacagggggcucuacucaaugacaagcauucaaacggaaccaucaaagaucgcagucccuaucgaacucugaugagcuguccuauuggcgaggucccaucucccuacaacucccguuuugaaucaguggccuggagcgcaagugccugccacgacggcauaaauuggcuuacaaucgggauuucuggaccugauaacggugcuguagcaguucugaaguauaauggcaucauaaccgacacgauuaaguccuggagaaacaauaucuugaggacucaagagagcgagugugccugcgugaacgggucguguuucaccgucaugacagauggaccaucugacggccaggcuuccuacaaaaucuuucggauugaaaaggguaaaaucgugaagucaguggagaugaaugcccccaacuaucauuacgaagagugcaguuguuacccugauagcuccgagauuacuugcgucugccgcgacaauuggcacgggucuaacagaccauggguuagcuucaaucagaaccucgaauaucagauaggauacaucuguucaggcauuuuuggcgauaauccgaggcccaacgacaaaaccgggaguugcggaccuguguccagcaauggugcgaacggcguaaagggguucucuuuuaaguauggaaacggcguguggaucggucggacaaaaucaaucaguagccgcaauggguucgagaugauuugggauccaaacggcuggaccggaacggacaauauauuuuccaucaagcaagacauugucggcaucaacgaauggucuggguacucggggagcuucgugcagcaucccgagcugacuggucuggauuguauucgaccuugcuucuggguugaacucaucagaggcaggccaaaagagaauacaauauggaccuccgggucaaguaucucuuuuuguggagugaacagcgacacugucggcugguccuggcccgauggugcagaguuaccguucacaauugacaaguga

SEQ ID NO: 146287 - RNA, 1410 nt, Artificial Sequence; identical to SEQ ID NO: 144786
  derived and/or modified CDS sequence (opt3) from neuraminidase__InfluenzaA__ADD74451

SEQ ID NO: 146288 - RNA, 1410 nt, Artificial Sequence; identical to SEQ ID NO: 144786
  derived and/or modified CDS sequence (opt3) from neuraminidase__InfluenzaA__ADD74461

SEQ ID NO: 146289 - RNA, 1410 nt, Artificial Sequence; identical to SEQ ID NO: 144786
  derived and/or modified CDS sequence (opt3) from neuraminidase__InfluenzaA__ADD74471

SEQ ID NO: 146290 - RNA, 1410 nt, Artificial Sequence; identical to SEQ ID NO: 144786
  derived and/or modified CDS sequence (opt3) from neuraminidase__InfluenzaA__ADD74481

SEQ ID NO: 146291 - RNA, 1410 nt, Artificial Sequence; identical to SEQ ID NO: 145803
  derived and/or modified CDS sequence (opt3) from neuraminidase__InfluenzaA__ADD74491

SEQ ID NO: 146292 - RNA, 1410 nt, Artificial Sequence; identical to SEQ ID NO: 144786
  derived and/or modified CDS sequence (opt3) from neuraminidase__InfluenzaA__ADD74501

SEQ ID NO: 146293 - RNA, 1410 nt, Artificial Sequence; identical to SEQ ID NO: 144786
  derived and/or modified CDS sequence (opt3) from neuraminidase__InfluenzaA__ADD74511

SEQ ID NO: 146294 - RNA, 1410 nt, Artificial Sequence; identical to SEQ ID NO: 145804
  derived and/or modified CDS sequence (opt3) from neuraminidase__InfluenzaA__ADD74521

SEQ ID NO: 146295 - RNA, 1410 nt, Artificial Sequence; identical to SEQ ID NO: 144786
  derived and/or modified CDS sequence (opt3) from neuraminidase__InfluenzaA__ADD74531

SEQ ID NO: 146296 - RNA, 1410 nt, Artificial Sequence
  derived and/or modified CDS sequence (opt3) from neuraminidase__InfluenzaA__ADD74551
augaaccccaaucagaagaucauuaccauaggcagcgugugcaugacaaucgggauggccaaccugauucuccaaaucggaaauauuaucuccauauggaucucucacucaauucagcuugguaaccagaaucagaucgagacuuguaaccaaagugucauuacguacgaaaauaacaccuggguuaaucagacauaugugaacaucagcaauacuaacuucgcugcaggccaguccguagugucugucaaacuggccggaaauucgucauugugcccugugagcggaugggcgauauacaguaaggacaacuccguuagaauuggcucuaaaggugauguguuugucaucagggagccauucauuagcuguuccccguuagaaugccggaccuuuuuccugacacagggggcucuacucaaugacaagcauucaaacggaaccaucaaagaucgcagucccuaucgaacucugaugagcuguccuaucggcgaggugccaucucccuacaacucccguuuugaaucaguagccuggagcgcaagugccugccacgacggcauuaauuggcuuacaauagggaucucuggaccugauuauggugcuguugcagugcugaaguacaacggcauuaucaccgacacgauaaaguccuggagaaauaacauuuugaggacucaagagagcgagugugccugcgucaaugggucguguuucaccgugaugacagauggaccaucugacggccaggcuuccuauaaaaucuuucggaucgaaaaggguaaaauugugaagucagucgagaugaacgcccccaauuaccauuacgaagagugcaguuguuauccugauagcuccgagaucacuugcguuugccgcgacaacuggcacgggucuaauagaccaugggugagcuucaaccagaaucucgaauaccagauuggauauauauguucaggcaucuuuggcgauaacccgaggcccaaugacaaaaccgggaguugcggaccuguauccagcaacggugcgaauggcgugaagggguucucuuuuaaguacggaaacggcgucuggauuggucggacaaaaucaaucaguagccgcaacggguucgagaugaucugggauccaaauggcuggaccggaacggacaacaauuuuuccauuaagcaagacauagugggcaucaacgaauggucuggguauucggggagcuucguucagcaucccgagcugacuggucuggauuguauucgaccuugcuucuggguggaacucaucagaggcaggccaaaagagaauacaauuuggaccuccgggucaaguaucucuuuuuguggagucaacagcgacacugugggcugguccuggcccgauggugcagaguuaccguucacaauagacaaguga

SEQ ID NO: 146297 - RNA, 1410 nt, Artificial Sequence; identical to SEQ ID NO: 144786
  derived and/or modified CDS sequence (opt3) from neuraminidase__InfluenzaA__ADD74561

SEQ ID NO: 146298 - RNA, 1410 nt, Artificial Sequence; identical to SEQ ID NO: 144786
  derived and/or modified CDS sequence (opt3) from neuraminidase__InfluenzaA__ADD74571

SEQ ID NO: 146299 - RNA, 1410 nt, Artificial Sequence
  derived and/or modified CDS sequence (opt3) from neuraminidase__InfluenzaA__ADD74581
augaaccccaaucagaagaucauuaccauaggcagcgugugcaugacaaucgggauggccaaccugauucuccaaaucggaaauauuaucuccauauggaucucucacucaauucagcuugguaaccagaaucagaucgagacuuguaaccaaagugucauuacguacgaaaauaacaccuggguuaaucagacauaugugaacaucagcaauacuaacuucgcugcaggccaguccguagugucugucaaacuggccggaaauucgucauugugcccugugagcggaugggcgauauacaguaaggacaacuccauuagaaucggcucuaaaggugauguuuuugugauuagggagccauucaucagcuguuccccguuagaaugccggaccuuuuuccugacacagggggcucuacucaaugacaagcauucaaacggaaccaucaaagaucgcagucccuaucgaacucugaugagcuguccuauuggcgaggucccaucucccuacaacucccguuuugaaucaguggccuggagcgcaagugccugccacgacggcauaaauuggcuuacaaucgggauuucuggaccugauaacggugcuguagcaguucugaaguauaauggcaucauaaccgacacgauuaaguccuggagaaacaauaucuugaggacucaagagagcgagugugccugcgugaacgggucguguuucaccgucaugacagauggaccaucugacggccaggcuuccuacaaaaucuuucggauugaaaaggguaaaaucgugaagucaguggagaugaaugcccccaacuaucauuacgaagagugcaguuguuacccugauagcuccgagauuacuugcgucugccgcgacaauuggcacgggucuaacagaccauggguuagcuucaaucagaaccucgaauaucagauaggauacaucuguucaggcauuuuuggcgauaauccgaggcccaacgacaaaaccgggaguugcggaccuguguccagcaauggugcgaacggcguaaagggguucucuuuuaaguauggaaacggcguguggaucggucggacaaaaucaaucaguagccgcaauggguucgagaugauuugggauccaaacggcuggaccggaacggacaauaacuuuuccauaaagcaagacaucgucggcauuaaugaauggucuggguacucggggagcuucgugcagcaucccgagcugacuggucuggauuguauccgaccuugcuucuggguugaacucauuagaggcaggccaaaagagaacacaaucuggaccuccgggucaaguauaucuuuuuguggagugaauagcgacgcagucggcugguccuggcccgauggugccgaguuaccguucacuaucgacaaguga

SEQ ID NO: 146300 - RNA, 1410 nt, Artificial Sequence; identical to SEQ ID NO: 144786
  derived and/or modified CDS sequence (opt3) from neuraminidase__InfluenzaA__ADD74591

SEQ ID NO: 146301 - RNA, 1410 nt, Artificial Sequence; identical to SEQ ID NO: 144786
  derived and/or modified CDS sequence (opt3) from neuraminidase__InfluenzaA__ADD74601

SEQ ID NO: 146302 - RNA, 1410 nt, Artificial Sequence
  derived and/or modified CDS sequence (opt3) from neuraminidase__InfluenzaA__ADD74611
augaaccccaaucagaagaucauuaccauaggcagcgugugcaugacaaucgggauggccaaccugauucuccaaaucggaaauauuaucuccauauggaucucucacucaauucagcuugguaaccagaaucagaucgagacuuguaaccaaagugucauuacguacgaaaauaacaccuggguuaaucagacauaugugaacaucagcaauacuaacuucgcugcaggccaguccguagugucugucaaacuggccggaaauucgucauugugcccugugagcggaugggcgauauacaguaaggacaacuccauuagaaucggcucuaaaggugauguuuuugugauuagggagccauucaucagcuguuccccguuagaaugccggaccuuuuuccugacacagggggcucuacucaaugacaagcauucaaacggaaccaucaaagaucgcagucccuaucgaacucugaugagcuguccuauuggcgaggucccaucucccuacaacucccguuuugaaucaguggccuggagcgcaagugccugccacgacggcauaaauuggcuuacaaucgggauuucuggaccugauaacggugcuguagcaguucugaaguauaauggcaucauaaccgacacgauuaaguccuggagaaacaauaucuugaggacucaagagagcgagugugccugcgugaacgggucguguuucaccgucaugacagauggaccaucugacggccaggcuuccuacaaaaucuuucggauugaaaaggguaaaaucgugaagucaguggagaugaaugcccccaacuaucauuacgaagagugcaguuguuacccugauagcuccgagauuacuugcgucugccgcgacaauuggcacgggucuaacagaccauggguuagcuucaaucagaaccucgaauaucagauaggauacaucuguucaggcauuuuuggcgauaauccgaggcccaacgacaaaaccgggaguugcggaccuguguccagcaauggugcgaacggcaucaagggguucucuuuuaaguauggaaacggcguauggaucggucggacaaaaucaauuaguagccgcaauggguucgagaugauaugggauccaaacggcuggaccggaacggacaauaacuuuuccaucaagcaagacauugugggcaucaaugaauggucuggguacucggggagcuucguccagcaucccgagcugacuggucuggauuguauucgaccuugcuucuggguggaacucaucagaggcaggccaaaagagaacacaauauggaccuccgggucaaguaucucuuuuuguggaguuaauagcgacacugugggcugguccuggcccgauggugcagaguuaccguucacaauugacaaguga

SEQ ID NO: 146303 - RNA, 1410 nt, Artificial Sequence; identical to SEQ ID NO: 144786
  derived and/or modified CDS sequence (opt3) from neuraminidase__InfluenzaA__ADD74621

SEQ ID NO: 146304 - RNA, 1410 nt, Artificial Sequence; identical to SEQ ID NO: 144786
  derived and/or modified CDS sequence (opt3) from neuraminidase__InfluenzaA__ADD74631

SEQ ID NO: 146305 - RNA, 1410 nt, Artificial Sequence; identical to SEQ ID NO: 144786
  derived and/or modified CDS sequence (opt3) from neuraminidase__InfluenzaA__ADD74641

SEQ ID NO: 146306 - RNA, 1410 nt, Artificial Sequence; identical to SEQ ID NO: 144786
  derived and/or modified CDS sequence (opt3) from neuraminidase__InfluenzaA__ADD74651

SEQ ID NO: 146307 - RNA, 1410 nt, Artificial Sequence; identical to SEQ ID NO: 146137
  derived and/or modified CDS sequence (opt3) from neuraminidase__InfluenzaA__ADD74661

SEQ ID NO: 146308 - RNA, 1410 nt, Artificial Sequence; identical to SEQ ID NO: 144786
  derived and/or modified CDS sequence (opt3) from neuraminidase__InfluenzaA__ADD74671

SEQ ID NO: 146309 - RNA, 1410 nt, Artificial Sequence; identical to SEQ ID NO: 144786
  derived and/or modified CDS sequence (opt3) from neuraminidase__InfluenzaA__ADD74681

SEQ ID NO: 146310 - RNA, 1410 nt, Artificial Sequence
  derived and/or modified CDS sequence (opt3) from neuraminidase__InfluenzaA__ADD74691
augaaccccaaucagaagaucauuaccauaggcagcgugugcaugacaaucgggauggccaaccugauucuccaaaucggaaauauuaucuccauauggaucugucacucuauucagcuugguaaccagaaucagaucgagacuugcaaccaaucagucauuacguacgaaaauaacaccuggguuaaucagacauaugugaacaucaguaauacuaacuucgcugcaggccagagcguaguguccgucaaacuggccggaaauucuucguuguguccugugucagggugggcgauauacagcaaggacaacaguauuagaaucggcuccaaaggugauguuuuugugauuagggagccauucaucucuugcagcccguuagaaugucggaccuuuuuccugacacagggggcucuacucaaugacaagcauuccaacggaaccaucaaagaucgcucacccuaucgaacucugaugaguugcccuauuggcgaggucccaagccccuacaacucucguuuugaauccguggccuggucagcaagcgccugucacgacggcauaaauuggcuuacaaucgggauuaguggaccugauaacggugcuguagcaguucugaaguauaauggcaucauaaccgacacgauuaagucuuggagaaacaauaucuugaggacucaagaguccgagugcgccugugugaacgggagcugcuucaccgucaugacagauggaccaucggacggccaggcuucuuacaaaaucuuucggauugaaaaggguaaaaucgugaaguccguggagaugaaugcccccaacuaucauuacgaagaguguucaugcuacccugauaguagcgagauuacuugcgucugucgcgacaauuggcacggguccaacagaccauggguuucuuucaaucagaaccucgaauaucagauaggauacaucugcagcggcauuuuuggcgauaauccgaggcccaacgacaaaaccgggucauguggaccugugaguuccaauggugcgaacggcguaaagggguucagcuuuaaguauggaaacggcguguggaucggucggacaaaaucuaucucaagucgcaauggguucgagaugauuugggauccaaacggcuggaccggaacggacaauaacuuuagcauaaagcaagacaucgucggcauuaaugaaugguccggguacucuggaucguucgugcagcaucccgagcugacuggucuggauugcauccgaccuuguuucuggguugaacucauuagaggcaggccaaaagagaacacaaucuggaccagcggguccucaauaaguuuuugcggagucaauucugacacugugggcuggagcuggcccgauggugcagaguuaccguucacaaucgacaaguga

SEQ ID NO: 146311 - RNA, 1410 nt, Artificial Sequence; identical to SEQ ID NO: 144786
  derived and/or modified CDS sequence (opt3) from neuraminidase__InfluenzaA__ADD74701

SEQ ID NO: 146312 - RNA, 1410 nt, Artificial Sequence; identical to SEQ ID NO: 144786
  derived and/or modified CDS sequence (opt3) from neuraminidase__InfluenzaA__ADD74711

SEQ ID NO: 146313 - RNA, 1410 nt, Artificial Sequence; identical to SEQ ID NO: 144786
  derived and/or modified CDS sequence (opt3) from neuraminidase__InfluenzaA__ADD74721

SEQ ID NO: 146314 - RNA, 1410 nt, Artificial Sequence; identical to SEQ ID NO: 144786
  derived and/or modified CDS sequence (opt3) from neuraminidase__InfluenzaA__ADD74731

SEQ ID NO: 146315 - RNA, 1410 nt, Artificial Sequence
  derived and/or modified CDS sequence (opt3) from neuraminidase__InfluenzaA__ADD74741
augaaccccaaucagaagaucauuaccauaggcagcgugugcaucacaauugggauggccaaccugauccuccaaauuggaaauaucauauccaucuggauuucucacucaauccagcuugguaaccagaaucagauugagacuuguaaccaaagugucaucacguacgaaaauaacaccuggguuaaucagacauaugugaacauaagcaauacuaacuucgcugcaggccaguccguagugucugucaaacuggccgggucgagcucauugugcccugugaguggaugggcgauuuacuccaaggacaauucuaucagaauuggcagcaaaggugauguuuuugugaucagggagccauucaucuccuguucaccguuagaaugccggaccuuuuuccugacacagggggcucuacucaacgacaagcauaguaauggaaccauuaaagaucgcagccccuaucgaacucugaugucuuguccuauaggcgaggucccaucccccuacaacucacguuuugaaagcguggccuggagugcaucugccugccacgacggcaucaacuggcuuacaauugggaucuccggaccugauaauggugcuguagcaguucugaaguauaacggcauaauuaccgacacgaucaagagcuggagaaauaacaucuugaggacucaagagucggagugugccugcgugaaugggucuuguuucaccgucaugacagauggaccauccgacggccaggcuucauacaaaauuuuucggaucgaaaaggguaaaauugugaagaguguggagaugaacgcccccaauuaucauuacgaagagugcagcuguuacccugauuccucugagauaacuugcgucugccgcgacaacuggcacgggagcaauagaccauggguuucauucaaccagaaucucgaauaucagaucggauacauuuguaguggcaucuuuggcgauaacccgaggcccaaugacaaaaagggguccugcggaccugugagcucuaacggugcgaauggcguaaagggguucucauuuaaauauggaaacggcguguggaucggucggaccaagaguauuagcucccgcaacggguucgagaugauaugggauccaaauggcuggacaggaaccgacaacaauuuuucuaucaaacaagacauugucggcaucaacgaauggucgggguacagcggauccuucgugcagcaucccgagcugacgggucuggauuguauucgaccuugcuucuggguugaacucaucagaggcaggccaaaggagaauacuauauggacaucagggaguucuaucagcuuuuguggagugaacuccgacaccgucggcuggucauggcccgauggugcagaguuaccguucacuauugacaaauga

SEQ ID NO: 146316 - RNA, 1410 nt, Artificial Sequence
  derived and/or modified CDS sequence (opt3) from neuraminidase__InfluenzaA__ADD74751
augaaccccaaucagaagaucauuaccauaggcagcgugugcaugacaaucgggauggccaaccugauucuccaaaucggaaauauuaucuccauauggaucucucacucaauucagcuugguaacaaaaaucagaucgagacuuguaaccagagugucauuacguacgaaaauaacaccuggguuaaucaaacauaugugaacaucagcaauacuaacuucgcugcaggccaguccguagugucugucaagcuggccggaaauucgucauugugcccugugagcggaugggcgauauacaguaaagacaacuccauuagaaucggcucuaagggugauguuuuugugauuagggagccauucaucagcuguuccccguuagaaugccggaccuuuuuccugacacagggggcucuacucaaugacaaacauucaaacggaaccaucaaggaucgcagucccuaucgaacucugaugagcuguccuauuggcgaggucccaucucccuacaacucccguuuugaaucaguggccuggagcgcaagugccugccacgacggcauaaauuggcuuacaaucgggauuucuggaccugauaacggugcuguagcaguucugaaguauaauggcaucauaaccgacacgauuaaauccuggagaaacaauaucuugaggacucaggagagcgagugugccugcgugaacgggucguguuucaccgucaugacagauggaccaucugacggccaggcuuccuacaagaucuuucggauugaaaaagguaagaucgugaaaucaguggagaugaaugcccccaacuaucauuacgaagagugcaguuguuacccugauagcuccgagauuacuugcgucugccgcgacaauuggcacgggucuaacagaccauggguuagcuucaaucaaaaccucaaguaucagauaggauacaucuguucaggcauuuuuggcgauaauccgaggcccaacgacaagaaagggaguugcggaccuguguccagcaauggugcgaacggcguaaagggguucucuuuuaaauauggaaacggcguguggaucggucggaccaagucaaucaguagccgcaauggguucgaaaugauuugggauccaaacggcuggacaggaaccgacaauaacuuuuccauaaaacaggacaucgucggcaugaaugaguggucuggguacucggggagcuucgugcaacaucccgaacugacgggucuggauuguauucgaccuugcuucuggguugagcucaucagaggcaggccaaaggaaaacacuauuuggacauccgggucaaguaucucuuuuuguggagugaauagcgacaccgucggcugguccuggcccgauggugcagaguuaccguucacuauagacaaauga

SEQ ID NO: 146317 - RNA, 1410 nt, Artificial Sequence
  derived and/or modified CDS sequence (opt3) from neuraminidase__InfluenzaA__ADD74761
augaaccccaaucagaagaucauuaccauaggcagcgugugcaugacaaucgggauggccaaccugauucuccaaaucggaaauauuaucuccauauggaucucucacucaauucagcuugguaaccagaaucagaucgagacuuguaaccaaagugucauuacguacgaaaauaacaccuggguuaaucagacauaugugaacaucagcaauacuaacuucgcugcaggccaguccguagugucugucaaacuggccggaaauucgucauugugcccugugagcggaugggcgauauacaguaaggacaacuccauuagaaucggcucuaaaggugauguuuuugugauuagggagccauucaucagcuguuccccguuagaaugccggaccuuuuuccugacacagggggcucuacucaaugacaagcauucaaacggaaccaucaaagaucgcagucccuaucgaacucugaugagcuguccuauuggcgaggucccaucucccuacaacucccguuuugaaucaguggccuggagcgcaagugccugccacgacggcauaaauuggcuuacaaucgggauuucuggaccugauaacggugcuguagcaguucugaaguauaauggcaucauaaccgacacgauuaaguccuggagaaacaauaucuugaggacucaagagagcgagugugccugcgugaacgggucguguuucaccgucaugacagauggaccaucugacggccaggcuuccuacaaaaucuuucggauugaaaaggguaaaaucgugaagucaguggagaugaaugcccccaacuaucauuacgaagagugcaguuguuacccugauagcuccgagauuacuugcgucugccgcgacaauuggcacgggucuaacagaccauggguuagcuucaaucagaaccucgaauaucagauaggauacaucuguucaggcauuuuuggcgauaauccgaggcccaacgacaaaaccgggaguugcggaccuguguccagcaauggugcgaacggcguaaagggguucucuuuuaaguauggaaacggcguguggaucggucggacaaaaucaaucaguagccgcaauggguucgagaugauuugggauccaaacggcuggaccggaacggacaauaacuuuuccauaaagcaagacaucgucggcauuaaugaauggucuggguacucggggagcuucgugcagcaucccgagcugacuggucuggauuguauccgaccuugcuucuggguugaacucauuagaggcaggccaaaagagaacacaaucuggaccuccgggucaaguauaucuuuuuguggaaucaauagcgacacugugggcugguccuggcccgauggugcagaguuaccguucacaauugacaaguga

SEQ ID NO: 146318 - RNA, 1410 nt, Artificial Sequence; identical to SEQ ID NO: 144786
  derived and/or modified CDS sequence (opt3) from neuraminidase__InfluenzaA__ADD74791

SEQ ID NO: 146319 - RNA, 1410 nt, Artificial Sequence; identical to SEQ ID NO: 145369
  derived and/or modified CDS sequence (opt3) from neuraminidase__InfluenzaA__ADD74811

SEQ ID NO: 146320 - RNA, 1410 nt, Artificial Sequence; identical to SEQ ID NO: 144786
  derived and/or modified CDS sequence (opt3) from neuraminidase__InfluenzaA__ADD74821

SEQ ID NO: 146321 - RNA, 1410 nt, Artificial Sequence
  derived and/or modified CDS sequence (opt3) from neuraminidase__InfluenzaA__ADD74831
augaaccccaaucagaagaucauuaccauaggcagcaucugcaugacaauugggauggccaaccugauccuccaaauuggaaauaucauauccaucuggauuucucacucaauccagcuugguaaccagaaucagauugagacuuguaaccaaagugugaucacguacgaaaauaacaccugggucaaucagacauauguuaacauaagcaauacuaacuucgcugcaggccaguccgugguaucugugaaacuggccggaaauucgucauugugcccugucagcggaugggcgauuuacaguaaggacaacuccaucagaauuggcucuaaaggugauguguuuguuaucagggagccauucaucagcuguuccccguuagaaugccggaccuuuuuccugacacagggggcucuacucaaugacaagcauucaaacggaaccauuaaagaucgcagucccuaucgaacucugaugagcuguccuauaggcgaggugccaucucccuacaacucccguuuugaaucagucgccuggagcgcaagugccugccacgacggcaucaauuggcuuacaauugggaucucuggaccugauaacggugcuguggcaguacugaaguauaauggcauaauuaccgacacgaucaaguccuggagaaacaauaucuugaggacucaagagagcgagugugccugccucaacgggucguguuucaccguuaugacagauggaccaucugacggccaggcuuccuacaaaauuuuucggaucgaaaaggguaaaauugugaagucagucgagaugaaugcccccaacuaucauuacgaagagugcaguuguuacccugauagcuccgagauaacuugcgugugccgcgacaauuggcacgggucuaacagaccaugggugagcuucaaucagaaccuggaauaucagaucggauacauuuguucaggcaucuuuggcgauaauccgaggcccaacgacaaaaccgggaguugcggaccugucuccagcaauggugcgaacggcguuaagggguucucuuuuaaguauggaaacggcguguggaucggucggacaaaaucaauuaguagccgcaauggguucgagaugauaugggauccaaacggcuggaccggaacggacaauaacuuuuccaucaagcaagacauuguaggcaucaaugaauggucuggguacucggggagcuucgugcagcaucccgagcugacuggucucgauuguauucgaccuugcuucugggucgaauuaaucagaggcaggccaaaagagaacacaauauggaccuccgggucaaguaucucuuuuuguggagugaauagcgacacuguuggcugguccuggcccgauggugcagagcugccguucacaauugacaaguga

SEQ ID NO: 146322 - RNA, 1410 nt, Artificial Sequence; identical to SEQ ID NO: 144786
  derived and/or modified CDS sequence (opt3) from neuraminidase__InfluenzaA__ADD74841

SEQ ID NO: 146323 - RNA, 1410 nt, Artificial Sequence; identical to SEQ ID NO: 144786
  derived and/or modified CDS sequence (opt3) from neuraminidase__InfluenzaA__ADD74851

SEQ ID NO: 146324 - RNA, 1410 nt, Artificial Sequence; identical to SEQ ID NO: 145893
  derived and/or modified CDS sequence (opt3) from neuraminidase__InfluenzaA__ADD74861

SEQ ID NO: 146325 - RNA, 1410 nt, Artificial Sequence; identical to SEQ ID NO: 144786
  derived and/or modified CDS sequence (opt3) from neuraminidase__InfluenzaA__ADD74871

SEQ ID NO: 146326 - RNA, 1410 nt, Artificial Sequence; identical to SEQ ID NO: 144786
  derived and/or modified CDS sequence (opt3) from neuraminidase__InfluenzaA__ADD74881

SEQ ID NO: 146327 - RNA, 1410 nt, Artificial Sequence; identical to SEQ ID NO: 144786
  derived and/or modified CDS sequence (opt3) from neuraminidase__InfluenzaA__ADD74891

SEQ ID NO: 146328 - RNA, 1410 nt, Artificial Sequence; identical to SEQ ID NO: 144786
  derived and/or modified CDS sequence (opt3) from neuraminidase__InfluenzaA__ADD74901

SEQ ID NO: 146329 - RNA, 1410 nt, Artificial Sequence; identical to SEQ ID NO: 144786
  derived and/or modified CDS sequence (opt3) from neuraminidase__InfluenzaA__ADD74911

SEQ ID NO: 146330 - RNA, 1410 nt, Artificial Sequence; identical to SEQ ID NO: 144786
  derived and/or modified CDS sequence (opt3) from neuraminidase__InfluenzaA__ADD74921

SEQ ID NO: 146331 - RNA, 1410 nt, Artificial Sequence; identical to SEQ ID NO: 144786
  derived and/or modified CDS sequence (opt3) from neuraminidase__InfluenzaA__ADD74941

SEQ ID NO: 146332 - RNA, 1410 nt, Artificial Sequence
  derived and/or modified CDS sequence (opt3) from neuraminidase__InfluenzaA__ADD74961
augaaccccaaucagaagaucauuaccauaggcagcgugugcaugacaaucgggauggccaaccugauucuccaaaucggaaauauuaucuccauauggaucucucacucaauucagcuugguaaccagaaucagaucggcacuuguaaccaaagugucauuacguacgagaauaacaccuggguuaaucauacauaugugaacaucagcaauacuaacuucgcugcagggcaguccguagugucugucaaacuggccggaaauucgucauugugcccugugagcggcugggcgauauacaguaaggacaacuccguuagaauugguucuaaaggggauguguuugucaucagggaaccauucauuagcuguuccccguuagagugccggaccuuuuuccugacacagggagcucuacucaaugacaagcacucaaacggcaccaucaaagaucgcagucccuaucgaacucugaugagcuguccuaucggcgaagugccaucucccuacaacucccguuuugagucaguagccuggagcgcaagugccugccaugacgggauuaauuggcuuacaauaggaaucucugguccugauaacggcgcuguugcagugcugaaguauaaugggauuaucaccgacacgauaaaguccuggagaaacaauauuuugaggacucaggaaagcgagugugccugcgucaacggaucguguuucaccgugaugacagauggcccaucugacggucaggcuuccuacaaaaucuuucggaucgagaaggggaaaauugugaagucagucgaaaugaaugcccccaacuaucacuacgaggaaugcaguuguuacccugauagcuccgagaucacuugcguuugccgcgacaauuggcauggaucuaacagaccaugggugagcuucaaucaaaaccucgaguaucagauuggcuacauauguucaggcaucuuuggggauaauccgaggcccaacgacaaaaccggaaguugcgguccuguauccagcaauggcgcgaacggggugaagggauucucuuuuaaguauggcaacggugucuggauugggcggacaaaaucaaucaguagccgcaauggcuucgaaaugaucugggauccaaacggauggaccggcacggacaauaacuuuuccauuaagcaggacauaguggggaucaaugaguggucuggauacucggguagcuucguucaacaccccgaacugacuggccuggauuguauucgaccuugcuucuggguggagcucaucagagggaggccaaaagaaaacacaauuuggaccuccggaucaaguaucucuuuuuguggcgucaauagcgacacuguggguugguccuggcccgauggggcagaguuaccguucacaauagacaaguga

SEQ ID NO: 146333 - RNA, 1410 nt, Artificial Sequence; identical to SEQ ID NO: 144786
  derived and/or modified CDS sequence (opt3) from neuraminidase__InfluenzaA__ADD74971

SEQ ID NO: 146334 - RNA, 1410 nt, Artificial Sequence
  derived and/or modified CDS sequence (opt3) from neuraminidase__InfluenzaA__ADD74981
augaaccccaaucagaagaucauuaccauaggcagcgugugcaugacaaucgggauggccaaccugauucuccaaaucggaaauauuaucuccauauggaucucucacucaauucagcuugguaaccagaaucagaucgagacuuguaaccaaaguauuaucacguacgaaaauaacaccugggucaaucagacauauguuaacauaagcaauacuaacuucgcugcaggccaguccgugguaucugugaaacuggccggaaauucgucauugugcccugucagcgggugggcgauuuacaguaaggacaacuccaucagaauuggcucuaaaggugauguguuuguuaucagggagccauucaucagcuguuccccguuagaaugccggaccuuuuuccugacacagggggcucuacucaaugacaagcauucaaacggaaccauuaaagaucgcagucccuaucgaacucugaugagcuguccuauaggcgaggugccaucucccuacaacucccguuuugaaucagucgccuggagcgcaagugccugccacgacggcaucaauuggcuuacaauugggaucucuggaccugauaacggugcuguggcaguacugaaguauaauggcauaauuaccgacacgaucaaguccuggagaaacaauaucuugaggacucaagagagcgagugugccugcguuaacgggucguguuucaccgugaugacagauggaccaucugacggccaggcuuccuacaaaauuuuucggaucgaaaaggguaaaauugucaagucaguggagaugaaugcccccaacuaucauuacgaagagugcaguuguuacccugauagcuccgagauaacuugcgugugccgcgacaauuggcacgggucuaacagaccaugggucagcuucaaucagaaccucgaauaucagaucggauacauuuguucaggcaucuuuggcgauaauccgaggcccaacgacaaaaccgggaguugcggaccuguuuccagcaauggugcgaacggcgugaagggguucucuuuuaaguauggaaacggcguauggaucggucggacaaaaucaauuaguagccgcuccggguucgagaugauaugggauccaaauggcuggaccggaacggacaacaauuuuucuaucaagcaagacauugugggcaucaacgaauggucgggguacagcggauccuucguccagcaucccgagcugacuggucuggauuguauucgaccuugcuucuggguggaacucaucagaggcaggccagaggagaauacaauauggaccucagggaguucuaucagcuuuuguggaguuaacuccgacacugugggcuggucauggcccgauggugcagaauuaccguucacaauugacaaauga

SEQ ID NO: 146335 - RNA, 1410 nt, Artificial Sequence; identical to SEQ ID NO: 144786
  derived and/or modified CDS sequence (opt3) from neuraminidase__InfluenzaA__ADD74991

SEQ ID NO: 146336 - RNA, 1410 nt, Artificial Sequence; identical to SEQ ID NO: 144786
  derived and/or modified CDS sequence (opt3) from neuraminidase__InfluenzaA__ADD75001

SEQ ID NO: 146337 - RNA, 1410 nt, Artificial Sequence
  derived and/or modified CDS sequence (opt3) from neuraminidase__InfluenzaA__ADD75011
augaaccccaaucagaagaucauuaccauaggcagcgugugcaugacaaucgggauggccaaccugauucuccaaaucggaaauauuaucuccauauggaucucucacucaauucagcuugguaaccagaaucagaucgagacuuguaaccaaagugucauuacguacgaaaauaacaccuggguuaaucagacauaugugaacaucagcaauacuaacuucgcugcaggccaguccguagugucugucaaacuggccggaaauucgucauugugcccugugagcgggugggcgauauacaguaaggacaacuccauuagaaucggcucuaaaggugauguuuuugugauuagggagccauucaucagcuguuccccguuagaaugccggaccuuuuuccugacacagggggcucuacucaaugacaagcauucaaacggaaccaucaaagaucgcagucccuaucgaacucugaugagcuguccuauuggcgaggucccaucucccuacaacucccguuuugaaucaguggccuggagcgcaagugccugccacgacggcauaaauuggcuuacaaucgggauuucuggaccugauaacggugcuguagcaguucugaaguauaauggcaucauaaccgacacgauuaaguccuggagaaacaauaucuugaggacucaagagagcgagugugccugcgugaacgggucguguuucaccgucaugacagauggaccaucugacggccaggcuuccuacaaaaucuuucggauugaaaaggguaaaaucgugaagucaguggagaugaaugcccccaacuaucauuacgaagagugcaguuguuacccugauagcuccgagauuacuugcgucugccgcgacaauuggcacgggucuaacagaccauggguuagcuucaaucagaaccucgaauaucagauaggauacaucuguucaggcauuuuuggcgauaauccgaggcccaacgacaaaaccgggaguugcgauccuguguccagcaauggagcgaacgguguaaagggcuucucuuuuaaguaugggaacggaguguggaucggccggacaaaaucaaucaguagccgcaaugguuucgagaugauuugggacccaaacggguggaccggcacggacaauaacuuuuccauaaagcaagauaucgucggaauuaaugaauggucuggcuacucggggagcuucgugcagcaucccgagcugacuggacuggacuguauccgaccuugcuucuggguugaacucauuagagguaggccaaaagagaacacaaucuggaccuccggcucaaguauaucuuuuuguggggugaauagcgauacugucggaugguccuggcccgacggcgcagaguuaccguucacaaucgauaaguga

SEQ ID NO: 146338 - RNA, 1410 nt, Artificial Sequence; identical to SEQ ID NO: 146074
  derived and/or modified CDS sequence (opt3) from neuraminidase__InfluenzaA__ADD75031

SEQ ID NO: 146339 - RNA, 1410 nt, Artificial Sequence
  derived and/or modified CDS sequence (opt3) from neuraminidase__InfluenzaA__ADD75041
augaaccccaaucagaagaucauuaccauaggcagcgugugcaugacaaucgggauggccaaccugauucuccaaaucggaaauauuaucuccauauggaucucucacucaauucagcuugguaaccagaaucagaucgagacuuguaaccaaagugucauuacguacgaaaauaaaaccuggguuaaccagacauaugugaauaucagcaacacuaauuucgcugcaggccaguccguagugucugucaagcuggccgggaacucgucauugugcccugugagcggaugggcgauauacaguaaagacaauuccauuagaaucggcucuaagggugauguuuuugugauuagggagccauucaucagcuguuccccguuagaaugccggaccuuuuuccugacacagggggcucuacucaacgacaaacauucaaauggaaccaucaaggaucgcagucccuaucgaacucugaugagcuguccuauuggcgaggucccaucucccuacaacucccguuuugaaucaguggccuggagcgcaagugccugccacgacggcauaaacuggcuuacaaucgggauuucuggaccugauaauggugcuguagcaguucugaaguauaacggcaucauaaccgacacgauuaaauccuggagaaauaacaucuugaggacucaagagagcgagugugccugcgugaaugggucguguuucaccgucaugacagauggaccaucugacggccaggcuuccuacaagaucuuucggauugaaaaagguaagaucgugaaaucaguggagaugaacgcccccaauuaucauuacgaagagugcaguuguuacccugauagcuccgagauuacuugcgucugccgcgacaacuggcacgggucuaauagaccauggguuagcuucaaccagaaucucgaauaucagauaggauacaucuguucaggcauuuuuggcgauaacccgaggcccaaugacaagaccgggaguugcggaccuguguccagcaacggugcgaauggcguaaagggguucucuuuuaaauauggaaacggcguguggaucggucggacaaagucaaucaguagccgcaacggguucgagaugauuugggauccaaauggcuggaccggaacggacaacaauuuuuccauaaaacaagacaucgucggcauuaacgaauggucuggguacucggguagcuucgugcagcaucccgagcugacuggacuggauuguauccgaccuugcuucuggguugaacucauuagaggcaggccaaaggagaauacaaucuggaccuccgggucaaguauaucuuuuuguggagugaacagcgacacugucggcugguccuggcccgauggugcagaguuaccguucacaaucgacaaauga

SEQ ID NO: 146340 - RNA, 1410 nt, Artificial Sequence; identical to SEQ ID NO: 144786
  derived and/or modified CDS sequence (opt3) from neuraminidase__InfluenzaA__ADD75051

SEQ ID NO: 146341 - RNA, 1410 nt, Artificial Sequence; identical to SEQ ID NO: 144786
  derived and/or modified CDS sequence (opt3) from neuraminidase__InfluenzaA__ADD75061

SEQ ID NO: 146342 - RNA, 1410 nt, Artificial Sequence; identical to SEQ ID NO: 144786
  derived and/or modified CDS sequence (opt3) from neuraminidase__InfluenzaA__ADD75071

SEQ ID NO: 146343 - RNA, 1410 nt, Artificial Sequence; identical to SEQ ID NO: 144786
  derived and/or modified CDS sequence (opt3) from neuraminidase__InfluenzaA__ADD75081

SEQ ID NO: 146344 - RNA, 1410 nt, Artificial Sequence
  derived and/or modified CDS sequence (opt3) from neuraminidase__InfluenzaA__ADD75091
augaaccccaaucagaagaucauuaccauaggcagcgugugcaugacaaucgggauggccaaccugauucuccaaaucggaaauauuaucuccauauggaucucucacucaauucagcuugguaaccagaaucagaucgagacuuguaaccaaagugucauuacguacgaaaauaacaccuggguuaaucagacauaugugaacaucagcaauacuaacuucgcugcaggccaguccguagugucugucaaacuggccgggaauagcucauugugcccugugagcggaugggcgauauacaguaaggacaacuccauuagaaucggcucuaaaggugauguuuuugugauuagggagccauucaucagcuguuccccguuagaaugccggaccuuuuuccugacacagggggcucuacucaaugacaagcauucaaacggaaccaucaaagaucgcagucccuaucgaacucugaugagcuguccuauuggcgaggucccaucucccuacaacucccguuuugaaucaguggccuggagcgcaagugccugccacgacggcauaaauuggcuuacaaucgggauuucuggaccugauaacggugcuguagcaguucugaaguauaauggcaucauaaccgacacgauuaaguccuggagaaacaauaucuugaggacucaagagagcgagugugccugcgugaacgggucguguuucaccgucaugacagauggaccaucugacggccaggcuuccuacaaaaucuuucggauugaaaaggguaaaaucgugaagucaguggagaugaaugcccccaacuaucauuacgaagagugcaguuguuacccugauagcuccgagauuacuugcgucugccgcgacaauuggcacgggucuaacagaccauggguuagcuucaaucagaaccucgaauaucagauaggauacaucuguucaggcauuuuuggcgauaauccgaggcccaacgacaaaaccgggaguugcggaccuguguccagcaauggugcgaacggcguaaagggguucucuuuuaaguauggaaacggcguguggaucggucggacaaaaucaaucaguagccgcuccggguucgagaugauuugggauccaaauggcuggaccggaacggacaacaauuuuucuauaaagcaagacaucgucggcauuaacgaauggucgggguacagcggauccuucgugcagcaucccgagcugacuggucuggauuguauccgaccuugcuucuggguugaacucauuagaggcaggccaaaagagaauacaaucuggaccucagggaguucuauaucguuuuguggagugaacuccgacacugucggcuggucauggcccgauggugcagaguuaccguucacaaucgacaaguga

SEQ ID NO: 146345 - RNA, 1410 nt, Artificial Sequence; identical to SEQ ID NO: 144786
  derived and/or modified CDS sequence (opt3) from neuraminidase__InfluenzaA__ADD75101

SEQ ID NO: 146346 - RNA, 1410 nt, Artificial Sequence; identical to SEQ ID NO: 144786
  derived and/or modified CDS sequence (opt3) from neuraminidase__InfluenzaA__ADD75111

SEQ ID NO: 146347 - RNA, 1410 nt, Artificial Sequence; identical to SEQ ID NO: 144786
  derived and/or modified CDS sequence (opt3) from neuraminidase__InfluenzaA__ADD75121

SEQ ID NO: 146348 - RNA, 1410 nt, Artificial Sequence; identical to SEQ ID NO: 144786
  derived and/or modified CDS sequence (opt3) from neuraminidase__InfluenzaA__ADD75131

SEQ ID NO: 146349 - RNA, 1410 nt, Artificial Sequence; identical to SEQ ID NO: 144786
  derived and/or modified CDS sequence (opt3) from neuraminidase__InfluenzaA__ADD75141

SEQ ID NO: 146350 - RNA, 1410 nt, Artificial Sequence
  derived and/or modified CDS sequence (opt3) from neuraminidase__InfluenzaA__ADD75161
augaaccccaaucagaagaucauuaccauaggcagcgugugcaugacaaucgggauggccaaccugauucuccaaaucggaaauauuaucuccauauggaucucucacucaauucagcuugguaaccagaaucagaucgagacuuguaaccaaagugucauuacguacgaaaauaacaccuggguuaaucagacauaugugaacaucagcaauacuaacuucgcugcaggccaguccguagugucugucaaacuggccgggaauagcucauugugcccugugagcggaugggcgauauacaguaaggacaacuccauuagaaucggcucuaaaggugauguuuuugugauuagggagccauucaucagcuguuccccguuagaaugccggaccuuuuuccugacacagggggcucuacucaaugacaagcauucaaacggaaccaucaaagaucgcaguagcuaucgaacucugaugucuugucccauuggcgaggucccuuccccauacaacucacguuuugaaagcguggccuggagugcaucugccugccacgacggcauaaauuggcuuacaaucgggauuuccggacccgauaacggugcuguagcaguucugaaguauaauggcaucauaaccgacacgauuaagagcuggagaaacaauaucuugaggacucaagagucggagugugccugcgugaacgggucuuguuucaccgucaugacagauggaccuuccgacggccaggcuucauacaaaaucuuucggauugaaaaggguaaaaucgugaagaguguggagaugaaugccccaaacuaucauuacgaagagugcagcuguuaccccgauuccucugagauuacuugcgucugccgcgacaauuggcacgggagcaacagaccuuggguuucauucaaucagaaccucgaauauaaaauaggauacaucuguaguggcauuuuuggcgauaauccaaggccgaacgacaagaccggguccugcggacccgugagcucuaauggugcgaacggcguaaagggguucucauuuaaauauggaaacggcguguggaucggucggacaaagaguaucagcucccgcaauggguucgagaugauuugggauccuaacggcuggaccggaacggacaauaacuuuucuauaaaacaggacaucgucggcauuaaugaauggucgggguacagcggauccuucgugcaacauccagagcugacuggucuggauuguauccgacccugcuucuggguugaacucauuagaggcaggccuaaggagaacacaaucuggaccucagggaguucuauaucguuuuguggagucaauuccgacacugugggcuggucauggccagauggugcagaguuacccuucacaaucgaccgguga

SEQ ID NO: 146351 - RNA, 1410 nt, Artificial Sequence
  derived and/or modified CDS sequence (opt3) from neuraminidase__InfluenzaA__ADD84500
augaaccccaaucagaacaucauuaccauaggcagcgugugcaugacaaucgggauggccaaucugauucuccaaaucggaaacauuaucuccauauggaucucucacucaauucagcuugguaaucagaaccagaucgagacuuguaaucaaagugucauuacguacgaaaacaauaccuggguuaaccagacauaugugaauaucagcaacacuaauuucgcugcaggccaguccguagugucugucaagcuggccgggaacucgucauugugcccugugagcggaugggcgauauacaguaaagacaauuccauuagaaucggcucuaagggugauguuuuugugauuagggagccauucaucagcuguuccccguuagaaugccggaccuuuuuccugacacagggggcucuacucaacgacaaacauucaaacggaaccaucaaggaucgcagucccuaucgaacucugaugagcuguccuauuggcgaggucccaucucccuacaauucccguuuugaaucaguggccuggagcgcaagugccugccacgacggcauaaacuggcuuacaaucgggauuucuggaccugauaauggugcuguagcaguucugaaauauaacggcaucauaaccgacacgauuaaguccuggagaaauaacaucuugaggacucaagagagcgagugugccugcgugaaugggucguguuucaucgucaugaccgauggaccaucugacggccaggcuuccuacaagauuuuucggaucgaaaaagguaagauugugaaaucaguggagaugaacgcccccaauuaucauuacgaagagugcaguuguuacccugauagcuccgagauaacaugcgucugccgcgacaacuggcacgggucuaauagaccauggguuagcuucaaccagaaucucgaauaucagaucggauacauuuguucaggcaucuuuggcgauaacccgaggcccaaugacaagacugggaguugcggaccuguguccagcaacggugcgaacggcguaaaaggguucucuuuuaaguauggaaauggcguguggaucggucggaccaagucaauuaguagccgcaacggguucgagaugauaugggauccaaauggcuggacaggaaccgacaacaauuuuuccaucaaacaagacauugucggcaucaacgaauggucuggguacucggguagcuucgugcagcaucccgagcugacgggacuggauuguauucgaccuugcuucuggguugaacucaucagaggcaggccaaaggagaauacuauauggacauccgggucaaguaucucuuuuuguggagugaacagcgacaccgucggcugguccuggcccgauggugcagaguuaccguucacuauugacaaauga

SEQ ID NO: 146352 - RNA, 1410 nt, Artificial Sequence
  derived and/or modified CDS sequence (opt3) from neuraminidase__InfluenzaA__ADD84502
augaaccccaaucagaacaucauuaccauaggcagcgugugcaugacaaucgggauggccaaucugauucuccaaaucggaaacauuaucuccauauggaucucucacucaauucagcuugguaaucagaaccagaucgagacuuguaaucaaagugucauuacguacgaaaacaauaccuggguuaaccagacauaugugaauaucagcaacacuaauuucgcugcaggccaguccguagugucugucaagcuggccgggaacucgucauugugcccugugagcggaugggcgauauacaguaaagacaauuccauuagaaucggcucuaagggugauguuuuugugauuagggagccauucaucagcuguuccccguuagaaugccggaccuuuuuccugacacagggggcucuacucaacgacaaacauucaaacggaaccaucaaggaucgcagucccuaucgaacucugaugagcuguccuauuggcgaggucccaucucccuacaauucccguuuugaaucaguggccuggagcgcaagugccugccacgacggcauaaacuggcuuacaaucgggauuucuggaccugauaauggugcuguagcaguucugaaauauaacggcaucauaaccgacacgauuaaguccuggagaaauaacaucuugaggacucaagagagcgagugugccugcgugaaugggucguguuucaccgucaugacagauggaccaucugacggccaggcuuccuacaagaucuuucggauugaaaaagguaagaucgugaaaucaguggagaugaacgcccccaauuaucauuacgaagagugcaguuguuacccugauagcuccgagauuacuugcgucugccgcgacaacuggcacgggucuaauagaccauggguuagcuucaaccagaaucucgaauaucagauaggauacaucuguucaggcauuuuuggcgauaacccgaggcccaaugacaagaccgggaguugcggaccuguguccagcaacggugcgaacggcguaaaaggguucucuuuuaaguauggaaauggcguguggaucggucggacaaagucaaucaguagccgcaacggguucgagaugauuugggauccaaauggcuggaccggaacggacaacaauuuuuccauaaaacaagacaucgucggcauuaacgaauggucuggguacucggguagcuucgugcagcaucccgagcugacuggacuggauuguauccgaccuugcuucuggguugaacucauuagaggcaggccaaaggagaauacaaucuggaccuccgggucaaguauaucuuuuuguggagugaacagcgacacugucggcugguccuggcccgauggugcagaguuaccguucacaaucgacaaauga

SEQ ID NO: 146353 - RNA, 1410 nt, Artificial Sequence; identical to SEQ ID NO: 146352
  derived and/or modified CDS sequence (opt3) from neuraminidase__InfluenzaA__ADD84503

SEQ ID NO: 146354 - RNA, 1410 nt, Artificial Sequence
  derived and/or modified CDS sequence (opt3) from neuraminidase__InfluenzaA__ADD84504
augaaccccaaucagaacaucauuaccauaggcagcgugugcaugacaaucgggauggccaaucugauucuccaaaucggaaacauuaucuccauauggaucucucacucaauucagcuugguaaucagaaccagaucgagacuuguaaucaaagugucauuacguacgaaaacaauaccuggguuaaccagacauaugugaauaucagcaacacuaauuucgcugcaggccaguccguagugucugucaagcuggccgggaacuuuucguugugcccugugucaggaugggcgauauacagcaaagacaauaguauuagaaucggcuccaagggugauguuuucgugauuagggagccauuuaucucuuguagcccguuagaaugccggaccuucuuucugacacagggggcucuacucaacgacaaacauuccaacggaaccaucaaggaucgcucacccuaucgaacucugaugaguuguccuauuggcgaggucccaagccccuacaauucucguuucgaauccguggccuggucagcaagcgccugccacgacggcauaaacuggcuuacaaucgggauuaguggaccugauaauggugcuguagcaguucugaaauauaacggcaucauaaccgacacgauuaagucuuggagaaauaacaucuugaggacucaagaguccgagugugccugcgugaaugggagcuguuuuaccgucaugacagauggaccaucggacggccaggcuucuuacaagaucuuccggauugaaaaagguaagaucgugaaauccguggagaugaacgcccccaauuaucauuacgaagagugcucauguuacccugauaguagcgagauuacuugcgucugccgcgacaacuggcacggguccaauagaccauggguuucuuuuaaccagaaucucgaauaucagauaggauacaucuguagcggcauuuucggcgauaacccgaggcccaaugacaagaccgggucaugcggaccugugaguuccaacggugcgaacggcguaaaaggguuuagcuucaaguauggaaauggcguguggaucggucggacaaagucuaucucaagucgcaacggguuugagaugauuugggauccaaauggcuggaccggaacggacaacaauuucagcauaaaacaagacaucgucggcauuaacgaaugguccggguacucuggaucguucgugcagcaucccgagcugacuggucuggauuguauccgaccuugcuuuuggguugaacucauuagaggcaggccaaaggagaauacaaucuggaccagcggguccucaauaaguuucuguggagugaacucugacacugucggcuggagcuggcccgauggugcagaguuaccguuuacaaucgacaaauga

SEQ ID NO: 146355 - RNA, 1410 nt, Artificial Sequence; identical to SEQ ID NO: 146352
  derived and/or modified CDS sequence (opt3) from neuraminidase__InfluenzaA__ADD84505

SEQ ID NO: 146356 - RNA, 1410 nt, Artificial Sequence; identical to SEQ ID NO: 146352
  derived and/or modified CDS sequence (opt3) from neuraminidase__InfluenzaA__ADD84506

SEQ ID NO: 146357 - RNA, 1410 nt, Artificial Sequence
  derived and/or modified CDS sequence (opt3) from neuraminidase__InfluenzaA__ADD92528
augaaccccaaucagaagaucauuaccauaggcagcgugugcaugacaaucgggauggccaaccugauucuccaaaucggaaauauuaucuccauauggaucucucacucaauucagcuugguaaccagaaucagaucgagacuuguaaccaaagugucauuacguacgaaaauaacaccuggguuaaucagacauaugugaacaucagcaauacuaacuucgcugcaggccaguccguagugucugucaaacuggccgggaauagcucauugugcccugugagcggaugggcgauauacaguaaggacaacuccauuagaaucggcucuaaaggugauguuuuugugauuagggagccauucaucagcuguuccccguuagaaugccggaccuuuuuccugacacagggggcucuacucaaugacaagcauucaaacggaaccaucaaagaucgcagucccuaucgaacucugaugagcuguccuauuggcgaggucccaucucccuacaacucccguuuugaaucaguggccuggagcgcaagugccugccacgacggcauaaauuggcuuacaaucgggauuucuggaccugauaacggugcuguagcaguucugaaguauaauggcaucauaaccgacacgauuaaguccuggagaaacaauaucuugaggacucaagagagcgagugugccugcgugaacgggucguguuucaccgucaugacagauggaccaucugacggccaggcuuccuacaaaaucuuucggauugaaaaggguaaaaucgugaagucaguggagaugaaugcccccaacuaucauuacgaagagugcaguuguuacccugauagcuccgagauuacuugcgucugccgcgacaauuggcacgggucuaacagaccauggguuagcuucaaucagaaccucgaauaucagauaggauacaucuguucaggcauuuuuggcgauaauccgaggcccaacgacaaaaccgggaguugcggaccuguguccagcaauggugcgaacggcguaaagggguucucuuuuaaguauggaaacggcguguggaucggucggacaaaaucaaucaguagccgcaauggguucgagaugauuugggauccaaacggcuggaccggaacggacaauaacuuuuccauaaagcaagacaucgucggcauuaaugaauggucugggcauucgggaagcuccgugcagcaccccgagcugacuggucuggauuguauccgaccuugcuucuggguugaacucauuagaggcaggccaaaagagaacacaaucuggaccucagggaguucuauaucguucuguggagucaauuccgacacugugggcuggucauggcccgauggugcagaguuaccguuuacaaucgacaaguga

SEQ ID NO: 146358 - RNA, 1410 nt, Artificial Sequence; identical to SEQ ID NO: 146009
  derived and/or modified CDS sequence (opt3) from neuraminidase__InfluenzaA__ADD96769

SEQ ID NO: 146359 - RNA, 1410 nt, Artificial Sequence; identical to SEQ ID NO: 146009
  derived and/or modified CDS sequence (opt3) from neuraminidase__InfluenzaA__ADD96779

SEQ ID NO: 146360 - RNA, 1410 nt, Artificial Sequence; identical to SEQ ID NO: 146009
  derived and/or modified CDS sequence (opt3) from neuraminidase__InfluenzaA__ADD96789

SEQ ID NO: 146361 - RNA, 1410 nt, Artificial Sequence; identical to SEQ ID NO: 146137
  derived and/or modified CDS sequence (opt3) from neuraminidase__InfluenzaA__ADD96799

SEQ ID NO: 146362 - RNA, 1410 nt, Artificial Sequence; identical to SEQ ID NO: 144786
  derived and/or modified CDS sequence (opt3) from neuraminidase__InfluenzaA__ADD96809

SEQ ID NO: 146363 - RNA, 1410 nt, Artificial Sequence
  derived and/or modified CDS sequence (opt3) from neuraminidase__InfluenzaA__ADD96819
augaaccccaaucagaagaucauuaccauaggcagcgugugcaugacaaucgggauggccaaccugauucuccaaaucggaaauauuaucuccauauggaucucucacucaauucagcuugguaaccagaaucagaucgagacuuguaaccaaagugucauuacguacgaaaauaacaccuggguuaaucagacauaugugaacaucagcaauacuaacuucgcugcaggccaguccguagugucugucaaacuggccgggucgagcagcuugugcccugugaguggaugggcgauauacuccaaggacaauucuauuagaaucggcagcaaaggugauguuuuugugauuagggagccauucaucuccuguucaccguuagaaugccggaccuuuuuccugacacagggggcucuacucaacgacaagcauaguaauggaaccaucaaagaucgcagccccuaucgaacucugaugucuuguccuauuggcgaggucccaucccccuacaacucacguuuugaaagcguggccuggagugcaucugccugccacgacggcauaaacuggcuuacaaucgggauuuccggaccugauaauggugcuguagcaguucugaaguauaacggcaucauaaccgacacgauuaagagcuggagaaauaacaucuugaggacucaagagucggagugugccugcgugaaugggucuuguuucaccgucaugacagauggaccauccgacggccaggcuucauacaaaaucuuucggauugaaaaggguaaaaucgugaagaguguggagaugaacgcccccaauuaucauuacgaagagugcagcuguuacccugauuccucugagauuacuugcgucugccgcgacaacuggcacgggagcaauagaccauggguuucauucaaccagaaucucgaauaucagauaggauacaucuguaguggcauuuuuggcgauaacccgaggcccaaugacaaaaagggguccugcggaccugugagcucuaacggugcgaauggcguaaagggguucucauuuaaauauggaaacggcguguggaucggucggaccaagaguaucagcucccgcaacggguucgagaugauuugggauccaaauggcuggacaggaaccgacaacaauuuuucuauaaaacaagacaucgucggcauuaacgaauggucgggguacagcggauccuucgugcagcaucccgagcugacgggucuggauuguauccgaccuugcuucuggguugaacucauuagaggcaggccaaaggagaauacuaucuggacaucagggaguucuauaucauuuuguggagugaacuccgacaccgucggcuggucauggcccgauggugcagaguuaccguucacuaucgacaaauga

SEQ ID NO: 146364 - RNA, 1410 nt, Artificial Sequence; identical to SEQ ID NO: 144786
  derived and/or modified CDS sequence (opt3) from neuraminidase__InfluenzaA__ADD96829

SEQ ID NO: 146365 - RNA, 1410 nt, Artificial Sequence; identical to SEQ ID NO: 144786
  derived and/or modified CDS sequence (opt3) from neuraminidase__InfluenzaA__ADD96839

SEQ ID NO: 146366 - RNA, 1410 nt, Artificial Sequence; identical to SEQ ID NO: 144786
  derived and/or modified CDS sequence (opt3) from neuraminidase__InfluenzaA__ADD96849

SEQ ID NO: 146367 - RNA, 1410 nt, Artificial Sequence; identical to SEQ ID NO: 144786
  derived and/or modified CDS sequence (opt3) from neuraminidase__InfluenzaA__ADD96859

SEQ ID NO: 146368 - RNA, 1410 nt, Artificial Sequence
  derived and/or modified CDS sequence (opt3) from neuraminidase__InfluenzaA__ADD96869
augaaccccaaucagaagaucauuaccauaggcagcgugugcaugacaaucgggauggccaaccugauucuccaaaucggaaauauuaucuccauauggaucucucacccuauucagcuugguaaccagaaucagaucgagacuuguaaccaaucagucauuacguacgaaaauaacaccuggguuaaucagacauaugugaacaucaguaauacuaacuucgcugcaggccagagcguaguguccgucaaacuggccggaaauucuucguugugcccagugucagggugggcgauauacagcaaggacaacaguauuagaaucggcuccaaaggugauguuuuugugauuagggagccguucaucucuuguagccccuuagaaugccggaccuuuuuccugacacagggggcucuacucaaugacaagcauuccaacggaaccaucaaagaucgcucaccuuaucgaacucugaugaguuguccaauuggcgagguccccagcccuuacaacucucguuuugaauccguggccuggucagcaagcgccugccacgacggcauaaauuggcuuacaaucgggauuaguggaccagauaacggugcuguagcaguucugaaguauaauggcaucauaaccgacacgauuaagucuuggaaaaacaauaucuugagaacucaagaguccgagugugccugcgugaacgggagcuguuucaccgucaugacagauggacccucggacggccaggcuucuuacaagaucuuuaggauugaaaaagguaagaucgugaaauccguggagaugaaugccccuaacuaucauuacgaagagugcucauguuacccagauaguagcgagauuacuugcgucugccgggacaauuggcacggguccaaccgcccguggguuucuuucaaucagaaccucgaauaucagauaggauacaucuguagcggcauuuuuggcgauaaucccagaccuaacgacaagaccgggucaugcggaccagugaguuccaauggugcgaacggcguaaagggguucagcuuuaaauauggaaacggcguguggaucgguaggacaaagucuaucucaagucggaauggguucgagaugauuugggaucccaacggcuggaccggaacggacaauaacuuuagcauaaaacaagacaucgucggcauuaaugaaugguccggguacucuggaucguucgugcagcauccugagcugacuggucuggauuguauccgcccaugcuucuggguugaacucauucgaggcagacccaaggagaacacaaucuggaccagcggguccucaauaaguuuuuguggagucaauucugacacugugggcuggagcuggccggauggugcagaguuaccuuucacaaucgacaaauga

SEQ ID NO: 146369 - RNA, 1410 nt, Artificial Sequence
  derived and/or modified CDS sequence (opt3) from neuraminidase__InfluenzaA__ADD96879
augaaccccaaucagaagaucauuaccauaggcagcgugugcaugacaaucgggauggccaaccugauucuccaaaucggaaauauuaucuccauauggaucucucacucaauucagcuugguaaccagaaucagaucgagacuuguaaccaaagugucauuacguacgaaaauaacaccuggguuaaucagacauaugugaacaucagcaauacuaacuucgcugcaggccaguccguagugucugucaaacuggccggaaauucgucauugugcccugugagcgggugggcgauauacaguaaggacaacuccauuagaaucggcucuaaaggugauguuuuugugauuagggagccauucaucagcuguuccccguuagggugccggaccuuuuuccugacacagggagcucuacucaaugacaagcauucaaacggcaccaucaaagaucgcagucccuaucgaacucugaugagcuguccuauuggcgaagucccaucucccuacaacucccguuuugagucaguggccuggagcgcaagugccugccacgacgggauaaauuggcuuacaaucggaauuucugguccugauaacggcgcuguagcaguucugaaguauaaugggaucauaaccgacacgauuaaguccuggagaaacaauaucuugaggacucaagaaagcgagugugccugcgugaacggaucguguuucaccgucaugacagauggcccaucugacggucaggcuuccuacaaaaucuuucggauugagaaggggaaaaucgugaagucaguggaaaugaaugcccccaacuaucauuacgaggaaugcaguuguuacccugauagcuccgagauuacuugcgucugccgcgacaauuggcacggaucuaacagaccauggguuagcuucaaucagaaccucgaguaucagauaggcuacaucuguucaggcauuuuuggggauaauccgaggcccaacgacaaaaccggaaguugcgguccuguguccagcaauggcgcgaacgggguaaagggauucucuuuuaaguauggcaacgguguguggaucgggcggacaaaaucaaucaguagccgcaauggcuucgaaaugauuugggauccaaacggauggaccggcacggacaauaacuuuuccauaaagcaagacaucgucgggauuaaugaguggucuggauacucggguagcuucgugcagcaucccgaacugacuggccuggauuguauccgaccuugcuucuggguugagcucauuagagggaggccaaaagaaaacacaaucuggaccuccggaucaaguauaucuuuuuguggcgugaauagcgacacugucgguugguccuggcccgauggggcagaguuaccguucacaaucgacaaguga

SEQ ID NO: 146370 - RNA, 1410 nt, Artificial Sequence; identical to SEQ ID NO: 144786
  derived and/or modified CDS sequence (opt3) from neuraminidase__InfluenzaA__ADD96889

SEQ ID NO: 146371 - RNA, 1410 nt, Artificial Sequence; identical to SEQ ID NO: 145369
  derived and/or modified CDS sequence (opt3) from neuraminidase__InfluenzaA__ADD96899

SEQ ID NO: 146372 - RNA, 1410 nt, Artificial Sequence; identical to SEQ ID NO: 144786
  derived and/or modified CDS sequence (opt3) from neuraminidase__InfluenzaA__ADD96909

SEQ ID NO: 146373 - RNA, 1410 nt, Artificial Sequence; identical to SEQ ID NO: 144786
  derived and/or modified CDS sequence (opt3) from neuraminidase__InfluenzaA__ADD96919

SEQ ID NO: 146374 - RNA, 1410 nt, Artificial Sequence; identical to SEQ ID NO: 144786
  derived and/or modified CDS sequence (opt3) from neuraminidase__InfluenzaA__ADD96929

SEQ ID NO: 146375 - RNA, 1410 nt, Artificial Sequence; identical to SEQ ID NO: 144786
  derived and/or modified CDS sequence (opt3) from neuraminidase__InfluenzaA__ADD96939

SEQ ID NO: 146376 - RNA, 1410 nt, Artificial Sequence; identical to SEQ ID NO: 144786
  derived and/or modified CDS sequence (opt3) from neuraminidase__InfluenzaA__ADD96959

SEQ ID NO: 146377 - RNA, 1410 nt, Artificial Sequence; identical to SEQ ID NO: 144786
  derived and/or modified CDS sequence (opt3) from neuraminidase__InfluenzaA__ADD96969

SEQ ID NO: 146378 - RNA, 1410 nt, Artificial Sequence
  derived and/or modified CDS sequence (opt3) from neuraminidase__InfluenzaA__ADD96989
augaaccccaaucagaagaucauuaccauaggcagcgugugcaugacaaucgggauggccaaccugauucuccaaaucggaaauauuaucuccauauggaucucucacucaauucagcuugguaaccagaaucagaucgagacuuguaaccaaagugucauuacguacgaaaauaacaccuggguuaaucagacauaugugaacaucagcaauacuaacuucgcugcaggccaguccguagugucugucaaacuggccgggaauagcucauugugcccugugagcggaugggcgauauacaguaaggacaacuccauuagaaucggcucuaaaggugauguuuuugugauuagggagccauucaucagcuguuccccguuagaaugccggaccuuuuuccugacacagggggcucuacucaaugacaagcauucaaacggaaccaucaaagaucgcaguagcuaucgaacucugaugucuugucccauuggcgaggucccuuccccauacaacucacguuuugaaagcguggccuggagugcaucugccugccacgacggcauaaauuggcuuacaaucgggauuuccggacccgauaacggugcuguagcaguucugaaguauaauggcaucauaaccgacacgauuaagagcuggagaaacaauaucuugaggacucaagagucggagugugccugcgugaacgggucuuguuucaccgucaugacagauggaccuuccgacggccaggcuucauacaaaaucuuucggauugaaaaggguaaaaucgugaagaguguggagaugaaugccccaaacuaucauuacgaagagugcagcuguuaccccgauuccucugagauuacuugcgucugccgcgacaauuggcacgggagcaacagaccuuggguuucauucaaucagaaccucgaauaucagauaggauacaucuguaguggcauuuuuggcgauaauccaaggccgaacgacaaaaccggguccugcggacccgugagcucuaauggugcgaacggcguaaagggguucucauuuaaguauggaaacggcguguggaucggucggacaaaaaguaucagcucccgcaauggguucgagaugauuugggauccuaacggcuggaccggaacggacaauaacuuuucuauaaagcaagacaucgucggcauuaaugaauggucgggguacagcggauccuucgugcagcauccagagcugacuggucuggauuguauccgacccugcuucuggguugaacucauuagaggcaggccuaaagagaacacaaucuggaccucagggaguucuauaucguuuuguggagucaauuccgacacugugggcuggucauggccagauggugcagaguuacccuucacaaucgacaaguga

SEQ ID NO: 146379 - RNA, 1410 nt, Artificial Sequence
  derived and/or modified CDS sequence (opt3) from neuraminidase__InfluenzaA__ADD97038
augaaccccaaucagaagaucauuaccauaggcagcgugugcaugacaaucgggauggccaaccugauucuccaaaucggaaauauuaucuccauauggaucucucacucaauucagcuugguaaccagaaucagaucgagacuuguaaccaaagugucauuacguacgaaaauaacaccuggguuaaucagacauaugugaacaucagcaauacuaacuucgcugcaggccaguccguagugucugucaaacuggccggaaauucgucauugugcccugugagcggaugggcgauauacaguaaggacaacuccauuagaaucggcucuaaaggugauguuuuugugauuagggagccauucaucagcuguuccccguuagaaugccggaccuuuuuccugacacagggggcucuacucaaugacaagcauucaaacggaaccaucaaagaucgcagucccuaucgaacucugaugagcuguccuauuggcgaggucccaucucccuacaacucccguuuugaaucaguggccuggagcgcaagugccugccacgacggcauaaauuggcuuacaaucgggauuucuggaccugauaacggugcuguagcaguucugaaguauaauggcaucauaaccgacacgauuaaguccuggagaaacaauaucuugaggacucaagagagcgagugugccugcgugaacgggucguguuucaccgucaugacagauggaccaucugacggccaggcuuccuacaaaaucuuucggauugaaaaggguaaaaucgugaagucaguggagaugaaugcccccaacuaucauuacgaagagugcaguuguuacccugauagcuccgagauuacuugcgucugccgcgacaauuggcacgggucuaacagaccauggguuagcuucaaucagaaccucgaauaucagauaggauacaucuguucaggcauuuuuggcgauaauccgaggcccaacgacaaaaccgggaguugcggaccuguguccagcaauggugcgaacggcguaaagggguucucuuuuaaguauggaaacggcguguggaucggucggacaaaaucaaucaguagccgcaauggguucgagaugauuugggauccaaacggcuggauaggaaccgacaauaacuuuuccaucaagcaagacauugucggcaucaaugaauggucuggguacucggggagcuucgugcagcaucccgagcugacgggucuggauuguauucgaccuugcuucuggguugaacucaucagaggcaggccaaaagagaacacuauauggacauccgggucaaguaucucuuuuuguggagugaauagcgacaccggcgguugguccuggcccgauggggcagaguuaccguucacuauugacaaguga

SEQ ID NO: 146380 - RNA, 1410 nt, Artificial Sequence; identical to SEQ ID NO: 144786
  derived and/or modified CDS sequence (opt3) from neuraminidase__InfluenzaA__ADD97048

SEQ ID NO: 146381 - RNA, 1410 nt, Artificial Sequence; identical to SEQ ID NO: 144786
  derived and/or modified CDS sequence (opt3) from neuraminidase__InfluenzaA__ADD97058

SEQ ID NO: 146382 - RNA, 1410 nt, Artificial Sequence; identical to SEQ ID NO: 144786
  derived and/or modified CDS sequence (opt3) from neuraminidase__InfluenzaA__ADD97069

SEQ ID NO: 146383 - RNA, 1410 nt, Artificial Sequence; identical to SEQ ID NO: 144786
  derived and/or modified CDS sequence (opt3) from neuraminidase__InfluenzaA__ADD97126

SEQ ID NO: 146384 - RNA, 1410 nt, Artificial Sequence; identical to SEQ ID NO: 144786
  derived and/or modified CDS sequence (opt3) from neuraminidase__InfluenzaA__ADD97164

SEQ ID NO: 146385 - RNA, 1410 nt, Artificial Sequence; identical to SEQ ID NO: 144786
  derived and/or modified CDS sequence (opt3) from neuraminidase__InfluenzaA__ADD97174

SEQ ID NO: 146386 - RNA, 1410 nt, Artificial Sequence; identical to SEQ ID NO: 144786
  derived and/or modified CDS sequence (opt3) from neuraminidase__InfluenzaA__ADD97184

SEQ ID NO: 146387 - RNA, 1410 nt, Artificial Sequence
  derived and/or modified CDS sequence (opt3) from neuraminidase__InfluenzaA__ADD97194
augaaccccaaucagaagaucauuaccauaggcagcgugugcaugacaaucgggauggccaaccugauucuccaaaucggaaauauuaucuccauauggaucucucacucaauucagcuugguaaccagaaucagaucgagacuuguaaccaaagugucauuacguacgaaaauaacaccuggguuaaucagacauaugugaacaucagcaaugcuaacuucgcagccggccaguccguagugucugucaaacuggcgggaaauucgucauugugcccugugagcggaugggcuauauacaguaaggacaacuccauuagaaucggcucuaaaggugauguuuuugugauuagggagccauucaucagcuguuccccguuagaaugccggaccuuuuuccugacucagggggcccuacucaaugacaagcauucaaacggaacaaucaaagaucgcagucccuaucgaacccugaugagcuguccuauuggcgaggucccaucucccuacaacucccguuuugaaucaguggcauggagcgccagugcuugccacgacggcauaaauuggcuuacuaucgggauuucuggaccugauaacggugcaguagccguucugaaguauaauggcaucauaacagacaccauuaaguccuggagaaacaauaucuugaggacgcaagagagcgagugugcuugcgugaacgggucguguuucacugucaugaccgauggaccaucugacggccaggccuccuacaaaaucuuucggauugaaaaggguaaaaucgugaagucaguggagaugaaugcgcccaacuaucauuacgaagagugcaguuguuacccugauagcuccgagauuacaugcgucugccgcgacaauuggcacgggucuaacagaccauggguuagcuucaaucagaaccucgaauaucagauaggauacaucuguucaggcauuuuuggcgauaauccgaggcccaacgacaaaacugggaguugcggaccuguguccagcaauggugcaaacggcguaaagggguucucuuuuaaguauggaaacggcguguggaucggucggaccaaaucaaucaguagccgcaauggguucgagaugauuugggauccaaacggcuggacaggaaccgacaauaacuuuuccauaaagcaagacaucgucggcauuaaugaauggucuggguacucggggagcuucgugcagcaucccgagcugacgggucuggauuguauccgaccuugcuucuggguugaacucauuagaggcaggccaaaagagaacacuaucuggacauccgggucaaguauaucuuuuuguggagugaauagcgacaccgucggcugguccuggcccgauggugccgaguuaccguucacuaucgacaaguga

SEQ ID NO: 146388 - RNA, 1410 nt, Artificial Sequence; identical to SEQ ID NO: 146378
  derived and/or modified CDS sequence (opt3) from neuraminidase__InfluenzaA__ADD97204

SEQ ID NO: 146389 - RNA, 1410 nt, Artificial Sequence; identical to SEQ ID NO: 144786
  derived and/or modified CDS sequence (opt3) from neuraminidase__InfluenzaA__ADD97214

SEQ ID NO: 146390 - RNA, 1410 nt, Artificial Sequence; identical to SEQ ID NO: 144786
  derived and/or modified CDS sequence (opt3) from neuraminidase__InfluenzaA__ADD97224

SEQ ID NO: 146391 - RNA, 1410 nt, Artificial Sequence; identical to SEQ ID NO: 144786
  derived and/or modified CDS sequence (opt3) from neuraminidase__InfluenzaA__ADD97234

SEQ ID NO: 146392 - RNA, 1410 nt, Artificial Sequence; identical to SEQ ID NO: 144786
  derived and/or modified CDS sequence (opt3) from neuraminidase__InfluenzaA__ADD97244

SEQ ID NO: 146393 - RNA, 1410 nt, Artificial Sequence; identical to SEQ ID NO: 144786
  derived and/or modified CDS sequence (opt3) from neuraminidase__InfluenzaA__ADD97254

SEQ ID NO: 146394 - RNA, 1410 nt, Artificial Sequence; identical to SEQ ID NO: 144786
  derived and/or modified CDS sequence (opt3) from neuraminidase__InfluenzaA__ADD97264

SEQ ID NO: 146395 - RNA, 1410 nt, Artificial Sequence; identical to SEQ ID NO: 144786
  derived and/or modified CDS sequence (opt3) from neuraminidase__InfluenzaA__ADD97274

SEQ ID NO: 146396 - RNA, 1410 nt, Artificial Sequence
  derived and/or modified CDS sequence (opt3) from neuraminidase__InfluenzaA__ADD97284
augaaccccaaucagaagaucauuaccauaggcagcgugugcaugacaaucgggauggccaaccugauucuccaaaucggaaauauuaucuccauauggaucucucacucaauucagcuugguaaccagaaucagaucgagacuuguaaccaaagugucauuacguacgaaaauaacaccuggguuaaucagacauaugugaacaucugcaauacuaacuucgcugcaggccagagcguaguguccgucaaacuggccggaaauucuucguuguguccugugucagggugggcgauauacagcaaggacaacaguauuagaaucggcuccaaaggugauguuuuugugauuagggagccauucaucucuugcagcccguuagaaugucggaccuuuuuccugacacagggggcucuacucaaugacaagcauuccaacggaaccaucaaagaucgcucacccuaucgaacucugaugaguugcccuauuggcgaggucccaagccccuacaacucucguuuugaauccguggccuggucagcaagcgccugucacgacggcauaaauuggcuuacaaucgggauuaguggaccugauaacggugcuguagcaguucugaaguauaauggcaucauaaccgacacgauuaagucuuggagaaacaauaucuugaggacucaagaguccgagugcgccugugugaacgggagcugcuucaccgucaugacagauggaccaucggacggccaggcuucuuacaaaaucuuucggauugaaaaggguaaaaucgugaaguccguggagaugaaugcccccaacuaucauuacgaagaguguucaugcuacccugauaguagcgagauuacuugcgucugucgcgacaauuggcacggguccaacagaccauggguuucuuucaaucagaaccucgaauaucagauaggauacaucugcagcggcauuuuuggcgauaauccgaggcccaacgacaaaaccgggucauguggaccugugaguuccaauggugcgaacggcguaaagggguucagcuuuaaguauggaaacggcguguggaucggucggacaaaaucuaucucaagucgcaauggguucgagaugauuugggauccaaacggcuggaccggaacggacaauaacuuuagcauaaagcaagacaucgucggcauuaaugaaugguccggguacucuggaucguucgugcagcaucccgagcugacuggucuggauugcauccgaccuuguuucuggguugaacucauuagaggcaggccaaaagagaacacaaucuggaccagcggguccucaauaaguuuuugcggagucaauucugacacugugggcuggagcuggcccgauggugcagaguuaccguucacaaucgacaaguga

SEQ ID NO: 146397 - RNA, 1410 nt, Artificial Sequence; identical to SEQ ID NO: 144786
  derived and/or modified CDS sequence (opt3) from neuraminidase__InfluenzaA__ADD97294

SEQ ID NO: 146398 - RNA, 1410 nt, Artificial Sequence
  derived and/or modified CDS sequence (opt3) from neuraminidase__InfluenzaA__ADD97314
augaaccccaaucagaagaucauuaccauaggcagcgugugcaugacaaucgggauggccaaccugauucuccaaaucggaaauauuaucuccauauggaucucucacucaauucagcuugguaaccagaaucagaucgagacuuguaaccaaagugucauuacguacgaaaauaacaccuggguuaaucagacauaugugaacaucagcaauacuaacuucgcugcaggccaguccguagugucugucaaacuggccggaaauucgucauugugcccugugagcggaugggcgauauacaguaaggacaacuccauuagaaucggcucuaaaggugauguuuuugugauuagggagccauucaucagcuguuccccguuagaaugccggaccuuuuuccugacacagggggcucuacucaaugacaagcauucaaacggaaccaucaaagaucgcagucccuaucgaacucugaugagcuguccuauuggcgaggucccaucucccuacaacucccguuuugaaucaguggccuggagcgcaagugccugccacgacggcauaaauuggcuuacaaucgggauuucuggaccugauaacggugcuguagcaguucugaaguauaauggcaucauaaccgacacgauuaaguccuggagaaacaauaucuugaggacucaagagagcgagugugccugcgugaacgggucguguuucaccgucaugacagauggaccaucugacggccaggcuuccuacaaaaucuuucggauugaaaaggguaaaaucgugaagucaguggagaugaaugcccccaacuaucauuacgaagagugcaguuguuacccugauagcuccgagauuacuugcgucugccgcgacaauuggcacgggucuaacagaccauggguuagcuucaaucagaaccucgaauaucagauaggauacaucuguucaggcauuuuuggcgauaauccgaggcccaacgacaaaaccgggaguugcggaccuguguccagcaauggugcgaacggcguaaagggguucucuuuuaaguauggaaacggcguguggaucggucggacaaaaucaaucaguagccgcaauggguucgagaugauuugggauccaaacggcuggaccggaacggacaauaacuuuuccauaaagcaagacaucgucggcacuaaugaauggucuggguacucggggagcuucgugcagcaucccgagcugacaggucuggauuguauucgaccuugcuucuggguugaacucaucagaggcaggccaaaagagaacaccauuuggacuuccgggucaaguaucucuuuuuguggagugaauagcgacacagucggcugguccuggcccgauggugcagaguuaccguucaccauagacaaguga

SEQ ID NO: 146399 - RNA, 1410 nt, Artificial Sequence; identical to SEQ ID NO: 144786
  derived and/or modified CDS sequence (opt3) from neuraminidase__InfluenzaA__ADD97334

SEQ ID NO: 146400 - RNA, 1410 nt, Artificial Sequence; identical to SEQ ID NO: 144786
  derived and/or modified CDS sequence (opt3) from neuraminidase__InfluenzaA__ADD97344

SEQ ID NO: 146401 - RNA, 1410 nt, Artificial Sequence; identical to SEQ ID NO: 144786
  derived and/or modified CDS sequence (opt3) from neuraminidase__InfluenzaA__ADD97354

SEQ ID NO: 146402 - RNA, 1410 nt, Artificial Sequence
  derived and/or modified CDS sequence (opt3) from neuraminidase__InfluenzaA__ADD97384
augaaccccaaucagaagaucauuaccauaggcagcgugugcaugacaaucgggauggccaaccugauucuccaaaucggaaauauuaucuccauauggaucucucacacuauucagcuugguaaccagaaucagaucgagacguguaaccaaucagucauuaccuacgaaaauaacacauggguuaaucagacuuaugugaacaucaguaauaccaacuucgcugcaggccagagcguaguguccgucaaacuggccggaaauucuucguugugcccugugucagggugggcgauauacagcaaggacaacaguauuagaaucggcuccaaaggugauguuuuugugauuagggagccauucaucucuuguagcccguuagaaugccggacauuuuuccugacccagggggcucuacucaaugacaagcauuccaacggaacuaucaaagaucgcucacccuaucgaacacugaugaguuguccuauuggcgaggucccaagccccuacaacucucguuuugaauccguggccuggucagcaagcgccugccacgacggcauaaauuggcuuaccaucgggauuaguggaccugauaacggugcuguagcaguucugaaguauaauggcaucauaacggacacuauuaagucuuggagaaacaauaucuugaggacccaagaguccgagugugccugcgugaacgggagcuguuucacagucaugacugauggaccaucggacggccaggcuucuuacaaaaucuuucggauugaaaaggguaaaaucgugaaguccguggagaugaaugcccccaacuaucauuacgaagagugcucauguuacccugauaguagcgagauuaccugcgucugccgcgacaauuggcacggguccaacagaccauggguuucuuucaaucagaaccucgaauaucagauaggauacaucuguagcggcauuuuuggcgauaauccgaggcccaacgacaaaacagggucaugcggaccugugaguuccaauggugcgaacggcguaaagggguucagcuuuaaguauggaaacggcguguggaucggucggaccaaaucuaucucaagucgcaauggguucgagaugauuugggauccaaacggcuggacgggaacugacaauaacuuuagcauaaagcaagacaucgucggcauuaaugaaugguccggguacucuggaucguucgugcagcaucccgagcugacaggucuggauuguauccgaccuugcuucuggguugaacucauuagaggcaggccaaaagagaacaccaucuggacuagcggguccucaauaaguuuuuguggagucaauucugacacagugggcuggagcuggcccgauggugcagaguuaccguucaccaucgacaaguga

SEQ ID NO: 146403 - RNA, 1410 nt, Artificial Sequence
  derived and/or modified CDS sequence (opt3) from neuraminidase__InfluenzaA__ADD97394
augaaccccaaucagaagaucauuaccauaggcagcgugugcaugacaaucgggauggccaaccugauucuccaaaucggaaauauuaucuccauauggaucucucacucaauucagcuugguaaccagaaucagaucgagacuuguaaccaaagugucauuacguacgaaaauaacaccuggguuaaucagacauaugugaacaucagcaauacuaacuucgcugcaggccagccuguaguguccgucaaacuggccggaaauucuucguugugcccagugaacgggugggcgauauacucaaaggacaauagcauuagaaucggcaguaaaggugauguuuuugugauuagggagccguucaucuccuguucucccuuagaaugccggaccuuuuuccugacacagggggcucuacucaacgacaagcauagcaacggaaccaucaaagaucgcuccccuuaucgaacucugaugucauguccaauuggcgagguccccaguccuuacaauagccguuuugaaucuguggccugguccgcaucagccugccacgacggcauaaacuggcuuacaaucgggauuagcggaccagauaauggugcuguagcaguucugaaguauaacggcaucauaaccgacacgauuaagaguuggagaaauaacaucuugaggacucaagagucugagugugccugcgugaauggguccuguuucaccgucaugacagauggacccagcgacggccaggcuucguacaaaaucuuucggauugaaaaggguaaaaucgugaagucuguggagaugaacgccccuaauuaucauuacgaagagugcuccuguuacccagauucaagugagauuacuugcgucugccgcgacaacuggcacgggagcaauagaccguggguuuccuucaaccagaaucucgaauaucagauaggauacaucuguucuggcauuuuuggcgauaaccccaggccuaaugacaaaaccgggagcugcggaccagugucaaguaacggugcgaacggcguaaagggguucuccuuuaaguauggaaauggcguguggaucggucggacaaaaagcaucucuucacgcaacggguucgagaugauuugggaucccaauggcuggaccggaacggacaacaauuuuaguauaaagcaagacaucgucggcauuaacgaauggagcggguacuccggaucuuucgugcagcauccugagcugacuggucuggauuguauccgaccaugcuucuggguugaacucauuagaggcaggcccaaagagaauacaaucuggaccucggggagcuccauaucauuuuguggagugaacagugacacugucggcuggucuuggccggauggugcagaguuaccuuucacaaucgacaaguga

SEQ ID NO: 146404 - RNA, 1410 nt, Artificial Sequence; identical to SEQ ID NO: 144786
  derived and/or modified CDS sequence (opt3) from neuraminidase__InfluenzaA__ADD97404

SEQ ID NO: 146405 - RNA, 1410 nt, Artificial Sequence; identical to SEQ ID NO: 144786
  derived and/or modified CDS sequence (opt3) from neuraminidase__InfluenzaA__ADD97424

SEQ ID NO: 146406 - RNA, 1410 nt, Artificial Sequence; identical to SEQ ID NO: 144786
  derived and/or modified CDS sequence (opt3) from neuraminidase__InfluenzaA__ADD97434

SEQ ID NO: 146407 - RNA, 1410 nt, Artificial Sequence; identical to SEQ ID NO: 144786
  derived and/or modified CDS sequence (opt3) from neuraminidase__InfluenzaA__ADD97444

SEQ ID NO: 146408 - RNA, 1410 nt, Artificial Sequence
  derived and/or modified CDS sequence (opt3) from neuraminidase__InfluenzaA__ADD97454
augaaccccaaucagaagaucauuaccauaggcagcgugugcaugacaaucgggauggccaaccugauucuccaaaucggaaauauuaucuccauauggaucucucacucaauucagcuugguaaccagaaucagaucgagacuuguaaccaaagugucauuacguacgaaaauaacaccuggguuaaucagacauaugugaacaucagcaauacuaacuucgcugcaggccaguccguagugucugucaaacuggccggaaauucgucauugugcccuauaagcgggugggcgauuuacaguaaggacaacuccaucagaauuggcucuaaaggugauguguuuguuaucagggagccauucaucagcuguuccccguuagaaugccggaccuuuuuccugacacagggggcucuacucucagacaagcauaguaauggaaccauuaaagaucgcagccccuaucgaacucugaugucuuguccuauaggcgaggugccaucccccuacaacucacguuuugaaagcgucgccuggagugcaucugccugccacgacggcaucaacuggcuuacaauugggaucuccggaccugauaauggugcuguggcaguacugaaguauaacggcauaauuaccgacacgaucaagagcuggagaaauaacaucuugaggacucaagagucggagugugccugcguuaaugggucuuguuucaccgugaugacagauggaccauccgacggccaggcuucauacaaaauuuuucggaucgaaaaggguaaaauugucaagaguguggagaugaacgcccccaauuaucauuacgaagagugcagcuguuacccugauuccucugagauaacuugcgugugccgcgacaacuggcacgggagcaauagaccaugggucucauucaaccagaaucucgaauaucagaucggauacauuuguaguggcaucuuuggcgauaacccgaggcccaaugacaaaaccggguccugcggaccuguuagcucuaacggugcgaauggcgugaagggguucucauuuaaguauggaaacggcguauggaucggucggacaaaaaguauuagcucccgcaacggguucgagaugauaugggauccaaauggcuggaccggaacggacaacaauuuuucuaucaagcaagacauugugggcaucaacgaauggucgggguacagcggauccuucguccagcaucccgagcugacuggucuggauuguauucgaccuugcuucuggguggaacucaucagaggcaggccaaaagagaauacaauauggaccucagggaguucuaucagcuuuuguggaguuaacuccgacacugugggcuggucauggcccgauggugcagaguuaccguucacaauugacaaguga

SEQ ID NO: 146409 - RNA, 1410 nt, Artificial Sequence
  derived and/or modified CDS sequence (opt3) from neuraminidase__InfluenzaA__ADD97464
augaaccccaaucagaagaucauuaccauaggcagcgugugcaugacaaucgggauggccaaccugauucuccaaaucggaaauauuaucuccauauggaucucucacucaauucagcuugguaaccagaaucagaucgagacuuguaaccaaagugucauuacguacgaaaauaacaccuggguuaaucagacauaugugaacaucagcaauacuaacuucgcugcaggccaguccguagugucugucaaacuggccggaaauucgucauugugcccugugagcggaugggcgauauacaguaaggacaacuccauuagaaucggcucuaaaggugauguuuuugugauuagggagccauucaucagcuguuccccguuagaaugccggaccuuuuuccugacacagggggcucuacucaaugacaagcauucaaacggaaccaucaaagaucgcagucccuaucgaacucugaugagcuguccuauuggcgaggucccaucucccuacaacucccguuuugaaucaguggccuggagcgcaagugccugccacgacggcauaaauuggcuuacaaucgggauuucuggaccugauaacggugcuguagcaguucugaaguauaauggcaucauaaccgacacgauuaaguccuggagaaacaauaucuugaggacucaagagagcgagugugccugcgugaacgggucguguuucaccgucaugacagauggaccaucugacggccaggcuuccuacaaaaucuuucggauugaaaaggguaaaaucgugaagucaguggagaugaaugcccccaacuaucauuacgaagagugcaguuguuacccugauagcuccgagauuacuugcgucugccgcgacaauuggcacgggucuaacagaccauggguuagcuucaaucagaaccucgaauaucagauaggauacaucuguucaggcauuuuuggcgauaauccgaggcccaacgacaaaaccgggaguugcggaccuguguccagcaauggugcgaacggcguaaagggguucucuuuuaaguauggaaacggcguguggaucggucggacaaaaucaaucaguagccgcaauggguucgagaugauuugggauccaaacggcuggaccggaacggacaauaacuuuuccacuaagcaagacauagucggcaucaaugaauggucuggguacucggggagcuucgugcagcaucccgagcugacaggucuggauuguauucgaccuugcuucuggguugaacucaucagaggcaggccaaaagagaacaccauuuggacuuccgggucaaguaucucuuuuuguggagugaauagcgacacagucggcugguccuggcccgauggugcagaguuaccguucaccauagacaaguga

SEQ ID NO: 146410 - RNA, 1410 nt, Artificial Sequence; identical to SEQ ID NO: 144786
  derived and/or modified CDS sequence (opt3) from neuraminidase__InfluenzaA__ADD97474

SEQ ID NO: 146411 - RNA, 1410 nt, Artificial Sequence; identical to SEQ ID NO: 144786
  derived and/or modified CDS sequence (opt3) from neuraminidase__InfluenzaA__ADD97484

SEQ ID NO: 146412 - RNA, 1410 nt, Artificial Sequence
  derived and/or modified CDS sequence (opt3) from neuraminidase__InfluenzaA__ADD97494
augaaccccaaucagaagaucauuaccauaggcagcgugugcaugacaaucgggauggccaaccugauucuccaaaucggaaauauuaucuccauauggaucucucacucaauucagcuugguaaccagaaucagaucgagacuuguaaccaaagugucauuacguacgaaaauaacaccuggguuaaucagacauaugugaacaucagcaauacuaacuucgcugcaggccaguccguagugucugucaaacuggccgggaauagcucauugugcccugugagcggaugggcgauauacaguaaggacaacuccauuagaaucggcucuaaaggugauguuuuugugauuagggagccauucaucagcuguuccccgucagaaugccggaccuuuuucuuaacacagggggcucugcuaaaugacaagcauaguaacggaaccaucaaagaucgcagccccuaucgaacucucaugucuuguccuauuggcgaggucccaucccccuacaacucacguuuugaaagcguggccuggagugcaucugccugccacgacggcauaaauuggcugacaaucgggauuuccggaccugauaacggugcuguagcaguucuuaaguauaauggcaucauaaccgacacgauuaagagcuggagaaacaauauccugaggacucaagagucggagugugccugcgugaacgggucuuguuucaccgucaugacagauggaccauccgacggccaggcuucauacaaaaucuuucggauugaaaaggguaaaaucgugaagaguguggagaugaaugcccccaacuaucauuacgaagagugcagcuguuacccugauuccucugagauuacuugcgucugccgcgacaauuggcacgggagcaacagaccauggguuucauucaaucagaacuuggaauaucagauaggauacaucuguaguggcauuuuuggcgauaauccgaggcccaacgacaaaaccggguccugcggaccugugagcucuaauggugcgaacggcguaaagggguucucauuuaaguauggaaacggcguguggaucggucggacaaaaaguaucagcucccgcaauggguucgagaugauuugggauccaaacggcuggaccggaacggacaauaacuuuucuauaaagcaagacaucgucggcauuaaugaauggucgggguacagcggauccuucgugcagcaucccgagcucacuggucuggauuguauccgaccuugcuucuggguugaacugauuagaggcaggccaaaagagaacacaaucuggaccucagggaguucuauaucguuuuguggagucaauuccgacacugugggcuggucauggcccgauggugcagagcucccguucacaaucgacaaguga

SEQ ID NO: 146413 - RNA, 1410 nt, Artificial Sequence; identical to SEQ ID NO: 144786
  derived and/or modified CDS sequence (opt3) from neuraminidase__InfluenzaA__ADD97504

SEQ ID NO: 146414 - RNA, 1410 nt, Artificial Sequence; identical to SEQ ID NO: 144786
  derived and/or modified CDS sequence (opt3) from neuraminidase__InfluenzaA__ADD97514

SEQ ID NO: 146415 - RNA, 1410 nt, Artificial Sequence; identical to SEQ ID NO: 146398
  derived and/or modified CDS sequence (opt3) from neuraminidase__InfluenzaA__ADD97534

SEQ ID NO: 146416 - RNA, 1410 nt, Artificial Sequence; identical to SEQ ID NO: 144786
  derived and/or modified CDS sequence (opt3) from neuraminidase__InfluenzaA__ADD97544

SEQ ID NO: 146417 - RNA, 1410 nt, Artificial Sequence; identical to SEQ ID NO: 144786
  derived and/or modified CDS sequence (opt3) from neuraminidase__InfluenzaA__ADD97554

SEQ ID NO: 146418 - RNA, 1410 nt, Artificial Sequence; identical to SEQ ID NO: 146402
  derived and/or modified CDS sequence (opt3) from neuraminidase__InfluenzaA__ADD97564

SEQ ID NO: 146419 - RNA, 1410 nt, Artificial Sequence; identical to SEQ ID NO: 144786
  derived and/or modified CDS sequence (opt3) from neuraminidase__InfluenzaA__ADD97574

SEQ ID NO: 146420 - RNA, 1410 nt, Artificial Sequence; identical to SEQ ID NO: 144786
  derived and/or modified CDS sequence (opt3) from neuraminidase__InfluenzaA__ADD97584

SEQ ID NO: 146421 - RNA, 1410 nt, Artificial Sequence
  derived and/or modified CDS sequence (opt3) from neuraminidase__InfluenzaA__ADD97681
augaaccccaaucagaagaucauuaccauaggcagcgugugcaugacaaucgggauggccaaccugauucuccaaaucggaaauauuaucuccauauggaucucucacucaauucagcuugguaaccagaaucagaucgagacuuguaaccaaagugucauuacguacgaaaauaacaccuggguuaaucagacauaugugaacaucagcaauacuaacuucgcugcaggccaguccguagugucugucaaacuggccggaaauucgucauugugcccugugagcggaugggcgauauacaguaaggacaacuccauuagaaucggcucuaaaggugauguuuuugugauuagggagccauucaucagcuguuccccguuagaaugccggaccuuuuuccugacacagggggcucuacucaaugacaagcauucaaacggaaccaucaaagaucgcagucccuaucgaacucugaugagcuguccuauuggcgaggucccaucucccuacaacucccguuuugaaucaguggccuggagcgcaagugccugccacgacggcauaaauuggcuuacaaucgggauuucuggaccugauaacggugcuguagcaguucugaaguauaauggcaucauaaccgacacgauuaaguccuggagaaacaauaucuugaggacucaagagagcgagugugccugcgugaacgggucguguuucaccgucaugacagauggaccaucugacggccaggcuuccuacaaaaucuuucggauugaaaaggguaaaaucgugaagucaguggagauuaaugcccccaacuaucauuacgaagagugcaguuguuacccugauagcuccgagauaacuugcgucugccgcgacaauuggcacgggucuaacagaccauggguuagcuucaaucagaaccucgaauaucagaucggauacauuuguucaggcaucuuuggcgauaauccgaggcccaacgacaaaaccgggaguugcggaccuguguccagcaauggugcgaacggcguaaagggguucucuuuuaaguauggaaacggcguguggaucggucggacaaaaucaauuaguagccgcaauggguucgagaugauaugggauccaaacggcuggaccggaacggacaauaacuuuuccaucaagcaagacauugucggcaucaaugaauggucuggguacucggggagcuucgugcagcaucccgagcugacuggucuggauuguauucgaccuugcuucuggguugaacucaucagaggcaggccaaaagagaacacaauauggaccuccgggucaaguaucucuuuuuguggaauuaauagcgacacugugggcugguccuggcccgauggugcagaguuaccguucacaaucgacaaguga

SEQ ID NO: 146422 - RNA, 1410 nt, Artificial Sequence; identical to SEQ ID NO: 146378
  derived and/or modified CDS sequence (opt3) from neuraminidase__InfluenzaA__ADD97691

SEQ ID NO: 146423 - RNA, 1410 nt, Artificial Sequence; identical to SEQ ID NO: 145923
  derived and/or modified CDS sequence (opt3) from neuraminidase__InfluenzaA__ADD97701

SEQ ID NO: 146424 - RNA, 1410 nt, Artificial Sequence; identical to SEQ ID NO: 144786
  derived and/or modified CDS sequence (opt3) from neuraminidase__InfluenzaA__ADD97891

SEQ ID NO: 146425 - RNA, 1410 nt, Artificial Sequence; identical to SEQ ID NO: 144786
  derived and/or modified CDS sequence (opt3) from neuraminidase__InfluenzaA__ADD97901

SEQ ID NO: 146426 - RNA, 1410 nt, Artificial Sequence; identical to SEQ ID NO: 144786
  derived and/or modified CDS sequence (opt3) from neuraminidase__InfluenzaA__ADD97911

SEQ ID NO: 146427 - RNA, 1410 nt, Artificial Sequence; identical to SEQ ID NO: 144786
  derived and/or modified CDS sequence (opt3) from neuraminidase__InfluenzaA__ADD97921

SEQ ID NO: 146428 - RNA, 1410 nt, Artificial Sequence; identical to SEQ ID NO: 144786
  derived and/or modified CDS sequence (opt3) from neuraminidase__InfluenzaA__ADD97931

SEQ ID NO: 146429 - RNA, 1410 nt, Artificial Sequence; identical to SEQ ID NO: 145553
  derived and/or modified CDS sequence (opt3) from neuraminidase__InfluenzaA__ADD97941

SEQ ID NO: 146430 - RNA, 1410 nt, Artificial Sequence
  derived and/or modified CDS sequence (opt3) from neuraminidase__InfluenzaA__ADD97951
augaaccccaaucagaagaucauuaccauaagcuccgugugcaugacaaucggcauggccaaccugauucuccaaaucgggaauauuaucucuauauggaucucacacaguauucagcuuggaaaccagaaucagaucgagacuuguaaccaaagcgucauuacguacgaaaauaacaccuggguuaaucagacauaugugaacaucuccaauacuaacuucgcugcaggucagucuguagugucggucaaacuggccggcaauagcagcuugugcccugugagugggugggcgauauacuccaaggacaacucuauuagaaucggaagcaaaggcgauguuuuugugauuagggagccauucaucuccuguucaccguuagaaugccggaccuuuuuccugacacagggugcucuacucaaugacaagcauaguaacgggaccaucaaagaucgcagccccuaucgaacucugaugucuuguccuauuggagaggucccaucccccuacaacucacguuuugaaagcguggccuggagugcaucugccugccacgacggcauaaauuggcuuacaaucggcauuuccgggccugauaacggagcuguagcaguucugaaguauaaugguaucauaaccgacacgauuaagagcuggagaaacaauaucuugaggacucaagagucggagugugccugcgugaacggcucuuguuucaccgucaugacagaugggccauccgacggacaggcuucauacaaaaucuuucggauugaaaagggcaaaaucgugaagaguguggagaugaaugcccccaacuaucauuacgaagagugcagcuguuacccugauuccucugagauuacuugcgucugccgcgacaauuggcacgguagcaacagaccauggguuucauucaaucagaaccucgaauaucagauaggguacaucuguaguggaauuuuuggcgauaauccgaggcccaacgacaaaaccggcuccugcgggccugugagcucuaauggagcgaacgguguaaagggcuucucauuuaaguaugggaacggaguguggaucggccggacaaaaaguaucagcucccgcaaugguuucgagaugauuugggauccaaacggguggaccggcacggacaauaacuuuucuauaaagcaagacaucgucggaauuaaugaauggucgggcuacagcggguccuucgugcagcaucccgagcugacuggacuggauuguauccgaccuugcuucuggguugaacucauuagagguaggccaaaagagaacacaaucuggaccucaggcaguucuauaucauuuuguggggucaauuccgacacugugggauggucauggcccgauggcgcagaguuaccguucacaaucgacaaguga

SEQ ID NO: 146431 - RNA, 1410 nt, Artificial Sequence
  derived and/or modified CDS sequence (opt3) from neuraminidase__InfluenzaA__ADD97961
augaaccccaaucagaagaucauuaccauaggcagcgugugcaugacaaucgggauggucaaccugauucuccaaaucggaaauauuaucuccauauggaucucucacucaauucagcuugguaaccagaaucagaucgagacuuguaaccaaaguguuauuacguacgaaaauaacaccugggugaaucagacauauguaaacaucagcaauacuaacuucgccgcuggccaguccguggucucugugaaacuggcagggaaugccucguugugcccuguuucaggaugggcgauauacagcaaggacaacaguauuagaaucggcuccaaaggugauguguuugucauuagggagccauucaucucuuguagcccguuagaaugccggaccuuuuuccugacacagggggcucuacucaaugacaagcauuccaacggaaccaucaaagaucgcucacccuaucgaacucugaugaguuguccuauuggcgaggugccaagccccuacaacucucguuuugaauccguagccuggucagcaagcgccugccacgacggcauaaauuggcuuacaaucgggauuaguggaccugauaacggugcuguugcagugcugaaguauaauggcaucauaaccgacacgauuaagucuuggagaaacaauaucuugaggacucaagaguccgagugugccugcgucaacgggagcuguuucaccgugaugacagauggaccaucggacggccaggcuucuuacaaaaucuuucggauugaaaaggguaaaaucgugaaguccgucgagaugaaugcccccaacuaucauuacgaagagugcucauguuacccugauaguagcgagauuacuugcguuugccgcgacaauuggcacggguccaacagaccaugggugucuuucaaucagaaccucgaauaucagauaggauacaucuguagcggcauuuuuggcgauaauccgaggcccaacgacaaaaccgggucaugcggaccuguaaguuccaauggugcgaacggcgugaagggguucagcuuuaaguauggaaacggcgucuggaucggucggacaaaaucuaucucaagucgcaauggguucgagaugauuugggauccaaacggcuggaccggaacggacaauaacuuuagcauaaagcaagacaucgugggcauuaaugaaugguccggguacucuggaucguucguucagcaucccgagcugacuggucuggauuguauccgaccuugcuucuggguggaacucauuagaggcaggccaaaagagaacacaaucuggaccagcggguccucaauaaguuuuuguggagucaauucugacacugugggcuggagcuggcccgauggugcagaguuaccguucacaaucgacaaguga

SEQ ID NO: 146432 - RNA, 1410 nt, Artificial Sequence; identical to SEQ ID NO: 146378
  derived and/or modified CDS sequence (opt3) from neuraminidase__InfluenzaA__ADD97971

SEQ ID NO: 146433 - RNA, 1410 nt, Artificial Sequence; identical to SEQ ID NO: 144786
  derived and/or modified CDS sequence (opt3) from neuraminidase__InfluenzaA__ADD97981

SEQ ID NO: 146434 - RNA, 1410 nt, Artificial Sequence
  derived and/or modified CDS sequence (opt3) from neuraminidase__InfluenzaA__ADD97991
augaaccccaaucagaagaucauuaccauaggcagcgugugcaugacaaucgggauggccaaccugauucuccaaaucggaaauauuaucuccauauggaucucucacucaauucagcuugguaaccagaaucagaucgagacuuguaaccaaagugucauuacguacgaaaauaacaccuggguuaaucagacauaugugaacaucagcaauacuaacuucgcugcaggccaguccguagugucugucaaacuggccggaaauucgucauugugcccugugagcggaugggcgauauacaguaaggacaacuccauuagaaucggcucuaaaggugauguuuuugugauuagggagccauucaucagcuguuccccguuagaaugccggaccuuuuuccugacacagggggcucuacucaaugacaagcauucaaacggaaccaucaaagaucgcagucccuaucgaacucugaugagcuguccuauuggcgaggucccaucucccuacaacucccguuuugaaucaguggccuggagcgcaagugccugccacgacggcauaaauuggcuuacaaucgggauuucuggaccugauaacggugcuguagcaguucugaaguauaauggcaucauaaccgacacgauuaaguccuggagaaacaauaucuugaggacucaagagagcgagugugccugcgugaacgggucguguuucaccgucaugacagauggaccaucugacggccaggcuuccuacaaaaucuuucggauugaaaaggguaaaaucgugaagucaguggagaugaaugcccccaacuaucauuacgaagagugcaguuguuacccugauagcuccgagauuacuugcgucugccgcgacaauuggcacgggucuaacagaccauggguuagcuucaaucagaaccucgaauaucagauaggauacaucuguucaggcauuuuuggcgauaauccgaggcccaacgacaaaaccgggaguugcggaccuguguccagcaauggugcgaacggcguaaagggguucucuuuuaaguauggaaacggcguguggaucggucggacaaaaucaaucaguagccgcaauggguucgagaugauuugggauccaaacggcuggauaggaaccgacaauaacuuuuccaucaagcaagacauugucggcaucaaugaauggucuggguacucggggagcuucgugcagcaucccgagcugacgggucuggauuguauucgaccuugcuucuggguugaacucaucagaggcaggccaaaagagaacacuauauggacauccgggucaaguaucucuuuuuguggagugaauagcgacaccgucggcugguccuggcccgauggugcagaguuaccguucacuauugacaaguga

SEQ ID NO: 146435 - RNA, 1410 nt, Artificial Sequence
  derived and/or modified CDS sequence (opt3) from neuraminidase__InfluenzaA__ADD98001
augaaccccaaucagaagaucauuaccauaggcagcgugugcaugacaaucgggauggccaaccugauucuccaaaucggaaauauuaucuccauauggaucucucacucaauucagcuugguaaccagaaucagaucgagacuuguaaccaaagugucauuacguacgaaaauaacaccuggguuaaucagacauaugugaacaucagcaauacuaacuucgcugcaggccaguccguagugucugucaaacuggccggaaauucgucauugugcccugugagcggaugggcgauauacaguaaggacaacuccauuagaaucggcucuaaaggugauguuuuugugauuagggagccauucaucagcuguuccccguuagaaugccggaccuuuuuccugacacagggggcucuacucaaugacaagcauucaaacggaaccaucaaagaucgcagucccuaucgaacucugaugagcuguccuauuggcgaggucccaucucccuacaacucccguuuugaaucaguggccuggagcgcaagugccugccacgacggcauaaauuggcuuacaaucgggauuucuggaccugauaacggugcuguagcaguucugaaguauaauggcaucauaaccgacacggugaaguccuggagaaacaauauuuugaggacucaagagagcgagugugccugcgucaacgggucguguuucaccgugaugacagauggaccaucugacggccaggcuuccuacaaaaucuuucggaucgaaaaggguaaaauugugaagucagucgagaugaaugcccccaacuaucauuacgaagagugcaguuguuacccugauagcuccgagaucacuugcguuugccgcgacaauuggcacgggucuaacagaccaugggugagcuucaaucagaaccucgaauaucagauuggauacauauguucaggcaucuuuggcgauaauccgaggcccaacgacaaaaccgggaguugcggaccuguauccagcaauggugcgaacggcgugaagggguucucuuuuaaguauggaaacggcgucuggauuggucggacaaaaucaaucaguagccgcaauggguucgagaugaucugggauccaaacggcuggaccggaacggacaauaacuuuuccauuaagcaagacauagugggcaucaaugaauggucuggguacucggggagcuucguucagcaucccgagcugacuggucuggauuguauucgaccuugcuucuggguggaacucaucagaggcaggccaaaagagaacacaauuuggaccuccgggucaaguaucucuuuuuguggagucaauagcgacacugugggcugguccuggcccgauggugcagaguuaccguucacaauagacaaguga

SEQ ID NO: 146436 - RNA, 1410 nt, Artificial Sequence; identical to SEQ ID NO: 144786
  derived and/or modified CDS sequence (opt3) from neuraminidase__InfluenzaA__ADD98011

SEQ ID NO: 146437 - RNA, 1410 nt, Artificial Sequence; identical to SEQ ID NO: 144786
  derived and/or modified CDS sequence (opt3) from neuraminidase__InfluenzaA__ADD98031

SEQ ID NO: 146438 - RNA, 1410 nt, Artificial Sequence; identical to SEQ ID NO: 146435
  derived and/or modified CDS sequence (opt3) from neuraminidase__InfluenzaA__ADD98041

SEQ ID NO: 146439 - RNA, 1410 nt, Artificial Sequence; identical to SEQ ID NO: 144786
  derived and/or modified CDS sequence (opt3) from neuraminidase__InfluenzaA__ADD98051

SEQ ID NO: 146440 - RNA, 1410 nt, Artificial Sequence; identical to SEQ ID NO: 144786
  derived and/or modified CDS sequence (opt3) from neuraminidase__InfluenzaA__ADD98061

SEQ ID NO: 146441 - RNA, 1410 nt, Artificial Sequence; identical to SEQ ID NO: 144786
  derived and/or modified CDS sequence (opt3) from neuraminidase__InfluenzaA__ADD98071

SEQ ID NO: 146442 - RNA, 1410 nt, Artificial Sequence; identical to SEQ ID NO: 144786
  derived and/or modified CDS sequence (opt3) from neuraminidase__InfluenzaA__ADD98081

SEQ ID NO: 146443 - RNA, 1410 nt, Artificial Sequence; identical to SEQ ID NO: 144786
  derived and/or modified CDS sequence (opt3) from neuraminidase__InfluenzaA__ADD98091

SEQ ID NO: 146444 - RNA, 1410 nt, Artificial Sequence; identical to SEQ ID NO: 145612
  derived and/or modified CDS sequence (opt3) from neuraminidase__InfluenzaA__ADD98101

SEQ ID NO: 146445 - RNA, 1410 nt, Artificial Sequence
  derived and/or modified CDS sequence (opt3) from neuraminidase__InfluenzaA__ADD98111
augaaccccaaucagaagaucauuaccauaggcagcgugugcaugacaaucgggauggccaaccugauucuccaaaucggaaauauuaucuccauauggaucucucacucaauucagcuugguaaccagaaucagaucgagacuuguaaccaaagugucauuacguacgaaaauaacaccuggguuaaucagacauaugugaacaucagcaauacuaacuucgcugcaggccaguccguagugucugucaaacuggccggaaauucgucauugugcccugugagcggaugggcgauauacaguaaggacaacuccauuagaaucggcucuaaaggugauguuuuugugauuagggagccauucaucagcuguuccccguuagaaugccggaccuuuuuccugacacagggggcucuacucaaugacaagcauucaaacggaaccaucaaagaucgcagucccuaucgaacucugaugagcuguccuauuggcgaggucccaucucccuacaacucccguuuugaaucaguggccuggagcgcaagugccugccacgacggcauaaauuggcuuacaaucgggauuucuggaccugauaacggugcuguagcaguucugaaguauaauggcaucauaaccgacacgauuaaguccuggagaaacaauaucuugaggacucaagagagcgagugugccugcgugaacgggucguguuucaccgucaugacagauggaccaucugacggccaggcuuccuacaaaaucuuucggauugaaaaggguaaaaucgugaagucaguggagaugaaugcccccaacuaucauuacgaagagugcaguuguuacccugauagcuccgagauuacuugcgucugccgcgacaauuggcacgggucuaacagaccauggguuagcuucaaucagaaccucgaauaucagauaggauacaucuguucaggcauucugggcgauaauccgaggcccaacgacaaaaccgggaguugcggaccuguguccagcaauggugcgaacggcguaaagggguuuucuuucaaguauggaaacggcguguggaucggucggacaaaaucaaucaguagccgcaauggguuugagaugauuugggauccaaacggcuggaccggaacggacaauaacuucuccauaaagcaagacaucgucggcauuaaugaauggucuggguacucggggagcuuugugcagcaucccgagcugacuggucucgauuguauccgaccuugcuucuggguugaauuaauuagaggcaggccaaaagagaacacaaucuggaccuccgggucaaguauaucuuucuguggagugaauagcgacacugucggcugguccuggcccgauggugcagagcugccguuuacaaucgacaaguga

SEQ ID NO: 146446 - RNA, 1410 nt, Artificial Sequence; identical to SEQ ID NO: 144786
  derived and/or modified CDS sequence (opt3) from neuraminidase__InfluenzaA__ADD98121

SEQ ID NO: 146447 - RNA, 1410 nt, Artificial Sequence; identical to SEQ ID NO: 144786
  derived and/or modified CDS sequence (opt3) from neuraminidase__InfluenzaA__ADD98131

SEQ ID NO: 146448 - RNA, 1410 nt, Artificial Sequence; identical to SEQ ID NO: 144786
  derived and/or modified CDS sequence (opt3) from neuraminidase__InfluenzaA__ADD98141

SEQ ID NO: 146449 - RNA, 1410 nt, Artificial Sequence; identical to SEQ ID NO: 144786
  derived and/or modified CDS sequence (opt3) from neuraminidase__InfluenzaA__ADD98151

SEQ ID NO: 146450 - RNA, 1410 nt, Artificial Sequence
  derived and/or modified CDS sequence (opt3) from neuraminidase__InfluenzaA__ADD98161
augaaccccaaucagaagaucauuaccauaggcagcgugugcaugacaaucgggauggccaaccugauucuccaaaucggaaauauuaucuccauauggaucucucacacuauucagcuugguaaccagaaucagaucgagacguguaaccaaucagucauuaccuacgaaaauaacacauggguuaaucagacuuaugugaacaucaguaauaccaacuucgcugcaggccagagcguaguguccgucaaacuggccggaaauucuucguugugcccugugucagggugggcgauauacagcaaggacaacaguauuagaaucggcuccaaaggugauguuuuugugauuagggagccauucaucucuuguagcccguuagaaugccggacauuuuuccugacccagggggcucuacucaaugacaagcauuccaacggaacuaucaaagaucgcucacccuaucgaacacugaugaguuguccuauuggcgaggucccaagccccuacaacucucguuuugaauccguggccuggucagcaagcgccugccacgacggcauaaauuggcuuaccaucgggauuaguggaccugauaacggugcuguagcaguucugaaguauaauggcaucauaacggacacuauuaagucuuggagaaacaauaucuugaggacccaagaguccgagugugccugcgugaacgggagcuguuucacagucaugacugauggaccaucggacggccaggcuucuuacaaaaucuuucggauugaaaaggguaaaaucgugaaguccguggagaugaaugcccccaacuaucauuacgaagagugcucauguuacccugauaguagcgagauuaccugcgucugccgcgacaauuggcacggguccaacagaccauggguuucuuucaaucagaaccucgaauaucagauaggauacaucuguagcggcauuuuuggcgauaauccgaggcccaacgacaaaacagggucaugcggaccugugaguuccaauggugcgaacggcguaaagggguucagcuuuaaguauggaaacggcguguggaucggucggaccaaaucuaucucaagucgcaauggguucgagaugauuugggauccaaacggcuggacgcgaacugacaauaacuuuagcauaaagcaagacaucgucggaauuaaugaaugguccggcuacucugggucguucgugcagcaucccgagcugacaggacuggauuguaucagaccuugcuucuggguugaacucauuaggggucggccaaaagagaacaccaucuggacuagcggcuccucaauaaguuuuuguggggucaauucugacacagugggauggagcuggcccgauggcgcagaguuaccguucaccaucgacaaguga

SEQ ID NO: 146451 - RNA, 1410 nt, Artificial Sequence
  derived and/or modified CDS sequence (opt3) from neuraminidase__InfluenzaA__ADD98171
augaaccccaaucagaagaucauuauaaucggcagcgugugcaugaccauugggauggccaaccugauccuccaaauuggaaauaucauauccaucuggauuucucacucaauccagcuugguaaccagaaucagauugagacauguaaccaaagugucaucacuuacgaaaauaacacguggguuaaucagaccuaugugaacauaagcaauacaaacuucgcugcaggccagacuguaguguccgucaaacuggccggaaauucuucguugugcccugugucaggaugggcgauuuacagcaaggacaacaguaucagaauuggcuccaaaggugauguuuuugugaucagggagccauucaucucuuguagcccguuagaaugccggaccuuuuuccugacacagggggcucuacucaaugacaagcauuccaacggaaccauuaaagaucgcucacccuaucgaacucugaugaguuguccuauaggcgaggucccaagccccuacaacucucguuuugaauccguggccuggucagcaagcgccugccacgacggcaucaauuggcuuacaauugggaucaguggaccugauaacggugcuguagcaguucugaaguauaauggcauaauuaccgacacgaucaagucuuggagaaacaauaucuugaggacucaagaguccgagugugccugcgugaacgggagcuguuucaccgucaugacagauggaccaucggacggccaggcuucuuacaaaauuuuucggaucgaaaaggguaaaauugugaaguccguggagaugaaugcccccaacuaucauuacgaagagugcucauguuacccugauaguagcgagauaacuugcgucugccgcgacaauuggcacggguccaacagaccauggguuucuuucaaucagaaccucgaauaucagaucggauacauuuguagcggcaucuuuggcgauaauccgaggucaaacgacaaaaccgggaguugcggacccguguccagcaauggugcgaacggcguaaagggguucucuuuuaaguauggaaacggcguguggaucggucggacaaaaucaauuaguagccgcaauggguucgagaugauaugggauccuaacggcuggaccggaacggacaauaacuuuuccaucaagcaagacauugucggcaucaaugaauggucuggguacucggggagcuucgugcagcauccagagcugacuggucuggauuguauucgacccugcuucuggguugaacucaucagaggcaggccuaaagagaacacaauauggaccuccgggucaaguaucucuuuuuguggagugaauagcgacacugucggcugguccuggccagauggugcagaguuacccuucacaauugacaaguga

SEQ ID NO: 146452 - RNA, 1410 nt, Artificial Sequence
  derived and/or modified CDS sequence (opt3) from neuraminidase__InfluenzaA__ADD98181
augaaccccaaucagaagaucauuaccauaggcagcgugugcaugacaaucgggauggccaaccugauucuccaaaucggaaauaugauuuccaucuggauaucucacucaauccagcuugagaaccagaaucagauugaaacuuguaaccaaagugucaucacguacgagaauaacaccuggguuaaucagacauaugugaacauuagcaauacuaacuucgcugcaggucaguccguagugucugucaaacuggccggcaauucgucauugugcccugugagcgggugggcgaucuacaguaaggacaacuccauaagaauuggaucuaaaggcgauguuuuugugaucagggaaccauucauuagcuguuccccguuagagugccggaccuuuuuccugacacagggugcucuacucaaugacaagcauucaaacgggaccaucaaagaucgcagucccuaucgaacucugaugagcuguccuaucggagaagucccaucucccuacaacucccguuuugagucaguggccuggagcgcaagugccugccacgacggcauuaauuggcuuacaauaggcaucucugggccugauaacggagcuguagcaguucugaaguauaaugguauuaucaccgacacgauaaaguccuggagaaacaauauuuugaggacucaagagagcgaaugugccugcgugaacggcucguguuucaccgucaugacagaugggccaucugacggacaggcuuccuacaaaaucuuucggaucgagaagggcaaaauugugaagucaguggaaaugaaugcccccaacuaucauuacgaggagugcaguuguuacccugauagcuccgaaaucacuugcgucugccgcgacaauuggcacgguucuaacagaccauggguuagcuucaaucagaaccucgaguaucagauuggguacauauguucaggaaucuuuggcgauaauccgaggcccaacgacaaaaccggcaguugcgggccuguguccagcaauggagcgaacgguguaaagggcuucucuuuuaaguaugggaacggaguguggauuggccggacaaaaucaaucaguagccgcaaugguuucgaaaugaucugggauccaaacggguggaccggcacggacaauaacuuuuccauuaagcaagacauagucggaaucaaugaguggucuggcuacucggggagcuucgugcagcaucccgaacugacuggacuggauuguauucgaccuugcuucuggguugagcucaucagagguaggccaaaagagaacacaauuuggaccuccggcucaaguaucucuuuuuguggggugaauagcgacacugucggaugguccuggcccgauggcgcagaauuaccguucacaauagacaaguga

SEQ ID NO: 146453 - RNA, 1410 nt, Artificial Sequence; identical to SEQ ID NO: 144786
  derived and/or modified CDS sequence (opt3) from neuraminidase__InfluenzaA__ADD98201

SEQ ID NO: 146454 - RNA, 1410 nt, Artificial Sequence; identical to SEQ ID NO: 144786
  derived and/or modified CDS sequence (opt3) from neuraminidase__InfluenzaA__ADD98211

SEQ ID NO: 146455 - RNA, 1410 nt, Artificial Sequence; identical to SEQ ID NO: 146009
  derived and/or modified CDS sequence (opt3) from neuraminidase__InfluenzaA__ADE20324

SEQ ID NO: 146456 - RNA, 1410 nt, Artificial Sequence; identical to SEQ ID NO: 146009
  derived and/or modified CDS sequence (opt3) from neuraminidase__InfluenzaA__ADE20334

SEQ ID NO: 146457 - RNA, 1410 nt, Artificial Sequence; identical to SEQ ID NO: 146009
  derived and/or modified CDS sequence (opt3) from neuraminidase__InfluenzaA__ADE20344

SEQ ID NO: 146458 - RNA, 1410 nt, Artificial Sequence; identical to SEQ ID NO: 146009
  derived and/or modified CDS sequence (opt3) from neuraminidase__InfluenzaA__ADE20354

SEQ ID NO: 146459 - RNA, 1410 nt, Artificial Sequence; identical to SEQ ID NO: 146009
  derived and/or modified CDS sequence (opt3) from neuraminidase__InfluenzaA__ADE20378

SEQ ID NO: 146460 - RNA, 1410 nt, Artificial Sequence; identical to SEQ ID NO: 146009
  derived and/or modified CDS sequence (opt3) from neuraminidase__InfluenzaA__ADE20391

SEQ ID NO: 146461 - RNA, 1410 nt, Artificial Sequence; identical to SEQ ID NO: 146009
  derived and/or modified CDS sequence (opt3) from neuraminidase__InfluenzaA__ADE20631

SEQ ID NO: 146462 - RNA, 1410 nt, Artificial Sequence; identical to SEQ ID NO: 146009
  derived and/or modified CDS sequence (opt3) from neuraminidase__InfluenzaA__ADE20641

SEQ ID NO: 146463 - RNA, 1410 nt, Artificial Sequence
  derived and/or modified CDS sequence (opt3) from neuraminidase__InfluenzaA__ADE20651
augaaccccaaucagaagaucauuaccauaggcagcgugugcaugacaaucgggauggccaaccugauucuccaaaucggaaauauuaucuccauauggaucucucacucaauucagcuugguaaccagaaucagaucgagacuuguaaccaaagugucauuacguacgaaaauaacaccuggguuaaucagacauaugugaacaucagcaauacuaacuucgcugcaggccaguccguagugucugucaaacuggugggaaauucgucauugugcccuguuagcggaugggccauauacaguaaggacaacuccgugagaauuggcucuaaaggugaugucuuugugaucagggagccauucauuagcuguuccccguuagaaugccggaccuuuuuccugacacagggggcgcuacucaaugacaagcauucaaacggaaccaucaaagaucgcagucccuaucgaacucugaugagcuguccuaucggcgagguaccaucucccuacaacucccguuuugaaucaguugcuuggagcgccagugcaugccacgacggcauuaauuggcuuacaauagggaucucuggaccugauaacggugccguggcuguccugaaguauaauggcauuaucaccgacacgauaaaguccuggagaaacaauauuuugaggacucaagagagcgagugugcaugcgugaacgggucguguuucaccgugaugacagauggaccaucugacggccaggccuccuacaaaaucuuucggaucgaaaaggguaaaauugucaagucaguugagaugaaugcucccaacuaucauuacgaagagugcaguuguuacccugauagcuccgagaucacuugcgugugccgcgacaauuggcacgggucuaacagaccaugggugagcuucaaucagaaccucgaauaucagauuggauacauauguucaggcaucuuuggcgauaauccgaggcccaacgacaaaaccgggaguugcggaccuguauccagcaauggugccaacggcgucaagggguucucuuuuaaguauggaaacggcguguggauuggucggacaaaaucaaucaguagccgcaauggguucgagaugaucugggauccaaacggcuggaccggaacggacaauaacuuuuccauuaagcaagacauaguuggcaucaaugaauggucuggguacucggggagcuucgugcagcaucccgagcugacuggucuggauuguauucgaccuugcuucugggucgaacucaucagaggcaggccaaaagagaacacaauuuggaccuccgggucaaguaucucuuuuuguggagugaauagcgacacuguaggcugguccuggcccgauggugcggaguuaccguucacaauagacaaguga

SEQ ID NO: 146464 - RNA, 1410 nt, Artificial Sequence; identical to SEQ ID NO: 146009
  derived and/or modified CDS sequence (opt3) from neuraminidase__InfluenzaA__ADE20661

SEQ ID NO: 146465 - RNA, 1410 nt, Artificial Sequence; identical to SEQ ID NO: 146009
  derived and/or modified CDS sequence (opt3) from neuraminidase__InfluenzaA__ADE20671

SEQ ID NO: 146466 - RNA, 1410 nt, Artificial Sequence; identical to SEQ ID NO: 146009
  derived and/or modified CDS sequence (opt3) from neuraminidase__InfluenzaA__ADE20681

SEQ ID NO: 146467 - RNA, 1410 nt, Artificial Sequence
  derived and/or modified CDS sequence (opt3) from neuraminidase__InfluenzaA__ADE20701
augaaccccaaucagaagaucauuaccauaggcagcgugugcaugacaaucgggauggccaaccugauucuccaaaucggaaauauuaucuccauauggaucucucacucaauucagcuugguaaccagaaucagaucgagacuuguaaccaaagugucauuacguacgaaaauaacaccuggguuaaucagacauaugugaacaucagcaauacuaacuucgcugcaggccaguccguagugucugucaaacuggccggaaauucgucauugugcccugugagcggaugggcgauauacaguaaggacaacuccguuagaauuggcucuaaaggugauguguuugucaucagggagccauucauuagcuguuccccguuagaaugccggaccuuuuuccugacacagggggcucuacucaaugacaagcauucaaacggaaccaucaaagaucgcagucccuaucgaacucugaugagcuguccuaucggcgaggugccaucucccuacaacucccguuuugaaucaguagccuggagcgcaagugccugccacgacggcauuaauuggcuuacaauagggaucucuggaccugauaacggugcuguugcagugcugaaguauaauggcgucauuaccgacacgaucaaguccuggagaaacaauauauugaggacucaagagagcgagugugccugcgugaacgggucguguuucaccgugaugacagauggaccaucuaauggccaggcuuccuacaaaauuuuucggaucgaaaaggguaaaaucgucaagucaguugagaugaacgcccccaauuaucauuacgaagagugcaguuguuacccugacagcuccgagauuacuugcgugugccgcgauaacuggcacgggucuaauagaccaugggugagcuucaaccagaaucucgaauaucagaucggauacauuuguucaggcauauuuggcgacaacccgaggcccaaugauaaaaccgggaguugcggaccuguauccagcaacggugcgaacggcgucaagggguucucuuuuaaguauggaaauggcguguggaucggucggacaaaaucaauuaguagccgcaacggguucgagaugaucugggacccaaauggcuggaccggaacggauaacaauuuuuccaucaagcaagacauuguuggcauaaacgaauggucuggguacucggggagcuucgugcagcaucccgagcugacuggucuggacuguauccgaccuugcuucugggucgaacucauuagaggcaggccaaaagagaauacaaucuggaccuccgggucaaguauuucuuuuuguggagugaacagcgauacuguaggcugguccuggcccgacggugcagaguuaccguucacaaucgauaaguga

SEQ ID NO: 146468 - RNA, 1410 nt, Artificial Sequence; identical to SEQ ID NO: 146009
  derived and/or modified CDS sequence (opt3) from neuraminidase__InfluenzaA__ADE20711

SEQ ID NO: 146469 - RNA, 1410 nt, Artificial Sequence
  derived and/or modified CDS sequence (opt3) from neuraminidase__InfluenzaA__ADE20721
augaaccccaaucagaagaucauuaccauaggcagcgugugcaugacaaucgggauggccaaccugauucuccaaaucggaaauauuaucuccauauggaucucucacucaauucagcuugguaaccagaaucagaucgagacuuguaaccaaagugucauuacguacgaaaauaacaccuggguuaaucagacauaugugaacaucagcaauacuaacuucgcugcaggccaguccguagugucugucaaacuggugggaaauucgucauugugcccuguuagcggaugggccauauacaguaaggacaacuccgugagaauuggcucuaaaggugaugucuuugugaucagggagccauucauuagcuguuccccguuagaaugccggaccuuuuuccugacacagggggcgcuacucaaugacaagcauucaaacggaaccaucaaagaucgcagucccuaucgaacucugaugagcuguccuaucggcgagguaccaucucccuacaacucccguuuugaaucaguugcuuggagcgccagugcaugccacgacggcauuaauuggcuuacaauagggaucucuggaccugauaacggugccguggcuguccugaaguauaauggcauuaucaccgacacgauaaaguccuggagaaacaauauuuugaggacucaagagagcgagugugcaugcgugaacgggucguguuucaccgugaugacagauggaccaucuaauggccaggccuccuacaaaaucuuucggaucgaaaaggguaaaauugucaagucaguugagaugaacgcucccaauuaucauuacgaagagugcaguuguuacccugacagcuccgagaucacuugcgugugccgcgauaacuggcacgggucuaauagaccaugggugagcuucaaccagaaucucgaauaucagauuggauacauauguucaggcaucuuuggcgacaacccgaggcccaaugauaaaaccgggaguugcggaccuguauccagcaacggugccaacggcgucaagggguucucuuuuaaguauggaaauggcguguggauuggucggacaaaaucaaucaguagccgcaacggguucgagaugaucugggacccaaauggcuggaccggaacggauaacaauuuuuccauuaagcaagacauaguuggcaucaacgaauggucuggguacucggggagcuucgugcagcaucccgagcugacuggucuggacuguauucgaccuugcuucugggucgaacucaucagaggcaggccaaaagagaauacaauuuggaccuccgggucaaguaucucuuuuuguggagugaacagcgauacuguaggcugguccuggcccgacggugcggaguuaccguucacaauagaucgguga

SEQ ID NO: 146470 - RNA, 1410 nt, Artificial Sequence; identical to SEQ ID NO: 146467
  derived and/or modified CDS sequence (opt3) from neuraminidase__InfluenzaA__ADE20731

SEQ ID NO: 146471 - RNA, 1410 nt, Artificial Sequence; identical to SEQ ID NO: 146009
  derived and/or modified CDS sequence (opt3) from neuraminidase__InfluenzaA__ADE20741

SEQ ID NO: 146472 - RNA, 1410 nt, Artificial Sequence; identical to SEQ ID NO: 146009
  derived and/or modified CDS sequence (opt3) from neuraminidase__InfluenzaA__ADE20751

SEQ ID NO: 146473 - RNA, 1410 nt, Artificial Sequence; identical to SEQ ID NO: 146467
  derived and/or modified CDS sequence (opt3) from neuraminidase__InfluenzaA__ADE20761

SEQ ID NO: 146474 - RNA, 1410 nt, Artificial Sequence; identical to SEQ ID NO: 146467
  derived and/or modified CDS sequence (opt3) from neuraminidase__InfluenzaA__ADE20781

SEQ ID NO: 146475 - RNA, 1410 nt, Artificial Sequence; identical to SEQ ID NO: 144786
  derived and/or modified CDS sequence (opt3) from neuraminidase__InfluenzaA__ADE20791

SEQ ID NO: 146476 - RNA, 1410 nt, Artificial Sequence; identical to SEQ ID NO: 144786
  derived and/or modified CDS sequence (opt3) from neuraminidase__InfluenzaA__ADE20801

SEQ ID NO: 146477 - RNA, 1410 nt, Artificial Sequence; identical to SEQ ID NO: 144786
  derived and/or modified CDS sequence (opt3) from neuraminidase__InfluenzaA__ADE20811

SEQ ID NO: 146478 - RNA, 1410 nt, Artificial Sequence; identical to SEQ ID NO: 144786
  derived and/or modified CDS sequence (opt3) from neuraminidase__InfluenzaA__ADE20821

SEQ ID NO: 146479 - RNA, 1410 nt, Artificial Sequence; identical to SEQ ID NO: 144786
  derived and/or modified CDS sequence (opt3) from neuraminidase__InfluenzaA__ADE20831

SEQ ID NO: 146480 - RNA, 1410 nt, Artificial Sequence; identical to SEQ ID NO: 144786
  derived and/or modified CDS sequence (opt3) from neuraminidase__InfluenzaA__ADE20841

SEQ ID NO: 146481 - RNA, 1410 nt, Artificial Sequence; identical to SEQ ID NO: 144786
  derived and/or modified CDS sequence (opt3) from neuraminidase__InfluenzaA__ADE20851

SEQ ID NO: 146482 - RNA, 1410 nt, Artificial Sequence; identical to SEQ ID NO: 146402
  derived and/or modified CDS sequence (opt3) from neuraminidase__InfluenzaA__ADE20861

SEQ ID NO: 146483 - RNA, 1410 nt, Artificial Sequence; identical to SEQ ID NO: 144786
  derived and/or modified CDS sequence (opt3) from neuraminidase__InfluenzaA__ADE20871

SEQ ID NO: 146484 - RNA, 1410 nt, Artificial Sequence; identical to SEQ ID NO: 146398
  derived and/or modified CDS sequence (opt3) from neuraminidase__InfluenzaA__ADE20881

SEQ ID NO: 146485 - RNA, 1410 nt, Artificial Sequence; identical to SEQ ID NO: 144786
  derived and/or modified CDS sequence (opt3) from neuraminidase__InfluenzaA__ADE20891

SEQ ID NO: 146486 - RNA, 1410 nt, Artificial Sequence; identical to SEQ ID NO: 144786
  derived and/or modified CDS sequence (opt3) from neuraminidase__InfluenzaA__ADE20901

SEQ ID NO: 146487 - RNA, 1410 nt, Artificial Sequence; identical to SEQ ID NO: 144786
  derived and/or modified CDS sequence (opt3) from neuraminidase__InfluenzaA__ADE20911

SEQ ID NO: 146488 - RNA, 1410 nt, Artificial Sequence; identical to SEQ ID NO: 144786
  derived and/or modified CDS sequence (opt3) from neuraminidase__InfluenzaA__ADE20921

SEQ ID NO: 146489 - RNA, 1410 nt, Artificial Sequence
  derived and/or modified CDS sequence (opt3) from neuraminidase__InfluenzaA__ADE20931
augaaccccaaucagaagaucauuaccauaggcagcgugugcaugacaaucgggauggccaaccugauucuccaaaucggaaauauuaucuccauauggaucucucacucaauucagcuugguaaccagaaucagaucgagacuuguaaccaaagugucauuacguacgaaaauaacaccuggguuaaucagacauaugugaacaucagcaauacuaacuucgcugcaggccaguccguagugucugucaaacuggccggaaauucgucauugugcccugugagcgggugggcgauauacaguaaggacaacuccauuagaaucggcucuaaaggugauguuuuugugauuagggagccauucaucagcuguuccccguuagaaugccggaccuuuuuccugacacagggggcucuacucaaugacaagcauucaaacggaaccaucaaagaucgcagucccuaucgaacucugaugagcuguccuauuggcgaggucccaucucccuacaacucccguuuugaaucaguggccuggagcgcaagugccugccacgacggcauaaauuggcuuacaaucgggauuucuggaccugauaacggugcuguagcaguucugaaguauaauggcaucauaaccgacacgauuaaguccuggagaaacaauaucuugaggacucaagagagcgagugugccugcgugaacgggucguguuucaccgucaugacagauggaccaucugacggccaggcuuccuacaaaaucuuucggauugaaaaggguaaaaucgugaagucaguggagaugaaugcccccaacuaucauuacgaagagugcaguuguuacccugauagcuccgagauuacuugcgucugccgcgacaauuggcacgggucuaacagaccauggguuagcuucaaucagaaccucgaauaucagauaggauacaucuguucaggcauuuuuggcgauaauccgaggcccaacgacaaaaccgggaguugcggaccugugcuguccaauggugcgaacggcguaaagggguucagcuuuaaguauggaaacggcguguggaucggucggacaaaaucuaucgggucacgcaauggcuucgagaugauuugggauccaaacggauggaccggcacggacaauaacuuuaguauaaagcaagacaucgucgggauuaaugaauggagcggauacuccgguucuuucgugcagcaucccgagcugacuggccucgauuguauccgaccuugcuucuggguugaauuaauuagagggaggccaaaagagaacacaaucuggaccucgggaagcuccauaucauuuuguggcgugaauagugacacugucgguuggucuuggcccgauggggcagagcugccguucacaaucgacaaguga

SEQ ID NO: 146490 - RNA, 1410 nt, Artificial Sequence; identical to SEQ ID NO: 144786
  derived and/or modified CDS sequence (opt3) from neuraminidase__InfluenzaA__ADE20941

SEQ ID NO: 146491 - RNA, 1410 nt, Artificial Sequence
  derived and/or modified CDS sequence (opt3) from neuraminidase__InfluenzaA__ADE20951
augaaccccaaucagaagaucauuaccauaggcagcgugugcaugacaaucgggauggccaaccugauucuccaaaucggaaauauuaucuccauauggaucucucacucaauucagcuugguaaccagaaucagaucgagacuuguaaccaaagugucauuacguacgaaaauaacaccuggguuaaucagacauaugugaacaucagcaauacuaacuucgcugcaggccaguccguagugucugucaaacuggccggaaauucgucauugugcccugugagcggaugggcgauauacaguaaggacaacuccauuagaaucggcucuaaaggugauguuuuugugauuagggagccauucaucagcuguuccccguuagaaugccggaccuuuuuccugacacagggggcucuacucaaugacaagcauucaaacggaaccaucaaagaucgcagucccuaucgaacucugaugagcuguccuauuggcgaggucccaucucccuacaacucccguuuugaaucaguggccuggagcgcaagugccugccacgacggcauaaauuggcuuacaaucgggauuucuggaccugauaacggugcuguagcaguucugaaguauaauggcaucauaaccgacacgauuaaguccuggagaaacaauaucuugaggacucaagagagcgagugugccugcgugaacgggucguguuucaccgucaugacagauggaccaucugacggccaggcuuccuacaaaaucuuucggauugaaaaggguaaaaucgugaagucaguggagaugaaugcccccaacuaucauuacgaagagugcaguuguuacccugauagcuccgagauuacuugcgucugccgcgacaauuggcacgggucuaacagaccauggguuagcuucaaucagaaccucgaauaucagauaggauacaucuguucaggcauuuuuggcgauaauccgaggcccaacgacaaaaccgggaguugcggaccuguguccagcaauggugcgaacggcguaaagggguucucuuuuaaguauggaaacggcguguggaucggucggacaaaaucaaucaguagccgcaauggguucgagaugauuugggauccaaacggcuggaccggaacggacaauaacuuuuccauaaagcaagacgucgugggcaucaaugaauggucuggguacucggggagcuucguucagcaucccgagcugacuggucuggauuguauucgaccuugcuucuggguggaacucaucagaggcaggccaaaagagaacacaauuuggaccuccgggucaaguaucucuuuuuguggagucaauagcgacacugugggcugguccuggcccgauggugcagaguuaccguucacaauagacaaguga

SEQ ID NO: 146492 - RNA, 1410 nt, Artificial Sequence
  derived and/or modified CDS sequence (opt3) from neuraminidase__InfluenzaA__ADE20961
augaaccccaaucagaagaucauuaccauaggcagcgugugcaugacaaucgggauggccaaccugauucuccaaaucggaaauauuaucuccauauggaucucucacucaauucagcuugguaaccagaaucagaucgagacuuguaaccaaagugucauuacguacgaaaauaacaccuggguuaaucagacauaugugaacaucagcaauacuaacuucgcugcaggccaguccguagugucugucaaacuggccggaaauucgucauugugcccugugagcgggugggcgauauacaguaaggacaacuccauuagaaucggcucuaaaggugauguuuuugugauuagggagccauucaucagcuguuccccguuagaaugccggaccuuuuuccugacacagggggcucuacucaaugacaagcauucaaacggaaccaucaaagaucgcagucccuaucgaacucugaugagcuguccuauuggcgaggucccaucucccuacaacucccguuuugaaucaguggccuggagcgcaagugccugccacgacggcauaaauuggcuuacaaucgggauuucuggaccugauaacggugcuguagcaguucugaaguauaaugacaucauaaccgauacgauuaaguccuggagaaacaauaucuugaggacucaagagagcgagugugccugcgugaacggcucguguuucaccgucaugacagacgggccaucugauggacaggcuuccuacaaaaucuuucggauugaaaagggcaaaaucgugaagucaguggagaugaaugcccccaacuaucauuacgaagagugcaguuguuacccugacagcuccgagauuacuugcgucugccgcgauaauuggcacgguucuaacagaccauggguuagcuucaaucagaaccucgaauaucagauaggguacaucuguucaggaauuuuuggcgacaauccgaggcccaacgauaaaaccggcaguugcgggccuguguccagcaauggagcgaacgguguaaagggcuucucuuuuaaguaugggaacggaguguggaucggccggacaaaaucaaucaguagccgcaaugguuucgagaugauuugggacccaaacggguggaccggcacggacaauaacuuuuccauaaagcaagauaucgucggaauuaaugaauggucuggcuacucggggagcuucgugcagcaucccgagcugacuggacuggacuguauccgaccuugcuucuggguugaacucauuagagguaggccaaaagagaacacaaucuggaccuccggcucaaguauaucuuuuuguggggugaauagcgauacugucggaugguccuggcccgacggcgcagaguuaccguucacaaucgauaaguga

SEQ ID NO: 146493 - RNA, 1410 nt, Artificial Sequence; identical to SEQ ID NO: 144786
  derived and/or modified CDS sequence (opt3) from neuraminidase__InfluenzaA__ADE20971

SEQ ID NO: 146494 - RNA, 1410 nt, Artificial Sequence; identical to SEQ ID NO: 146402
  derived and/or modified CDS sequence (opt3) from neuraminidase__InfluenzaA__ADE20981

SEQ ID NO: 146495 - RNA, 1410 nt, Artificial Sequence; identical to SEQ ID NO: 144786
  derived and/or modified CDS sequence (opt3) from neuraminidase__InfluenzaA__ADE20991

SEQ ID NO: 146496 - RNA, 1410 nt, Artificial Sequence
  derived and/or modified CDS sequence (opt3) from neuraminidase__InfluenzaA__ADE21001
augaaccccaaucagaagaucauuaccauaggcagcgugugcaugacaaucgggauggccaaccugauucuccaaaucggaaauauuaucuccauauggaucucucacacuauucagcuugguaaccagaaucagaucgagacguguaaccaaucagucauuaccuacgaaaauaacacauggguuaaucagacuuaugugaacaucaguaauaccaacuucgcugcaggccagagcguaguguccgucaaacuggccggaaauucuucguugugcccugugucagggugggcgauauacagcaaggacaacaguauuagaaucggcuccaaaggugauguuuuuauuaucagggagccauucaucucuuguagcccguuagaaugccggacauuuuuccugacccagggggcucuacucaaugacaagcauuccaacggaacuauuaaagaucgcucacccuaucgaacacugaugaguuguccuauaggcgaggugccaagccccuacaacucucguuuugaauccgucgccuggucagcaagcgccugccacgacggcaucaauuggcuuaccauugggaucaguggaccugauaacggugcuguggcaguacugaaguauaauggcauaauuacggacacuaucaagucuuggagaaacaauaucuugaggacccaagaguccgagugugccugcguuaacgggagcuguuucacagugaugacugauggaccaucggacggccaggcuucuuacaaaauuuuucggaucgaaaaggguaaaauugucaaguccguggagaugaaugcccccaacuaucauuacgaagagugcucauguuacccugauaguagcgagauaaccugcgugugccgcgacaauuggcacggguccaacagaccaugggucucuuucaaucagaaccucgaauaucagaucggauacauuuguagcggcaucuuuggcgauaauccgaggcccaacgacaaaacagggucaugcggaccuguuaguuccaauggugcgaacggcgugaagggguucagcuuuaaguauggaaacggcguauggaucggucggaccaaaucuauuucaagucgcaauggguucgagaugauaugggauccaaacggcuggacgggaacugacaauaacuuuagcaucaagcaagacauugugggcaucaaugaaugguccggguacucuggaucguucguccagcaucccgagcugacaggucuggauuguauucgaccuugcuucuggguggaacucaucagaggcaggccaaaagagaacaccauauggacuagcggguccucaaucaguuuuuguggaguuaauucugacacagugggcuggagcuggcccgauggugcagaguuaccguucaccauugacaaguga

SEQ ID NO: 146497 - RNA, 1410 nt, Artificial Sequence; identical to SEQ ID NO: 144786
  derived and/or modified CDS sequence (opt3) from neuraminidase__InfluenzaA__ADE21011

SEQ ID NO: 146498 - RNA, 1410 nt, Artificial Sequence; identical to SEQ ID NO: 144786
  derived and/or modified CDS sequence (opt3) from neuraminidase__InfluenzaA__ADE21021

SEQ ID NO: 146499 - RNA, 1410 nt, Artificial Sequence; identical to SEQ ID NO: 146435
  derived and/or modified CDS sequence (opt3) from neuraminidase__InfluenzaA__ADE21031

SEQ ID NO: 146500 - RNA, 1410 nt, Artificial Sequence
  derived and/or modified CDS sequence (opt3) from neuraminidase__InfluenzaA__ADE21041
augaaccccaaucagaagaucauuaccauaggcagcgugugcaugacaaucgggauggccaaccugauucuccaaaucggaaauauuaucuccauauggaucucucacucaauucagcuugguaaccagaaucagaucgagacuuguaaccaaagugucauuacguacgaaaauaacaccuggguuaaucagacauaugugaacaucagcaauacuaacuucgcugcaggccaguccguagugucugucaaacuggccggaaauucgucauugugcccugugagcggaugggcgauauacaguaaggacaacuccauuagaaucggcucuaaaggugauguuuuugugauuagggagccauucaucagcuguuccccguuagaaugccggaccuuuuuccugacacagggggcucuacucaaugacaagcauucaaacggaaccaucaaagaucgcagucccuaucgaacucugaugagcuguccuauuggcgaggucccaucucccuacaacucccguuuugaaucaguggccuggagcgcaagugccugccacgacggcauaaauuggcuuacaaucgggauuucuggaccugauaacggugcuguagcaguucugaaguauaauggcaucauaaccgacacgauuaaguccuggagaaacaauaucuugaggacucaagagagcgagugugccugcgugaacgggucguguuucaccgucaugacagauggaccaucugacggccaggcuuccuacaaaaucuuucggauugaaaaggguaaaaucgugaagucaauugagaugaaugcccccaacuaucauuacgaagagugcaguuguuacccugauagcuccgagauaacuugcgugugccgcgacaauuggcacgggucuaacagaccaugggucagcuucaaucagaaccucgaauaucagaucggauacauuuguucaggcaucuuuggcgauaauccgaggcccaacgacaaaaccgggaguugcggaccuguuuccagcaauggugcgaacggcgugaagggguucucuuuuaaguauggaaacggcguauggaucggucggacaaaaucaauuaguagccgcaauggguucgagaugauaugggauccaaacggcuggaccggaacggacaauaacuuuuccaucaagcaagacauugugggcaucaaugaauggucuggguacucggggagcuucguccagcaucccgagcugacuggucuggauuguauucgaccuugcuucuggguggaacucaucagaggcaggccaaaagagaacacaauauggaccuccgggucaaguaucucuuuuuguggaguuaauagcgacacugugggcugguccuggcccgauggugcagaguuaccguucacaauugacaaguga

SEQ ID NO: 146501 - RNA, 1410 nt, Artificial Sequence; identical to SEQ ID NO: 144786
  derived and/or modified CDS sequence (opt3) from neuraminidase__InfluenzaA__ADE21051

SEQ ID NO: 146502 - RNA, 1410 nt, Artificial Sequence
  derived and/or modified CDS sequence (opt3) from neuraminidase__InfluenzaA__ADE21071
augaaccccaaucagaagaucauuaccauaggcagcgugugcaugacaaucgggauggccaaccugauucuccaaaucggaaauauuaucuccauauggaucucucacucaauucagcuugguaaccagaaucagaucgagacuuguaaccaaagugucauuacguacgaaaauaacaccuggguuaaucagacauaugugaacaucagcaauacuaacuucgcugcaggccaguccguagugucugucaaacuggccggaaauucgucauugugcccugugaacgggugggcgauauacagcaaggacaauaguauuagaaucggcuccaaaggugauguuuuugugauuagggagccauucaucucuuguagcccguuagaaugccggaccuuuuuccugacacagggggcucuacucaacgacaagcauuccaacggaaccaucaaagaucgcucacccuaucgaacucugaugaguuguccuauuggcgaggucccaagccccuacaauucucguuuugaauccguggccuggucagcaagcgccugccacgacggcauaaacuggcuuacaaucgggauuaguggaccugauaauggugcuguagcaguucugaaguauaacggcaucauaaccgacacgauuaagucuuggagaaauaacaucuugaggacucaagaguccgagugugccugcgugaaugggagcuguuucaccgucaugacagauggaccaucggacggccaggcuucuuacaaaaucuuucggauugaaaaggguaaaaucgugaaguccguggagaugaacgcccccaauuaucauuacgaagagugcucauguuacccugauaguagcgagauuacuugcgucugccgcgacaacuggcacggguccaauagaccauggguuucuuucaaccagaaucucgaauaucagauaggauacaucuguagcggcauuuuuggcgauaacccgaggcccaaugacaaaaccgggucaugcggaccugugaguuccaacggugcgaacggcguaaagggguucagcuuuaaguauggaaauggcguguggaucggucggacaaaaucuaucucaagucgcaacggguucgagaugauuugggauccaaauggcuggaccggaacggacaacaaguuuagcauaaaacaagacaucgucggcauuaaugaaugguccggguacucuggaucguucgugcagcaucccgagcugacuggucuggauuguauccgaccuugcuucuggguugaacucauuagaggcaggccaaaggagaacacaaucuggaccagcggguccucaauaaguuuuuguggagucaauucugacacugugggcuggagcuggcccgauggugcagaguuaccguucacaaucgacaaauga

SEQ ID NO: 146503 - RNA, 1413 nt, Artificial Sequence; identical to SEQ ID NO: 144680
  derived and/or modified CDS sequence (opt3) from neuraminidase__InfluenzaA__ADE28752

SEQ ID NO: 146504 - RNA, 1413 nt, Artificial Sequence; identical to SEQ ID NO: 145509
  derived and/or modified CDS sequence (opt3) from neuraminidase__InfluenzaA__ADE28763

SEQ ID NO: 146505 - RNA, 1410 nt, Artificial Sequence; identical to SEQ ID NO: 146009
  derived and/or modified CDS sequence (opt3) from neuraminidase__InfluenzaA__ADE28773

SEQ ID NO: 146506 - RNA, 1410 nt, Artificial Sequence; identical to SEQ ID NO: 146009
  derived and/or modified CDS sequence (opt3) from neuraminidase__InfluenzaA__ADE28783

SEQ ID NO: 146507 - RNA, 1410 nt, Artificial Sequence; identical to SEQ ID NO: 146467
  derived and/or modified CDS sequence (opt3) from neuraminidase__InfluenzaA__ADE28803

SEQ ID NO: 146508 - RNA, 1410 nt, Artificial Sequence; identical to SEQ ID NO: 144786
  derived and/or modified CDS sequence (opt3) from neuraminidase__InfluenzaA__ADE28813

SEQ ID NO: 146509 - RNA, 1410 nt, Artificial Sequence; identical to SEQ ID NO: 144786
  derived and/or modified CDS sequence (opt3) from neuraminidase__InfluenzaA__ADE28823

SEQ ID NO: 146510 - RNA, 1410 nt, Artificial Sequence
  derived and/or modified CDS sequence (opt3) from neuraminidase__InfluenzaA__ADE28843
augaaccccaaucagaagaucauuaccauaggcagcgugugcaugacaaucgggauggccaaccugauucuccaaaucggaaauauuaucuccauauggaucucucacucaauucagcuugguaaccagaaucagaucgagacuuguaaccaaagugucauuacguacgaaaauaacaccuggguuaaucagacauaugugaacaucagcaauacuaacuucgcugcaggccaguccguagugucugucaaacuggccggaaauucgucauugugcccugugagcggaugggcgauauacaguaaggacaacuccguuagaauuggcucuaaaggugauguguuugucaucagggagccauucauuagcuguuccccguuagaaugccggaccuuuuuccugacacagggggcucuacucaaugacaagcauucaaacggaaccaucaaagaucgcagucccuaucgaacucugaugagcuguccugugggcgagguaccaucucccuacaacucccguuuugaaucaguugccuggagcgcaagugccugccacgacggcaucaauuggcuuacaauugggauaucuggaccugauaacggugcuguggcaguccugaaguauaauggcaucauuaccgacacgaucaaguccuggagaaacaauauauugaggacucaagagagcgagugugccugcgugaacgggucguguuucaccgugaugacagauggaccaucuaauggccaggcuuccuacaaaauuuuucggaucgaaaaggguaaaaucgucaagucaguugagaugaacgcccccaauuaucauuacgaagagugcaguuguuacccugacagcuccgagauuacuugcgugugccgcgauaacuggcacgggucuaauagaccaugggugagcuucaaccagaaucucgaauaucagaucggauacauuuguucaggcauauuuggcgacaacccgaggcccaaugauaaaaccgggaguugcggaccuguauccagcaacggugcgaacggcgucaagggguucucuuuuaaguauggaaauggcguguggaucggucggacaaaaucaauuaguagccgcaacggguucgagaugaucugggacccaaauggcuggaccggaacggauaacaauuuuuccaucaagcaagacauuguuggcauaaacgaauggucuggguacucggggagcuucgugcagcaucccgagcugacuggucuggacuguauccgaccuugcuucugggucgaacucauuagaggcaggccaaaagagaauacaaucuggaccuccgggucaaguauuucuuuuuguggagugaacagcgauacuguaggcugguccuggcccgacggugcagaguuaccguucacaaucgauaaguga

SEQ ID NO: 146511 - RNA, 1410 nt, Artificial Sequence
  derived and/or modified CDS sequence (opt3) from neuraminidase__InfluenzaA__ADE28853
augaaccccaaucagaagaucauuaccauagugagcgucugcaugacaaucggcauggccaaccugauucuccaaaucgggaauauuaucuccauauggaucucucacucaauucagcuuggaaaccagaaucagaucgagacuuguaaccaaaguguuauuacguacgaaaauaacaccugggugaaucagacauauguaaacaucagcaauacuaacuucgcugcaggucaguccguggucucugugaaacuggccggcaauucgucauugugcccuguuagcgggugggcgauauacaguaaggacaacuccgugagaauuggaucuaaaggcgaugucuuugugaucagggagccauucauuagcuguuccccguuagaaugccggaccuuuuuccugacacagggugcucuacucaaugacaagcauucaaacgggaccaucaaagaucgcagucccuaucgaacucugaugagcuguccuaucggagagguaccaucucccuacaacucccguuuugaaucaguugccuggagcgcaagugccugccacgacggcauuaauuggcuuacaauaggcaucucugggccugauaacggagcuguggcaguccugaaguauaaugguauuaucaccgacacgauaaaguccuggagaaacaauauuuugaggacucaagagagcgagugugccugcgugaacggcucguguuucaccgugaugacagaugggccaucuaauggacaggcuuccuacaaaaucuuucggaucgaaaagggcaaaauugucaagucaguugagaugaacgcccccaauuaucauuacgaagagugcaguuguuacccugacagcuccgagaucacuugcgugugccgcgauaacuggcacgguucuaauagaccaugggugagcuucaaccagaaucucgaauaucagauuggguacauauguucaggaaucuuuggcgacaacccgaggcccaaugauaaaaccggcaguugcgggccuguauccagcaacggagcgaacggugucaagggcuucucuuuuaaguaugggaauggaguguggauuggccggacaaaaucaaucaguagccgcaacgguuucgagaugaucugggacccaaauggguggaccggcacggauaacaauuuuuccauuaagcaagacauaguuggaaucaacgaauggucuggcuacucggggagcuucgugcagcaucccgagcugacuggacuggacuguauucgaccuugcuucugggucgaacucaucagagguaggccaaaagagaauacaauuuggaccuccggcucaaguaucucuuuuuguggggugaacagcgauacuguaggaugguccuggcccgacggcgcagaguuaccguucacaauagauaaguga

SEQ ID NO: 146512 - RNA, 1410 nt, Artificial Sequence; identical to SEQ ID NO: 146510
  derived and/or modified CDS sequence (opt3) from neuraminidase__InfluenzaA__ADE28884

SEQ ID NO: 146513 - RNA, 1410 nt, Artificial Sequence
  derived and/or modified CDS sequence (opt3) from neuraminidase__InfluenzaA__ADE28894
augaaccccaaucagaagaucauuaccauaggcagcgugugcaugacaaucgggauggccaaccugauucuccaaaucggaaauauuaucuccauauggaucucucacucaguccagcuugguaaccagaaucagauugagacuuguaaccaaaguguuaucacguacgaaaauaacaccugggugaaucagacauauguaaacauuagcaauacuaacuucgcugcaggccaguccguggucucugugaaacuggccggaaauucgucauugugcccuguuagcggaugggcgaucuacaguaaggacaacuccgugagaauaggcucuaaaggugaugucuuugugauuagggagccauucaucagcuguuccccguuagaaugccggaccuuuuuccugacacagggggcucuacucaaugacaagcauucaaacggaaccauuaaagaucgcagucccuaucgaacucugaugagcuguccuaucggcgagguaccaucucccuacaacucccguuuugaaucaguugccuggagcgcaagugccugccacgacggcaucaauuggcuuacaauugggauaucuggaccugauaacggugcuguggcaguccugaaguauaauggcaucauuaccgacacgaucaaguccuggagaaacaauauauugaggacucaagagagcgagugugccugcgugaacgggucguguuucaccgugaugacagauggaccaucuaauggccaggcuuccuacaaaauuuuucggaucgaaaaggguaaaaucgucaagucaguugagaugaacgcccccaauuaucauuacgaagagugcaguuguuacccugacagcuccgagauuacuugcgugugccgcgauaacuggcacgggucuaauagaccaugggugagcuucaaccagaaucucgaauaucagaucggauacauuuguucaggcauauuuggcgacaacccgaggcccaaugauaaaaccgggaguugcggaccuguauccagcaacggugcgaacggcgucaagggguucucuuuuaaguauggaaauggcguguggaucggucggacaaaaucaauuaguagccgcaacggguucgagaugaucugggacccaaauggcuggaccggaacggauaacaauuuuuccaucaagcaagacauuguuggcauaaacgaauggucuggguacucggggagcuucgugcagcaucccgagcugacuggucuggacuguauccgaccuugcuucugggucgaacucauuagaggcaggccaaaagagaauacaaucuggaccuccgggucaaguauuucuuuuuguggagugaacagcgauacuguaggcugguccuggcccgacggugcagaguuaccguucacaaucgauaaguga

SEQ ID NO: 146514 - RNA, 1410 nt, Artificial Sequence; identical to SEQ ID NO: 146434
  derived and/or modified CDS sequence (opt3) from neuraminidase__InfluenzaA__ADE28904

SEQ ID NO: 146515 - RNA, 1410 nt, Artificial Sequence; identical to SEQ ID NO: 144786
  derived and/or modified CDS sequence (opt3) from neuraminidase__InfluenzaA__ADE28914

SEQ ID NO: 146516 - RNA, 1410 nt, Artificial Sequence; identical to SEQ ID NO: 144786
  derived and/or modified CDS sequence (opt3) from neuraminidase__InfluenzaA__ADE28924

SEQ ID NO: 146517 - RNA, 1410 nt, Artificial Sequence
  derived and/or modified CDS sequence (opt3) from neuraminidase__InfluenzaA__ADE28934
augaaccccaaucagaagaucauuaccauaggcagcgugugcaugacaaucgggauggccaaccugauucuccaaaucggaaauauuaucuccauauggaucucucacucaauucagcuugguaaccagaaucagaucgagacuuguaaccaaagugucauuacguacgaaaauaacaccuggguuaaucagacauaugugaacaucagcaauacuaacuucgcugcaggccaguccguagugucugucaaacuggccggaaauucgucauugugcccugugagcggaugggcgauauacaguaaggacaacuccauuagaaucggcucuaaaggugauguuuuugugauuagggagccauucaucagcuguuccccguuagaaugccggaccuuuuuccugacacagggggcucuacucaaugacaagcauucaaacggaaccaucaaagaucgcagucccuaucgaacucugaugagcuguccuauuggcgaggucccaucucccuacaacucccguuuugaaucaguggccuggagcgcaagugccugccacgacggcauaaauuggcuuacaaucgggauuucuggaccugauaacggugcuguagcaguucugaaguauaauggcaucauaaccgacacgauuaaguccuggagaaacaauaucuugaggacucaagagagcgagugugccugcaucaacgggucguguuucaccgugaugacagauggaccaucugacggccaggcuuccuacaaaauuuuucggaucgaaaaggguaaaauugucaagucaguggagaugaaugcccccaacuaucauuacgaagagugcaguuguuacccugauagcuccgagauaacuugcgugugccgcgacaauuggcacgggucuaacagaccaugggucagcuucaaucagaaccucgaauaucagaucggauacauuuguucaggcaucuuuggcgauaauccgaggcccaacgacaaaaccgggaguugcggaccuguuuccagcaauggugcgaacggcgugaagggguucucuuuuaaguauggaaacggcguauggaucggucggacaaaaucaauuaguagccgcaauggguucgagaugauaugggauccaaacggcuggaccggaacggacaauaacuuuuccaucaagcaagacauugugggcaucaaugaauggucuggguacucggggagcuucguccagcaucccgagcugacuggucuggauuguauucgaccuugcuucuggguggaacucaucagaggcaggccaaaagagaacacaauauggaccuccgggucaaguaucucuuuuuguggaguuaauagcgacacugugggcugguccuggcccgauggugcagaguuaccguucacaauugacaaguga

SEQ ID NO: 146518 - RNA, 1410 nt, Artificial Sequence; identical to SEQ ID NO: 144786
  derived and/or modified CDS sequence (opt3) from neuraminidase__InfluenzaA__ADE28954

SEQ ID NO: 146519 - RNA, 1410 nt, Artificial Sequence
  derived and/or modified CDS sequence (opt3) from neuraminidase__InfluenzaA__ADE28964
augaaccccaaucagaagaucauuaccauaggcagcgugugcaugacaaucgggauggccaaccugauucuccaaaucggaaauauuaucuccauauggaucucucacucaauucagcuugguaaccagaaucagaucgagacuuguaaccaaagugucauuacguacgaaaauaacaccuggguuaaucagacauaugugaacaucagcaauauaaacuucgcugcaggccaguccguagugucugucaaacuggccggaaauucgucauugugcccugugagcggaugggcgauuuacaguaaggacaacuccaucagaauuggcucuaaaggugauguuuuugugaucagggagccauucaucagcuguuccccguuagaaugccggaccuuuuuccugacucagggggcucuacucaaugacaagcauucaaacggaacaauuaaagaucgcagucccuaucgaacccugaugagcuguccuauaggcgaggucccaucucccuacaacucccguuuugaaucaguggccuggagcgcaagugccugccacgacggcaucaauuggcuuacuauugggaucucuggaccugauaacggugcuguagcaguucugaaguauaauggcauaauuacagacaccaucaaguccuggagaaacaauaucuugaggacgcaagagagcgagugugccugcgugaacgggucguguuucacugucaugaccgauggaccaucugacggccaggcuuccuacaaaauuuuucggaucgaaaaggguaaaauugugaagucaguggagaugaaugcccccaacuaucauuacgaagagugcaguuguuacccugauagcuccgagauaacaugcgucugccgcgacaauuggcacgggucuaacagaccauggguuagcuucaaucagaaccucgaauaucagaucggauacauuuguucaggcaucuuuggcgauaauccgaggcccaacgacaaaacugggaguugcggaccuguguccagcaauggugcgaacggcguaaagggguucucuuuuaaguauggaaacggcguguggaucggucggaccaaaucaauuaguagccgcaauggguucgagaugauaugggauccaaacggcuggacaggaaccgacaauaacuuuuccaucaagcaagacauugucggcaucaaugaauggucuggguacucggggagcuucgugcagcaucccgagcugacgggucuggauuguauucgaccuugcuucuggguugaacucaucagaggcaggccaaaagagaacacuauauggacauccgggucaaguaucucuuuuuguggagugaauagcgacaccgucggcugguccuggcccgauggugcagaguuaccguucacuauugacaaguga

SEQ ID NO: 146520 - RNA, 1410 nt, Artificial Sequence; identical to SEQ ID NO: 144786
  derived and/or modified CDS sequence (opt3) from neuraminidase__InfluenzaA__ADE28974

SEQ ID NO: 146521 - RNA, 1410 nt, Artificial Sequence
  derived and/or modified CDS sequence (opt3) from neuraminidase__InfluenzaA__ADE29004
augaaccccaaucagaagaucauuaccauaggcagcgugugcaugacaaucgggcuggccaaccucauucuucaaaucggaaauauuaucuccauauggaucucucacucaauucagcuggguaaccagaaucagaucgagacuuguaaccaaagugucauuacguacgaaaauaacaccuggguuaaucagacauaugugaacaucagcaauacuaacuucgcugcaggccaguccguagugucugucaaauuggccggaaauucgucauuaugcccugugagcggaugggcgauauacaguaaggacaacuccguuagaauuggcucuaaaggugauguguuugucaucagggagccauucauuagcuguuccccgcuggaaugccggaccuuuuuccuaacacagggggcucuccugaaugacaagcauucaaacggaaccaucaaagaucgcagucccuaucgaacucuuaugagcuguccuaucggcgaggugccaucucccuacaacucccguuuugaaucaguagccuggagcgcaagugccugccacgacggcauuaauuggcugacaauagggaucucuggaccugauaacggugcuguugcaguguugaaguauaauggcauuaucaccgacacgauaaaguccuggagaaacaauauucucaggacucaagagagcgagugugccugcgucaacgggucguguuucaccgugaugacagauggaccaucugacggccaggcuuccuacaaaaucuuucggaucgaaaaggguaaaauugugaagucagucgagaugaaugcccccaacuaucauuacgaagagugcaguuguuacccugauagcuccgagaucacuugcguuugccgcgacaauuggcacgggucuaacagaccaugggugagcuucaaucagaaccuggaauauaggauuggauacauauguucaggcaucuuuggcgauaauccgcggcccaacgacaaaaccgggaguugcggaccuguauccagcaauggugcgaacggcgugaagggguucucuuuuaaguauggaaacggcgucuggauuggucgcacaaaaucaaucaguagccgaaauggguucgagaugaucugggauccaaacggcuggaccggaacggacaagaauuuuuccauuaaacaggacauagugggcaucaacgaauggucuggguacucggggagcuucguucaacaucccgagcugacuggucucgauuguauuagaccuugcuucuggguggaauuaaucaggggccggccaaaggagaauacaauuuggaccuccgggucaaguaucucuuuuuguggagucaacagcgacacugugggcugguccuggcccgauggugcagagcugccguucacaauagacaaauga

SEQ ID NO: 146522 - RNA, 1410 nt, Artificial Sequence; identical to SEQ ID NO: 144786
  derived and/or modified CDS sequence (opt3) from neuraminidase__InfluenzaA__ADE29014

SEQ ID NO: 146523 - RNA, 1410 nt, Artificial Sequence
  derived and/or modified CDS sequence (opt3) from neuraminidase__InfluenzaA__ADE29024
augaaccccaaucagaagaucauuaccauaggcagcgugugcaugacaaucgggauggccaaccugauucuccaaaucggaaauauuaucuccauauggaucucucacucaauucagcuugguaaccagaaucagaucgagacuuguaaccaaagugucauuacguacgaaaauaacaccuggguuaaucagacauaugugaacaucagcaauacuaacuucgcugcaggccaguccguagugucugucaaacuggccggaaauucgucauugugcccugugagcggaugggcgauauacaguaaggacaacuccauuagaaucggcucuaaaggugauguuuuugugauuagggagccauucaucagcuguuccccguuagaaugccggaccuuuuuccugacacagggggcucuacucaaugacaagcauucaaacggaaccaucaaagaucgcagucccuaucgaacucugaugagcuguccuauuggcgaggucccaucucccuacaacucccguuuugaaucaguggccuggagcgcaagugccugccacgacggcauaaauuggcuuacaaucgggauuucuggaccugauaacggugcuguagcaguucugaaguauaauggcaucauaaccgacacgauuaaguccuggaaaaacaauaucuugagaacucaagagagcgagugugccugcgugaacgggucguguuucaccgucaugacagauggaccaucugacggccaggcuuccuacaagaucuuuaggauugaaaaagguaagaucgugaaaucaguggagaugaaugcccccaacuaucauuacgaagagugcaguuguuacccugauagcuccgagauuacuugcgucugccgggacaauuggcacgggucuaaccgcccauggguuagcuucaaucagaaccucgaauaucagauaggauacaucuguucaggcauuuuuggcgauaauccgagacccaacgacaagaccgggaguugcggaccuguguccagcaauggugcgaacggcguaaagggguucucuuuuaaauauggaaacggcguguggaucgguaggacaaagucaaucaguagccggaauggguucgagaugauuugggauccaaacggcuggaauggaaccgacaacaauuuuuccauaaaacaagacaucgucggcauuaacgaauggucuggguacucggggagcuucgugcagcaucccgagcugacgggucuggauuguauccgcccuugcuucuggguugaacucauucgaggcagaccaaaggagaauacuaucuggacauccgggucaaguauaucuuuuuguggagugaacagcgacaccgucggcugguccuggcccgauggugcagaguuaccguucacuaucgacaaauga

SEQ ID NO: 146524 - RNA, 1410 nt, Artificial Sequence; identical to SEQ ID NO: 144786
  derived and/or modified CDS sequence (opt3) from neuraminidase__InfluenzaA__ADE29034

SEQ ID NO: 146525 - RNA, 1410 nt, Artificial Sequence; identical to SEQ ID NO: 144786
  derived and/or modified CDS sequence (opt3) from neuraminidase__InfluenzaA__ADE29044

SEQ ID NO: 146526 - RNA, 1410 nt, Artificial Sequence; identical to SEQ ID NO: 144786
  derived and/or modified CDS sequence (opt3) from neuraminidase__InfluenzaA__ADE29054

SEQ ID NO: 146527 - RNA, 1410 nt, Artificial Sequence; identical to SEQ ID NO: 146074
  derived and/or modified CDS sequence (opt3) from neuraminidase__InfluenzaA__ADE29064

SEQ ID NO: 146528 - RNA, 1410 nt, Artificial Sequence
  derived and/or modified CDS sequence (opt3) from neuraminidase__InfluenzaA__ADE29087
augaaccccaaucagaagaucauuaccauaggcagcgugugcaugacaaucgggauggccaaccugauucuccaaaucggaaauauuaucuccauauggaucucucacucaauucagcuugguaaccagaaucagaucgagacuuguaaccaaagugucauuacguacgaaaauaacaccuggguuaaucagacauaugugaacaucagcaauacuaacuucgcugcaggccaguccguagugucugucaaacuggccggaaauucgucauugugcccugugagcggaugggcgauauacaguaaggacaacuccguuagaauuggcucuaaaggugauguguuugucaucagggagccauucauuagcuguuccccguuagaaugcaagaccuuuuuccugacacagggggcucuacucaaugacaaacauucaaacggaaccaucaaggaucggagucccuaucgcacucugaugagcuguccuaucggcgaggugccaucucccuacaacucccgauuugaaucaguagccuggagcgcaagugccugccacgacggcauuaauuggcuuacaauagggaucucuggaccugauaacggugcuguugcagugcugaaguauaauggcauuaucaccgacacgauaaaauccuggcguaacaauauuuugagaacucaagagagcgagugugccugcgucaacgggucguguuucaccgugaugacagauggaccaucuaauggccaggcuuccuacaagaucuuuaggaucgaaaaagguaagauugugaaaucagucgagaugaacgcccccaauuaucauuacgaagagugcaguuguuacccugacagcuccgagaucacuugcguuugccgggauaacuggcacgggucuaaucgcccaugggugagcuucaaccagaaucucgaauaucagauuggauacauauguucaggcaucuuuggcgacaacccgagacccaaugauaagaccgggaguugcggaccuguauccagcaacggugcgaacggcgugaagggguucucuuuuaaauauggaaauggcgucuggauugguaggacaaagucaaucaguagccggaacggguucgagaugaucugggacccaaauggcuggaccggaacggauaacaauuuuuccauuaaacaagacauagugggcaucaacgaauggucuggguacucggggagcuucguucagcaucccgagcugacuggucuggacuguauucgcccuugcuucuggguggaacucauccgaggcagaccaaaggagaauacaauuuggaccuccgggucaaguaucucuuuuuguggagucaacagcgauacugugggcugguccuggcccgacggugcagaguuaccguucacaauagauaaauga

SEQ ID NO: 146529 - RNA, 1410 nt, Artificial Sequence; identical to SEQ ID NO: 144776
  derived and/or modified CDS sequence (opt3) from neuraminidase__InfluenzaA__ADE29097

SEQ ID NO: 146530 - RNA, 1410 nt, Artificial Sequence; identical to SEQ ID NO: 145653
  derived and/or modified CDS sequence (opt3) from neuraminidase__InfluenzaA__ADE34194

SEQ ID NO: 146531 - RNA, 1410 nt, Artificial Sequence; identical to SEQ ID NO: 144647
  derived and/or modified CDS sequence (opt3) from neuraminidase__InfluenzaA__ADE34205

SEQ ID NO: 146532 - RNA, 1410 nt, Artificial Sequence
  derived and/or modified CDS sequence (opt3) from neuraminidase__InfluenzaA__ADE34216
augaaccccaaucagaagaucauuaccauaggcagcgugucccugacaaucucuacuauuugcuucuuuaugcaaaucgccauucucgucacgaccguuacacuucacuucaaacaguacgaguuuaacucaccuccaaauaaccaggugaugcugugugaaccgacuaucauagagagaaauaucaccgaaauuguauauuugacaaacaccacuaucgagaaggaaauuugccccaaauuagcugaguacaggaauuggaguaagccucagugugacaucacaggguucgcaccauuuagcaaagauaacuccauacggcugucugccggaggugacauuugggugacccgcgagcccuaugucucgugcgauccugacaaguguuaccaauucgcgcuaggccaggggacgacucucaauaacgugcauucaaauaacaccguucgagaucguacaccauauagaacucugcuuaugaaugaacugggagugcccuuucacuugggcaccaagcaggucugcaucgcuuggagcaguuccucuugucaugacgguaaagccuggcuccacgugugcauuacaggggaugacaagaacgcaaccgccagcuucaucuacaauggaaggcugguagauuccguugugucauggaguaaagacauccugcggacgcaggagagcgaaugugucugcauuaacggcacuuguacaguggugaugaccgauggcucugcuuccgggaaggcagacacuaaaauacucuuuaucgaggagggaaagauuguccauacaucaaccuuaagcgguagugcccaacacguugaagagugcucuugcuauccucgcuacccaggcgugagauguguaugcagggauaacuggaagggguccaaucggccgaucguggacauaaacauuaaagaccacagcaucgucucgucuuacguguguuccggacugguuggcgauacgccccgcaagaaugacucaaguagcuccucucauugccuugauccuaacaaugaagagggugggcacggagugaaaggcugggcuuucgacgauggcaacgacgucuggauggggcgaaccaucagcgaaaagucaagauugggauaugagacauuuaaagugauugaggguuggaguaauccaaaguccaaacugcagaucaacaggcagguaauuguugaucggggcaaucguagcggguacucuggaauauucucaguggaaggcaagaguuguaucaaccgcugcuuuuaugucgagcuaauuagagguaggaaggaagagacugaagugcucuggaccagcaauuccaucgucguguucugugggacaucuggcacuuacggaaccggcucguggcccgacggggccaacaucaaucugaugccuauuuga

SEQ ID NO: 146533 - RNA, 1410 nt, Artificial Sequence; identical to SEQ ID NO: 145653
  derived and/or modified CDS sequence (opt3) from neuraminidase__InfluenzaA__ADE34227

SEQ ID NO: 146534 - RNA, 1410 nt, Artificial Sequence; identical to SEQ ID NO: 145653
  derived and/or modified CDS sequence (opt3) from neuraminidase__InfluenzaA__ADE34238

SEQ ID NO: 146535 - RNA, 1410 nt, Artificial Sequence
  derived and/or modified CDS sequence (opt3) from neuraminidase__InfluenzaA__ADE34260
augaaccccaaucagaagaucauuaccauaggcagcgugucccugacaaucucuacuauuugcuucuuuaugcagaucgccauucucaucacgaccgucacacuucacuucaaacaguacgaguuuaacucaccuccaaauaaccagguuaugcugugugaaccgacuauaaucgagagaaauauuaccgaaaucguguauuugacaaacaccacuauugagaaggaaaucugccccaaauuagcugaguacaggaauuggaguaagccucagugugacauaacaggguucgcaccauuuagcaaagauaacuccauucggcugucugccggaggugacaucuggguaacccgcgagcccuaugugucgugcgauccugacaaguguuaccaauucgcgcuaggccaggggacgacucucaauaacguccauucaaauaacaccgugcgagaucguacaccauauagaacucugcuuaugaaugaacugggaguucccuuucacuugggcaccaaacaggugugcauugcuuggagcaguuccucuugucaugacgguaaggccuggcuccacgucugcaucacaggggaugacaagaacgcaaccgccagcuucaucuacaauggaaggcugguggauuccguaguuucauggaguaaagagauucugcggacgcaggaaagcgagugugugugcauaaacggcacuuguacagucgugaugaccgacggcucugcuuccgggaaggcagauacuaaaauccucuuuauugaggaaggaaagaucgugcauacaucaaccuuaagcgguagugcccaacacgucgaggaaugcucuugcuauccucgcuacccaggcguuagaugugugugcagggacaacuggaagggguccaaucggccgauaguagauauuaacaucaaagaccacagcaucgugucgucuuacgucuguuccggacuggugggcgacacgccccgcaagaaugauucaaguagcuccucucauugccuugacccuaacaaugaggaaggugggcacggaguuaaaggcugggcuuucgaugacggcaacgauguguggauggggcgaaccauuagcgagaagucaagauugggauaugagacauuuaaagucaucgaagguuggaguaauccaaaguccaaacugcagauuaacaggcaagugauaguagaccggggcaaucguagcggguacucuggaaucuucucaguugagggcaagaguuguauuaaccgcugcuuuuauguggaacuaaucagagguaggaaggaggaaacugagguccucuggaccagcaauuccaucguggucuucugugggacaucuggcacuuacggaaccggcucguggcccgauggggccgacauuaaccugaugagcauauga

SEQ ID NO: 146536 - RNA, 1410 nt, Artificial Sequence; identical to SEQ ID NO: 145653
  derived and/or modified CDS sequence (opt3) from neuraminidase__InfluenzaA__ADE34271

SEQ ID NO: 146537 - RNA, 1410 nt, Artificial Sequence; identical to SEQ ID NO: 144786
  derived and/or modified CDS sequence (opt3) from neuraminidase__InfluenzaA__ADE45502

SEQ ID NO: 146538 - RNA, 1410 nt, Artificial Sequence; identical to SEQ ID NO: 144786
  derived and/or modified CDS sequence (opt3) from neuraminidase__InfluenzaA__ADE45504

SEQ ID NO: 146539 - RNA, 1410 nt, Artificial Sequence; identical to SEQ ID NO: 144786
  derived and/or modified CDS sequence (opt3) from neuraminidase__InfluenzaA__ADE45506

SEQ ID NO: 146540 - RNA, 1410 nt, Artificial Sequence; identical to SEQ ID NO: 144786
  derived and/or modified CDS sequence (opt3) from neuraminidase__InfluenzaA__ADE45508

SEQ ID NO: 146541 - RNA, 1410 nt, Artificial Sequence; identical to SEQ ID NO: 144786
  derived and/or modified CDS sequence (opt3) from neuraminidase__InfluenzaA__ADE45510

SEQ ID NO: 146542 - RNA, 1410 nt, Artificial Sequence; identical to SEQ ID NO: 144786
  derived and/or modified CDS sequence (opt3) from neuraminidase__InfluenzaA__ADE45512

SEQ ID NO: 146543 - RNA, 1410 nt, Artificial Sequence
  derived and/or modified CDS sequence (opt3) from neuraminidase__InfluenzaA__ADE45514
augaaccccaaucagaagaucauuaccauaggcagcgugugcaugacaaucgggauggccaaccugauucuccaaaucggaaauauuaucuccauauggaucucucacucaauucagcuugguaaccagaaucagaucgagacuuguaaccaaaguauuaucacguacgaaaauaacaccugggucaaucagacauauguuaacauaagcaauacuaacuucgcugcaggccaguccgugguaucugugaaacuggccggaaauucgucauugugcccugucagcggaugggcgauuuacaguaaggacaacuccaucagaauuggcucuaaaggugauguguuuguuaucagggagccauucaucagcuguuccccguuagaaugccggaccuuuuuccugacacagggggcucuacucaaugacaagcauucaaacggaaccauuaaagaucgcagucccuaucgaacucugaugagcuguccuauaggcgaggugccaucucccuacaacucccguuuugaaucagucgccuggagcgcaagugccugccacgacggcaucaauuggcuuacaauugggaucucuggaccugauaacggugcuguggcaguacugaaguauaauggcauaauuaccgacacgaucaaguccuggagaaacaauaucuugaggacucaagagagcgagugugccugcguuaacgggucguguuucaccgugaugacagauggaccaucugacggccaggcuuccuacaaaauuuuucggaucgaaaaggguaaaauugucaagucaguggagaugaaugcccccaacuaucauuacgaagagugcaguuguuacccugauagcuccgagauaacuugcgugugccgcgacaauuggcacgggucuaacagaccaugggucagcuucaaucagaaccucgaauaucagaucggauacauuuguucaggcaucuuuggcgauaauccgaggcccaacgacaaaaccgggaguugcggaccuguuuccagcaauggugcgaacggcgugaagggguucucuuuucaauauggaaacggcguauggaucggucggacaaagucaauuaguagccgcaauggguucgagaugauaugggauccaaacggcuggaccggaacggacaauaacuuuuccaucaaacaggacauugugggcaucaaugaauggucuggguacucggggagcuucguccagcaucccgagcugacuggucuggauuguauucgaccuugcuucuggguggaacucaucagaggcaggccaaaggagaacacaauauggaccuccgggucaaguaucucuuuuuguggaguuaauagcgacacugugggcugguccuggcccgauggugcagaguuaccguucacaauugacaaauga

SEQ ID NO: 146544 - RNA, 1410 nt, Artificial Sequence
  derived and/or modified CDS sequence (opt3) from neuraminidase__InfluenzaA__ADE45516
augaaccccaaucagaagaucauuaccauaggcagcgugugcaugacaaucgggauggccaaccugauucuccaaaucggaaauauuaucuccauauggaucucucacucaauucagcuugguaaccagaaucagaucgagacuuguaaccaaagugucauuacguacgaaaauaacaccuggguuaaucagacauaugugaacaucagcaauacuaacuucgcugcaggccaguccguagugucugucaaacuggccggaaauucgucauugugcccugugagcgggugggcgauauacaguaaggacaacuccauuagaaucggcucuaaaggugauguuuuugugauuagggagccauucaucagcuguuccccguuagaaugccggaccuuuuuccugacacagggggcucuacucaaugacaagcauucaaacggaaccaucaaagaucgcagucccuaucgaacucugaugagcuguccuauuggcgaggucccaucucccuacaacucccguuuugaaucaguggccuggagcgcaagugccugccacgacggcauaaauuggcuuacaaucgggauuucuggaccugauaacggugcuguagcaguucugaaguauaauggcaucauaaccgacacgauuaaguccuggagaaacaauaucuugaggacucaagagagcgagugugccugcgugaacgggucguguuucaccgucaugacagauggaccaucugacggccaggcuuccuacaaaaucuuucggauugaaaaggguaaaaucgugaagucaguggagaugaaugcccccaacuaucauuacgaagagugcaguuguuacccugauagcuccgagauuacuugcgucugccgcgacaauuggcacgggucuaacagaccauggguuagcuucaaucagaaccucgaauaucagauaggauacaucuguucaggcauuuuuggcgauaauccgaggcccaacgacaaaaccgggaguugcggaccuguguccagcaauggugcgaacggcguaaagggguucucuuuuaaguauggaaacggcguguggaucggucggacaaaaucaaucagucugcgcaauggguucgagaugauuugggauccaaacggcuggaccggaacggacaauaacuuuagcauaaagcaagacaucgucggcauuaaugaaugguccggguacucuggaucguucgugcagcaucccgagcugacuggucucgauuguauccgaccuugcuucuggguugaauuaauuagaggcaggccaaaagagaacacaaucuggaccagcggguccucaauaaguuuuuguggagucaauucugacacugugggcuggagcuggcccgauggugcagagcugccguucacaaucgacaaguga

SEQ ID NO: 146545 - RNA, 1410 nt, Artificial Sequence
  derived and/or modified CDS sequence (opt3) from neuraminidase__InfluenzaA__ADF10069
augaaccccaaucagaagaucauuaccauaggcagcgugugcaugacaaucgggauggccaaccugauucuccaaaucggaaauauuaucuccauauggaucucucacucaauucagcuugguaaccagaaucagaucgagacuuguaaccaaagugucauuacguacgaaaauaacaccuggguuaaucagacauaugugaacaucagcaauacuaacuucgcugcaggccaguccguagugucugucaaacuggccggaaauucgucauugugcccugugagcggaugggcgauauacaguaaggacaacuccauuagaaucggcucuaaaggugauguuuuugugauuagggagccauucaucagcuguuccccguuagaaugccggaccuuuuuccugacacaggggacccuacucaaugacaagcauucaaacggaacuaucaaagaucgcagucccuaucgaacacugaugagcuguccuauuggcgaggucccaucucccuacaacucccguuuugaaucaguggcuuggagcgccagugcaugccacgacggcauaaauuggcuuaccaucgggauuucuggaccugauaacggugccguagcuguucugaaguauaauggcaucauaacggacacuauuaaguccuggagaaacaauaucuugaggacccaagagagcgagugugcaugcgugaacgggucguguuucacagucaugacugauggaccaucugacggccaggccuccuacaaaaucuuucggauugaaaaggguaaaaucgugaagucaguggagaugaaugcucccaacuaucauuacgaagagugcaguuguuacccugauagcuccgagauuaccugcgucugccgcgacaauuggcacgggucuaacagaccauggguuagcuucaaucagaaccucgaauaucagauaggauacaucuguucaggcauuuuuggcgauaauccgaggcccaacgacaaaacagggaguugcggaccuguguccagcaauggugccaacggcguaaagggguucucuuuuaaguauggaaacggcguguggaucggucggaccaaaucaaucaguagccgcaauggguucgagaugauuugggauccaaacggcuggacgggaacugacaauaacuuuuccauaaagcaagacaucgucggcauuaaugaauggucuggguacucggggagcuucgugcagcaucccgagcugacaggucuggauuguauccgaccuugcuucuggguugaacucauuagaggcaggccaaaagagaacaccaucuggacuuccgggucaaguauaucuuuuuguggagugaauagcgacacagucggcugguccuggcccgauggugcggaguuaccguucaccaucgacaaguga

SEQ ID NO: 146546 - RNA, 1410 nt, Artificial Sequence; identical to SEQ ID NO: 144786
  derived and/or modified CDS sequence (opt3) from neuraminidase__InfluenzaA__ADF10079

SEQ ID NO: 146547 - RNA, 1410 nt, Artificial Sequence; identical to SEQ ID NO: 144786
  derived and/or modified CDS sequence (opt3) from neuraminidase__InfluenzaA__ADF10089

SEQ ID NO: 146548 - RNA, 1410 nt, Artificial Sequence; identical to SEQ ID NO: 144786
  derived and/or modified CDS sequence (opt3) from neuraminidase__InfluenzaA__ADF10099

SEQ ID NO: 146549 - RNA, 1410 nt, Artificial Sequence
  derived and/or modified CDS sequence (opt3) from neuraminidase__InfluenzaA__ADF10109
augaaccccaaucagaagaucauuaccauaggcagcgugugcaugacaaucgggauggccaaccugauucuccaaaucggaaauauuaucuccauauggaucucucacucaauucagcuugguaaccagaaucagaucgagacuuguaaccaaagugucauuacguacgaaaauaacaccuggguuaaucagacauaugugaacaucagcaauacuaacuucgcugcaggccaguccguagugucugucaaacuggccggaaauucgucauugugcccugugagcgggugggcgauauacaguaaggacaacuccauuagaaucggcucuaaaggugauguuuuugugauuagggagccauucaucagcuguuccccguuagaaugccggaccuuuuuccugacacagggggcucuacucaaugacaagcauucaaacggaaccaucaaagaucgcagucccuaucgaacucugaugagcuguccuauuggcgaggucccaucucccuacaacucccguuuugaaucaguggccuggagcgcaagugccugccacgacggcauaaauuggcuuacaaucgggauuucuggaccugauaacggugcuguagcaguucugaaguauaauggcaucauaaccgacacgauuaaguccuggagaaacaauaucuugaggacucaagagagcgagugugccugcgugaacgggucguguuucaccgucaugacagauggaccaucugacggccaggcuuccuacaaaaucuuucggauugaaaaggguaaaaucgugaagucaguggagaugaaugcccccaacuauuacuacgaagagugcaguuguuauccugauagcuccgagauuacuugcgucugccgcgacaauuggcaugggucuaacagaccauggguuagcuucaaucagaaccucgaauaccagauaggauauaucuguucaggcauuuuuggcgauaauccgaggcccaacgacaaaaccgggaauugcggaccugugaguuccaacggugcgaacggcguaaagggguucagcuuuaaguacggaaauggcguguggaucggucggacaaaaucuaucucaagucgcaacggguucgagaugauuugggauccaaauggcuggaccggaacggacaacaauuuuagcauaaagcaagacaucgucggcauuaacgaaugguccggguauucuggaucguucgugcagcaccccgagcugacuggucuggauuguauccgaccuugcuucuggguugaacucauuagaggcaggccaaaagagaauacaaucuggaccagcggguccucaauaaguuuuuguggagugaacucugacacugucggcuggagcuggcccgauggugcagaguuaccguucacaaucgacaaguga

SEQ ID NO: 146550 - RNA, 1410 nt, Artificial Sequence; identical to SEQ ID NO: 144786
  derived and/or modified CDS sequence (opt3) from neuraminidase__InfluenzaA__ADF10129

SEQ ID NO: 146551 - RNA, 1410 nt, Artificial Sequence; identical to SEQ ID NO: 146216
  derived and/or modified CDS sequence (opt3) from neuraminidase__InfluenzaA__ADF10146

SEQ ID NO: 146552 - RNA, 1410 nt, Artificial Sequence
  derived and/or modified CDS sequence (opt3) from neuraminidase__InfluenzaA__ADF10166
augaaccccaaucagaagaucauuaccauaggcagcgugugcaugaucauugggauggccaaccugauccuccaaauuggaaauaucauauccaucuggauuucucacucaauccagcuugguaaccagaaucagauugagacauguaaccaaagugucaucacuuacgaaaauaacacguggguuaaucagaccuaugugaacauaagcaauacaaacuucgcugcaggccaguccguagugucugucaaacuggccggaaauucgucauugugcccugugagcggaugggcgauuuacaguaaggacaacuccaucagaauuggcucuaaaggugauguuuuugugaucagggagccauucaucagcuguuccccguuagaaugccggaccuuuuuccugacucagggggcucuacucaaugacaagcauucaaacggaacaauuaaagaucgcagucccuaucgaacccugaugagcuguccuauaggcgaggucccaucucccuacaacucccguuuugaaucaguggccuggagcgcaagugccugccacgacggcaucaauuggcuuacuauugggaucucuggaccugauaacggugcuguagcaguucugaaguauaauggcauaauuacagacaccaucaaguccuggagaaacaauaucuugaggacgcaagagagcgagugugccugcgugaacgggucguguuucacugucaugaccgauggaccaucugacggccaggcuuccuacaaaauuuuucggaucgaaaaggguaaaauugugaagucaguggagaugaaugcccccaacuaucauuacgaagagugcaguuguuacccugauagcuccgagauaacaugcgucugccgcgacaauuggcacgggucuaacagaccauggguuagcuucaaucagaaccucgaauaucagaucggauacauuuguucaggcaucuuuggcgauaauccgaggcccaacgacaaaacugggaguugcggaccuguguccagcaauggugcgaacggcguaaagggguucucuuuuaaguauggaaacggcguguggaucggucggaccaaaucaauuaguagccgcaagggguucgagaugauaugggauccaaauggcuggacaggaaccgacaacaauuuuuccaucaaacaagacauugucggcaucaacgaauggucuggguacucggggagcuucgugcagcaucccgagcugacgggucuggauuguauucgaccuugcuucuggguugaacucaucagaggcaggccaaaggagaauacuauauggacauccgggucaaguaucucuuuuuguggagugaacagcgacaccgucggcugguccuggcccgauggugcagaguuaccguucacuauugacaaauga

SEQ ID NO: 146553 - RNA, 1410 nt, Artificial Sequence; identical to SEQ ID NO: 146552
  derived and/or modified CDS sequence (opt3) from neuraminidase__InfluenzaA__ADF10176

SEQ ID NO: 146554 - RNA, 1410 nt, Artificial Sequence; identical to SEQ ID NO: 146552
  derived and/or modified CDS sequence (opt3) from neuraminidase__InfluenzaA__ADF10192

SEQ ID NO: 146555 - RNA, 1410 nt, Artificial Sequence; identical to SEQ ID NO: 144786
  derived and/or modified CDS sequence (opt3) from neuraminidase__InfluenzaA__ADF10247

SEQ ID NO: 146556 - RNA, 1410 nt, Artificial Sequence; identical to SEQ ID NO: 146552
  derived and/or modified CDS sequence (opt3) from neuraminidase__InfluenzaA__ADF10290

SEQ ID NO: 146557 - RNA, 1410 nt, Artificial Sequence
  derived and/or modified CDS sequence (opt3) from neuraminidase__InfluenzaA__ADF10304
augaaccccaaucagaagaucauuaccauaggcagcgugugcaugacaaucgggauggccaaccugauucuccaaaucggaaauauuaucuccauauggaucucucacucaauucagcuugguaaccagaaucagaucgagacuuguaaccaaagugucauuacguacgaaaauaacaccuggguuaaucagacauaugugaacaucagcaauacuaacuucgcugcaggccaguccguagugucugucaaacuggccggaaauucgucauugugcccugugagcggaugggcgauauacaguaaggacaacuccauuagaaucggcucuaaaggugauguuuuugugauuagggagccauucaucagcuguuccccguuagaaugccggaccuuuuuccugacacagggggcucuacucaaugacaagcauucaaacggaaccaucaaagaucgcagucccuaucgaacucugaugagcuguccuauuggcgaggucccaucucccuacaacucccguuuugaaucaguggccuggagcgcaagugccugccacgacggcauaaauuggcuuacaaucgggauuucuggaccugauaacggugcuguagcaguucugaaguauaauggcaucauaaccgacacgauuaaguccuggagaaacaauaucuugaggacucaagagagcgagugugccugcgugaacgggucguguuucaccgucaugacagauggaccaucugacggccaggcuuccuacaaaaucuuucggauugaaaaggguaaaaucgugaagucaguggagaugaaugcccccaacuaucauuacgaagagugcaguuguuacccugauagcuccgagauuacuugcgucugccgcgacaauuggcacgggucuaacagaccauggguuagcuucaaucagaaccucgaauaucagauaggauacaucuguucaggcauuuuuggcgauaauccgaggcccaacgacaaaaccgggaguugcggaccuguguccagcaauggugcgaacggcguaaagggguucucuuuuaaguauggaaacggcguguggaucggucggacaaaaucaaucaguagccgcaauggguucgagaugauuugggauccaaacggcuggaccggaacggacaauaacuuuuccauaaagcaagacaucgucggcauuaaugaauggucuggguacucggggagcuucgugcagcaucccgagcugacuggucuggauuguauccgaccuugcuucuggguugaacucauuagaggcaggccaaaagagaacacaaucuggaccuccgggucaaguauaucuuuuuguggagugaauagcgacacugucggcugguccuggcccgauggugcaggguuaccguucacaaucgacaaguga

SEQ ID NO: 146558 - RNA, 1410 nt, Artificial Sequence; identical to SEQ ID NO: 144786
  derived and/or modified CDS sequence (opt3) from neuraminidase__InfluenzaA__ADF10340

SEQ ID NO: 146559 - RNA, 1410 nt, Artificial Sequence; identical to SEQ ID NO: 144786
  derived and/or modified CDS sequence (opt3) from neuraminidase__InfluenzaA__ADF10361

SEQ ID NO: 146560 - RNA, 1410 nt, Artificial Sequence; identical to SEQ ID NO: 146552
  derived and/or modified CDS sequence (opt3) from neuraminidase__InfluenzaA__ADF10371

SEQ ID NO: 146561 - RNA, 1410 nt, Artificial Sequence; identical to SEQ ID NO: 146552
  derived and/or modified CDS sequence (opt3) from neuraminidase__InfluenzaA__ADF10407

SEQ ID NO: 146562 - RNA, 1410 nt, Artificial Sequence; identical to SEQ ID NO: 144786
  derived and/or modified CDS sequence (opt3) from neuraminidase__InfluenzaA__ADF10472

SEQ ID NO: 146563 - RNA, 1410 nt, Artificial Sequence; identical to SEQ ID NO: 146552
  derived and/or modified CDS sequence (opt3) from neuraminidase__InfluenzaA__ADF10616

SEQ ID NO: 146564 - RNA, 1410 nt, Artificial Sequence; identical to SEQ ID NO: 146552
  derived and/or modified CDS sequence (opt3) from neuraminidase__InfluenzaA__ADF10688

SEQ ID NO: 146565 - RNA, 1410 nt, Artificial Sequence; identical to SEQ ID NO: 146552
  derived and/or modified CDS sequence (opt3) from neuraminidase__InfluenzaA__ADF10726

SEQ ID NO: 146566 - RNA, 1410 nt, Artificial Sequence; identical to SEQ ID NO: 144786
  derived and/or modified CDS sequence (opt3) from neuraminidase__InfluenzaA__ADF10773

SEQ ID NO: 146567 - RNA, 1410 nt, Artificial Sequence
  derived and/or modified CDS sequence (opt3) from neuraminidase__InfluenzaA__ADF10837
augaaccccaaucagaagaucauuaccauaggcagcgugugcaugacaaucgggauggccaaccugauucuccaaaucggaaauauuaucuccauauggaucucucacucaauucagcuugguaaccagaaucagaucgagacuuguaaccaaagugucauuacguacgaaaauaacaccuggguuaaucagacauaugugaacaucagcaauacuaacuucgcugcaggccaguccguagugucugucaaacuggccggaaauucgucauugugcccugugagcggaugggcgauauacaguaaggacaacuccauuagaaucggcucuaaaggugauguuuuugugauuagggagccauucaucagcuguuccccguuagaaugccggaccuuuuuccugacacagggggcucuacucaaugacaagcauucaaacggaaccaucaaagaucgcagucccuaucgaacucugaugagcuguccuauuggcgaggucccaucucccuacaacucccguuuugaaucaguggccuggagcgcaagugccugccacgacggcauaaauuggcuuacaaucgggauuucuggaccugauaacggugcuguagcaguucugaaguauaauggcaucauaaccgacacgauuaaguccuggaaaaacaauaucuugagaacucaagagagcgagugugccugcgugaacgggucguguuucaccgucaugacagauggaccaucugacggccaggcuuccuacaagaucuuuaggauugaaaaagguaagaucgugaaaucaguggagaugaaugcccccaacuaucauuacgaagagugcaguuguuacccugauagcuccgagauuacuugcgucugccgggacaauuggcacgggucuaaccgcccauggguuagcuucaaucagaaccucgaauaucagauaggauacaucuguucaggcauuuuuggcgauaauccgagacccaacgacaagaccgggaguugcggaccuguguccagcaauggugcgaacggcguaaagggguucucuuuuaaauauggaaacggcguguggaucgguaggacaaagucaaucaguagccggaauggguucgagaugauuugggauccaaacggcuggaccggaacggacaauaacuuuuccauaaaacaagacaucgucggcauuaaugaauggucuggguacucggggagcuucgugcagcaucccgagcugacuggucuggauuguauccgcccuugcuucuggguugaacucauucgaggcagaccaaaggagaacacaaucuggaccuccgggucaaguauaucuuuuuguggagugaauagcgacacugucggcugguccuggcccgauggugcagaguuaccguucacaaucgacaaauga

SEQ ID NO: 146568 - RNA, 1410 nt, Artificial Sequence; identical to SEQ ID NO: 144786
  derived and/or modified CDS sequence (opt3) from neuraminidase__InfluenzaA__ADF10889

SEQ ID NO: 146569 - RNA, 1410 nt, Artificial Sequence; identical to SEQ ID NO: 144786
  derived and/or modified CDS sequence (opt3) from neuraminidase__InfluenzaA__ADF10947

SEQ ID NO: 146570 - RNA, 1410 nt, Artificial Sequence; identical to SEQ ID NO: 144786
  derived and/or modified CDS sequence (opt3) from neuraminidase__InfluenzaA__ADF11010

SEQ ID NO: 146571 - RNA, 1410 nt, Artificial Sequence
  derived and/or modified CDS sequence (opt3) from neuraminidase__InfluenzaA__ADF27355
augaaccccaaucagaagaucauuaccauaggcagcgugugcaugacaaucgggauggccaaccugauucuccaaaucggaaauauuaucuccauauggaucucucacucaauucagcuugguaaccagaaucagaucgagacuuguaaccaaagugucauuacguacgaaaauaacaccuggguuaaucagacauaugugaacaucagcaauacuaacuucgcugcaggccaguccguagugucugucaaacuggccggaaauucgucauugugcccugugagcggaugggcgauauacaguaaggacaacuccauuagaaucggcucuaaaggugauguuuuugugauuagggagccauucaucagcuguuccccguuagaaugccggaccuuuuuccugacacagggggcucuacucaaugacaagcauucaaacggaaccaucaaagaucgcagucccuaucgaacucugaugagcuguccuauuggcgaggucccaucucccuacaacucccguuuugaaucaguggccuggagcgcaagugccugccacgacggcauaaauuggcuuacaaucgggauuucuggaccugauaacggugcuguagcaguucugaaguauaauggcaucauaaccgacacgauuaaguccuggagaaacaauaucuugaggacucaagagagcgagugugccugcgugaacgggucguguuucaccgucaugacagauggaccaucugacggccaggcuuccuacaaaaucuuucggauugaaaaggguaaaaucgugaagucaguggagaugaaugcccccaacuaucauuacgaagagugcaguuguuacccugauagcuccgagauuacuugcgucugccgcgacaauuggcacgggucuaacagaccauggguuagcuucaaucagaaccucgaauaucagauaggauacaucuguucaggcauuuuuggcgauaauccgaggcccaacgacaaaaccgggaguugcggaccuguguccagcaauggugcgaacggcguaaagggguucucuuuuaaguauggaaacggcguguggaugggucggacaaaaucaaucaguagccgcaauggguucgagaugaucugggauccaaacggcuggaccggaacggacaauaacuuuuccauuaagcaagacauagucggcaucaaugaauggucuggguacucggggagcuucgugcagcaucccgagcugacuggucuggauuguauucgaccuugcuucuggguugaacucaucagaggcaggccaaaagagaacacaauuuggaccuccgggucaaguaucucuuuuuguggagugaauagcgacacugucggcugguccuggcccgauggugcagaguuaccguucacaauagacaaguga

SEQ ID NO: 146572 - RNA, 1410 nt, Artificial Sequence
  derived and/or modified CDS sequence (opt3) from neuraminidase__InfluenzaA__ADF27356
augaaccccaaucagaagaucauuaccauaggcagcgugugcaugacaaucgggauggccaaccugauucuccaaaucggaaauauuaucuccauauggaucucucacucaauucagcuugguaaccagaaucagaucgagacuuguaaccaaaaugucauuacguacgaaaacaauaccuggguuaaccagacauaugugaauaucaguaacacuaauuucgcugcaggccagagcguaguguccgucaaacuggccgggaacucuucguugugcccugugucaggaugggcgauauacagcaaggacaauaguauuagaaucggcuccaaaggugauguuuuugugauuagggagccauucaucucuuguagcccguuagaaugccggaccuuuuuccugacacagggggcucuacucaacgacaagcauuccaacggaaccaucaaagaucgcucacccuaucgaacucugaugaguuguccuauuggcgaggucccaagccccuacaauucucguuuugaauccguggccuggucagcaagcgccugccacgacggcauaaacuggcuuacaaucgggauuaguggaccugauaauggugcuguagcaguucugaaguauaacggcaucauaaccgacacgauuaagucuuggagaaauaacaucuugaggacucaagaguccgagugugccugcgugaaugggagcuguuucaccgucaugacagauggaccaucggacggccaggcuucuuacaaaaucuuucggauugaaaaggguaaaaucgugaaguccguggagaugaacgcccccaauuauuacuacgaagagugcucauguuauccugauaguagcgagauuacuugcgucugccgcgacaacuggcauggguccaauagaccauggguuucuuucaaccagaaucucgaauaccagauaggauauaucuguagcggcauuuuuggcgauaacccgaggcccaaugacaaaaccgggucaugcggaccugugaguuccaacggugcgaacggcguaaagggguucagcuuuaaguacggaaauggcguguggaucggucggacaaaaucuaucucaagucgcaacggguucgagaugauuugggauccaaauggcuggaccggaacggacaacaauuuuagcauaaagcaagacaucgucggcauuaacgaaugguccggguauucuggaucguucgugcagcaccccgagcugacuggucuggauuguauccgaccuugcuucuggguugaacucauuagaggcaggccaaaagagaauacaaucuggaccagcggguccucaauaaguuuuuguggagugaacucugacacugucggcuggagcuggcccgauggugcagaguuaccguucacaaucgacaaguga

SEQ ID NO: 146573 - RNA, 1410 nt, Artificial Sequence; identical to SEQ ID NO: 145140
  derived and/or modified CDS sequence (opt3) from neuraminidase__InfluenzaA__ADF27357

SEQ ID NO: 146574 - RNA, 1410 nt, Artificial Sequence; identical to SEQ ID NO: 145140
  derived and/or modified CDS sequence (opt3) from neuraminidase__InfluenzaA__ADF27358

SEQ ID NO: 146575 - RNA, 1410 nt, Artificial Sequence; identical to SEQ ID NO: 145140
  derived and/or modified CDS sequence (opt3) from neuraminidase__InfluenzaA__ADF27360

SEQ ID NO: 146576 - RNA, 1410 nt, Artificial Sequence; identical to SEQ ID NO: 144786
  derived and/or modified CDS sequence (opt3) from neuraminidase__InfluenzaA__ADF27361

SEQ ID NO: 146577 - RNA, 1410 nt, Artificial Sequence; identical to SEQ ID NO: 144786
  derived and/or modified CDS sequence (opt3) from neuraminidase__InfluenzaA__ADF27362

SEQ ID NO: 146578 - RNA, 1410 nt, Artificial Sequence; identical to SEQ ID NO: 144786
  derived and/or modified CDS sequence (opt3) from neuraminidase__InfluenzaA__ADF27363

SEQ ID NO: 146579 - RNA, 1410 nt, Artificial Sequence; identical to SEQ ID NO: 145140
  derived and/or modified CDS sequence (opt3) from neuraminidase__InfluenzaA__ADF27364

SEQ ID NO: 146580 - RNA, 1410 nt, Artificial Sequence; identical to SEQ ID NO: 144786
  derived and/or modified CDS sequence (opt3) from neuraminidase__InfluenzaA__ADF27365

SEQ ID NO: 146581 - RNA, 1410 nt, Artificial Sequence; identical to SEQ ID NO: 145140
  derived and/or modified CDS sequence (opt3) from neuraminidase__InfluenzaA__ADF27366

SEQ ID NO: 146582 - RNA, 1410 nt, Artificial Sequence; identical to SEQ ID NO: 144786
  derived and/or modified CDS sequence (opt3) from neuraminidase__InfluenzaA__ADF27382

SEQ ID NO: 146583 - RNA, 1410 nt, Artificial Sequence; identical to SEQ ID NO: 144786
  derived and/or modified CDS sequence (opt3) from neuraminidase__InfluenzaA__ADF27392

SEQ ID NO: 146584 - RNA, 1410 nt, Artificial Sequence; identical to SEQ ID NO: 144786
  derived and/or modified CDS sequence (opt3) from neuraminidase__InfluenzaA__ADF27402

SEQ ID NO: 146585 - RNA, 1410 nt, Artificial Sequence; identical to SEQ ID NO: 146567
  derived and/or modified CDS sequence (opt3) from neuraminidase__InfluenzaA__ADF27422

SEQ ID NO: 146586 - RNA, 1410 nt, Artificial Sequence
  derived and/or modified CDS sequence (opt3) from neuraminidase__InfluenzaA__ADF27432
augaaccccaaucagaagaucauuaccauaggcagcgugugcgucacaaucgggauggccaaccugauucuccaaaucggaaauauuaucuccauauggaucucucacucaauucagcuugguaaccagaaucagaucgagacuuguaaccaaaguguuauuacguacgaaaauaacaccugggugaaucagacauauguaaacaucagcaauacuaacuucgcugcaggccaguccguggucucugugaaacuggccggaaauucgucauugugcccuguuagcggaugggcgauauacaguaaggacaacuccauuagaaucggcucuaaaggugauguguuugucauuagggagccauucaucagcuguuccccguuagaaugccggaccuuuuuccugacacagggggcucuacucaaugacaagcauucaaacggaaccaucaaagaucgcagucccuaucgaacucugaugagcuguccuauuggcgaggugccaucucccuacaacucccguuuugaaucaguagccuggagcgcaagugccugccacgacggcauaaauuggcuuacaaucgggauuucuggaccugauaacggugcuguugcagugcugaaguauaauggcaucauaaccgacacgauuaaguccuggagaaacaauaucuugaggacucaagagagcgagugugccugcgucaacgggucguguuucaccgugaugacagauggaccaucugacggccaggcuuccuacaaaaucuuucggauugaaaaggguaaaaucgugaagucagucgagaugaaugcccccaacuaucauuacgaagagugcaguuguuacccugauagcuccgagauuacuugcguuugccgcgacaauuggcacgggucuaacagaccaugggugagcuucaaucagaaccucgaauaucagauaggauacaucuguucaggcauuuuuggcgauaauccgaggcccaacgacaaaaccgggaguugcggaccuguauccagcaauggugcgaacggcgugaagggguucucuuuuaaguauggaaacggcgucuggaucggucggacaaaaucaaucaguagccgcaauggguucgagaugauuugggauccaaacggcuggaccggaacggacaauaacuuuuccauaaagcaagacaucgugggcauuaaugaauggucuggguacucggggagcuucguucagcaucccgagcugacuggucuggauuguauccgaccuugcuucuggguggaacucauuagaggcaggccaaaagagaacacaaucuggaccuccgggucaaguauaucuuuuuguggagucaauagcgacacugugggcugguccuggcccgauggugcagaguuaccguucacaaucgacaaguga

SEQ ID NO: 146587 - RNA, 1410 nt, Artificial Sequence
  derived and/or modified CDS sequence (opt3) from neuraminidase__InfluenzaA__ADF27442
augaaccccaaucagaagaucauuaccauaggcagcgugugcaugacaaucgggauggccaaccugauucuccaaaucggaaauauuaucuccauauggaucucucacucaauucagcuugagaaccagaaucagaucgaaacuuguaaccaaagugucauuacguacgagaauaacaccuggguuaaucagacauaugugaacaucagcaauacuaacuucgcugcaggucaguccguagugucugucaaacuggccggcaauucgucauugugcccugugagcgggugggcgauauacaguaaggacaacuccauuagaaucggaucuaaaggcgauguuuuugugauuagggaaccauucaucagcuguuccccguuagagugccggaccuuuuuccugacacagggugcucuacucaaugacaagcauucaaacgggaccaucaaagaucgcagucccuaucgaacucugaugagcuguccuauuggagaagucccaucucccuacaacucccguuuugagucaguggccuggagcgcaagugccugccacgacggcauaaauuggcuuacaaucggcauuucugggccugauaacggagcuguagcaguucugaaguauaaugguaucauaaccgacacgauuaaguccuggagaaacaauaucuugaggacucaagagagcgaaugugccugcgugaacggcucguguuucaccgucaugacagaugggccaucugacggacaggcuuccuacaaaaucuuucggauugagaagggcaaaaucgugaagucaguggaaaugaaugcccccaacuaucauuacgaggagugcaguuguuacccugauagcuccgaaauuacuugcgucugccgcgacaauuggcacgguucuaacagaccauggguuagcuucaaucagaaccucgaguaucagauaggguacaucuguucaggaauuuuuggcgauaauccgaggcccaacgacaaaaccggcaguugcgggccuguguccagcaauggagcgaacgguguaaagggcuucucuuuuaaguaugggaacggaguguggaucggccggacaaaaucaaucaguagccgcaaugguuucgaaaugauuugggauccaaacggguggaccggcacggacaauaacuuuuccauaaagcaagacaucgucggaauuaaugaguggucuggcuacucggggagcuucgugcagcaucccgaacugacuggacuggauuguauccgaccuugcuucuggguugagcucauuagagguaggccaaaagagaacacaaucuggaccuccggcucaaguauaucuuuuuguggggugaauagcgacacugucggaugguccuggcccgauggcgcagaauuaccguucacaaucgacaaguga

SEQ ID NO: 146588 - RNA, 1410 nt, Artificial Sequence
  derived and/or modified CDS sequence (opt3) from neuraminidase__InfluenzaA__ADF27462
augaaccccaaucagaagaucauuaccauaggcagcgugugcaugacaaucgggauggccaaccugauucuccaaaucggaaauauuaucuccauauggaucucucacucaauucagcuugguaaccagaaucagaucgaggcuuguaaccaaagugucauuacuuacgaaaauaacacguggguuaaucagaccuaugugaacaucagcaauacaaacuucgcagccggccaguccguagugucugucaaacuggcgggaaauucgucauugugcccugugagcggaugggcuguuuacaguaaggacaacuccauaagaauuggcucuaaaggugauguguuugucaucagggagccauucauuagcuguuccccguuagaaugccggaccuuuuuccugacucagggggcccuacucaaugacaagcauucaaacggaacaaucaaagaucgcagucccuaucgaacccugaugagcuguccuaucggcgaggugccaucucccuacaacucccguuuugaaucaguagcauggagcgccagugcuugccacgacggcauuaauuggcuuacuauagggaucucuggaccugauaacggugcaguugccgugcugaaguauaauggcauuaucacagacaccauaaaguccuggagaaacaauauuuugaggacgcaagagagcgagugugcuugcgucaacgggucguguuucacugugaugaccgauggaccaucugacggccaggccuccuacaaaaucuuucggaucgaaaaggguaaaauugugaagucagucgagaugaaugcgcccaacuaucauuacgaagagugcaguuguuacccugauagcuccgagaucacaugcguuugccgcgacaauuggcacgggucuaacagaccaugggugagcuucaaucagaaccucgaauaucagauuggauacauauguucaggcaucuuuggcgauaauccgaggcccaacgacaaaacugggaguugcggaccuguauccagcaauggugcaaacggcgugaagggguucucuuuuaaguauggaaacggcgucuggauuggucggaccaaaucaaucaguagccgcaauggguucgagaugaucugggauccaaacggcuggacaggaaccgacaauaacuuuuccauuaagcaagacauagugggcaucaaugaauggucuggguacucggggagcuucguucagcaucccgagcugacgggucuggauuguauucgaccuugcuucuggguggaacucaucagaggcaggccaaaagagaacacuauuuggacauccgggucaaguaucucuuuuuguggagucaauagcgacaccgugggcugguccuggcccgauggugccgaguuaccguucacuauagacaaguga

SEQ ID NO: 146589 - RNA, 1410 nt, Artificial Sequence; identical to SEQ ID NO: 144786
  derived and/or modified CDS sequence (opt3) from neuraminidase__InfluenzaA__ADF27472

SEQ ID NO: 146590 - RNA, 1410 nt, Artificial Sequence
  derived and/or modified CDS sequence (opt3) from neuraminidase__InfluenzaA__ADF27482
augaaccccaaucagaagaucauuaccauaggcagcgugugcaugacaaucgggauggccaaccugauucuccaaaucggaaauauuaucuccauauggaucucucacucaauucagcuugguaaccagaaucaggucgagacuuguaaccaaaguaucauuacguacgaaaauaacaccuggguuaaucagacauaugugaacaucagcaauacuaacuucgcugcaggccaguccguagugucugucaaacuggccggaaauucgucauugugcccugugagcggaugggcgauauacaguaaggacaacuccauuagaaucggcucuaaaggugauguuuuugugauuagggagccauucaucagcuguuccccguuagaaugccggaccuuuuuccugacacagggggcucuacucaaugacaagcauucaaacggaaccaucaaagaucgcagucccuaucgaacucugaugagcuguccuauuggcgaggucccaucucccuacaacucccguuuugaaucaguggccuggagcgcaagugccugccacgacggcauaaauuggcuuacaaucgggauuucuggaccugauaacggugcuguagcaguucugaaguauaauggcaucauaaccgacacgauuaaguccuggagaaacaauaucuugaggacucaagagagcgagugugccugcgugaacgggucguguuucaccgucaugacagauggaccaucugacggccaggcuuccuacaaaaucuuucggauugaaaaggguaaaaucgugaagucaguggagaugaaugcccccaacuaucauuacgaagagugcaguuguuacccugauagcuccgagauuacuugcgucugccgcgacaauuggcacgggucuaacagaccauggguuagcuucaaucagaaccucgaauaucagauaggauacaucuguucaggcauuuuuggcgauaauccgaggcccaacgacaaaaccgggaguugcggaccuguguccagcaauggugcgaacggcguaaagggguucucuuuuaaguauggaaacggcguguggaucggucggacaaaaucaaucaguagccgcaauggguucgagaugauuugggauccaaacggcuggaccggaacggacaauaacuuuuccauaaagcaagacaucgucggcauuaaugaauggucuggguacucggggagcuucgugcagcaucccgagcugacuggucuggauuguauccgaccuugcuucuggguugaacucauuagaggcaggccaaaagagaacacaaucuggaccuccgggucaaguauaucuuuuuguggagugaauagcgacacugucggcugguccuggcccgauggugcagaguuaccguucacaaucgacaaguga

SEQ ID NO: 146591 - RNA, 1410 nt, Artificial Sequence
  derived and/or modified CDS sequence (opt3) from neuraminidase__InfluenzaA__ADF27492
augaaccccaaucagaagaucauuaccauaggcagcgugugcaugacaaucgggauggccaaccugauucuccaaaucggaaauauuaucuccauauggaucucucacucaauucagcuugguaaccagaaucagaucgagccuuguaaccaaagugucauuacuuacgaaaauaacacguggguuaaucagaccuaugugaacaucagcaauacaaacuucgcugcaggccaguccguagugucugucaaacuggccggaaauucgucauugugcccagugagcggaugggcgauauacaguaaggacaacuccauuagaaucggcucuaaaggugauguuuuugugauuagggagccguucaucagcuguucccccuuagaaugccggaccuuuuuccugacucagggggcucuacucaaugacaagcauucaaacggaacaaucaaagaucgcaguccuuaucgaacccugaugagcuguccaauuggcgagguccccucuccuuacaacucccguuuugaaucaguggccuggagcgcaagugccugccacgacggcauaaauuggcuuacuaucgggauuucuggaccagauaacggugcuguagcaguucugaaguauaauggcaucauaacagacaccauuaaguccuggagaaacaauaucuugaggacgcaagagagcgagugugccugcgugaacgggucguguuucacugucaugaccgauggacccucugacggccaggcuuccuacaaaaucuuucggauugaaaaggguaaaaucgugaagucaauugagaugaaugccccuaacuaucauuacgaagagugcaguuguuacccagauagcuccgagauaacaugcgugugccgcgacaauuggcacgggucuaacagaccgugggucagcuucaaucagaaccucgaauaucagaucggauacauuuguucaggcaucuuuggcgauaaucccaggccuaacgacaaaacugggaguugcggaccaguuuccagcaauggugcgaacggcgugaagggguucucuuuuaaguauggaaacggcguauggaucggucggaccaaaucaauuaguagccgcaauggguucgagaugauaugggaucccaacggcuggacaggaaccgacaauaacuuuuccaucaagcaagacauugugggcaucaaugaauggucuggguacucggggagcuucguccagcauccugagcugacgggucuggauuguauucgaccaugcuucuggguggaacucaucagaggcaggcccaaagagaacacuguuuggacauccgggucaaguauaucuuuuuguggagugaauagcgacaccgucggcugguccuggccggauggugcagaguuaccuuucacuaucgacaaguga

SEQ ID NO: 146592 - RNA, 1410 nt, Artificial Sequence; identical to SEQ ID NO: 144786
  derived and/or modified CDS sequence (opt3) from neuraminidase__InfluenzaA__ADF27502

SEQ ID NO: 146593 - RNA, 1410 nt, Artificial Sequence; identical to SEQ ID NO: 144786
  derived and/or modified CDS sequence (opt3) from neuraminidase__InfluenzaA__ADF27512

SEQ ID NO: 146594 - RNA, 1410 nt, Artificial Sequence
  derived and/or modified CDS sequence (opt3) from neuraminidase__InfluenzaA__ADF27522
augaaccccaaucagaagaucauuaccauaggcagcgugugcaugacaaucgggauggccaaccugauucuccaaaucggaaauauuaucuccauauggaucucucacucaauucagcuugguaaccagaaucagaucgagacuuguaaccaaagugucauuacguacgaaaauaacaccuggguuaaucagacauaugugaacaucagcaauacuaacuucgcugcaggccaguccguagugucugucaaacuggccggaaauucgucauugugcccugugagcggaugggcgauauacaguaaggacaacuccauuagaaucggcucuaaaggugauguuuuugugauuagggagccauucaucagcuguuccccguuagaaugccggaccuuuuuccugacacagggggcucuacucaaugacaagcauucaaacggaaccaucaaagaucgcagucccuaucgaacucugaugagcuguccuauuggcgaggucccaucucccuacaacucccguuuugaaucaguggccuggagcgcaagugccugccacgacggcauaaauuggcuuacaaucgggauuucuggaccugauaacggugcuguagcaguucugaaguauaauggcaucauaaccgacacgauuaaguccuggagaaacaauaucuugaggacucaagagagcgagugugccugcgugaacgggucguguuucaccgucaugacagauggaccaucugacggccaggcuuccuacaaaaucuuucggauugaaaaggguaaaaucgugaagucaguggagaugaaugcccccaacuaucauuacgaagagugcaguuguuacccugauagcuccgagauuacuugcgucugccgcgacaauuggcacgggucuaacagaccauggguuagcuucaaucagaaccucgaauaucagauaggauacaucuguucaggcauuuuuggcgauaauccgaggcccaacgacaaaaccgggaguugcggaccuguguccagcaauggugcgaacggcguaaagggguucucuuuuaaguauggaaacggcguguggaucggucggaucaaaucaauuaguagccgcaauggguucgagaugauaugggauccaaacggcuggacaggaaccgacaauaacuuuuccaucaagcaagacauugucggcaucaaugaauggucuggguacucggggagcuucgugcagcaucccgagcugacgggucuggauuguauucgaccuugcuucuggguugaacucaucagaggcaggccaaaagagaacacuauauggacauccgggucaaguaucucuuuuuguggagugaauagcgacaccgucggcugguccuggcccgauggugcagaguuaccguucacuauugacaaguga

SEQ ID NO: 146595 - RNA, 1410 nt, Artificial Sequence; identical to SEQ ID NO: 144786
  derived and/or modified CDS sequence (opt3) from neuraminidase__InfluenzaA__ADF27532

SEQ ID NO: 146596 - RNA, 1410 nt, Artificial Sequence
  derived and/or modified CDS sequence (opt3) from neuraminidase__InfluenzaA__ADF27542
augaaccccaaucagaagaucauuaccauaggcagcgugugcaugacaaucgggauggccaaccugauucuccaaaucggaaauauuaucuccauauggaucucucacucaauucagcuugguaaccagaaucagaucgagacuuguaaccaaagugucauuacguacgaaaauaacaccuggguuaaucagacauaugugaacaucagcaauacuaacuucgcugcaggccaguccguagugucugucaaacuggccggaaauucgucauugugcccugugagcggaugggcgauauacaguaaggacaacuccguuagaauuggcucuaaaggugauguguuugucaucagggagccauucauuagcuguuccccguuagaaugccggaccuuuuuccugacacagggggcucuacucaaugacaagcauucaaacggaaccaucaaagaucgcagucccuaucgaacucugaugagcuguccuaucggcgaggugccaucucccuacaacucccguuuugaaucaguagccuggagcgcaagugccugccacgacggcauuaauuggcuuacaauagggaucucuggaccugauaacggugcuguugcagugcugaaguauaauggcauuaucaccgacacgauaaaguccuggagaaacaauauuuugaggacucaagagagcgagugugccugcgucaacgggucguguuucaccgugaugacagauggaccaucugacggccaggcuuccuacaaaaucuuucggaucgaaaaggguaaaauugugaagucagucgagaugaaugcccccaacuaucauuacgaagagugcaguuguuacccugauagcuccgagaucacuugcguuugccgcgacaauuggcacgggucuaacagaccaugggugagcuucaaucagaaccucgaauauaggauuggauacauauguucaggcaucuuuggcgauaauccgcggcccaacgacaaaaccgggaguugcggaccuguauccagcaauggugcgaacggcgugaagggguucucuuuuaaguauggaaacggcgucuggauuggucgcacaaaaucaaucaguagccgaaauggguucgagaugaucugggauccaaacggcuggaccggaacggacaauaacuuuuccauuaagcaggacauagugggcaucaaugaauggucuggguacucggggagcuucguucaacaucccgagcugacuggucuggauuguauuagaccuugcuucuggguggaacucaucaggggccggccaaaagagaacacaauuuggaccuccgggucaaguaucucuuuuuguggagucaauagcgacacugugggcugguccuggcccgauggugcagaguuaccguucacaauagacaaguga

SEQ ID NO: 146597 - RNA, 1410 nt, Artificial Sequence
  derived and/or modified CDS sequence (opt3) from neuraminidase__InfluenzaA__ADF27552
augaaccccaaucagaagaucauuaccauaggcagcgugugcaugacaaucgggcuggccaaccucauucuucaaaucggaaauauuaucuccauaugggucucucacucaauccagcuggguaaccagaaucagauugagacuuguaaccaaaguguuaucacguacgaaaauaacaccugggugaaucagacauauguaaacauuagcaauacuaacuucgcugcaggccaguccguggucucugugaaauuggccggaaauucgucauuaugcccuguuagcggaugggcgaucuacaguaaggacaacuccgugagaauaggcucuaaaggugaugucuuugugauuagggagccauucaucagcuguuccccgcuggaaugccggaccuuuuuccuaacacagggggcucuccugaaugacaagcauucaaacggaaccauuaaagaucgcagucccuaucgaacucuuaugagcuguccuaucggcgagguaccaucucccuacaacucccguuuugaaucaguugccuggagcgcaagugccugccacgacggcaucaauuggcugacaauugggauaucuggaccugauaacggugcuguggcagucuugaaguauaauggcaucauuaccgacacgaucaaguccuggagaaacaauauacucaggacucaagagagcgagugugccugcgugaacgggucguguuucaccgugaugacagauggaccaucugacggccaggcuuccuacaaaauuuuucggaucgaaaaggguaaaaucgucaagucaguugagaugaaugcccccaacuaucauuacgaagagugcaguuguuacccugauagcuccgagauuacuugcgugugccgcgacaauuggcacgggucuaacagaccaugggugagcuucaaucagaaccuggaauauaggaucggauacauuuguucaggcauauuuggcgauaauccgcggcccaacgacaaaaccgggaguugcggaccuguauccagcaauggugcgaacggcgucaagggguucucuuuuaaguauggaaacggcguguggaucggucgcacaaaaucaauuaguagccgaaauggguucgagaugaucugggauccaaacggcuggaccggaacggacaagaauuuuuccaucaaacaggacauuguuggcauaaacgaauggucuggguacucggggagcuucgugcaacaucccgagcugacuggucucgauuguaucagaccuugcuucugggucgaauuaauuaggggccggccaaaggagaauacaaucuggaccuccgggucaaguauuucuuuuuguggagugaacagcgacacuguaggcugguccuggcccgauggugcagagcugccguucacaaucgacaaauga

SEQ ID NO: 146598 - RNA, 1410 nt, Artificial Sequence; identical to SEQ ID NO: 145612
  derived and/or modified CDS sequence (opt3) from neuraminidase__InfluenzaA__ADF27562

SEQ ID NO: 146599 - RNA, 1410 nt, Artificial Sequence; identical to SEQ ID NO: 144786
  derived and/or modified CDS sequence (opt3) from neuraminidase__InfluenzaA__ADF27572

SEQ ID NO: 146600 - RNA, 1410 nt, Artificial Sequence
  derived and/or modified CDS sequence (opt3) from neuraminidase__InfluenzaA__ADF27582
augaaccccaaucagaagaucauuaccauaggcagcgugugcaugacaaucgggauggccaaccugauucuccaaaucggaaauauuaucuccauauggaucucucacucaauucagcuugguaaccagaaucagaucgagacuuguaaccaaagugucauuacguacgaaaauaacaccuggguuaaucagacauaugugaacaucagcaauacuaacuucgcugcaggccaguccguagugucugucaaacuggccggaaauucgucauugugcccugugagcggaugggcgauauacaguaaggacaacuccauuagaaucggcucuaaaggugauguuuuugugauuagggagccauucaucagcuguuccccguuagaaugccggaccuuuuuccugacacagggggcucuacucaaugacaagcauucaaacggaaccaucaaagaucgcagucccuaucgaacucugaugagcuguccuauuggcgaggucccaucucccuacaacucccguuuugaaucaguggccuggagcgcaagugccugccacgacggcauaaauuggcuuacaaucgggauuucuggaccugauaacggugcuguagcaguucugaaguauaauggcaucauaaccgacacgauuaaguccuggagaaacaauaucuugaggacucaagagagcgagugugccugcgugaacgggucguguuucaccgucaugacagauggaccaucugacggccaggcuuccuacaaaaucuuucggauugaaaaggguaaaaucgugaagucaguggagaugaaugcccccaacuaucauuacgaagagugcaguuguuacccugauagcuccgagauuacuugcgucugccgcgacaauuggcacgggucuaacagaccauggguuagcuucaaucagaaccucgaauauaggauaggauacaucuguucaggcauuuuuggcgauaauccgcggcccaacgacaaaaccgggaguugcggaccuguguccagcaauggugcgaacggcguaaagggguucucuuuuaaguauggaaacggcguguggaucggucgcacaaaaucaaucaguagccgaaauggguucgagaugauuugggauccaaacggcuggaccggaacggacaauaacuuuuccauaaagcaggacaucgucggcauuaaugaauggucuggguacucggggagcuucgugcaacaucccgagcugacuggucuggauuguaucagaccuugcuucuggguugaacucauuaggggccggccaaaagagaacacaaucuggaccuccgggucaaguauaucuuuuuguggagugaauagcgacacugucggcugguccuggcccgauggugcagaguuaccguucacaaucgacaaguga

SEQ ID NO: 146601 - RNA, 1410 nt, Artificial Sequence; identical to SEQ ID NO: 144786
  derived and/or modified CDS sequence (opt3) from neuraminidase__InfluenzaA__ADF27592

SEQ ID NO: 146602 - RNA, 1410 nt, Artificial Sequence
  derived and/or modified CDS sequence (opt3) from neuraminidase__InfluenzaA__ADF27602
augaaccccaaucagaagaucauuaccauaggcagcgugugcaugacaaucgggauggccaaccugauucuccaaaucggaaauauuaucuccauauggaucucucacucaauucagcuugguaaccagaaucagaucgagacuuguaaccaaagugucauuacguacgaaaauaacaccuggguuaaucagacauaugugaacaucagcaauacuaacuucgcugcaggccaguccguagugucugucaaacuggccgggaauagcucauugugcccugugagcggaugggcgauauacaguaaggacaacuccauuagaaucggcucuaaaggugauguuuuugugauuagggagccauucaucagcuguuccccguuagaaugccggaccuuuuuccugacacagggggcucuacucaaugacaagcauucaaacggaaccaucaaagaucgcagucccuaucgaacucugaugagcuguccuauuggcgaggucccaucucccuacaacucccguuuugaaucaguggccuggagcgcaagugccugccacgacggcauaaauuggcuuacaaucgggauuucuggaccugauaacggugcuguagcaguucugaaguauaauggcaucauaaccgacacgauuaaguccuggagaaacaauaucuugaggacucaagagagcgagugugccugcgugaacgggucguguuucaccgucaugacagauggaccaucugacggccaggcuuccuacaaaaucuuucggauugaacgcgguaagaucgugaaaucaguggagaugaaugcccccaacuaucauuacgaagagugcaguuguuacccugauagcuccgagauuacuugcgucugcagagacaauuggcacgggucuaacaggccauggguuagcuucaaucagaaccucgaauaucagauaggauacaucuguucaggcauuuuuggcgauaauccgcggcccaacgacaagaccgggaguugcggaccuguguccagcaauggugcgaacggcguaaaaggguucucuuuuaaguauggaaacggcguguggaucggucgcacaaagucaaucaguagccgaaauggguucgagaugauuugggauccaaacggcuggaccggaacggacaauuccuuuucuauaaaacaagacaucgucggcauuaacgaauggucgggguacagcggauccuucgugcagcaucccgagcugacuggucuggauuguaucagaccuugcuucuggguugaacucauuaggggccggccaaaggagaauacaaucuggaccucagggaguucuauaucguuuuguggagugaacuccgacacugucggcuggucauggcccgauggugcagaguuaccguucacaaucgacaaauga

SEQ ID NO: 146603 - RNA, 1410 nt, Artificial Sequence; identical to SEQ ID NO: 144786
  derived and/or modified CDS sequence (opt3) from neuraminidase__InfluenzaA__ADF27612

SEQ ID NO: 146604 - RNA, 1410 nt, Artificial Sequence; identical to SEQ ID NO: 146074
  derived and/or modified CDS sequence (opt3) from neuraminidase__InfluenzaA__ADF27622

SEQ ID NO: 146605 - RNA, 1410 nt, Artificial Sequence; identical to SEQ ID NO: 146521
  derived and/or modified CDS sequence (opt3) from neuraminidase__InfluenzaA__ADF27632

SEQ ID NO: 146606 - RNA, 1410 nt, Artificial Sequence; identical to SEQ ID NO: 144786
  derived and/or modified CDS sequence (opt3) from neuraminidase__InfluenzaA__ADF27642

SEQ ID NO: 146607 - RNA, 1410 nt, Artificial Sequence; identical to SEQ ID NO: 144786
  derived and/or modified CDS sequence (opt3) from neuraminidase__InfluenzaA__ADF27652

SEQ ID NO: 146608 - RNA, 1410 nt, Artificial Sequence
  derived and/or modified CDS sequence (opt3) from neuraminidase__InfluenzaA__ADF27662
augaaccccaaucagaagaucauuaccauaggcagcgugugcaugacaaucgggauggccaaccugauucuccaaaucggaaauauuaucuccauauggaucucucacucaauucagcuugguaaccagaaucagaucgagacuuguaaccaaagugucauuacguacgaaaauaacaccuggguuaaucagacauaugugaacaucagcaauacuaacuucgcugcaggccaguccguagugucugucaaacuggccggaaauucgucauugugcccugugagcggaugggcgauauacaguaaggacaacuccguuagaauuggcucuaaaggugauguguuugucaucagggagccauucauuagcuguuccccguuagaaugccggaccuuuuuccugacacagggggcucuacucaaugacaagcauucaaacggaaccaucaaagaucgcagucccuaucgaacucugaugagcuguccuaucggcgaggugccaucucccuacaacucccguuuugaaucaguagccuggagcgcaagugccugcaaugacggcauuaacuggcuuacaauagggaucucuggaccugauaauggugcuguugcagugcugaaguauaacggcauuaucaccgacacgauaaaguccuggagaaauaacauuuugaggacucaagagagcgagugugccugcgucaaugggucguguuucaccgugaugacagauggaccaucugacggccaggcuuccuacaaaaucuuucggaucgaaaaggguaaaauugugaagucagucgagaugaacgcccccaauuaucacuacgaagagugcaguuguuacccugauagcuccgagaucacuugcguuugccgcgacaacuggcaugggucuaauagaccaugggugagcuucaaccagaaucucgaauauaggauuggauacauauguucaggcaucuuuggcgauaacccgcggcccaaugacaaaaccgggaguugcggaccuguauccagcaacggugcgaacggcgugaagggguucucuuuuaaguauggaaauggcgucuggauuggucgcacaaaaucaaucaguagccgaaacggguucgagaugaucugggauccaaauggcuggaccggaacggacaacaauuuuuccauuaagcaggacauagugggcaucaacgaauggucuggguacucggggagcuucguucaacaccccgagcugacuggucuggauuguauuagaccuugcuucuggguggaacucaucaggggccggccaaaagagaauacaauuuggaccuccgggucaaguaucucuuuuuguggagucaacagcgacacugugggcugguccuggcccgauggugcagaguuaccguucacaauagacaaguga

SEQ ID NO: 146609 - RNA, 1410 nt, Artificial Sequence; identical to SEQ ID NO: 144786
  derived and/or modified CDS sequence (opt3) from neuraminidase__InfluenzaA__ADF27672

SEQ ID NO: 146610 - RNA, 1410 nt, Artificial Sequence; identical to SEQ ID NO: 144786
  derived and/or modified CDS sequence (opt3) from neuraminidase__InfluenzaA__ADF27682

SEQ ID NO: 146611 - RNA, 1410 nt, Artificial Sequence; identical to SEQ ID NO: 144786
  derived and/or modified CDS sequence (opt3) from neuraminidase__InfluenzaA__ADF27692

SEQ ID NO: 146612 - RNA, 1410 nt, Artificial Sequence; identical to SEQ ID NO: 144786
  derived and/or modified CDS sequence (opt3) from neuraminidase__InfluenzaA__ADF27702

SEQ ID NO: 146613 - RNA, 1410 nt, Artificial Sequence; identical to SEQ ID NO: 144786
  derived and/or modified CDS sequence (opt3) from neuraminidase__InfluenzaA__ADF27712

SEQ ID NO: 146614 - RNA, 1410 nt, Artificial Sequence; identical to SEQ ID NO: 146074
  derived and/or modified CDS sequence (opt3) from neuraminidase__InfluenzaA__ADF27788

SEQ ID NO: 146615 - RNA, 1410 nt, Artificial Sequence; identical to SEQ ID NO: 146029
  derived and/or modified CDS sequence (opt3) from neuraminidase__InfluenzaA__ADF27798

SEQ ID NO: 146616 - RNA, 1410 nt, Artificial Sequence; identical to SEQ ID NO: 146521
  derived and/or modified CDS sequence (opt3) from neuraminidase__InfluenzaA__ADF27808

SEQ ID NO: 146617 - RNA, 1410 nt, Artificial Sequence
  derived and/or modified CDS sequence (opt3) from neuraminidase__InfluenzaA__ADF27818
augaaccccaaucagaagaucauuaccauaggcagcgugugcaugacaaucgggauggccaaccugauucuccaaaucggaaauauuaucuccauauggaucucucacucaauucagcuugguaaccagaaucagaucgagacuuguaaccaaagugucauuacguacgaaaauaacaccuggguuaaucagacauaugugaacaucagcaauacuaacuucgcugcaggccaguccguagugucugucaaacuggccggaaauucgucauugugcccugugagcgggugggcgauauacaguaaggacaacuccauuagaaucggcucuaaaggugauguuuuugugauuagggagccauucaucagcuguuccccguuagaaugccggaccuuuuuccugacacagggggcucuacucaaugacaagcauucaaacggaaccaucaaagaucgcagucccuaucgaacucugaugagcuguccuauuggcgaggucccaucucccuacaacucccguuuugaaucaguggccuggagcgcaagugccugccacgacggcauaaauuggcuuacaaucgggauuucuggaccugauaacggugcuguagcaguucugaaguauaauggcaucauaaccgacacgauuaaguccuggagaaacaauaucuugaggacucaagagagcgagugugccugcgugaacgggucguguuucaccaucaugacagauggaccaucugacggccaggcuuccuacaaaauuuuucggaucgaaaaggguaaaauugucaagucaguggagaugaaugcccccaacuaucauuacgaagagugcaguuguuacccugauagcuccgagauaacuugcgugugccgcgacaauuggcacgggucuaacagaccaugggucagcuucaaucagaaccucgaauaucagaucggauacauuuguucaggcaucuuuggcgauaauccgaggcccaacgacaaaaccgggaguugcggaccuguuuccagcaauggugcgaacggcgugaagggguucucuuuuaaguauggaaacggcguauggaucggucggacaaaaucaauuaauagucgcaacggguucgagaugauaugggauccaaauggcuggaccggaacggacaacaauuuuagcaucaagcaagacauugugggcaucaacgaaugguccggguacucuggaucguucguccagcaucccgagcugacuggucuggauuguauucgaccuugcuucuggguggaacucaucagaggcaggccaaaagagaauacaauauggaccagcggguccucaaucaguuuuuguggaguuaacucugacacugugggcuggagcuggcccgauggugcagaguuaccguucacaauugacaaguga

SEQ ID NO: 146618 - RNA, 1410 nt, Artificial Sequence; identical to SEQ ID NO: 144786
  derived and/or modified CDS sequence (opt3) from neuraminidase__InfluenzaA__ADF27838

SEQ ID NO: 146619 - RNA, 1410 nt, Artificial Sequence; identical to SEQ ID NO: 144786
  derived and/or modified CDS sequence (opt3) from neuraminidase__InfluenzaA__ADF27848

SEQ ID NO: 146620 - RNA, 1410 nt, Artificial Sequence
  derived and/or modified CDS sequence (opt3) from neuraminidase__InfluenzaA__ADF27858
augaaccccaaucagaagaucauuaccauaggcagcgugugcaugacaaucgggauggccaaccugauucuccaaaucggaaauauuaucuccauauggaucucucacucaauucagcuugguaaccagaaucagaucgagacuuguaaccaaagugucauuacguacgaaaauaacaccuggguuaaucagacauaugugaacaucagcaauacuaacuucgcugcaggccaguccguagugucugucaaacuggccgggaauagcucauugugcccugugagcggaugggcgauauacaguaaggacaacuccauuagaaucggcucuaaaggugauguuuuugugauuagggagccauucaucagcuguuccccguuagaaugccggaccuuuuuccugacacagggggcucuacucaaugacaagcauucaaacggaaccaucaaagaucgcagucccuaucgaacucugaugagcuguccuauuggcgaggucccaucucccuacaacucccguuuugaaucaguggccuggagcaguucugcaugccacgacggcauaaauuggcuuacaaucgggauuuccggaccugauaacggugccguagcuguucugaaguauaauggcaucauaaccgacacgauuaagagcuggagaaacaauaucuugaggacucaagagucggagugugcaugcgugaacgggucuuguuucaccgucaugacagauggaccauccgacggccaggccucauacaaaaucuuucggauugaaaaggguaaaaucgugaagaguguggagaugaaugcucccaacuaucauuacgaagagugcagcuguuacccugauuccucugagauuacuugcgucugccgcgacaauuggcacgggagcaacagaccauggguuucauucaaucagaaccucgaauaucagauaggauacaucuguaguggcauuuuuggcgauaauccgaggcccaacgacaaaaagggguccugcggaccugugagcucuaauggugccaacggcguaaagggguucucauuuaaauauggaaacggcguguggaucggucggaccaagaguaucagcucccgcaauggguucgagaugauuugggauccaaacggcuggacaggaaccgacaauaacuuuucuauaaaacaagacaucgucggcauuaaugaauggucgggguacagcggauccuucgugcagcaucccgagcugacgggucuggauuguauccgaccuugcuucuggguugaacucauuagaggcaggccaaaggagaacacuaucuggacaucagggaguucuauaucguuuuguggagugaauggcgacaccgucgguugguccuggcccgauggggcggaguuaccguucacuaucgacaaauga

SEQ ID NO: 146621 - RNA, 1410 nt, Artificial Sequence
  derived and/or modified CDS sequence (opt3) from neuraminidase__InfluenzaA__ADF27878
augaaccccaaucagaagaucauuaccauaggcagcgugugcaugacaaucgggauggccaaccugauucuccaaaucggaaauauuaucuccauauggaucucucacucaauucagcuugguaaccagaaucagaucgagacuuguaaccaaagugucauuacguacgaaaauaacaccuggguuaaucagacauaugugaacaucagcaauacuaacuucgcugcaggccaguccguagugucugucaaacuggccggaaauucgucauugugcccugugagcggaugggcgauauacaguaaggacaacuccauuagaaucggcucuaaaggugauguuuuugugauuagggagccauucaucagcuguuccccguuagaaugccggaccuuuuuccugacacagggggcucuacucaaugacaagcauucaaacggaaccaucaaagaucgcagucccuaucgaacucugaugagcuguccuauuggcgaggucccaucucccuacaacucccguuuugaaucaguggccuggagcgcaagugccugccacgacggcauaaauuggcuuacaaucgggauuucuggaccugauaacggugcuguagcaguucugaaguauaauggcaucauaaccgacacgauuaaguccuggagaaacaauaucuugaggacucaagagagcgagugugccugcgugaacgggucguguuucaccgucaugacagauggaccaucugacggccaggcuuccuacaaaaucuuucggauugaaaaggguaaaaucgugaagucaguggagaugaaugcccccaacuaucauuacgaagagugcaguuguuacccugauagcuccgagauuacuugcgucugccgcgacaauuggcacgggucuaacagaccauggguuagcuucaaucagaaccucgaauaucagauaggauacaucuguucaggcauuuuuggcgauaauccgaggcccaacgacaaaaaggggaguugcggaccuguguccagcaauggugcgaacggcguaaagggguucucuuuuaaauauggaaacggcguguggaucggucggaccaagucaaucaguagccgcaauggguucgagaugauuugggauccaaacggcuggacaggaaccgacaauaacuuuuccauaaaacaagacaucgucggcauuaaugaauggucuggguacucggggagcuucgugcagcaucccgagcugacgggucuggauuguauccgaccuugcuucuggguugaacucauuagaggcaggccaaaggagaacacuaucuggacauccgggucaaguauaucuuuuuguggagugaauggcgacaccgucgguuggagcuggcccgauggggcagaguuaccguucacuaucgacaaauga

SEQ ID NO: 146622 - RNA, 1410 nt, Artificial Sequence; identical to SEQ ID NO: 146074
  derived and/or modified CDS sequence (opt3) from neuraminidase__InfluenzaA__ADF27888

SEQ ID NO: 146623 - RNA, 1410 nt, Artificial Sequence; identical to SEQ ID NO: 144786
  derived and/or modified CDS sequence (opt3) from neuraminidase__InfluenzaA__ADF27898

SEQ ID NO: 146624 - RNA, 1410 nt, Artificial Sequence; identical to SEQ ID NO: 146074
  derived and/or modified CDS sequence (opt3) from neuraminidase__InfluenzaA__ADF27908

SEQ ID NO: 146625 - RNA, 1410 nt, Artificial Sequence; identical to SEQ ID NO: 146074
  derived and/or modified CDS sequence (opt3) from neuraminidase__InfluenzaA__ADF27918

SEQ ID NO: 146626 - RNA, 1410 nt, Artificial Sequence
  derived and/or modified CDS sequence (opt3) from neuraminidase__InfluenzaA__ADF27938
augaaccccaaucagagaaucauuaccauaggcagcgugugcaugacaaucgggauggccaaccugauucuccaaaucggaaauauuaucuccauauggaucucucacucaauucagcuugguaaccagaaucagaucgagacuuguaaccaaagugucauuacguacgaaaauaacaccuggguuaaucagacauaugugaacaucagcaauacuaacuucgcugcaggccaguccguagugucugucaagcuggccggaaauucgucauugugcccugugagcggaugggcgauauacaguaaagacaacuccauuaggaucggcucuaagggugauguuuuugugauucgggagccauucaucagcuguuccccguuagaaugccgcaccuuuuuccugacacagggggcucuacucaaugacaaacauucaaacggaaccaucaaggaucgaagucccuaucguacucugaugagcuguccuauuggcgaggucccaucucccuacaacuccagauuugaaucaguggccuggagcgcaagugccugccacgacggcauaaauuggcuuacaaucgggauuucuggaccugauaacggugcuguagcaguucugaaauauaauggcaucauaaccgacacgauuaaguccuggaggaacaauaucuugcggacucaagagagcgagugugccugcgugaacgggucguguuucaccgucaugacagauggaccaucugacggccaggcuuccuacaagaucuuucgcauugaaaaagguaagaucgugaaaucaguggagaugaaugcccccaacuaucauuacgaagagugcaguuguuacccugauagcuccgagauuacuugcgucugcagagacaauuggcacgggucuaacaggccauggguuagcuucaaucagaaccucgaauaucagauaggauacaucuguucaggcauuuuuggcgauaauccgcggcccaacgacaagaccgggaguugcggaccuguguccagcaauggugcgaacggcguaaaaggguucucuuuuaaguauggaaacggcguguggaucggucgcacaaagucaaucaguagccgaaauggguucgagaugauuugggauccaaacggcuggaccggaacggacaauaacuuuuccauaaaacaagacaucgucggcauuaaugaauggucuggguacucggggagcuucgugcagcaucccgagcugacuggucuggauuguaucagaccuugcuucuggguugaacucauuaggggccggccaaaggagaacacaaucuggaccuccgggucaaguaugucuuuuuguggagugaauagcgacacugucggcugguccuggcccgauggugcagaguuaccguucacaauagacaaauga

SEQ ID NO: 146627 - RNA, 1410 nt, Artificial Sequence; identical to SEQ ID NO: 144786
  derived and/or modified CDS sequence (opt3) from neuraminidase__InfluenzaA__ADF27948

SEQ ID NO: 146628 - RNA, 1410 nt, Artificial Sequence; identical to SEQ ID NO: 146074
  derived and/or modified CDS sequence (opt3) from neuraminidase__InfluenzaA__ADF27958

SEQ ID NO: 146629 - RNA, 1410 nt, Artificial Sequence; identical to SEQ ID NO: 144786
  derived and/or modified CDS sequence (opt3) from neuraminidase__InfluenzaA__ADF27968

SEQ ID NO: 146630 - RNA, 1410 nt, Artificial Sequence; identical to SEQ ID NO: 146074
  derived and/or modified CDS sequence (opt3) from neuraminidase__InfluenzaA__ADF27978

SEQ ID NO: 146631 - RNA, 1410 nt, Artificial Sequence
  derived and/or modified CDS sequence (opt3) from neuraminidase__InfluenzaA__ADF27988
augaaccccaaucagaagaucauuaccauaggcagcgugugcaugacaaucgggcuggccaaccucauucuucaaaucggaaauauuaucuccauauggaucucucacucaauucagcuggguaaccagaaucagaucgagacuuguaaccaaagugucauuagcuacgaaaauaacacguggguuaaucagaccuaugugaacaucuccaauacaaacuucgcugcaggccagucuguagugucggucaaauuggccgggaauagcucauuaugcccugugaguggaugggcgauauacuccaaggacaacucuguuagaauuggcagcaaaggugauguguuugucaucagggagccauucauuuccuguucaccgcuggaaugccggaccuuuuuccuaacucagggggcucuccugaaugacaagcauaguaacggaacaaucaaagaucgcagccccuaucgaacccuuaugucuuguccuaucggcgaggugccaucccccuacaacucacguuuugaaagcguagccuggagugcaucugccugccacgacggcauuaauuggcugacuauagggaucuccggaccugauaacggugcuguugcaguguugaaguauaauggcauuaucacagacaccauaaagagcuggagaaacaauauucucaggacgcaagagucggagugugccugcgucaacgggucuuguuucacugugaugaccgauggaccauccgacggccaggcuucauacaaaaucuuucggaucgaaaaggguaaaauugugaagagugucgagaugaaugcccccaacuaucauuacgaagagugcagcuguuacccugauuccucugagaucacaugcguuugccgcgacaauuggcacgggagcaacagaccaugggugucauucaaucagaaccuggaauauaggauuggauacauauguaguggcaucuuuggcgauaauccgcggcccaacgacaaaacuggguccugcggaccuguaagcucuaauggugcgaacggcgugaagggguucucauuuaaguauggaaacggcgucuggauuggucgcaccaaaaguaucagcucccgaaauggguucgagaugaucugggauccaaacggcuggacaggaaccgacaagaauuuuucuauuaaacaggacauagugggcaucaacgaauggucgggguacagcggauccuucguucaacaucccgagcugacgggucucgauuguauuagaccuugcuucuggguggaauuaaucaggggccggccaaaggagaauacuauuuggacaucagggaguucuaucagcuuuuguggagucaacuccgacaccgugggcuggucauggcccgauggugcagagcugccguucacuauagacaaauga

SEQ ID NO: 146632 - RNA, 1410 nt, Artificial Sequence; identical to SEQ ID NO: 144786
  derived and/or modified CDS sequence (opt3) from neuraminidase__InfluenzaA__ADF27998

SEQ ID NO: 146633 - RNA, 1410 nt, Artificial Sequence; identical to SEQ ID NO: 144786
  derived and/or modified CDS sequence (opt3) from neuraminidase__InfluenzaA__ADF28008

SEQ ID NO: 146634 - RNA, 1410 nt, Artificial Sequence; identical to SEQ ID NO: 145673
  derived and/or modified CDS sequence (opt3) from neuraminidase__InfluenzaA__ADF28018

SEQ ID NO: 146635 - RNA, 1410 nt, Artificial Sequence; identical to SEQ ID NO: 144786
  derived and/or modified CDS sequence (opt3) from neuraminidase__InfluenzaA__ADF28028

SEQ ID NO: 146636 - RNA, 1410 nt, Artificial Sequence
  derived and/or modified CDS sequence (opt3) from neuraminidase__InfluenzaA__ADF28038
augaaccccaaucagaagaucauuaccauaggcagcgugugcaugacaaucgggauggccaaccugauucuccaaaucggaaauauuaucuccauauggaucucucacucaauucagcuugguaaccagaaucagaucgagacuuguaaccaaagugucauuacguacgaaaauaacaccuggguuaaucagacauaugugaacaucagcaauacuaacuucgcuaccggccagcugguaguguccgucaaauuggcaggaaauucuucguuaugcccugugucagggugggccauauacagcaaggacaacaguauuagaaucggcuccaaaggugauguuuuugugauuagggagccauucaucucuuguagcccgcuggaaugccggacauuuuuccuaacccagggggcgcuccugaaugaccgccauuccaacggaacuaucaaggaucgaucacccuaucguacacuuaugaguuguccuauuggcgaggucccaagccccuacaacucuagauuugaauccguggcuuggucagccagcgcaugccacgacggcauaaauuggcugaccaucgggauuaguggaccugauaacggugccguagcuguuuugaaauauaauggcaucauaacggacacuauuaagucuuggaggaacaauauccuccggacccaagaguccgagugugcaugcgugaacgggagcuguuucacagucaugacugauggaccaucggacggccaggccucuuacaagaucuuucgcauugaaaaagguaagaucgugaaauccguggagaugaaugcucccaacuaucauuacgaagagugcucauguuacccugauaguagcgagauuaccugcgucugcagagacaauuggcacggguccaacaggccauggguuucuuucaaucagaaccuggaauaucagauaggauacaucuguagcggcauuuuuggcgauaauccgcggcccaacgacaagacagggucaugcggaccugugaguuccaauggugccaacggcguaaaaggguucagcuuuaaguauggaaacggcguguggaucggucgcaccaagucuaucucaagucgaaauggguucgagaugauuugggauccaaacggcuggacgggaacugacaauaacuuuagcauaaaacaagacaucgucggcauuaaugaaugguccggguacucuggaucguucgugcagcaucccgagcugacaggucucgauuguaucagaccuugcuucuggguugaauuaauuaggggccggccaaaggagaacaccaucuggacuagcggguccucaauaaguuuuuguggagucaauucugacacagugggcuggagcuggcccgauggugcggagcugccguucaccaucgacaaauga

SEQ ID NO: 146637 - RNA, 1410 nt, Artificial Sequence; identical to SEQ ID NO: 144786
  derived and/or modified CDS sequence (opt3) from neuraminidase__InfluenzaA__ADF28048

SEQ ID NO: 146638 - RNA, 1410 nt, Artificial Sequence; identical to SEQ ID NO: 144786
  derived and/or modified CDS sequence (opt3) from neuraminidase__InfluenzaA__ADF28058

SEQ ID NO: 146639 - RNA, 1410 nt, Artificial Sequence
  derived and/or modified CDS sequence (opt3) from neuraminidase__InfluenzaA__ADF28068
augaaccccaaucagaagaucauuaccauaggcagcgugugcaugacaaucgggauggccaaccugauucuccaaaucggaaauauuaucuccauauggaucucucacucaauucagcuugguaaccagaaucagaucgagacuuguaaccaaagugucauuacguacgaaaauaacaccuggguuaaucagacauaugugaacaucagcaauacuaacuucgcugcaggccaguccguagugucugucaaacuggccgggucgagcagcuugugcccugugaguggaugggcgauauacuccaaggacaauucuauuagaaucggcagcaaaggugauguuuuugugauuagggagccauucaucuccuguucacauuuagaaugccggaccuuuuuccugacacagggggcucuacucaacgacaagcacaguaauggaaccaucaaagaucgcagcccguaucgaacucugaugucuugucccauuggcgaggucccuuccccauacaacucacguuuugaaagcguggccuggagugcaucugccugccaugacggcauaaacuggcuuacaaucgggauuuccggacccgauaauggugcuguagcaguucugaaguauaacggcaucauaaccgacacgauuaagagcuggagaaauaacaucuugaggacucaagagucggagugugccugcgugaaugggucuuguuucaccgucaugacagauggaccuuccgacggccaggcuucauacaaaaucuuucggauugaaaaggguaaaaucgugaagaguguggagaugaacgccccaaauuaucacuacgaagagugcagcuguuaccccgauuccucugagauuacuugcgucugccgcgacaacuggcaugggagcaauagaccuuggguuucauucaaccagaaucucgaauaucagauaggauacaucuguaguggcauuuuuggcgauaacccaaggccgaaugacaaaaagggguccugcggacccgugagcucuaacggugcgaauggcguaaagggguucucauuuaaauauggaaacggcguguggaucggucggaccaagaguaucagcucccgcaacggguucgagaugauuugggauccuaauggcuggacaggaaccgacaacaauuuuucuauaaaacaagacaucgucggcauuaacgaauggucgggguacagcggauccuucgugcagcacccagagcugacgggucuggauuguauccgacccugcuucuggguugaacucauuagaggcaggccuaaggagaauacuaucuggacaucagggaguucuauaucauuuuguggagugaacuccgacaccgucggcuggucauggccagauggugcagaguuacccuucacuaucgacaaauga

SEQ ID NO: 146640 - RNA, 1410 nt, Artificial Sequence; identical to SEQ ID NO: 144786
  derived and/or modified CDS sequence (opt3) from neuraminidase__InfluenzaA__ADF28078

SEQ ID NO: 146641 - RNA, 1410 nt, Artificial Sequence; identical to SEQ ID NO: 144786
  derived and/or modified CDS sequence (opt3) from neuraminidase__InfluenzaA__ADF28088

SEQ ID NO: 146642 - RNA, 1410 nt, Artificial Sequence; identical to SEQ ID NO: 146248
  derived and/or modified CDS sequence (opt3) from neuraminidase__InfluenzaA__ADF28110

SEQ ID NO: 146643 - RNA, 1410 nt, Artificial Sequence; identical to SEQ ID NO: 144786
  derived and/or modified CDS sequence (opt3) from neuraminidase__InfluenzaA__ADF28120

SEQ ID NO: 146644 - RNA, 1410 nt, Artificial Sequence; identical to SEQ ID NO: 144786
  derived and/or modified CDS sequence (opt3) from neuraminidase__InfluenzaA__ADF29919

SEQ ID NO: 146645 - RNA, 1410 nt, Artificial Sequence; identical to SEQ ID NO: 145923
  derived and/or modified CDS sequence (opt3) from neuraminidase__InfluenzaA__ADF42692

SEQ ID NO: 146646 - RNA, 1410 nt, Artificial Sequence; identical to SEQ ID NO: 144786
  derived and/or modified CDS sequence (opt3) from neuraminidase__InfluenzaA__ADF42702

SEQ ID NO: 146647 - RNA, 1410 nt, Artificial Sequence; identical to SEQ ID NO: 146621
  derived and/or modified CDS sequence (opt3) from neuraminidase__InfluenzaA__ADF42712

SEQ ID NO: 146648 - RNA, 1410 nt, Artificial Sequence; identical to SEQ ID NO: 144786
  derived and/or modified CDS sequence (opt3) from neuraminidase__InfluenzaA__ADF42722

SEQ ID NO: 146649 - RNA, 1410 nt, Artificial Sequence; identical to SEQ ID NO: 146074
  derived and/or modified CDS sequence (opt3) from neuraminidase__InfluenzaA__ADF42732

SEQ ID NO: 146650 - RNA, 1410 nt, Artificial Sequence; identical to SEQ ID NO: 144786
  derived and/or modified CDS sequence (opt3) from neuraminidase__InfluenzaA__ADF42742

SEQ ID NO: 146651 - RNA, 1410 nt, Artificial Sequence; identical to SEQ ID NO: 144776
  derived and/or modified CDS sequence (opt3) from neuraminidase__InfluenzaA__ADF58339

SEQ ID NO: 146652 - RNA, 1410 nt, Artificial Sequence; identical to SEQ ID NO: 144786
  derived and/or modified CDS sequence (opt3) from neuraminidase__InfluenzaA__ADF58348

SEQ ID NO: 146653 - RNA, 1410 nt, Artificial Sequence; identical to SEQ ID NO: 144786
  derived and/or modified CDS sequence (opt3) from neuraminidase__InfluenzaA__ADF58350

SEQ ID NO: 146654 - RNA, 1410 nt, Artificial Sequence; identical to SEQ ID NO: 144786
  derived and/or modified CDS sequence (opt3) from neuraminidase__InfluenzaA__ADF58352

SEQ ID NO: 146655 - RNA, 1410 nt, Artificial Sequence
  derived and/or modified CDS sequence (opt3) from neuraminidase__InfluenzaA__ADF80459
augaaccccaaucagaagaucauuaccauaggcagcgugugcaugacaaucgggauggccaaccugauucuccaaaucggaaauauuaucuccauauggaucucucacucaauucagcuugguaaccagaaucagaucgagacuuguaaccaaagugucauuacguacgaaaauaacaccuggguuaaucagacauaugugaacaucagcaauacuaacuucgcugcaggccaguccguagugucugucaaacuggccggaaauucgucauugugcccugugagcgggugggcgauauacaguaaggacaacuccauuagaaucggcucuaaaggugauguuuuugugauuagggagccauucaucagcuguuccccguuagaaugccggaccuuuuuccugacacagggggcucuacucaaugacaagcauucaaacggaaccaucaaagaucgcagucccuaucgaacucugaugagcuguccuauuggcgaggucccaucucccuacaacucccguuuugaaucaguggccuggagcgcaagugccugccacgacggcauaaauuggcuuacaaucgggauuucuggaccugauaacggugcuguagcaguucugaaguauaauggcaucauaaccgacacgauuaaguccuggagaaacaauaucuugaggacucaagagagcgagugugccugcgugaacgggucguguuucaccgucaugacagauggaccaucugacggccaggcuuccuacaaaaucuuucggauugaaaaggguaaaaucgugaagucaguggagaugaaugcccccaacuauuacuacgaagagugcaguuguuauccugauagcuccgagauuacuugcgucugccgcgacaauuggcaugggucuaacagaccauggguuaccuucaaucagaaccucgaauaccagauaggauauaucuguagcggcauuuuuggcgauaauccgaggcccaacgacaaaacagggucaugcggaccugugaguuccaauggugcgaacggcguaaagggguucagcuuuaaguacggaaacggcguguggaucggucggaccaaaucuaucucaagucgcaauggguucgagaugauuugggauccaaacggcuggacgggaacugacaauaacuuuagcauaaagcaagacaucgucggcauuaaugaaugguccggguauucuggaucguucgugcagcaccccgagcugacaggucuggauuguauccgaccuugcuucuggguugaacucauuagaggcaggccaaaagagaacaccguguggacuagcggguccucaaucaguuuuuguggagucaauucugacacagugggcuggagcuggcccgauggugcagaguuaccguucaccauagacaaguga

SEQ ID NO: 146656 - RNA, 1410 nt, Artificial Sequence
  derived and/or modified CDS sequence (opt3) from neuraminidase__InfluenzaA__ADF80503
augaaccccaaucagaagaucauuaccauaggcagcgugugcaugacaaucgggauggccaaccugauucuccaaaucggaaauauuacuuccaucuggauaucucacucaauccagcuugguaaccagaaucagauugagacguguaaccaaagugucaucaccuacgaaaauaacacauggguuaaucagacuuaugugaacauuagcaauaccaacuucgcugcaggccaguccguagugucugucaaacuggccggaaauucgucauugugcccugugagcggaugggcgaucuacaguaaggacaacuccauaagaauuggcucuaaaggugauguuuuugugaucagggagccauucauuagcuguuccccguuagaaugccggacauuuuuccugacccagggggcucuacucaaugacaagcauucaaacggaacuaucaaagaucgcagucccuaucgaacacugaugagcuguccuaucggcgaggucccaucucccuacaacucccguuuugaaucaguggccuggagcgcaagugccugccacgacggcauuaauuggcuuaccauagggaucucuggaccugauaacggugcuguagcaguucugaaguauaauggcauuaucacggacacuauaaaguccuggagaaacaauauuuugaggacccaagagagcgagugugccugcgugaacgggucguguuucacagucaugacugauggaccaucugacggccaggcuuccuacaaaaucuuucggaucgaaaaggguaaaauugugaagucaguggagaugaaugcccccaacuauuacuacgaagagugcaguuguuauccugauagcuccgagauuaccugcgucugccgcgacaauuggcaugggucuaacagaccauggguuagcuucaaucagaaccucgaauaccagaucggauauauauguucaggcaucuuuggcgauaauccgaggcccaacgacaaaacagggaguugcggaccuguguccagcaauggugcgaacggcguaaagggguucucuuuuaaguacggaaacggcguguggauuggucggaccaaaucaaucaguagccgcaauggguucgagaugaucugggauccaaacggcuggacgggaacugacaauaacuuuuccauuaagcaagacauagucggcaucaaugaauggucuggguauucggggagcuucgugcagcaccccgagcugacaggucuggauuguauucgaccuugcuucuggguugaacucaucagaggcaggccaaaagagaacaccauuuggacuuccgggucaaguaucucuuuuuguggagugaauagcgacacagucggcugguccuggcccgauggugcagaguuaccguucaccauagacaaguga

SEQ ID NO: 146657 - RNA, 1410 nt, Artificial Sequence
  derived and/or modified CDS sequence (opt3) from neuraminidase__InfluenzaA__ADF83744
augaaccccaaucagaagaucauuaccauaggcagcgugucccugacaaucucuacuauuugcuucuuuaugcaaaucgccauucucaucacgaccgucacacuucacuucaaacaguacgaguuuaacucaccuccaaauaaccagguuaugcugugugaaccgacuauaaucgagaagaauauuaccgaaaucguguauuugacaaacaccacuauugagaaagaaaucugccccaaguuagcugaguacagaaauuggaguaaaccucagugugacauaacaggguucgcaccauuuagcaaggauaacuccauuaggcugucugccggaggugacaucuggguaacccgggagcccuaugugucgugcgauccugacaaguguuaccaauucgcgcuaggccaggggacgacucucaauaacguccauucaaauaacaccgugcgcgaucgaacaccauaucguacucugcuuaugaaugaacugggaguucccuuucacuugggcaccaaacaggugugcauugcuuggagcaguuccucuugucaugacgguaaggccuggcuccacgucugcaucacaggggaugacaaaaacgcaaccgccagcuucaucuacaauggaagacugguggauuccguaguuucauggaguaaggagauucugaggacgcaggaaagcgagugugugugcauaaacggcacuuguacagucgugaugaccgacggcucugcuuccgggaaagcagauacuaagauccucuuuauugaggaaggaaagaucgugcauacaucaaccuuaagcgguagugcccaacacgucgaggaaugcucuugcuauccucgguacccaggcguucgcugugugugcagagacaacuggaaaggguccaauaggccgauaguagauauuaacaucaaggaccacagcaucgugucgucuuacgucuguuccggacuggugggcgacacgccccggaaaaaugauucaaguagcuccucucauugccuugacccuaacaaugaggaaggugggcacggaguuaagggcugggcuuucgaugacggcaacgauguguggauggggcgcaccauuagcgagaaaucacgauugggauaugagacauuuaaggucaucgaagguuggaguaauccaaaauccaagcugcagauuaacagacaggugauaguagacaggggcaaucggagcggguacucuggaaucuucucaguugagggcaagaguuguauuaaccguugcuuuuauguggaacuaauccgcgguagaaaagaggaaacugagguccucuggaccagcaauuccaucguggucuucugugggacaucuggcacuuacggaaccggcucguggcccgauggggccgacauuaaccugaugccuauauga

SEQ ID NO: 146658 - RNA, 1410 nt, Artificial Sequence; identical to SEQ ID NO: 145640
  derived and/or modified CDS sequence (opt3) from neuraminidase__InfluenzaA__ADF83755

SEQ ID NO: 146659 - RNA, 1410 nt, Artificial Sequence
  derived and/or modified CDS sequence (opt3) from neuraminidase__InfluenzaA__ADF83766
augaaccccaaucagaagaucauuaccauaggcagcgugugcaugacaaucgggauggccaaccugauucuccaaaucggaaauauuaucuccauauggaucucucacucaauucagcuugguaaccagaaucagacugagacguguaaccaaagugucaucaccuacgaaaauaacacauggguuaaucagacuuaugugaacauuagcaauaccaacuucgcugcaggccaguccguagugucugucaaacuggccggaaauucgucauugugcccugugagcgggugggcgaucuacaguaaggacaacuccauaagaauuggcucuaaaggugauguuuuugugaucagggagccauucauuagcuguuccccguuagaaugccggacauuuuuccugacccagggggcucuacucaaugacaagcauucaaacggaacuaucaaagaucgcagucccuaucgaacacugaugagcuguccuaucggcgaggucccaucucccuacaacucccguuuugaaucaguggccuggagcgcaagugccugccacgacggcauuaauuggcuuaccauagggaucucuggaccugauaacggugcuguagcaguucugaaguauaauggcauuaucacggacacuauaaaguccuggagaaacaauauuuugaggacccaagagagcgagugugccugcgugaacgggucguguuucacagucaugacugauggaccaucugacggccaggcuuccuacaaaaucuuucggaucgaaaaggguaaaauugugaagucaguggagaugaaugcccccaacuaucauuacgaagagugcaguuguuacccugauagcuccgagauuaccugcgucugccgcgacaauuggcacgggucuaacagaccauggguuagcuucaaucagaaccucgaauaucagaucggauacauauguucaggcaucuuuggcgauaauccgaggcccaacgacaaaacagggaguugcggaccuguguccagcaauggugcgaacggcguaaagggguucucuuuuaaguaugauaacggaguguggauuggccggaccaaaucaaucaguagccgcaaugguuucgagaugaucugggacccaaacggguggacgggcacugacaauaacuuuuccauuaagcaagauauagucggaaucaaugaauggucuggcuacucggggagcuucgugcagcaucccgagcugacaggacuggacuguauucgaccuugcuucuggguugaacucaucagagguaggccaaaagagaacaccauuuggacuuccggcucaaguaucucuuuuuguggggugaauagcgauacagucggaugguccuggcccgacggcgcagaguuaccguucaccauagauaaguga

SEQ ID NO: 146660 - RNA, 1410 nt, Artificial Sequence; identical to SEQ ID NO: 144786
  derived and/or modified CDS sequence (opt3) from neuraminidase__InfluenzaA__ADF83776

SEQ ID NO: 146661 - RNA, 1410 nt, Artificial Sequence
  derived and/or modified CDS sequence (opt3) from neuraminidase__InfluenzaA__ADF83786
augaaccccaaucagaagaucauuaccauaggcagcgugugcaugacaaucgggauggccaaccugauucuccaaaucggaaauauuaucuccauauggaucucucacucaauucagcuugguaaccagaaucagaucgagacuuguaaccaaagugucauuacguacgaaaauaacaccuggguuaaucagacauaugugaacaucagcaauacuaacuucgcugcaggccaguccguagugucugucaaacuggccggaaauucgucauugugcccugugagcggaugggcgauauacaguaaggacaacuccauuagaaucggcucuaaaggugauguuuuugugauuagggagccauucaucagcuguuccccguuagaaugccggaccuuuuuccugacacagggggcucuacucaaugacaagcauucaaacggaaccaucaaagaucgcagucccuaucgaacucugaugagcuguccuauuggcgaggucccaucucccuacaacucccguuuugaaucaguggccuggagcgcaagugccugccacgacggcauaaauuggcuuacaaucgggauuucuggaccugauaacggugcuguagcaguucugaaguauaauggcaucauaaccgacacgauuaaguccuggagaaacaauaucuugaggacucaagagagcgagugugccugcgugaacgggucguguuucaccgucaugacagauggaccaucugacggccaggcuuccuacaaaaucuuucggauugaaaaggguaaaaucgugaagucaguggagaugaaugcccccaacuaucauuacgaagagugcaguuguuacccugauagcuccgagauuacuugcgucugccgcgacaauuggcacgggucuaacagaccauggguuagcuucaaucagaaccucgaauaucagauaggauacaucuguucaggcauuuuuggcgauaauccgaggcccaacgacaaaaccgggaguugcggaccuguguccagcaauggugcgaacggcguaaagggguucucuuuuaaguauggaaacggcguguggaucggucggacaaaaucaaucaguagccgcaauggguucgagaugauuugggauccaaacggcuggaccggaacggacaauaacuuuuccauaaagcaagacaucgucggcauuaaugaauggucuggguacucggggagcuucgugcagcaucccgagcugacuggucuggauuguauccgaccuugcuucuggguugaacucauuagaggcaggccaaaagagaacacaaucuggaccuccgggucaaguauaucuuuuuguggagugaauggcgacacugucgguuggagcuggcccgauggggcagaguuaccguucacaaucgacaaguga

SEQ ID NO: 146662 - RNA, 1410 nt, Artificial Sequence
  derived and/or modified CDS sequence (opt3) from neuraminidase__InfluenzaA__ADF83796
augaaccccaaucagaagaucauuaccauaggcagcgugugcaugacaaucgggauggccaaccugauucuccaaaucggaaauauuaucuccauauggaucucucacucaauucagcuugguaaccagaaucagaucgagacuuguaaccaaagugucauuacguacgaaaauaacaccuggguuaaucagacauaugugaacaucagcaauacuaacuucgcugcaggccaguccguagugucugucaaacuggccggaaauucgucauugugcccugugagcgggugggcgauauacaguaaggacaacuccauuagaaucggcucuaaaggugauguuuuugugauuagggagccauucaucagcuguuccccguuagaaugccggaccuuuuuccugacacagggggcucuacucaaugacaagcauucaaacggaaccaucaaagaucgcagucccuaucgaacucugaugagcuguccuauuggcgaggucccaucucccuacaacucccguuuugaaucaguggccuggagcgcaagugccugccacgacggcauaaauuggcuuacaaucgggauuucuggaccugauaacggugcuguagcaguucugaaguauaauggcaucauaaccgacacgauuaaguccuggagaaacaauaucuugaggacucaagagagcgagugugccugcgugaacgggucguguuucaccgucaugacagauggaccaucugacggccaggcuuccuacaaaaucuuucggauugaaaaggguaaaaucgugaagucaguggagaugaaugcccccaacuaucauuacgaagagugcaguuguuacccugauagcuccgagauuacuugcgucugccgcgacaauuggcacgggucuaacagaccauggguuagcuucaaucagaaccucgaauaucagauaggauacaucuguucaggcauuuuuggcgauaauccgaggcccaacgacaaaaccgggaguugcggaccuguguccagcaauggugcgaacggcguaaagggguucucuuuuaaguauggaaacggcguguggaucggucggacaaaaucaaucaguagccgcaauggguucgagaugauuugggauccaaacggcuggaccggaacggacaauaacuuuuccauaaagcaagacaucguccgaauuaaugaauggucuggcuacucggggagcuucgugcagcaucccgagcugacuggacuggauuguaucagaccuugcuucuggguugaacucauuaggggucggccaaaagagaacacaaucuggaccuccggcucaaguauaucuuuuuguggggugaauagcgacacugucggaugguccuggcccgauggcgcagaguuaccguucacaaucgacaaguga

SEQ ID NO: 146663 - RNA, 1410 nt, Artificial Sequence; identical to SEQ ID NO: 144786
  derived and/or modified CDS sequence (opt3) from neuraminidase__InfluenzaA__ADF83806

SEQ ID NO: 146664 - RNA, 1410 nt, Artificial Sequence; identical to SEQ ID NO: 146299
  derived and/or modified CDS sequence (opt3) from neuraminidase__InfluenzaA__ADF83816

SEQ ID NO: 146665 - RNA, 1410 nt, Artificial Sequence; identical to SEQ ID NO: 144786
  derived and/or modified CDS sequence (opt3) from neuraminidase__InfluenzaA__ADF83826

SEQ ID NO: 146666 - RNA, 1410 nt, Artificial Sequence; identical to SEQ ID NO: 144786
  derived and/or modified CDS sequence (opt3) from neuraminidase__InfluenzaA__ADF83836

SEQ ID NO: 146667 - RNA, 1410 nt, Artificial Sequence; identical to SEQ ID NO: 144786
  derived and/or modified CDS sequence (opt3) from neuraminidase__InfluenzaA__ADF83846

SEQ ID NO: 146668 - RNA, 1410 nt, Artificial Sequence; identical to SEQ ID NO: 144786
  derived and/or modified CDS sequence (opt3) from neuraminidase__InfluenzaA__ADF83856

SEQ ID NO: 146669 - RNA, 1410 nt, Artificial Sequence; identical to SEQ ID NO: 146137
  derived and/or modified CDS sequence (opt3) from neuraminidase__InfluenzaA__ADF83866

SEQ ID NO: 146670 - RNA, 1410 nt, Artificial Sequence; identical to SEQ ID NO: 146567
  derived and/or modified CDS sequence (opt3) from neuraminidase__InfluenzaA__ADF83876

SEQ ID NO: 146671 - RNA, 1410 nt, Artificial Sequence; identical to SEQ ID NO: 146217
  derived and/or modified CDS sequence (opt3) from neuraminidase__InfluenzaA__ADF83888

SEQ ID NO: 146672 - RNA, 1410 nt, Artificial Sequence
  derived and/or modified CDS sequence (opt3) from neuraminidase__InfluenzaA__ADF83898
augaaccccaaucagaagaucauuaccauaggcagcgugugcaugacaaucgggauggccaaccugauucuccaaaucggaaauauuaucuccauauggaucucucacccuauucagcuugguaaccagaaucagaucgagacuuguaaccaaucagucauuacguacgaaaauaacaccuggguuaaucagacauaugugaacaucaguaauacuaacuucgcugcaggccagagcguaguguccgucaaacuggccggaaauucuucguugugcccagugucagggugggcgauauacagcaaggacaacaguauuagaaucggcuccaaaggugauguuuuugugauuagggagccguucaucucuuguagccccuuagaaugccggaccuuuuuccugacacagggggcucuacucaaugacaagcauuccaacggaaccaucaaagaucgcucaccuuaucgaacucugaugaguuguccaauuggcgagguccccagcccuuacaacucucguuuugaauccguggccuggucagcaagcgccugccacgacggcauaaauuggcuuacaaucgggauuaguggaccagauaacggugcuguagcaguucugaaguauaauggcaucauaaccgacacgauuaagucuuggagaaacaauaucuugaggacucaagaguccgagugugccugcgugaacgggagcuguuucaccgucaugacagauggacccucggacggccaggcuucuuacaaaaucuuucggauugaaaaggguaaaaucgugaaguccguggagaugaaugccccuaacuaucauuacgaagagugcucauguuacccagauaguagcgagauuacuugcgucugccgcgacaauuggcacggguccaacagaccguggguuucuuucaaucagaaccucgaauaucagauaggauacaucuguagcggcauuuuuggcgauaaucccaggccuaacgacaaaaccgggucaugcggaccagugaguuccaauggugcgaacggcguaaagggguucagcuuuaaguauggaaacggcguguggaucggucggacaaaaucuaucucaagucgcaauggguucgagaugauuugggaucccaacggcuggaccggaacggacaauaacuuuagcauaaagcaagacaucgucggcauuaaugaaugguccggguacucuggaucguucgugcagcauccugagcugacuggucuggauuguauccgaccaugcuucuggguugaacucauuagaggcaggcccaaagagaacacaaucuggaccagcggguccucaauaaguuuuuguggagucaauucugacacugugggcuggagcuggccggauggugcagaguuaccuuucacaaucgacaaguga

SEQ ID NO: 146673 - RNA, 1410 nt, Artificial Sequence; identical to SEQ ID NO: 144786
  derived and/or modified CDS sequence (opt3) from neuraminidase__InfluenzaA__ADF83908

SEQ ID NO: 146674 - RNA, 1410 nt, Artificial Sequence; identical to SEQ ID NO: 144786
  derived and/or modified CDS sequence (opt3) from neuraminidase__InfluenzaA__ADF83918

SEQ ID NO: 146675 - RNA, 1410 nt, Artificial Sequence; identical to SEQ ID NO: 144786
  derived and/or modified CDS sequence (opt3) from neuraminidase__InfluenzaA__ADF84444

SEQ ID NO: 146676 - RNA, 1410 nt, Artificial Sequence; identical to SEQ ID NO: 144786
  derived and/or modified CDS sequence (opt3) from neuraminidase__InfluenzaA__ADF84462

SEQ ID NO: 146677 - RNA, 1410 nt, Artificial Sequence
  derived and/or modified CDS sequence (opt3) from neuraminidase__InfluenzaA__ADF84472
augaaccccaaucagaagaucauuaccauaggcagcgugugcaugacaaucgggauggccaaccugauucuccaaaucggaaauauuaucuccauauggaucucucacucaauucagcuugguaaccagaaucagaucgagacuuguaaccaaagugucauuacguacgaaaauaacaccuggguuaaucagacauaugugaacaucagcaauacuaacuucgcugcagagcaguccguagugucugucaaacuggccggcaauucgucauugugcccugugagcgggugggcgauauacaguaaggacaacuccauuagaaucggaucuaaaggcgauguuuuugugauuagggaaccauucaucagcuguuccccguuagagugccggaccuuuuuccugacacagggugcucuacucaaugacaagcauucaaacgggaccaucaaagaucgcagucccuaucgaacucugaugagcuguccuauuggagaagucccaucucccuacaacucccguuuugagucaguggccuggagcgcaagugccugccacgacggcauaaauuggcuuacaaucggcauuucugggccugauaacggagcuguagcaguucugaaguauaaugguaucauaaccgacacgauuaaguccuggagaaacaauaucuugaggacucaagagagcgaaugugccugcgugaacggcucguguuucaccgucaugacagaugggccaucugacggacaggcuuccuacaaaaucuuucggauugagaagggcaaaaucgugaagucaguggaaaugaaugcccccaacuaucauuacgaggagugcaguuguuacccugauagcuccgaaauuacuugcgucugccgcgacaauuggcacgguucuaacagaccauggguuagcuucaaucagaaccucgaguaucagauaggguacaucuguucaggaauuuuuggcgauaauccgaggcccaacgacaaaaccggcaguugcgggccuguguccagcaauggagcgaacgguguaaagggcuucucuuuuaaguaugggaacggaguguggaucggccggacaaaaucaaucaguagccgcaaugguuucgaaaugauuugggauccaaacggguggaccggcacggacaauaacuuuuccauaaagcaagacaucgucggaauuaaugaguggucuggcuacucggggagcuucgugcagcaucccgaacugacuggacuggauuguauccgaccuugcuucuggguugagcucauuagagguaggccaaaagagaacacaaucuggaccuccggcucaaguauaucuuuuuguggggugaauagcgacacugucggaugguccuggcccgauggcgcagaauuaccguucacaaucgacaaguga

SEQ ID NO: 146678 - RNA, 1410 nt, Artificial Sequence
  derived and/or modified CDS sequence (opt3) from neuraminidase__InfluenzaA__ADF84482
augaaccccaaucagaagaucauuauaaucggcagcgugugcaugaccauugggauggccaaccugauccuccaaauuggaaauaucauauccaucuggauuucucacucaauccagcuugguaaccagaaucagauugagacauguaaccaaagugucaucacuuacgaaaauaacacguggguuaaucagaccuaugugaacauaagcaauacaaacuucgcugcaggccaguccguagugucugucaaacuggccggaaauucgucauugugcccugugagcgggugggcgauuuacaguaaggacaacuccaucagaauuggcucuaaaggugauguuuuugugaucagggagccauucaucagcuguuccccguuagaaugccggaccuuuuuccugacucagggggcucuacucaaugacaagcauucaaacggaacaauuaaagaucgcagucccuaucgaacccugaugagcuguccuauaggcgaggucccaucucccuacaacucccguuuugaaucaguggccuggagcgcaagugccugccacgacggcaucaauuggcuuacuauugggaucucuggaccugauaacggugcuguagcaguucugaaguauaauggcauaauuacagacaccaucaaguccuggagaaacaauaucuugaggacgcaagagagcgagugugccugcgugaacgggucguguuucacugucaugaccgauggaccaucugacggccaggcuuccuacaaaauuuuucggaucgaaaaggguaaaauugugaagucaguggagaugaaugcccccaacuaucauuacgaagagugcaguuguuacccugauagcuccgagauaacaugcgucugccgcgacaauuggcacgggucuaacagaccauggguuagcuucaaucagaaccucgaauaucagaucggauacauuuguucaggcaucuuuggcgauaauccgaggcccaacgacaaaacugggaguugcggaccuguguccagcaauggugcgaacggcguaaagggguucucuuuuaaguauggaaacggcguguggaucggucggaccaaaucaauuaguagccgcaauggguucgagaugauaugggauccaaacggcuggacaggaaccgacaauaacuuugcaaucaagcaagacauugucggcaucaaugaaugguccggguacucuggaucguucgugcagcaucccgagcugacgggucuggauuguauucgaccuugcuucuggguugaacucaucagaggcaggccaaaagagaacacuauauggacaagcggguccucaaucaguuuuuguggagucaauucugacaccgugagcugguccuggcccgauggcgccgaguuaccguucacuauugacaaguga

SEQ ID NO: 146679 - RNA, 1410 nt, Artificial Sequence
  derived and/or modified CDS sequence (opt3) from neuraminidase__InfluenzaA__ADF84492
augaaccccaaucagaagaucauuaccauaggcagcgugugcaugacaaucgggauggccaaccugauucuccaaaucggaaauauuaucuccauauggaucucucacucaauucagcuugguaaccaggaccagaucgagacuuguaaucaaagugucauuacguacgaaaacaauaccuggguuaaccagacauaugugaauaucagcaacacuaauuucgcugcaggccaguccguagugucugucaaacuggccgggaacucgucauugugcccugugagcggaugggcgauauacaguaaggauaauuccauuagaaucggcucuaaaggugacguuuuugugauuagggagccauucaucagcuguuccccguuagaaugccggaccuuuuuccugacacagggggcucuacucaacgauaagcauucaaauggaaccaucaaagaccgcagucccuaucgaacucugaugagcuguccuauuggcgaggucccaucucccuacaacucccguuuugaaucaguggccuggagcgcaagugccugccacgauggcauaaacuggcuuacaaucgggauuucuggaccugacaauggugcuguagcaguucugaaguauaacggcaucauaaccgauacgauuaaguccuggagaaauaacaucuugaggacucaagagagcgagugugccugcgugaaugggucguguuucaccgucaugacagacggaccaucugauggccaggcuuccuacaaaaucuuucggauugaaaaggguaaaaucgugaagucaguggagaugaacgcccccaauuaucauuacgaagagugcaguuguuacccugacagcuccgagauuacuugcgucugccgcgauaacuggcacgggucuaauagaccauggguuagcuucaaccagaaucucgaauaucagauaggauacaucuguucaggcauuuuuggcgacaacccgaggcccaaugauaaaaccgggaguugcggaccuguguccagcaacggugcgaauggcguaaagggguucucuuuuaaguauggaaacggcguguggaucggucggacaaaaucaaucaguagccgcaacggguucgagaugauuugggacccaaauggcuggaccggaacggacaacaauuuuuccauaaagcaagauaucgucggcauuaacgaauggucuggguacucggguagcuucgugcagcaucccgagcugacuggacuggacuguauccgaccuugcuucuggguugaacucauuagaggcaggccaaaagagaauacaaucuggaccuccgggucaaguauaucuuuuuguggagugaacagcgauacugucggcugguccuggcccgacggugcagaguuaccguucacaaucgauaaguga

SEQ ID NO: 146680 - RNA, 1410 nt, Artificial Sequence; identical to SEQ ID NO: 145893
  derived and/or modified CDS sequence (opt3) from neuraminidase__InfluenzaA__ADF85020

SEQ ID NO: 146681 - RNA, 1410 nt, Artificial Sequence; identical to SEQ ID NO: 144786
  derived and/or modified CDS sequence (opt3) from neuraminidase__InfluenzaA__ADF87155

SEQ ID NO: 146682 - RNA, 1410 nt, Artificial Sequence
  derived and/or modified CDS sequence (opt3) from neuraminidase__InfluenzaA__ADF87165
augaaccccaaucagaagaucauuauaaucggcagcgugugcaugaccauugggauggccaaccugauccuccaaauuggaaauaucauauccaucuggauuucucacucaauccagcuugguaaccagaaucagauugagacauguaaccaaagugucaucacuuacgaaaauaacacguggguuaaucagaccuaugugaacauaagcaauacaaacuucgcugcaggccaguccguagugucugucaaacuggccggaaauucgucauugugcccugugagcgggugggcgauuuacaguaaggacaacuccaucagaauuggcucuaaaggugauguuuuugugaucagggagccauucaucagcuguuccccguuagaaugccggaccuuuuuccugacucagggggcucuacucaaugacaagcauucaaacggaacaauuaaagaucgcagucccuaucgaacccugaugagcuguccuauaggcgaggucccaucucccuacaacucccguuuugaaucaguggccuggagcgcaagugccugccacgacggcaucaauuggcuuacuauugggaucucuggaccugauaacggugcuguagcaguucugaaguauaauggcauaauuacagacaccaucaaguccuggagaaacaauaucuugaggacgcaagagagcgagugugccugcgugaacgggucguguuucacugucaugaccgauggaccaucugacggccaggcuuccuacaaaauuuuucggaucgauaaggguaaaauugugaagucaguggaaaugaaugcccccaacuaucauuacgaggaaugcaguuguuacccugacagcuccgagauaacaugcgucugccgcgauaauuggcacgggucuaacagaccauggguuagcuucaaucagaaccucgaguaucagaucggauacauuuguucaggcaucuuuggcgacaauccgaggcccaacgauaaaacugggaguugcggaccuguguccagcaauggugcgaacggcguaaagggguucucuuuuaaguauggaaacggcguguggaucggucggaccaaaucaauuaguagccgcaauggguucgaaaugauaugggacccaaacggcuggacaggaaccgacaauaacuuugcaaucaagcaagauauugucggcaucaaugagugguccggguacucuggaucguucgugcagcaucccgaacugacgggucuggacuguauucgaccuugcuucuggguugagcucaucagaggcaggccaaaagaaaacacuauauggacaagcggguccucaaucaguuuuuguggagucaauucugauaccgugggcuggagcuggcccgacggugccgaguuaccguucacuauugauaaguga

SEQ ID NO: 146683 - RNA, 1410 nt, Artificial Sequence; identical to SEQ ID NO: 146677
  derived and/or modified CDS sequence (opt3) from neuraminidase__InfluenzaA__ADF87175

SEQ ID NO: 146684 - RNA, 1410 nt, Artificial Sequence; identical to SEQ ID NO: 144786
  derived and/or modified CDS sequence (opt3) from neuraminidase__InfluenzaA__ADF87185

SEQ ID NO: 146685 - RNA, 1410 nt, Artificial Sequence; identical to SEQ ID NO: 146677
  derived and/or modified CDS sequence (opt3) from neuraminidase__InfluenzaA__ADF87195

SEQ ID NO: 146686 - RNA, 1410 nt, Artificial Sequence; identical to SEQ ID NO: 144786
  derived and/or modified CDS sequence (opt3) from neuraminidase__InfluenzaA__ADF87205

SEQ ID NO: 146687 - RNA, 1410 nt, Artificial Sequence; identical to SEQ ID NO: 144786
  derived and/or modified CDS sequence (opt3) from neuraminidase__InfluenzaA__ADF87215

SEQ ID NO: 146688 - RNA, 1410 nt, Artificial Sequence
  derived and/or modified CDS sequence (opt3) from neuraminidase__InfluenzaA__ADF87235
augaaccccaaucagaagaucauuaccauaggcagcgugugcaugacaaucgggauggccaaccugauucuccaaaucggaaauauuaucuccauauggaucucucacucaauucagcuugguaaccagaaucagaucgagacuuguaaccaaagugucauuacguacgaaaauaacaccuggguuaaucagacauaugugaacaucagcaauacuaacuucgcugcaggccaguccguagugucugucaaacuggccggaaauucgucauugugcccugugagcggaugggcgauauacaguaaggacaacuccauuagaaucggcucuaaaggugauguuuuugugauuagggagccauucaucagcuguuccccguuagaaugccggaccuuuuuccugacacagggggcucuacucaaugacaagcauucaaacggaaccaucaaagaucgcagucccuaucgaacucugaugagcuguccuauuggcgaggucccaucucccuacaacucccguuuugaaucaguggccuggagcgcaagugccugccacgacggcauaaauuggcuuacaaucgggauuucuggaccugauaacggugcuguagcaguucugaaguauaauggcaucauaaccgacacgauuaaguccuggagaaacaauaucuugaggacucaagagagcgagugugccugcgugaacgggucguguuucaccgucaugacagauggaccaucugacggccaggcuuccuacaaaaucuuuaagauugaaaaagguaagaucgugaaaucaguggagaugaaugcccccaacuaucauuacgaagagugcaguuguuacccugauagcuccgagauuacuugcgucugccgggacaauuggcacgggucuaaccgcccauggguuagcuucaaucagaaccucgaauaucagauaggauacaucuguucaggcauuuuuggcgauaauccgagacccaacgacaagaccgggaguugcggaccuguguccagcaauggugcgaacggcguaaagggguucucuuuuaaauauggaaacggcguguggaucgguaggacaaagucaaucaguagccggaauggguucgagaugauuugggauccaaacggcuggaccggaacggacaauaacuuuuccauaaaacaagacaucgucggcauuaaugaauggucuggguacucggggagcuucgugcagcaucccgagcugacuggucuggauuguauccgcccuugcuucuggguugaacucauucgaggcagaccaaaggagaacacaaucuggaccuccgggucaaguauaucuuuuuguggagugaauagcgacacugucggcugguccuggcccgauggugcagaguuaccguucacaaucgacaaauga

SEQ ID NO: 146689 - RNA, 1410 nt, Artificial Sequence; identical to SEQ ID NO: 146677
  derived and/or modified CDS sequence (opt3) from neuraminidase__InfluenzaA__ADF87245

SEQ ID NO: 146690 - RNA, 1410 nt, Artificial Sequence; identical to SEQ ID NO: 146677
  derived and/or modified CDS sequence (opt3) from neuraminidase__InfluenzaA__ADF87265

SEQ ID NO: 146691 - RNA, 1410 nt, Artificial Sequence
  derived and/or modified CDS sequence (opt3) from neuraminidase__InfluenzaA__ADF87285
augaaccccaaucagaagaucauuaccauaggcagcgugugcauguccaucgggauggccaaccugauucuccaaaucggaaauauuaucucuauauggaucucacacaguauucagcuugguaacaaaaaucagaucgagacauguaaccagagcgucauuacuuacgaaaauaacacguggguuaaucaaaccuaugugaacaucuccaauacaaacuucgcugcaggccagucuguagugucggucaagcuggccgggaauagcucauugugcccugugaguggaugggcgauauacuccaaagacaacucuauuagaaucggcagcaagggugauguuuuugugauuagggagccauucaucuccuguucaccguuagaaugccggaccuuuuuccugacucagggggcucuacucaaugacaaacauaguaacggaacaaucaaggaucgcagccccuaucgaacccugaugucuuguccuauuggcgaggucccaucccccuacaacucacguuuugaaagcguggccuggagugcaucugccugccacgacggcauaaauuggcuuacuaucgggauuuccggaccugauaacggugcuguagcaguucugaaguauaauggcaucauaacagacaccauuaaaagcuggagaaacaauaucuugaggacgcaggagucggagugugccugcgugaacgggucuuguuucacugucaugaccgauggaccauccgacggccaggcuucauacaagaucuuucggauugaaaaagguaagaucgugaaaaguguggagaugaaugcccccaacuaucauuacgaagagugcagcuguuacccugauuccucugagauuacaugcgucugccgcgacaauuggcacgggagcaacagaccauggguuucauucaaucaaaaccucgaauaucagauaggauacaucuguaguggcauuuuuggcgauaauccgaggcccaacgacaagaagggguccugcggaccugugagcucuaauggugcgaacggcguaaaaggguucucauuuaaguauggaaacggcguguggaucggucggacuaaaaguaucagcucccgcaauggguucgagaugauuugggauccaaacggcuggaccggaacagacaauaacuuuucuauaaagcaggacaucgucggcaugaaugaauggucgggguacagcggauccuucgugcaacaucccgagcugaccggucuggauuguauucgaccuugcuucuggguugaacucaucagaggcaggccaaaagagaacacgauuuggacuucagggaguucuaucagcuuuuguggagucaauuccgacacagugggcuggucauggcccgauggugcagaguuaccguucaccauagacaaguga

SEQ ID NO: 146692 - RNA, 1410 nt, Artificial Sequence; identical to SEQ ID NO: 144786
  derived and/or modified CDS sequence (opt3) from neuraminidase__InfluenzaA__ADF87295

SEQ ID NO: 146693 - RNA, 1410 nt, Artificial Sequence; identical to SEQ ID NO: 144786
  derived and/or modified CDS sequence (opt3) from neuraminidase__InfluenzaA__ADF87305

SEQ ID NO: 146694 - RNA, 1410 nt, Artificial Sequence; identical to SEQ ID NO: 144786
  derived and/or modified CDS sequence (opt3) from neuraminidase__InfluenzaA__ADF87334

SEQ ID NO: 146695 - RNA, 1410 nt, Artificial Sequence; identical to SEQ ID NO: 144786
  derived and/or modified CDS sequence (opt3) from neuraminidase__InfluenzaA__ADF87344

SEQ ID NO: 146696 - RNA, 1410 nt, Artificial Sequence
  derived and/or modified CDS sequence (opt3) from neuraminidase__InfluenzaA__ADF87354
augaaccccaaucagaagaucauuaccauaggcagcgugugcaugacaaucgggauggccaaccugauucuccaaaucggaaauauuaucuccauauggaucucucacucaauucagcuugguaaccagaaucagaucgagacuuguaaccaaagugucauuacguacgaaaauaacaccuggguuaaucagacauaugugaacaucagcaauacuaacuucgcugcaggccaguccguagugucugucaaacuggccggaaauucgucauugugcccugugagcggaugggcgauauacaguaaggacaacuccauuagaaucggcucuaaaggugauguuuuugugauuagggagccauucaucagcuguuccccguuagaaugccggaccuuuuuccugacacagggggcucuacucaaugacaagcauucaaacggaaccaucaaagaucgcagucccuaucgaacucugaugagcuguccuauuggcgaggucccaucucccuacaacucccguuuugaaucaguggccuggagcgcaagugccugccacgacggcauaaauuggcuuacaaucgggauuucuggaccugauaacggugcuguagcaguucugaaguauaauggcaucauaaccgacacgauuaaguccuggagaaacaauaucuugaggacucaagagagcgagugugccugcgugaacgggucguguuucaccgucaugacagauggaccaucugacggccaggcuuccuacaaaaucuuucggauugaaaaggguaaaaucgugaagucaguggagaugaaugcccccaacuaucauuacgaagagugcaguuguuacccugauagcuccgagauuacuugcgucugccgcgacaauuggcacgggucuaacagaccauggguuagcuucaaucagaaccucgaauaucagauaggauacaucuguucaggcauuuuuggcgauaauccgaggcccaacgacaaaaccgggaguugcggaccuguguccagcaauggugcgaacggcguaaagggguucucuuuuaaguauggaaacggcguguggaucggucggacaaaaucaaucaguagccgcaauggguucgagaugauuugggauccaaacggcuggaccggaacggacaauuacuuuuccauaaagcaagacaucgucggcauuaacgaauggucuggguauucggggagcuucgugcagcaucccgagcugacuggucuggauuguauccgaccuugcuucuggguugaacucauuagaggcaggccaaaagagaauacaaucuggaccuccgggucaaguauaucuuuuuguggagugaacagcgacacugucggcugguccuggcccgauggugcagaguuaccguucacaaucgacaaguga

SEQ ID NO: 146697 - RNA, 1410 nt, Artificial Sequence; identical to SEQ ID NO: 145369
  derived and/or modified CDS sequence (opt3) from neuraminidase__InfluenzaA__ADF87364

SEQ ID NO: 146698 - RNA, 1410 nt, Artificial Sequence; identical to SEQ ID NO: 144786
  derived and/or modified CDS sequence (opt3) from neuraminidase__InfluenzaA__ADF87374

SEQ ID NO: 146699 - RNA, 1410 nt, Artificial Sequence
  derived and/or modified CDS sequence (opt3) from neuraminidase__InfluenzaA__ADF87384
augaaccccaaucagaagaucauuaccauaggcagcgugugcaugacaaucgggauggccaaccugauucuccaaaucggaaauauuaucuccauauggaucucucacucaauucagcuugguaaccagaaucagaucgagacuuguaaccaaaguauuaucacguacgaaaauaacaccugggucaaucagacauauguuaacauaagcaauacuaacuucgcugcaggccaguccgugguaucugugaaacuggccggaaauucgucauugugcccugucagcggaugggcgauuuacaguaaggacaacuccaucagaauuggcucuaaaggugauguguuuguuaucagggagccauucaucagcuguuccccguuagaaugccggaccuuuuuccugacacagggggcucuacucaaugacaagcauucaaacggaaccauuaaagaucgcagucccuaucgaacucugaugagcuguccuauaggcgaggugccaucucccuacaacucccguuuugaaucagucgccuggagcgcaagugccugccacgacggcaucaauuggcuuacaauugggaucucuggaccugauaacggugcuguggcaguacugaaguauaauggcauaauuaccgacacgaucaaguccuggagaaacaauaucuugaggacucaagagagcgagugugccugcguuaacgggucguguuucaccgugaugacagauggaccaucugacggccaggcuuccuacaaaauuuuucggaucgaaaaggguaaaauugucaagucaguggagaugaaugcccccaacuaucauuacgaagagugcaguuguuacccugauagcuccgagauaacuugcgugugccgcgacaauuggcacgggucuaacagaccaugggucagcuucaaucagaaccucgaauaucagaucggauacauuuguucaggcaucuuuggcgauaauccgaggcccaacgacaaaaccgggaguugcggaccuguuuccagcaauggugcgaacggcgugaagggguucucuuuuaaguauggaaacggcguauggaucggucggacaaaaucaauuaguagccgcaauggguucgagaugauaugggauccaaacggcuggaccggaacggacaauaacuuuuccaucaagcaagacauugugggcaucaaugaauggucuggguacucggggagcuucguccagcaucccgagcugacuggucuggauuguauucgaccuugcuucuggguggaacucaucagaggcaggccaaaagagaacacaauauggaccuccgggucaaguaucucuuuuuguggaguuaauagcgacacugugggcugguccuggcccgauggugcagaguuaccguucacaauugacaaguga

SEQ ID NO: 146700 - RNA, 1410 nt, Artificial Sequence; identical to SEQ ID NO: 144786
  derived and/or modified CDS sequence (opt3) from neuraminidase__InfluenzaA__ADF97251

SEQ ID NO: 146701 - RNA, 1410 nt, Artificial Sequence; identical to SEQ ID NO: 146029
  derived and/or modified CDS sequence (opt3) from neuraminidase__InfluenzaA__ADF97252

SEQ ID NO: 146702 - RNA, 1410 nt, Artificial Sequence; identical to SEQ ID NO: 144786
  derived and/or modified CDS sequence (opt3) from neuraminidase__InfluenzaA__ADF97253

SEQ ID NO: 146703 - RNA, 1410 nt, Artificial Sequence; identical to SEQ ID NO: 144786
  derived and/or modified CDS sequence (opt3) from neuraminidase__InfluenzaA__ADF97254

SEQ ID NO: 146704 - RNA, 1410 nt, Artificial Sequence
  derived and/or modified CDS sequence (opt3) from neuraminidase__InfluenzaA__ADF97255
augaaccccaaucagaagaucauuaccauaggcagcgugugcaugacaaucgggauggccaaccugauucuccaaaucggaaauauuaucuccauauggaucucucacucaauucagcuugguaaccagaaucagaucgagacuuguaaccaaagugucauuacguacgaaaauaacaccuggguuaaucagacauaugugaacaucagcaauacuaacuucgcugcaggccaguccguagugucugucaaacuggccggaaauucgucauugugcccugugagcggaugggcgauauacaguaaggacaacuccauuagaaucggcucuaaaggugauguuuuugugauuagggagccauucaucagcuguuccccguuagaaugccggaccuuuuuccugacacagggggcucuacucaaugacaagcauucaaacggaaccaucaaagaucgcagucccuaucgaacucugaugagcuguccuauuggcgaggucccaucucccuacaacucccguuuugaaucaguggccuggagcgcaagugccugccacgacggcauaaauuggcuuacaaucgggauuucuggaccugauaacggugcuguagcaguucugaaguauaauggcaucauaaccgacacgauuaaguccuggagaaacaauaucuugaggacucaagagagcgagugugccugcgugaacgggucguguuucaccgucaugacagauggaccaucugacggccaggcuuccuacaaaaucuuucggauugaaaaggguaaaaucgugaagucaguggagaugaaugcccccaacuaucauuacgaagagugcaguuguuacccugauagcuccgagauuacuugcgucugccgcgacaauuggcacgggucuaacagaccauggguuagcuucaaucagaaccucgaauaucagauaggauacaucuguucaggcauuuuuggcgauaauccgaggcccaacgacaaaaccgggaguugcggaccuguguccagcaauggugcgaacggcguaaagggguucucuuuuaaguauggaaacggcguguggaucggucggacaaaaucaaucaguagccgcaauggguucgagaugauuugggauccaaacggcuggaccggaacggacaaucauuuuuccauaaagcaagacaucgucggcauuaacgaauggucuggguacucggggagcuucgugcagcaccccgagcugacuggucuggauuguauccgaccuugcuucuggguugaacucauuagaggcaggccaaaagagaauacaaucuggaccuccgggucaaguauaucuuuuuguggagugaacagcgacacugucggcugguccuggcccgauggugcagaguuaccguucacaaucgacaaguga

SEQ ID NO: 146705 - RNA, 1410 nt, Artificial Sequence; identical to SEQ ID NO: 144786
  derived and/or modified CDS sequence (opt3) from neuraminidase__InfluenzaA__ADF97256

SEQ ID NO: 146706 - RNA, 1410 nt, Artificial Sequence; identical to SEQ ID NO: 144786
  derived and/or modified CDS sequence (opt3) from neuraminidase__InfluenzaA__ADF97257

SEQ ID NO: 146707 - RNA, 1410 nt, Artificial Sequence; identical to SEQ ID NO: 145140
  derived and/or modified CDS sequence (opt3) from neuraminidase__InfluenzaA__ADF97837

SEQ ID NO: 146708 - RNA, 1410 nt, Artificial Sequence; identical to SEQ ID NO: 144786
  derived and/or modified CDS sequence (opt3) from neuraminidase__InfluenzaA__ADG08120

SEQ ID NO: 146709 - RNA, 1350 nt, Artificial Sequence
  derived and/or modified CDS sequence (opt3) from neuraminidase__InfluenzaA__ADG21408
augaaccccaaucagaagaucauuaccauaggcagcaucugcauggugauugggaucgucucccugaugcuccaaauuggaaacaugaucucuauauggguuucacacaguauccagacagguaaucagugucaggacgagccuauuagcaacacuaaauuccuuacggaaaaggccguggcuuccguaacccuggcaggcaauuugucuuuaugcccagugucggggugggccgucuacucaaaagauaacagcaucagaauuggaaguaggggcgacguguuuguuauccgggagccguucauauccuguucucaucuggaaugccgcacauuuuuccuaacucaaggugcgcuccugaaugauaagcacagcaacgggaccgugaaagaccgaucaccccaucguacacuuauguccuguccugucggagaggcuccaagucccuauaauagcagauuugaaucuguggccugguccgcaucagccugccacgauggcaccagcuggcugacuauuggcaucagugggccugacaacggagcuguagcaguuuugaaguacaaugguauuaucacagauaccaucaagucuuggaggaacaauauuaugcggacgcaggaguccgagugugccugcgugaacggcagcuguuucacugucaugaccgacgggccaucgucuggacaggcuuccuauaaaauauuuaagauggaaaaaggcaagguggugaaaucagucgagcucgaugcccccaauuaccauuaugaagagugcaguuguuacccugacgcgggugagaucacaugcguuugccgcgauaacuggcacgggagcaacagaccauggguguccuucaaucagaaccuggaauaucaaauuggauacaucuguucuggcguauuuggcgacaauccgaggcccaacgaugggacuggaagcugcgguccuguguucccaaauggcgcauacggggucaagggauuuucauucaaguauggcaacgguguguggauagggcggaccaaaaguacaaauucccgcagcggcuuugagaugauuugggaccccaacggauggaccggcacggacucuucauucaguguuaagcaggauaucguggccaucacugacuggagcggguacuccggaucuuucguccagcacccugaacugacaggucucgauuguauucgaccaugcuuuuggguggaguuaaucagaggcaggcccaaagaaucgaccauuuggacuagcggguccucaauaaguuucuguggaguaaauggcgacacaguuucuuggagcuggccggauggugcugagcugccuuuuaccaucgacaaguga

SEQ ID NO: 146710 - RNA, 1350 nt, Artificial Sequence; identical to SEQ ID NO: 145071
  derived and/or modified CDS sequence (opt3) from neuraminidase__InfluenzaA__ADG21409

SEQ ID NO: 146711 - RNA, 1350 nt, Artificial Sequence; identical to SEQ ID NO: 145071
  derived and/or modified CDS sequence (opt3) from neuraminidase__InfluenzaA__ADG21415

SEQ ID NO: 146712 - RNA, 1350 nt, Artificial Sequence; identical to SEQ ID NO: 145071
  derived and/or modified CDS sequence (opt3) from neuraminidase__InfluenzaA__ADG21417

SEQ ID NO: 146713 - RNA, 1350 nt, Artificial Sequence
  derived and/or modified CDS sequence (opt3) from neuraminidase__InfluenzaA__ADG21419
augaaccccaaucagaagaucauuaccauaggcagcaucugcauggugauugggaucgucucccugaugcuccaaauuggaaacaugaucucuauauggguuucacacaguauccagacagguaaucagugucaggacgagagcauuuccaacacuaaauuccuuacggaaaaggccguggcuucuguaacccuggcaggcaauucgucauugugcccuaucagcgggugggccguguacaguaaagauaacuccauuagaaucggaucuaggggcgacgucuuugugauacgggagccauucauuagcuguucccauuuagaaugccgcacauuuuuccugacucaaggugcgcuacucaaugauaagcacucaaacgggaccguuaaagaccgaaguccgcaucguacacugaugagcugucccgugggagaggcuccuucuccauauaauuccagauuugaaucagucgccuggagcgcaagugccugccacgauggcaccucuuggcuuacuaucggcauuuccgggcccgacaacggagcuguggcaguacugaaguacaaugguaucaucacagauaccauuaagagcuggaggaacaauauaaugcggacgcaggagucggagugugccugcguuaacggcucuuguuucacugugaugaccgacgggccuuccucaggacaggcuaguuauaaaaucuuuaagauggaaaaaggcaaggucgugaaaagcguggaguuggaugccccaaauuaccauuaugaagagugcuccuguuaccccgacgcgggugagauuacaugcgucugccgcgauaacuggcacgggucuaacagaccuuggguuagcuucaaucagaaccucgaauaucaaaucggauacauauguucaggcguguuuggcgacaauccaaggccgaacgaugggacuggaaguugcggucccguauucccuaauggcgcauacggggugaagggauuuuccuucaaguauggcaacggugucuggauugggcggaccaaaagcacaaauucucgcucaggcuuugagaugaucugggacccaaacggauggaccggcacggacaguagcuucuccgugaagcaggauaucguugccauuacugacuggucuggguacucggguagcuucgugcagcaccccgaacugacaggacuggauuguauccgaccuugcuuuugggucgagcucauuagaggcaggccaaaagaauccaccauauggacuucagggaguucuaucagcuucuguggagugaauggcgacacaguauccuggucauggcccgauggugcugaguuaccguuuaccauugacaaguga

SEQ ID NO: 146714 - RNA, 1350 nt, Artificial Sequence
  derived and/or modified CDS sequence (opt3) from neuraminidase__InfluenzaA__ADG21423
augaaccccaaucagaagaucauuaccauaggcagcaucugcauggugauugggaucgucucccugaugcuccaaauuggaaacaugaucucuauauggguuucacacaguauccagacagguaaucagugucaggacgagccuauuagcaacacuaaauuccuuacggaaaaggccguggcuuccguaacccuggcaggcaauucuucguugugcccaaucucagggugggccguguacagcaaagauaacaguauuagaaucggauccaggggcgacgucuuugugauacgggagccguucauuucuuguagccauuuagaaugccgcacauuuuuccugacucaaggugcgcuacucaaugauaagcacuccaacgggaccguuaaagaccgaucaccccaucguacacugaugaguuguccugugggagaggcuccaagccccuauaauucuagauuugaauccgucgccuggucagcaagcgccugccacgauggcaccaguuggcuuacuaucggcauuucugggccugacaacggagcuguggcaguacugaaguacaaugguaucaucacagauaccauuaaguccuggaggaacaauauaaugcggacgcaggagagcgagugugccugcguuaacggcucguguuucacugugaugaccgacgggccaucuuccggacaggcuucauauaaaaucuuuaagauggaaaaaggcaaggucgugaaaaguguggaguuggaugcccccaauuaccauuaugaagagugcagcuguuacccugacgcgggugagauuacaugcgucugccgcgauuccuggcacgggucuaacagaccauggguuagcuucaaccagaaucucgaauaucaaaucggauacauauguucaggcguguuuggcgacaacccgaggcccaaugaugggacuggaaguugcgguccuguauucccaaacggcgcauacggggugaagggauuuuccuucaaguauggcaauggugucuggauugggcggaccaaaagcacaaacucucgcucaggcuuugagaugaucugggaccccaauggauggaccggcacggacaguagcuucuccgugaagcaggauaucguugccauuacugacuggucuggguacucggguagcuucgugcagcacccugaacugacaggacuggauuguauccgaccaugcuuuugggucgagcucauuagaggcaggcccaaagaauccaccauauggacuucagggaguucuaucagcuucuguggagugaacggcgacacaguauccuggucauggccggauggugcugaguuaccuuuuaccauugacaaguga

SEQ ID NO: 146715 - RNA, 1350 nt, Artificial Sequence
  derived and/or modified CDS sequence (opt3) from neuraminidase__InfluenzaA__ADG21424
augaaccccaaucagaagaucauuaccauaggcagcaucugcauggugauugggaucgccucccugaugcuccaaauuggaaacaugaucucuauaugggucucacacaguauccagacagguaaucagugucaggacgagagcauuuccaacacuaaauuccuuacggaaaaggcuguugcaucugugacccuggccggcaauucgucauugugcccuaucagcgggugggcgguauacaguaaagauaacuccauuagaaucggaucuaagggcgacguguuugucauaagggagccauucauuagcuguucccauuuagaaugccggacauuuuuccugacucaaggugcucuacucaaugauaaacacucaaacgggaccgugaaggaccgcaguccgcaucgaacacugaugagcugucccguuggagaggccccuucuccauauaauucccguuuugaaucaguggcauggagcgccagugcuugccacgauggcaccucuuggcuuacuaucggcauuuccgggcccgacaacggagcagucgccgugcugaaguacaaugguaucaucacagauaccauuaaaagcuggagaaacaauauaaugaggacgcaggagucggagugugcuugcguaaacggcucuuguuucacuguuaugaccgacgggccuuccucaggacaggccaguuauaagaucuuuaaaauggaaaagggcaaaguggucaagagcguggaguuggaugcgccaaauuaccauuaugaagagugcuccuguuaccccgacgcaggagagauuacaugcgugugccgggauaacuggcacgggucuaaccgcccuugggucagcuucaaucagaaccucgaauaucaaaucggauacauauguucaggcguuuuuggcgacaauccaagaccgaacgaugggacuggaaguugcggucccguguucccuaauggcgccuacgggguaaagggauuuuccuucaaauauggcaacgguguguggauugggaggaccaagagcacaaauucucggucaggcuuugagaugaucugggacccaaacggauggaccggcacggacaguagcuucuccgucaaacaggauaucguggcuauuacugacuggucuggguacucggguagcuucguucagcaccccgaacugacaggucuggauuguauccgcccuugcuuuuggguggagcucauucgaggcagaccaaaggaauccaccauauggacuucagggaguucuaucagcuucuguggagucaauggcgacacaguguccuggucauggcccgauggugccgaguuaccguuuaccauugacaaauga

SEQ ID NO: 146716 - RNA, 1350 nt, Artificial Sequence
  derived and/or modified CDS sequence (opt3) from neuraminidase__InfluenzaA__ADG21426
augaaccccaaucagaagaucauuaccauaggcagcaucugcauggugauugggaucgucucccugaugcuccaaauuggaaacaugaucucuauauggguuucacacaguauccagacagagaaucagugucaggacgaaccuauuagcaacacuaaauuccuuacggagaaggccguggcuuccguaacccuggcagguaauucuucguugugcccaaucucaggcugggccguguacagcaaagauaacaguauuagaaucggguccaggggagacgucuuugugauacgggaaccguucauuucuuguagccauuuagagugccgcacauuuuuccugacucaaggcgcgcuacucaaugauaagcacuccaacgguaccguuaaagaccgaucaccccaucguacacugaugaguuguccugugggggaagcuccaagccccuauaauucuagauuugaguccgucgccuggucagcaagcgccugccacgauggaaccaguuggcuuacuaucggcauuucuggcccugacaacggggcuguggcaguacugaaguacaauggaaucaucacagauaccauuaaguccuggaggaacaauauaaugcggacgcaggagagcgaaugugccugcguuaacgguucguguuucacugugaugaccgacggcccaucuuccgggcaggcuucauauaaaaucuuuaagauggagaaaggaaaggucgugaaaaguguggaauuggaugcccccaauuaccauuaugaggagugcagcuguuacccugacgcgggcgaaauuacaugcgucugccgcgauaacuggcacgguuccaacagaccauggguuucuuucaaucagaaccucgaguaucaaaucggguacauauguagcggaguguuuggcgacaauccgaggcccaacgauggcacugggucaugcggaccuguauucccaaauggugcauacggcgugaagggguuuaguuucaaguauggaaacggcgucuggauuggucggaccaaauccacaaauagccgcucuggguuugaaaugaucugggaccccaacggcuggaccggaacggacucaaguuucagcgugcgacaggauaucguugccauuacugacugguccggcuacucugggucguucgugcagcacccugagcugacaggacuggauuguaucagaccaugcuuuugggucgaacucauuaggggucggcccaaggagagcaccauauggacuuccggcucaaguaucucuuucuguggggugaauggagacacaguaagcugguccuggccggauggcgcugaguuaccuuuuaccauugacaaauga

SEQ ID NO: 146717 - RNA, 1350 nt, Artificial Sequence
  derived and/or modified CDS sequence (opt3) from neuraminidase__InfluenzaA__ADG21428
augaaccccaaucagaagaucauuaccauaggcagcaucugcauggugauugggaucgucucccugaugcuccaaauuggaaacaugaucucuauauggguuucacacccuauccagacagguaaucagugucaggacaaaccaauuaguaacacuaaguuccuuacggagaaagccguggcuagcguaacccuggcaggcaauuccucuuugugcccgaucucggggugggccguguacucaaaggauaacagcauuagaaucggaaguaggggcgacgucuuugugauacgggaacccuucauuuccuguucucauuuagagugccgcacauuuuuccugacucaaggugcgcuacucaaugauaaacacagcaacgggaccguuaaggaccgauccccucaucguacacugaugucauguccagugggagaagcucccaguccuuauaauagcagauuugagucugucgccugguccgcaucagccugccacgauggcaccagcuggcuuacuaucggcauuagugggccagacaacggagcuguggcaguacugaaguacaaugguaucaucacagauaccauuaaaucuuggaggaacuccauaaugcggacgcaggaaagcgagugugccugcguuaauggcucguguuucacugugaugaccgacgggcccucuuccggacaggcuucauauaagaucuuuaaaauggagaagggcaaagucgugaagaguguggaauuggaugccccuaacuaccauuaugaggaaugcagcuguuacccagacgcgggugagauuacaugcgucugccgcgauaauuggcacggguccaacagaccguggguuucuuucaaccagaaucucgaguaucaaaucggauacauauguagcggcguguuuggcgacaaccccaggccuaaugaugggacuggaucaugcgguccaguauuccccaacggcgcauacggggugaagggauuuaguuucaaauauggcaauggugucuggauugggcggaccaaguccacaaacagccgcucuggcuuugaaaugaucugggacccuaauggauggaccggcacggacucaaguuucagcgugaaacaggauaucguugccauuacugacugguccggguacucuggaucguucgugcagcacccagagcugacaggucuggauuguauccgacccugcuuuugggucgaacucauuagaggcaggccgaaggagagcaccauauggacuuccgggucaaguaucucuuucuguggagugaacggcgacacaguaagcugguccuggccugauggugcugaauuacccuuuaccauugacaaauga

SEQ ID NO: 146718 - RNA, 1350 nt, Artificial Sequence; identical to SEQ ID NO: 145071
  derived and/or modified CDS sequence (opt3) from neuraminidase__InfluenzaA__ADG21430

SEQ ID NO: 146719 - RNA, 1350 nt, Artificial Sequence
  derived and/or modified CDS sequence (opt3) from neuraminidase__InfluenzaA__ADG21432
augaaccccaaucagaagaucauuaccauaggcagcaucugcauggugauugggaucgucucccugaugcuccaaauuggaaacaugaucucuauauggguuucacacaguauccagacagguaaucagugucaggacgagccuauuagcaacacuaaauuccuuacggaaaaggccguggcuuccguaacccuggcaggcaauucuucguugugcccaaucucagggugggccguguacagcaaagauaacaguauuagaaucggauccaggggcgacgucuuugugauacgggagccguucauuucuuguagccauuuagaaugccgcacauuuuuccugacucaaggugcgcuacucaaugauaagcacuccaacgggaccguuaaagaccgaucaccccaucguacacugaugaguuguccugugggagaggcuccaagccccuauaauucuagauuugaauccgucgccuggucagcaagcgccugccacgauggcaccaguuggcuuacuaucggcauuucugggccugacaacggagcuguggcaguacugaaguacaaugguaucaucacagauaccauuaaguccuggaggaacaauauaaugcggacgcaggagagcgagugugccugcguuaacggcucguguuucacugugaugaccgacgggccaucuuccggacaggcuucauauaaaaucuuuaagauggaaaaaggcaaggucgugaaaaguguggaguuggaugcccccaauuaccauuaugaagagugcagcuguuacccugacgcgggugagauuacaugcgucugccgcgauaacuggcacggguccaacagaccauggguuucuuucaaucagaaccucgaauaucaaaucggauacauauguagcggcguguuuggcgacaauccgaggcccaacgaugggacuggaucaugcgguccuguauucccaaauggcgcauacggggugaagggauuuaguuuccgguauggcaacggugucuggauugggcgcaccaaguccacaaauagccgaucuggcuuugagaugaucugggaccccaacggauggaccggcacggacucaaguuucagcgugaaacaggauaucguugccauuacugacugguccggguacucuggaucguucgugcagcacccugaacugacaggucuggauuguaucagaccaugcuuuugggucgagcucauuaggggccggcccaaggaaagcaccauauggacuuccgggucaaguaucucuuucuguggagugaauggcgacacaguaagcugguccuggccggauggugcugaguuaccuuuuaccauugacaaauga

SEQ ID NO: 146720 - RNA, 1350 nt, Artificial Sequence
  derived and/or modified CDS sequence (opt3) from neuraminidase__InfluenzaA__ADG21438
augaaccccaaucagaagaucauuaccauaggcagcaucugcauggugauugggaucgucucccugaugcuccaaauuggaaacaugaucucuauauggaucucacacaguauucagacagguaaucagugucaggacgagccuaucagcaacacuaaauuccuuacggaaaaggccguugcuuccgugacccuggcaggcaauucuucguugugcccaauuucagggugggccguauacagcaaagauaacaguaucagaauaggauccaggggcgacguguuugucauucgggagccguucaucucuuguagccauuuagaaugccgcacauuuuuccugacucaaggugcgcuacucaaugauaagcacuccaacgggaccgugaaagaccgaucaccccaucguacacugaugaguuguccuguuggagaggcuccaagccccuauaauucuagauuugaauccguggccuggucagcaagcgccugccacgauggcaccaguuggcuuacuauuggcaucucugggccugacaacggagcugucgcagugcugaaguacaaugguaucauuacagauaccauaaaguccuggaggaacaauaucaugcggacgcaggagagcgagugugccugcguaaacggcucguguuucacuguuaugaccgacgggccaucuuccggacaggcuucauauaaaauuuuuaagauggaaaaaggcaagguggucaaaaguguggaguuggaugcccccaauuaccauuaugaagagugcagcuguuacccugacgcgggugagaucacaugcgugugccgcgauaacuggcacggguccaacagaccaugggucucuuucaaucagaaccucgaauaucaaauaggauacauuuguagcggcguuuuuggcgacaauccgaggcccaacgaugggacuggaucaugcgguccuguguucccaaauggcgcauacgggguaaagggauuuaguuucaaguauggcuccgguguguggaucgggcggaccaaaagcacaaacucucgcucaggcuuugagaugaucugggaccccaauggauggaccggcacggacaguagcuucuccgucaagcaggauauuguggccaucacugacuggucuggguacucggguagcuucguucagcacccugaacugacaggacuggauuguauucgaccaugcuuuuggguggagcucauaagaggcaggcccaaagaauccaccaucuggacuucagggaguucuauuagcuucuguggagucaacggcgacacaguguccuggucauggccggauggugcugaguuaccuuuuaccaucgacaaguga

SEQ ID NO: 146721 - RNA, 1350 nt, Artificial Sequence
  derived and/or modified CDS sequence (opt3) from neuraminidase__InfluenzaA__ADG21440
augaaccccaaucagaagaucauuaccauaggcagcaucugcauggugauugggaucgccucccugaugcuccaaauuggaaacaugaucucuauaugggucucacacaguauccagacagguaaucagugucaggacgagagcauuuccaacacuaaauuccuuacggaaaaggcuguugcaucugugacccuggccggcaauucgucauugugcccuaucagcgggugggcgguauacaguaaagauaacuccauuagaaucggaucuaggggcgacguguuugucauacgggagccauucauuagcuguucccauuuagaaugccgcacauuuuuccugacucaaggugcucuacucaaugauaagcacucaaacgggaccgugaaagaccgaaguccgcaucguacacugaugagcugucccguuggagaggccccuucuccauauaauuccagauuugaaucaguggcauggagcgccagugcuugccacgauggcaccucuuggcuuacuaucggcauuuccgggcccgacaacggagcagucgccgugcugaaguacaaugguaucaucacagauaccauuaagagcuggaggaacaauauaaugcggacgcaggagucggagugugcuugcguaaacggcucuuguuucacuguuaugaccgacgggccuuccucaggacaggccaguuauaaaaucuuuaagauggaaaaaggcaagguggucaaaagcguggaguuggaugcgccaaauuaccauuaugaagagugcuccuguuaccccgacgcaggagagauuacaugcgugugccgcgauaacuggcacgggucuaacagaccuugggucagcuucaaucagaaccucgaauaucaaaucggauacauauguucaggcguuuuuggcgacaauccaaggccgaacgaugggacuggaaguugcggucccguguucccuaauggcgccuacgggguaaagggauuuuccuucaaguauggcaacgguguguggauugggcggaccaaaagcacaaauucucgcucaggcuuugagaugaucugggacccaaacggauggaccggcacggacaguagcuucuccgucaagcaggauaucguggcuauuacugacuggucuggguacucggguagcuucguucagcaccccgaacugacaggucuggauuguauccgaccuugcuuuuggguggagcucauuagaggcaggccaaaagaauccaccauauggacuucagggaguucuaucagcuucuguggagucaauggcgacacaguguccuggucauggcccgauggugccgaguuaccguuuaccauugacaaguga

SEQ ID NO: 146722 - RNA, 1350 nt, Artificial Sequence; identical to SEQ ID NO: 145071
  derived and/or modified CDS sequence (opt3) from neuraminidase__InfluenzaA__ADG21442

SEQ ID NO: 146723 - RNA, 1350 nt, Artificial Sequence
  derived and/or modified CDS sequence (opt3) from neuraminidase__InfluenzaA__ADG21444
augaaccccaaucagaagaucauuaccauaggcagcaucugcauggugauugggaucgucucccugaugcuccaaauuggaaacaugaucucuauauggguuucacacaguauccagacagguaaucagugucaggacgagagcauuuccaacacuaaauuccuuacggaaaaggccgugaccucuguaacacuggcuggcaauucgucauugugcccuaucagcgggugggcaguguacaguaaagauaacuccauuagaaucggaucuaggggcgacgucuuugugauacgggagccauucauuagcuguucccauuuagaaugccgcaccuuuuuccugacucaaggugcccuacucaaugauaagcacucaaacgggacaguuaaagaccgaaguccgcaucguacccugaugagcugucccgugggagaggcgccuucuccauauaauuccagauuugaaucagucgcuuggagcgccagugcaugccacgauggcacuucuuggcuuacaaucggcauuuccgggcccgacaacggagccguggcuguacugaaguacaaugguaucaucaccgauacgauuaagagcuggaggaacaauauaaugcggacucaggagucggagugugcaugcguuaacggcucuuguuucaccgugaugacagacgggccuuccucaggacaggccaguuauaaaaucuuuaagauggaaaaaggcaaggucgugaaaagcguggaguuggaugcuccaaauuaccauuaugaagagugcuccuguuaccccgacgccggugagauuacuugcgucugccgcgauaacuggcacgggucuaacagaccuuggaucagcuucaaucagaaccucgaauaucaaauaggauacauuuguucaggcguuuuuggcgacaauccaaggccgaacgaugggaccggaaguugcggucccguguucccuaauggcgcguacgggguaaagggauuuuccuucaaguauggcaacgguguguggaucgggcggacaaaaagcaccaauucucgcucaggcuuugagaugaucugggacccaaacggauggacgggcacugacaguagcuucuccgucaagcaggauauuguggcaaucacagacuggucuggguacucggguagcuucguucagcaccccgaacugaccggacuggauuguauucgaccuugcuuuuggguggagcucauaagaggcaggccaaaagaauccacuaucuggacaucagggaguucuauuagcuucuguggagucaauggcgacaccguguccuggucauggcccgauggugccgaguuaccguuuacgaucgacaaguga

SEQ ID NO: 146724 - RNA, 1350 nt, Artificial Sequence; identical to SEQ ID NO: 145071
  derived and/or modified CDS sequence (opt3) from neuraminidase__InfluenzaA__ADG21446

SEQ ID NO: 146725 - RNA, 1350 nt, Artificial Sequence
  derived and/or modified CDS sequence (opt3) from neuraminidase__InfluenzaA__ADG21448
augaaccccaaucagaagaucauuaccauaggcagcaucugcauggugauugggaucgucucccugaugcuccaaauuggaaacaugaucucuauauggguuucacacaguauccagacagguaaucagugucaggacgagccuauuagcaacacuaaauuccuuacggaaaaggccguggcuuccguaacccuggcaggcaauucuucguugugcccaaucucagggugggccguguacagcaaagauaacaguauuagaaucggauccaggggcgacgucuuugugauacgggagccguucauuucuuguagccauuuagaaugccgcacauuuuuccugacucaaggugcgcuacucaaugauaagcacuccaacgggaccguuaaagaccgaucaccccaucguacacugaugaguuguccugugggagaggcuccaagccccuauaauucuagauuugaauccgucgccuggucagcaagcgccugccacgauggcaccaguuggcuuacuaucggcauuucugggccugacaacggagcuguggcaguacugaaguacaaugguaucaucacagauaccauuaaguccuggaggaacaauauaaugcggacgcaggagagcgagugugccugcguuaacggcucguguuucacugugaugaccgacgggccaucuuccggacaggcuucauauaaaaucuuuaagauggaaaaaggcaaggucgugaaaaguguggaguuggaugcccccaauuaccauuaugaagagugcagcuguuacccugacgcgggugagauuacaugcgucugccgcgauaacuggcacggguccaacagaccauggaucucuuucaaucagaaccucgaauaucaaauaggauacauuuguagcggcguuuuuggcgacaauccgaggcccaacgaugggacuggaucaugcgguccuguguucccaaauggcgcauacgggguaaagggauuuaguuucaaguauggcaacgguguguggaucgggcggaccaaauccacaaauagccgcucuggcuuugagaugaucugggaccccaacggauggaccggcacggacucaaguuucagcgucaagcaggauauuguggccaucacugacugguccggguacucuggaucguucguucagcacccugaacugacaggucuggauuguauucgaccaugcuuuuggguggagcucauaagaggcaggcccaaagaaagcaccaucuggacuuccgggucaaguauuucuuucuguggagucaauggcgacacagugagcugguccuggccggauggugcugaguuaccuuuuaccaucgacaaguga

SEQ ID NO: 146726 - RNA, 1350 nt, Artificial Sequence; identical to SEQ ID NO: 146725
  derived and/or modified CDS sequence (opt3) from neuraminidase__InfluenzaA__ADG21450

SEQ ID NO: 146727 - RNA, 1410 nt, Artificial Sequence; identical to SEQ ID NO: 144786
  derived and/or modified CDS sequence (opt3) from neuraminidase__InfluenzaA__ADG27797

SEQ ID NO: 146728 - RNA, 1410 nt, Artificial Sequence
  derived and/or modified CDS sequence (opt3) from neuraminidase__InfluenzaA__ADG27983
augaaccccaaucagaagaucauuaccauaggcagcgugugcaugacaaucgggauggccaaccugauucuccaaaucggaaauauuaucuccauauggaucucucacucaauucagcuugguaaccagaaucagaucgagacuuguaaccaaagugucauuacguacgaaaauaacaccuggguuaaucagacauaugugaacaucagcaauacuaacuucgcugcaggccaguccguagugucugucaaacuggccggaaauucgucauugugcccugugagcggaugggcgauauacaguaaggacaacuccauuagaaucggcucuaaaggugauguuuuugugauuagggagccauucaucagcuguuccccguuagaaugccggaccuuuuuccugacacagggggcucuacucaaugacaagcauucaaacggaaccaucaaagaucgcagucccuaucgaacucugaugagcuguccuauuggcgaggucccaucucccuacaacucccguuuugaaucaguggccuggagcgcaagugccugccacgacggcauaaauuggcuuacaaucgggauuucuggaccugauaacggugcuguagcaguucugaaguauaauggcaucauaaccgacacgauuaaguccuggagaaacaauaucuugaggacucaagagagcgagugugccugcgugaacgggucguguuucaccgucaugacagauggaccaucugacggccaggcuuccuacaaaaucuuucggauugaaaaggguaaaaucgugaagucaguggagaugaaugcccccaaccaucacuaugaagagugcaguuguuacccugauagcuccgagauuacuugcgucugccgcgacaauuggcaugggucuaacagaccauggguuagcuucaaucagaaccucgaauaccagauaggauauaucuguucaggcauuuuuggcgauaauccgaggcccaacgacaaaaccgggaguugcggaccuguguccagcaauggugcgaacggcguaaagggguucucuuuuaaguacggaaacggcguguggaucggucggacaaaaucaaucaguagccgcaauggguucgagaugauuugggauccaaacggcuggaccggaacggacaauaacuuuuccauaaagcaagacaucgucggcauuaaugaauggucuggguauucggggagcuucgugcagcaccccgagcugacuggucuggauuguauccgaccuugcuucuggguugaacucauuagaggcaggccaaaagagaacacaaucuggaccuccgggucaaguauaucuuuuuguggagugaauagcgacacuaugggcugguccuggcccgauggugcagaguuaccguucacaaucgacaaguga

SEQ ID NO: 146729 - RNA, 1410 nt, Artificial Sequence; identical to SEQ ID NO: 144786
  derived and/or modified CDS sequence (opt3) from neuraminidase__InfluenzaA__ADG27989

SEQ ID NO: 146730 - RNA, 1410 nt, Artificial Sequence; identical to SEQ ID NO: 146728
  derived and/or modified CDS sequence (opt3) from neuraminidase__InfluenzaA__ADG27998

SEQ ID NO: 146731 - RNA, 1410 nt, Artificial Sequence; identical to SEQ ID NO: 145140
  derived and/or modified CDS sequence (opt3) from neuraminidase__InfluenzaA__ADG28013

SEQ ID NO: 146732 - RNA, 1410 nt, Artificial Sequence; identical to SEQ ID NO: 144786
  derived and/or modified CDS sequence (opt3) from neuraminidase__InfluenzaA__ADG42086

SEQ ID NO: 146733 - RNA, 1410 nt, Artificial Sequence; identical to SEQ ID NO: 144786
  derived and/or modified CDS sequence (opt3) from neuraminidase__InfluenzaA__ADG42096

SEQ ID NO: 146734 - RNA, 1410 nt, Artificial Sequence; identical to SEQ ID NO: 146363
  derived and/or modified CDS sequence (opt3) from neuraminidase__InfluenzaA__ADG42106

SEQ ID NO: 146735 - RNA, 1410 nt, Artificial Sequence; identical to SEQ ID NO: 144786
  derived and/or modified CDS sequence (opt3) from neuraminidase__InfluenzaA__ADG42116

SEQ ID NO: 146736 - RNA, 1410 nt, Artificial Sequence; identical to SEQ ID NO: 144786
  derived and/or modified CDS sequence (opt3) from neuraminidase__InfluenzaA__ADG42126

SEQ ID NO: 146737 - RNA, 1410 nt, Artificial Sequence; identical to SEQ ID NO: 144786
  derived and/or modified CDS sequence (opt3) from neuraminidase__InfluenzaA__ADG42136

SEQ ID NO: 146738 - RNA, 1410 nt, Artificial Sequence; identical to SEQ ID NO: 145369
  derived and/or modified CDS sequence (opt3) from neuraminidase__InfluenzaA__ADG42146

SEQ ID NO: 146739 - RNA, 1410 nt, Artificial Sequence; identical to SEQ ID NO: 144786
  derived and/or modified CDS sequence (opt3) from neuraminidase__InfluenzaA__ADG42156

SEQ ID NO: 146740 - RNA, 1410 nt, Artificial Sequence; identical to SEQ ID NO: 144786
  derived and/or modified CDS sequence (opt3) from neuraminidase__InfluenzaA__ADG42166

SEQ ID NO: 146741 - RNA, 1410 nt, Artificial Sequence; identical to SEQ ID NO: 144786
  derived and/or modified CDS sequence (opt3) from neuraminidase__InfluenzaA__ADG42186

SEQ ID NO: 146742 - RNA, 1410 nt, Artificial Sequence; identical to SEQ ID NO: 146677
  derived and/or modified CDS sequence (opt3) from neuraminidase__InfluenzaA__ADG42196

SEQ ID NO: 146743 - RNA, 1410 nt, Artificial Sequence
  derived and/or modified CDS sequence (opt3) from neuraminidase__InfluenzaA__ADG42206
augaaccccaaucagaagaucauuaccauaggcagcgugugcaugacaaucgggauggccaaccugauucuccaaaucggaaauauuaucuccauauggaucucucacucaauucagcuugguaaccagaaucagaucgagacuuguaaccaaagugucauuacguacgaaaauaacaccuggguuaaucagacauaugugaacaucagcaauacuaacuucgcugcaggccaguccguagugucugucaaacuggccggaaauucgucauugugcccugugagcggaugggcgauauacaguaaggacaacuccauuagaaucggcucuaaaggugauguuuuugugauuagggagccauucaucagcuguuccccguuagaaugccggaccuuuuuccugacacagggggcucuacucaaugacaagcauucaaacggaaccaucaaagaucgcagucccuaucgaacucugaugagcuguccuauuggcgaggucccaucucccuacaacucccguuuugaaucaguggccuggagcgcaagugccugccacgacggcauaaauuggcuuacaaucgggauuucuggaccugauaacggugcuguagcaguucugaaguauaauggcaucauaaccgacacgauuaaguccuggagaaacaauaucuugaggacucaagagagcgagugugccugcgugaacgggucguguuucaccgucaugacagauggaccaucugacggccaggcuuccuacaaaaucuuucggauugaaaaggguaaaaucgugaagucaguggagaugaaugcccccaacuaucauuacgaagagugcaguuguuacccugauagcuccaaaauuacuugcgucugccgcgacaauuggcacgggucuaacagaccauggguuagcuucaaucagaaccucgaguaucagauaggauacaucuguucaggcauuuuuggcgauaauccgaggcccaacgacaagaccgggaguugcggaccuguguccagcaauggugcgaacggcguaaagggguucucuuuuaaauauggaaacggcguguggaucggucggacaaagucaaucaguagccgcaauggguucgaaaugauuugggauccaaacggcuggaccggaacggacaauaacuuuuccauaaaacaagacaucgucggcauuaaugaguggucuggguacucggggagcuucgugcagcaucccgaacugacuggucuggauuguauccgaccuugcuucuggguugagcucauuagaggcaggccaaaggaaaacacaaucuggaccuccgggucaaguauaucuuuuuguggagugaauagcgacacugucggcugguccuggcccgauggugcagaguuaccguucacaaucgacaaauga

SEQ ID NO: 146744 - RNA, 1410 nt, Artificial Sequence; identical to SEQ ID NO: 144786
  derived and/or modified CDS sequence (opt3) from neuraminidase__InfluenzaA__ADG42216

SEQ ID NO: 146745 - RNA, 1410 nt, Artificial Sequence; identical to SEQ ID NO: 146137
  derived and/or modified CDS sequence (opt3) from neuraminidase__InfluenzaA__ADG42226

SEQ ID NO: 146746 - RNA, 1410 nt, Artificial Sequence; identical to SEQ ID NO: 144786
  derived and/or modified CDS sequence (opt3) from neuraminidase__InfluenzaA__ADG42236

SEQ ID NO: 146747 - RNA, 1410 nt, Artificial Sequence; identical to SEQ ID NO: 144786
  derived and/or modified CDS sequence (opt3) from neuraminidase__InfluenzaA__ADG42246

SEQ ID NO: 146748 - RNA, 1410 nt, Artificial Sequence; identical to SEQ ID NO: 144786
  derived and/or modified CDS sequence (opt3) from neuraminidase__InfluenzaA__ADG42256

SEQ ID NO: 146749 - RNA, 1410 nt, Artificial Sequence; identical to SEQ ID NO: 144786
  derived and/or modified CDS sequence (opt3) from neuraminidase__InfluenzaA__ADG42276

SEQ ID NO: 146750 - RNA, 1410 nt, Artificial Sequence
  derived and/or modified CDS sequence (opt3) from neuraminidase__InfluenzaA__ADG42296
augaaccccaaucagaagaucauuaccauaggcagcgugugcaugacaaucgggauggccaaccugauucuccaaaucggaaauauuaucuccauauggaucucucacucaauucagcuugguaaccagaaucagaucgagacuuguaaccaaagugucauuacguacgaaaauaacaccuggguuaaucagacauaugugaacaucagcaauacuaacuucgcugcaggccaguccguagugucugucaaacuggccggaaauucgucauugugcccugugagcggaugggcgauauacaguaaggacaacuccauuagaaucggcucuaaaggugauguuuuugugauuagggagccauucaucagcuguuccccguuagaaugccggaccuuuuuccugacacagggggcucuacucaaugacaagcauucaaacggaaccaucaaagaucgcagucccuaucgaacucugaugagcuguccuauuggcgaggucccaucucccuacaacucccguuuugaaucaguggccuggagcgcaagugccugccacgacggcauaaauuggcuuacaaucgggauuucuggaccugauaacggugcuguagcaguucugaaguauaauggcaucauaaccgacacgauuaaguccuggagaaacaauaucuugagggcccaagagagcgagugugcuugcgugaacgggucguguuucacugucaugaccgauggaccaucugacggccaggccuccuacaaaaucuuucggauugaaaaggguaaaaucgugaagucaguggagaugaaugcgcccaacuaucauuacgaagagugcaguuguuacccugauagcuccgagauuacaugcgucugccgcgacaauuggcacgggucuaacagaccauggguuagcuucaaucagaaccucgaauaucagauaggauacaucuguucaggcauuuuuggcgauaauccgaggcccaacgacaaaacugggaguugcggaccuguguccagcaauggugcaaacggcguaaagggguucucuuuuaaguauggaaacggcguguggaucggucggaccaaaucaaucaguagccgcaauggguucgagaugauuugggauccaaacggcuggacaggaaccgacaauaacuuuuccauaaagcaagacaucgucggcauuaaugaauggucuggguacucggggagcuucgugcagcaucccgagcugacgggucuggauuguauccgaccuugcuucuggguugaacucauuagaggcaggccaaaagagaacacuaucuggacauccgggucaaguauaucuuuuuguggagugaauagcgacaccgucggcugguccuggcccgauggugccgaguuaccguucacuaucgacaaguga

SEQ ID NO: 146751 - RNA, 1410 nt, Artificial Sequence; identical to SEQ ID NO: 144786
  derived and/or modified CDS sequence (opt3) from neuraminidase__InfluenzaA__ADG42306

SEQ ID NO: 146752 - RNA, 1410 nt, Artificial Sequence; identical to SEQ ID NO: 144786
  derived and/or modified CDS sequence (opt3) from neuraminidase__InfluenzaA__ADG42316

SEQ ID NO: 146753 - RNA, 1410 nt, Artificial Sequence; identical to SEQ ID NO: 144786
  derived and/or modified CDS sequence (opt3) from neuraminidase__InfluenzaA__ADG42326

SEQ ID NO: 146754 - RNA, 1410 nt, Artificial Sequence
  derived and/or modified CDS sequence (opt3) from neuraminidase__InfluenzaA__ADG42336
augaaccccaaucagaagaucauuaccauaggcagcgugugcaugacaaucgggauggccaaccugauucuccaaaucggaaauauuaucuccauauggaucucucacucaauucagcuugguaaccagaaucagaucgagacuuguaaccaaagugucauuacguacgaaaauaacaccuggguuaaucagacauaugugaacaucagcaauacuaacuucgcugcaggccaguccguagugucuaugaaacuggccggaaauucgucauugugcccugucagcggaugggcgauauacaguaaggacaacuccauuagaaucggcucuaaaggugauguguuuguuauuagggagccauucaucagcuguuccccguuagaaugccggaccuuuuuccugacacagggggcucuacucaaugacaagcauucaaacggaaccaucaaagaucgcagucccuaucgaacucugaugagcuguccuauuggcgaggugccaucucccuacaacucccguuuugaaucagucgccuggagcgcaagugccugccacgacggcauaaauuggcuuacaaucgggauuucuggaccugauaacggugcuguggcaguacugaaguauaauggcaucauaaccgacacgauuaaguccuggagaaacaauaucuugaggacucaagagagcgagugugccugcguuaacgggucguguuucaccgugaugacagauggaccaucugacggccaggcuuccuacaaaaucuuucggauugaaaaggguaaaaucgucaagucaguggagaugaaugcccccaacuaucauuacgaagagugcaguuguuacccugauagcuccgagauuacuugcgugugccgcgacaauuggcacgggucuaacagaccaugggucagcuucaaucagaaccucgaauaucagauaggauacaucuguucaggcauuuuuggcgauaauccgaggcccaacgacaaaaccgggaguugcggaccuguuuccagcaauggugcgaacggcgugaagggguucucuuuuaaguauggaaacggcguauggaucggucggacaaaaucaaucaguagccgcaauggguucgagaugauuugggauccaaacggcuggaccggaacggacaauaaguuuuccauaaaacaagacaucgugggcauuaacgaauggucuggguacucggggagcuucguccagcaucccgagcugacuggucuggauuguauccgaccuugcuucuggguggaacucauuagaggcaggccaaaggagaauacaaucuggaccuccgggucaaguauaucuuuuuguggaguuaacagcgacacugugggcugguccuggcccgauggugcagaguuaccguucacaaucgacaaauga

SEQ ID NO: 146755 - RNA, 1410 nt, Artificial Sequence; identical to SEQ ID NO: 146248
  derived and/or modified CDS sequence (opt3) from neuraminidase__InfluenzaA__ADG42346

SEQ ID NO: 146756 - RNA, 1410 nt, Artificial Sequence; identical to SEQ ID NO: 145963
  derived and/or modified CDS sequence (opt3) from neuraminidase__InfluenzaA__ADG42356

SEQ ID NO: 146757 - RNA, 1410 nt, Artificial Sequence
  derived and/or modified CDS sequence (opt3) from neuraminidase__InfluenzaA__ADG42366
augaaccccaaucagaagaucauuaccauaggcagcgugugcaugacaaucgggauggccaaccugauucuccaaaucggaaauauuaucuccauauggaucucucacucaauucagcuugguaaccagaaucagaucgagacuuguaaccaaagugucauuacguacgaaaauaacaccuggguuaaucagacauaugugaacaucagcaauacuaacuucgcugcaggccaguccguagugucugucaaacuggccggaaauucgucauugugcccugugagcggaugggcgauauacaguaaggacaacuccauuagaaucggcucuaaaggugauguuuuugugauuagggagccauucaucagcuguuccccguuagaaugccggaccuuuuuccugacacagggggcucuacucaaugacaagcauucaaacggaaccaucaaagaucgcagucccuaucgaacucugaugagcuguccuauuggcgaggucccaucucccuacaacucccguuuugaaucaguggccuggagcgcaagugccugccacgacggcauaaauuggcuuacaaucgggauuucuggaccugauaacggugcuguagcaguucugaaguauaauggcaucauaaccgacacgauuaaguccuggagaaacaauaucuugaggacucaagagagcgagugugccugcgugaacgggucguguuucaccgucaugacagauggaccaucugacggccaggcuuccuacaaaaucuuucggauugaaaaggguaaaaucgugaagucaguggagaugaaugcccccaacuaucauuacgaagagugcaguuguuacccugauagcuccgagauuacuugcgucugccgcgacaauuggcacgggucuaacagaccauggaucagcuucaaucagaaccucgaauaucagauaggauacauuuguucaggcaucuuuggcgauaauccgaggcccaacgacaaaaccgggaguugcggaccuguuuccagcaauggugcgaacggcgugaagggguucucuuuuaaguauggaaacggcguauggaucggucggacaaaaucaauuaguagccgcaauggguucgagaugauaugggauccaaacggcuggaccggaacggacaauaaguuuuccaucaaacaagacauugugggcaucaacgaauggucuggguacucggggagcuucguccagcaucccgagcugacuggucuggauuguauucgaccuugcuucuggguggaacucaucagaggcaggccaaaggagaauacaauauggaccuccgggucaaguaucucuuuuuguggaguuaacagcgacacugugggcugguccuggcccgauggugcagaguuaccguucacaauugacaaauga

SEQ ID NO: 146758 - RNA, 1410 nt, Artificial Sequence; identical to SEQ ID NO: 144786
  derived and/or modified CDS sequence (opt3) from neuraminidase__InfluenzaA__ADG42376

SEQ ID NO: 146759 - RNA, 1410 nt, Artificial Sequence
  derived and/or modified CDS sequence (opt3) from neuraminidase__InfluenzaA__ADG42386
augaaccccaaucagaagaucauuaccauaggcagcgugugcaugacaaucgggauggccaaccugauucuccaaaucggaaauauuaucuccauauggaucucucacucaauucagcuugguaaccagaaucagaucgagacuuguaaccaaagugucauuacguacgaaaauaacaccuggguuaaucagacauaugugaacaucagcaauacuaacuucgcugcaggccaguccguagugucugucaaauuugccggaaauucgucacugugcccugugagcggaugggcgauauacaguaaggacaacuccauuagaaucggcucuaaaggugauguuuucgugauuagggagccauuuaucagcuguuccccguuggaaugccggaccuucuuuuuaacacagggggcucugcuaaaugacaagcauucaaacggaaccaucaaagaucgcagucccuaucgaacucucaugagcuguccuauuggcgaggucccaucucccuacaacucccguuucgaaucaguggccuggagcgcaagugccugccacgacggcauaaauuggcugacaaucgggauuucuggaccugauaacggugcuguagcaguucuuaaguauaauggcaucauaaccgacacgauuaaguccuggagaaacaauauccugaggacucaagagagcgagugugccugcgugaacgggucguguuuuaccgucaugacagauggaccaaaugacggccaggcuucuuacaaaaucuuccggauugaaaaggguaaaaucgugaaguccguggagaugaacgcccccaauuaucauuacgaagagugcucauguuacccugauaguagcgagauuacuugcgucugccgcgacaacuggcacggguccaauagaccauggguuucuuuuaaccagaauuuggaauaucagauaggauacaucuguagcggcauuuucggcgauaacccgaggcccaaugacaaaaccgggucaugcggaccugugaguuccaacggugcgaacggcguaaagggguuuagcuucaaguauggaaauggcguguggaucggucggacaaaaucuaucucaagucgcagcggguuugagaugauuugggauccaaacggcuggaccggaacggacaauaaguucuccauaaaacaagacaucgucggcauuaacgaauggucuggguacucggggagcuucgugcagcaucccgagcucacuggucuggauuguauccgaccuugcuuuuggguugaacugauuagaggcaggccaaaggagaauacaaucuggaccuccgggucaaguauaucuuucuguggagugaacagcgacacugucggcugguccuggcccgauggugcagagcucccguuuacaaucgacaaauga

SEQ ID NO: 146760 - RNA, 1410 nt, Artificial Sequence; identical to SEQ ID NO: 146743
  derived and/or modified CDS sequence (opt3) from neuraminidase__InfluenzaA__ADG42396

SEQ ID NO: 146761 - RNA, 1410 nt, Artificial Sequence
  derived and/or modified CDS sequence (opt3) from neuraminidase__InfluenzaA__ADG42406
augaaccccaaucagaagaucauuaccauaggcagcgugugcaugacaaucgggauggccaaccugauucuccaaaucggaaauauucuuuccacuuggaucucucacucaauacagcuggguaaccagaaucagaucgagacguguaaccaaagugucauuaccuacgaaaauaacacauggguuaaucagacuuaugugaacaucagcaauaccaacuucgcugcaggccaguccguagugucugucaaauuggccggaaauucgucauuaugcccugugagcggaugggcgauuuacaguaaggacaacuccaucagaauaggcucuaaaggugauguuuuugugauuagggagccauucaucagcuguuccccgcuggaaugccggacauuuuuccuaacccagggggcucuccugaaugacaagcauucaaacggaacuauuaaagaucgcagucccuaucgaacacuuaugagcuguccuaucggcgaggucccaucucccuacaacucccguuuugaaucaguggccuggagcgcaagugccugccacgacggcaucaauuggcugaccauugggauaucuggaccugauaacggugcuguagcaguuuugaaguauaauggcaucauuacggacacuaucaaguccuggagaaacaauauacucaggacccaagagagcgagugugccugcgugaacgggucguguuucacagucaugacugauggaccaucugacggccaggcuuccuacaaaauuuuucggaucgaaaaggguaaaaucgugaagucaguggagaugaaugcccccaacuaucauuacgaagagugcaguuguuacccugauagcuccgagauuaccugcgucugccgcgacaauuggcacgggucuaacagaccauggguuagcuucaaucagaaccuggaauaucagaucggauacauuuguucaggcauauuuggcgauaauccgaggcccaacgacaaaaaggggaguugcggaccuguguccagcaauggugcgaacggcguaaagggguucucuuuuaaauauggaaacggcguguggaucggucggacaaagucaauuaguagccgcaauggguucgagaugaucugggauccaaacggcuggaccggaacggacaauaacuuuuccaucaaacaagacauugucggcauaaaugaauggucuggguacucggggagcuucgugcagcaucccgagcugacuggucucgauuguauccgaccuugcuucuggguugaauuaauuagaggcaggccaaaggagaacacaaucuggaccuccgggucaaguauuucuuuuuguggagugaauagcgacacugucggcugguccuggcccgauggugcagagcugccguucacaaucgacaaauga

SEQ ID NO: 146762 - RNA, 1410 nt, Artificial Sequence; identical to SEQ ID NO: 145963
  derived and/or modified CDS sequence (opt3) from neuraminidase__InfluenzaA__ADG42426

SEQ ID NO: 146763 - RNA, 1410 nt, Artificial Sequence; identical to SEQ ID NO: 144786
  derived and/or modified CDS sequence (opt3) from neuraminidase__InfluenzaA__ADG42436

SEQ ID NO: 146764 - RNA, 1410 nt, Artificial Sequence
  derived and/or modified CDS sequence (opt3) from neuraminidase__InfluenzaA__ADG42446
augaaccccaaucagaagaucauuaccauaggcagcgugugcaugacaaucgggauggccaaccugauucuccaaaucggaaauauuaucuccauauggaucucucacucaauucagcuugguaaccagaaucagaucgagacuuguaaccaaagugucauuacguacgaaaauaacaccuggguuaaucagacauaugugaacaucagcaauacuaacuucgcugcaggccaguccguagugucugccaaacuggcgggaaauucgucauugugcccugucagcggaugggcuauauacaguaaggacaacuccauuagaaucggcucuaaaggugauguguuuguuauuagggagccauucaucagcuguuccccguuagaaugccggaccuuuuuccugacacagggggcccuacucaaugacaagcauucaaacggaaccaucaaagaucgcagucccuaucgaacucugaugagcuguccuauuggcgaggugccaucucccuacaacucccguuuugaaucagucgcauggagcgccagugcuugccacgacggcauaaauuggcuuacaaucgggauuucuggaccugauaacggugcaguggccguacugaaguauaauggcaucauaaccgacacgauuaaguccuggagaaacaauaucuugaggacucaagagagcgagugugcuugcguuaacgggucguguuucaccgugaugacagauggaccaucugacggccaggccuccuacaaaaucuuucggauugaaaaggguaaaaucgucaagucaguggagaugaaugcgcccaacuaucauuacgaagagugcaguuguuacccugauagcuccgagauuacuugcgugugccgcgacaauuggcacgggucuaacagaccaugggucagcuucaaucagaaccucgaauaucagauaggauacaucuguucaggcauuuuuggcgauaauccgaggcccaacgacaaaaccgggaguugcggaccuguuuccagcaauggugcaaacggcgugaagggguucucuuuuaaguauggaaacggcguauggaucggucggacaaaaucaaucaguagccgcaauggguucgagaugauuugggauccaaacggcuggaccggaacggacaauaacuuuuccauaaagcaagacaucgugggcauuaaugaauggucuggguacucggggagcuucguccagcaucccgagcugacuggucuggauuguauccgaccuugcuucuggguggaacucauuagaggcaggccaaaagagaacacaaucuggaccuccgggucaaguauaucuuuuuguggaguuaauagcgacacugugggcugguccuggcccgauggugccgaguuaccguucacaaucgacaaguga

SEQ ID NO: 146765 - RNA, 1410 nt, Artificial Sequence
  derived and/or modified CDS sequence (opt3) from neuraminidase__InfluenzaA__ADG42456
augaaccccaaucagaagaucauuaccauaggcagcgugugcaugacaaucgggauggccaaccugauucuccaaaucggaaauauuaucuccauauggaucucucacucaauucagcuugguaaccagaaucagaucgagacuuguaaccaaagugucauuacguacgaaaauaacaccuggguuaaucagacauaugugaacaucagcaauacuaacuucgcugcaggccaguccguagugucugucaaacuggccggaaauucgucauugugcccugugagcggaugggcgauauacaguaaggacaacuccauuagaaucggcucuaaaggugauguuuuugugauuagggagccauucaucagcuguuccccguuagaaugccggaccuuuuuccugacacagggggcucuacucaaugacaagcauucaaacggaaccaucaaagaucgcaguccccaccgaacucugaugagcuguccuauuggcgaggucccaucucccuauaacucccguuuugaaucaguggccuggagcgcaagugccugccaugacggcauaaauuggcuuacaaucgggauuucuggaccugauaacggugcuguagcaguucugaaguacaauggcaucauaaccgacacgauuaaguccuggagaaacaauaucuugaggacucaagagagcgagugugccugcgugaacgggucguguuucaccgucaugacagauggaccaucugacggccaggcuuccuauaaaaucuuucggauugaaaaggguaaaaucgugaagucaguggagaugaaugcccccaacuaccacuaugaagagugcaguuguuacccugauagcuccgagauuacuugcgucugccgcgacaauuggcaugggucuaacagaccauggguuagcuucaaucagaaccucgaauaccagauaggauauaucuguucaggcauuuuuggcgauaauccgaggcccaacgacaaaaccgggaguugcggaccuguguccagcaauggugcgaacggcguaaagggguucucuuuuaaguacggaaacggcguguggaucggucggacaaaaucaaucaguagccgcaauggguucgagaugauuugggauccaaacggcuggaccggaacggacaauaacuuuuccauaaagcaagacaucgucggcauuaaugaauggucuggguauucggggagcuucgugcagcaccccgagcugacuggucuggauuguauccgaccuugcuucuggguugaacucauuagaggcaggccaaaagagaacacaaucuggaccuccgggucaaguauaucuuuuuguggagugaauagcgacacugucggcugguccuggcccgauggugcagaguuaccguucacaaucgacaaguga

SEQ ID NO: 146766 - RNA, 1410 nt, Artificial Sequence; identical to SEQ ID NO: 144786
  derived and/or modified CDS sequence (opt3) from neuraminidase__InfluenzaA__ADG42466

SEQ ID NO: 146767 - RNA, 1410 nt, Artificial Sequence
  derived and/or modified CDS sequence (opt3) from neuraminidase__InfluenzaA__ADG42476
augaaccccaaucagaagaucauuaccauaggcagcgugugcaugacaaucgggauggccaaccugauucuccaaaucggaaauauuaucuccauauggaucucucacucaauucagcuugguaaccagaaucagacugagacguguaaccaaagugucaucaccuacgaaaauaacacauggguuaaucagacuuaugugaacauuagcaauaccaacuucgcugcaggccaguccguagugucugucaaacuggccggaaauucgucauugugcccugugagcggaugggcgaucuacaguaaggacaacuccauaagaauuggcucuaaaggugauguuuuugugaucagggagccauucauuagcuguuccccguuagaaugccggacauuuuuccugacccagggggcucuacucaaugacaagcauucaaacggaacuaucaaagaucgcagucccuaucgaacacugaugagcuguccuaucggcgaggucccaucucccuacaacucccguuuugaaucaguggccuggagcgcaagugccugccacgacggcauuaauuggcuuaccauagggaucucuggaccugauaacggugcuguagcaguucugaaguauaauggcauuaucacggacacuauaaaguccuggagaaacaauauuuugaggacccaagagagcgagugugccugcgugaacgggucguguuucacagucaugacugauggaccaucugacggccaggcuuccuacaaaaucuuucggaucgaaaaggguaaaauugugaagucaguggagaugaaugcccccaacuaucauuacgaagagugcaguuguuacccugauagcuccgagauuaccugcgucugccgcgacaauuggcacgggucuaacagaccauggguuagcuucaaucagaaccucgaauaucagaucggauacauauguucaggcaucuuuggcgauaauccgaggcccaacgacaaaacagggaguugcggaccuguguccagcaauggugcgaacggcguaaagggguucucuuuuaaguauggaaacggcguguggauuggucggaccaaaucaaucaguagccgcaauggguucgagaugaucugggauccaaacggcuggacgggaacugacaauaacuuuuccauuaagcaagacauagucggcaucaaugaauggucuggguacucggggagcuucgugcagcaucccgagcugacaggucuggauuguauucgaccuugcuucuggguugaacucaucagaggcaggccaaaagagaacaccauuuggacuuccgggucaaguaucucuuuuuguggagugaauagcgacacagucggcugguccuggcccgauggugcagaguuaccguucaccauagacaaguga

SEQ ID NO: 146768 - RNA, 1410 nt, Artificial Sequence; identical to SEQ ID NO: 146688
  derived and/or modified CDS sequence (opt3) from neuraminidase__InfluenzaA__ADG42486

SEQ ID NO: 146769 - RNA, 1410 nt, Artificial Sequence; identical to SEQ ID NO: 144786
  derived and/or modified CDS sequence (opt3) from neuraminidase__InfluenzaA__ADG42496

SEQ ID NO: 146770 - RNA, 1410 nt, Artificial Sequence
  derived and/or modified CDS sequence (opt3) from neuraminidase__InfluenzaA__ADG42506
augaaccccaaucagaagaucauuauaaucggcagcgugugcaugaccauugggauggccaaccugauccuccaaauuggaaauaucauauccaucuggauuucucacucaauccagcuugguaaccagaaucagauugagacauguaaccaaaguaucauaacuuacgaaaauaacacgugggucaaucagaccuauguuaacauuagcaauacaaacuucgcugcaggccaguccgugguaucugugaaacuggccggaaauucgucauugugcccugucagcggaugggcgaucuacaguaaggacaacuccauuagaaucggcucuaaaggugauguguuuguuaucagggagccauucauuagcuguuccccguuagaaugccggaccuuuuuccugacucagggggcucuacucaaugacaagcauucaaacggaacaauaaaagaucgcagucccuaucgaacccugaugagcuguccuaucggcgaggugccaucucccuacaacucccguuuugaaucagucgccuggagcgcaagugccugccacgacggcauuaauuggcuuacuaucgggauaucuggaccugauaacggugcuguggcaguacugaaguauaauggcauuaucacagacaccaucaaguccuggagaaacaauauuuugaggacgcaagagagcgagugugccugcguuaacgggucguguuucacugugaugaccgauggaccaucugacggccaggcuuccuacaaaaucuuucggauugaaaaggguaaagucgugaagucaguggagaugaaugcccccaacuaucauuacgaagagugcaguuguuacccugauagcuccgagauaacaugcgucugccgcgacaauuggcacgggucuaacagaccauggguuagcuucaaucagaaccucgaauaucagaucggauacauuuguucaggcaucuuuggcgauaauccgaggcccaacgacaaaacugggaguugcggaccuguguccagcaauggugcgaacggcguaaagggguucucuuuuaaguauggaaacggcguguggaucggucggaccaaaucaauuaguagccgcaauggguucgagaugauaugggauccaaacggcuggacaggaaccgacaauaacuuuuccaucaagcaagacauugucggcaucaaugaauggucuggguacucggggagcuucgugcagcaucccgagcugacgggucuggauuguauucgaccuugcuucuggguugaacucaucagaggcaggccaaaagagaacacuauauggacauccgggucaaguaucucuuuuuguggagugaauagcgacaccgucggcugguccuggcccgauggugcagaguuaccguucacuauugacaaguga

SEQ ID NO: 146771 - RNA, 1410 nt, Artificial Sequence; identical to SEQ ID NO: 145961
  derived and/or modified CDS sequence (opt3) from neuraminidase__InfluenzaA__ADG42516

SEQ ID NO: 146772 - RNA, 1410 nt, Artificial Sequence
  derived and/or modified CDS sequence (opt3) from neuraminidase__InfluenzaA__ADG42526
augaaccccaaucagaagaucauuaccauaggcagcgugugcaugacaaucgggauggccaaccugauucuccaaaucggaaauauuaucuccauauggaucucucacucaauucagcuugguaaccagaaucagaucgagacuuguaaccaaagugucauuacguacgaaaauaacaccuggguuaaucagacauaugugaacaucagcaauacuaacuucgcugcaggccaguccguagugucugucaaacuggccggaaauucgucauugugcccugugagcggaugggcgauauacaguaaggacaacuccauuagaaucggcucuaaaggugauguuuuugugauuagggagccauucaucagcuguuccccguuagaaugccggaccuuuuuccugacacagggggcucuacucaaugacaagcauucaaacggaaccaucaaagaucgcagucccuaucgaacucugaugagcuguccuauuggcgaggucccaucucccuacaacucccguuuugaaucaguggccuggagcgcaagugccugccacgacggcauaaauuggcuuacaaucgggauuucuggaccugauaacggugcuguagcaguucugaaguauaauggcaucauaaccgacacgauuaaguccuggagaaacaauaucuugaggacucaagagagcgagugugccugccucaacgggucguguuucaccgugaugacagauggaccaucugacggccaggcuuccuacaaaaucuuucggauugaaaaggguaaaaucgucaagucaguggagaugaaugcccccaacuaucauuacgaagagugcaguuguuacccugauagcuccgagauuacuugcgugugccgcgacaauuggcacgggucuaacagaccaugggucagcuucaaucagaaccuggaauaucagauaggauacaucuguucaggcauuuuuggcgauaauccgaggcccaacgacaaaaccgggaguugcggaccuguuuccagcaauggugcgaacggcgugaagggguucucuuuuaaguauggaaacggcguauggaucggucggacaaaaucaaucaguagccgcaauggguucgagaugauuugggauccaaacggcuggaccggaacggacaauaacuuuuccauaaagcaagacaucgugggcauuaaugaauggucuggguacucggggagcuucguccagcaucccgagcugacuggucucgauuguauccgaccuugcuucuggguggaauuaauuagaggcaggccaaaagagaacacaaucuggaccuccgggucaaguauaucuuuuuguggaguuaauagcgacacugugggcugguccuggcccgauggugcagagcugccguucacaaucgacaaguga

SEQ ID NO: 146773 - RNA, 1410 nt, Artificial Sequence
  derived and/or modified CDS sequence (opt3) from neuraminidase__InfluenzaA__ADG42536
augaaccccaaucagaagaucauuaccauaggcagcgugugcaugacaaucgggauggccaaccugauucuccaaaucggaaauauuaucuccauauggaucucucacucaauucagcuugguaaccagaaucagaucgagacuuguaaccaaagugucauuacguacgaaaauaacaccuggguuaaucagacauaugugaacaucagcaauacuaacuucgcugcaggccaguccguagugucugucaaacuggccggaaauucgucauugugcccugugagcggaugggcgauauacaguaaggacaacuccauuagaaucggcucuaaaggugauguuuuugugauuagggagccauucaucagcuguuccccguuagaaugccggaccuuuuuccugacacagggggcucuacucaaugacaagcauucaaacggaaccaucaaagaucgcagucccuaucgaacucugaugagcuguccuauuggcgaggucccaucucccuacaacucccguuuugaaucaguggccuggagcgcaagugccugccacgacggcauaaauuggcuuacaaucgggauuucuggaccugauaacggugcuguagcaguucugaaguauaauggcaucauaaccgacacgauuaaguccuggagaaacaauaucuugaggacucaagagagcgagugugccugcgugaacgggucguguuucaccgucaugacagauggaccaucugacggccaggcuuccuacaaaaucuuucggauugaaaaggguaaaaucgugaagucaguggagaugaaugcccccaacuaucauuacgaagagugcaguuguuacccugauagcuccgagauuacuugcgucugccgcgacaauuggcacgggucuaacagaccauggguuagcuucaaucagaaccucgaauaucagauaggauacaucuguucaggcauuuuuggcgauaauccgaggcccaacgacaaaaccgggaguugcggaccuguguccagcaauggugcgaacggcguaaagggguucucuuuuaaguauggaaacggcguguggaucggucggacaaaaucaaucaguagccgcaauggguucgagaugauuugggauccaaacggcuggaccggaacggacaauaacuuuuccauaaagcaagacaucgucggcauuaaugaauggucuggguacucggggagcuucgugcagcaucccgagcugacuggucuggauuguauccgaccuugcuucuggguugaacucauuagaggcaggccaaaagagaacacaaucuggaccuccgggucaaguauaucuuuuuguggagugacuagcgacacagucggcugguccuggcccgauggugcagaguuaccguucaccaucgacaaguga

SEQ ID NO: 146774 - RNA, 1410 nt, Artificial Sequence; identical to SEQ ID NO: 144786
  derived and/or modified CDS sequence (opt3) from neuraminidase__InfluenzaA__ADG42546

SEQ ID NO: 146775 - RNA, 1410 nt, Artificial Sequence; identical to SEQ ID NO: 144786
  derived and/or modified CDS sequence (opt3) from neuraminidase__InfluenzaA__ADG42556

SEQ ID NO: 146776 - RNA, 1410 nt, Artificial Sequence
  derived and/or modified CDS sequence (opt3) from neuraminidase__InfluenzaA__ADG42566
augaaccccaaucagaagaucauuaccauaggcagcgugugcaugacaaucgggauggccaaccugauucuccaaaucggaaauauuaucuccauauggaucucucacucaauucagcuugguaaccagaaucagaucgagacuuguaaccaaagugucauuacguacgaaaauaacaccuggguuaaucagacauaugugaacaucagcaauacuaacuucgcugcaggccauuccguagugucugucaaacuggccggaaauucgucauugugcccugugagcggaugggcgauauacaguaaggacaacuccauuagaaucggcucuaaaggugauguuuuugugauuagggagccauucaucagcuguuccccguuagaaugccggaccuuuuuccugacacagggggcucuacucaaugacaagcacucaaacggaaccaucaaagaucgcagucccuaucgaacucugaugagcuguccuauuggcgaggucccaucucccuacaacucccguuuugaaucaguggccuggagcgcaagugccugccaugacggcauaaauuggcuuacaaucgggauuucuggaccugauaacggugcuguagcaguucugaaguauaauggcaucauaaccgacacgauuaaguccuggagaaacaauaucuugaggacucaggagagcgagugugccugcgugaacgggucguguuucaccgucaugacagauggaccaucugacggccaggcuuccuacaaaaucuuucggauugaaaaggguaaaaucgugaagucaguggagaugaaugcccccaacuaucacuacgaagagugcaguuguuacccugauagcuccgagauuacuugcgucugccgcgacaauuggcaugggucuaacagaccauggguuagcuucaaucaaaaccucgaauaucagauaggauacaucuguucaggcauuuuuggcgauaauccgaggcccaacgacaaaaccgggaguugcggaccuguguccagcaauggugcgaacggcguaaagggguucucuuuuaaguauggaaacggcguguggaucggucggacaaaaucaaucaguagccgcaauggguucgagaugauuugggauccaaacggcuggaccggaacggacaauaacuuuuccauaaagcaggacaucgucggcauuaaugaauggucuggguacucggggagcuucgugcaacaccccgagcugacuggucuggauuguauccgaccuugcuucuggguugaacucauuagaggcaggccaaaagagaacacaaucuggaccuccgggucaaguauaucuuuuuguggagugaauagcgacacugucggcugguccuggcccgauggugcagaguuaccguucacaaucgacaaguga

SEQ ID NO: 146777 - RNA, 1410 nt, Artificial Sequence
  derived and/or modified CDS sequence (opt3) from neuraminidase__InfluenzaA__ADG42576
augaaccccaaucagaagaucauuaccauaggcagcgugugcaugacaaucgggauggccaaccugauucuccaaaucggaaauauuaucuccauauggaucucucacucaauucagcuugguaaccagaaucagaucgagacuuguaaccaaagugucauuacguacgaaaauaacaccuggguuaaucagacauaugugaacaucagcaauacuaacuucgcugcaggccaguccguagugucugucaaacuggccggaaauucgucauugugcccugugagcggaugggcgauauacaguaaggacaacuccauuagaaucggcucuaaaggugauguuuuugugauuagggagccauucaucagcuguuccccguuagaaugccggaccuuuuuccugacacagggggcucuacucaaugacaagcauucaaacggaaccaucaaagaucgcagucccuaucgaacucugaugagcuguccuauuggcgaggucccaucucccuacaacucccguuuugaaucaguggccuggagcgcaagugccugccacgacggcauaaauuggcuuacaaucgggauuucuggaccuuauaacggugcuguagcaguucugaaguacaauggcaucauaaccgauacgauuaaguccuggagaaacaauaucuugaggacucaagagagcgagugugccugcgugaacgggucguguuucaccgucaugacagacggaccaucugauggccaggcuuccuauaaaaucuuuaagauugaaaaagguaagaucgugaaaucaguggagaugaaugcccccaacuaccauuacgaagagugcaguuguuauccugacagcuccgagauuacuugcgucugccgggauaauuggcacgggucuaaccgcccauggguuagcuucaaucagaaccucgaauaccagauaggauauaucuguucaggcauuuuuggcgacaauccgagacccaacgauaagaccgggaguugcggaccuguguccagcaauggugcgaacggcguaaagggguucucuuuuaaauacggaaacggcguguggaucgguaggacaaagucaaucaguagccggaauggguucgagaugauuugggacccaaacggcuggaccggaacggauaauaacuuuuccauaaaacaagacaucgucggcauuaaugaauggucuggguauucggggagcuucgugcagcaucccgagcugacuggucuggacuguauccgcccuugcuucuggguugaacucauucgaggcagaccaaaggagaacacaaucuggaccuccgggucaaguauaucuuuuuguggagugaauagcgauacugucggcugguccuggcccgacggugcagaguuaccguucacaaucgauaaauga

SEQ ID NO: 146778 - RNA, 1410 nt, Artificial Sequence; identical to SEQ ID NO: 144786
  derived and/or modified CDS sequence (opt3) from neuraminidase__InfluenzaA__ADG42586

SEQ ID NO: 146779 - RNA, 1410 nt, Artificial Sequence
  derived and/or modified CDS sequence (opt3) from neuraminidase__InfluenzaA__ADG42606
augaaccccaaucagaagaucauuaccauaggcagcgugugcaugacaaucgggauggccaaccugauucuccaaaucggaaauauuaucuccauauggaucucucacucaauucagcuugguaaccagaaucagaucgagacuuguaaccaaagugucauuacguacgaaaauaacaccuggguuaaucagacauaugugaacaucagcaauacuaacuucgcugcaggccaguccguagugucugucaaacuggccggaaauucgucauugugcccugugagcggaugggcgauauacaguaaggacaacuccauuagaaucggcucuaaaggugauguuuuugugauuagggagccauucaucagcuguuccccguuagaaugccggaccuuuuuccugacacagggggcucuacucaaugacaagcauucaaacggaaccaucaaagaucgcagucccuaucgaacucugaugagcuguccuauuggcgaggucccaucucccuacaacucccguuuugaaucaguggccuggagcgcaagugccugccacgacggcauaaauuggcuuacaaucgggauuucuggaccugauaacggugcuguagcaguucugaaguauaauggcaucauaaccgacacgauuaaguccuggagaaacaauaucuugaggacucaagagagcgagugugccugcgugaacgggucguguuucaccgucaugacagauggaccaucugacggccaggcuuccuacaaaaucuuucggauugaaaaggguaaaaucgugaagucaguggagaugaaugcccccaacuaucauuacgaagagugcaguuguuacccugauagcuccgagauuacuugcgucugccgcgacaauuggcacgggucuaacagaccauggguuagcuucaaucagaaccucgaauaucagauaggauacaucuguucaggcauuuuuggcgauaauccgaggcccaacgacaaaaccgggaguugcggaccuguguccagcaauggugcgaacggcguaaagggguucucuuuuaaguauggaaacggcguguggaucggucggacaaaaucaaucaguagccgcaauggguucgagaugauuugggauccaaacggcuggaccggaacggacaauaacuuuuccauaaagcaagacaucgucggcauuaaugaauggucuggguacucggggagcuucgugcagcaucccgagcugacuggucuggauuguauccgaccuugcuucuggguugaacucauuagaggcaggccaaaagagaacacaaucuggaccuccgggucaaguauaucuuuuuguggagugaauagcgacacugucggcugguccuggcccgauggugcagaguuaccguucccuaucgacaaguga

SEQ ID NO: 146780 - RNA, 1410 nt, Artificial Sequence
  derived and/or modified CDS sequence (opt3) from neuraminidase__InfluenzaA__ADG42616
augaacagcaaucagaagaucauuaccauaggcuccgugugcaugacaaucgggauggccaaccugauucuccaaaucggaaauauuaucucuauauggaucucacacaguauucagcuugguaaccagaaucagaucgagacuuguaaccaaagcgucauuacguacgaaaauaacaccuggguuaaucagacauaugugaacaucuccaauacuaacuucgcugcaggccagucuguagugucggucaaacuggccgggaauagcagcuugugccccgugaguggaugggcgauauacuccaaggacaacucuauuagaaucggcagcaaaggugauguuuuugugauuagggagccuuucaucuccuguucaccauuagaaugccggaccuuuuuccugacacagggggcucuacucaaugacaagcauaguaacggaaccaucaaagaucgcagcccguaucgaacucugaugucuugucccauuggcgaggucccuuccccauacaacucacguuuugaaagcguggccuggagugcaucugccugccacgacggcauaaauuggcuuacaaucgggauuuccggacccgauaacggugcuguagcaguucugaaguauaauggcaucauaaccgacacgauuaagagcuggagaaacaauaucuugaggacucaagagucggagugugccugcgugaacgggucuuguuucaccgucaugacagauggaccuuccgacggccaggcuucauacaaaaucuuucggauugaaaaggguaaaaucgugaagaguguggagaugaaugccccaaacuaucauuacgaagagugcagcuguuaccccgauuccucugagauuacuugcgucugccgcgacaauuggcacgggagcaacagaccuuggguuucauucaaucagaaccucgaauaucagauaggauacaucuguaguggcauuuuuggcgauaauccaaggccgaacgacaaaaccggguccugcggacccgugagcucuaauggugcgaacggcguaaagggguucucauuuaaguauggaaacggcguguggaucggucggacaaaaaguaucagcucccgcaauggguucgagaugauuugggauccuaacggcuggaccggaacggacaauaacuuuucuauaaagcaagacaucgucggcauuaaugaauggucgggguacagcggauccuucgugcagcauccagagcugacuggucuggauuguauccgacccugcuucuggguugaacucauuagaggcaggccuaaagagaacacaaucuggaccucagggaguucuauaucauuuuguggagucaauuccgacacugugggcuggucauggccagauggugcagaguuacccuucacaaucgacaaguga

SEQ ID NO: 146781 - RNA, 1410 nt, Artificial Sequence; identical to SEQ ID NO: 145369
  derived and/or modified CDS sequence (opt3) from neuraminidase__InfluenzaA__ADG42626

SEQ ID NO: 146782 - RNA, 1410 nt, Artificial Sequence; identical to SEQ ID NO: 146767
  derived and/or modified CDS sequence (opt3) from neuraminidase__InfluenzaA__ADG42636

SEQ ID NO: 146783 - RNA, 1410 nt, Artificial Sequence
  derived and/or modified CDS sequence (opt3) from neuraminidase__InfluenzaA__ADG42646
augaaccccaaucagagaaucauuaccauaggcagcgugugcaugacaaucgggauggccaaccugauucuccaaaucggaaauauuaucuccauauggaucucucacucaauucagcuugguaaccagaaucagaucgagacuuguaaccaaagugucauuacguacgaaaauaacaccuggguuaaucagacauaugugaacaucagcaauacuaacuucgcugcaggccaguccguagugucugucaagcuggccggaaauucgucauugugcccugugagcggaugggcgauauacaguaaagacaacuccauuaggaucggcucuaagggugauguuuuugugauucgggagccauucaucagcuguuccccguuagaaugccgcaccuuuuuccugacacagggggcucuacucaaugacaaacauucaaacggaaccaucaaggaucgaagucccuaucguacucugaugagcuguccuauuggcgaggucccaucucccuacaacuccagauuugaaucaguggccuggagcgcaagugccugccacgacggcauaaauuggcuuacaaucgggauuucuggaccugauaacggugcuguagcaguucugaaauauaauggcaucauaaccgacacgauuaaguccuggaggaacaauaucuugcggacucaagagagcgagugugccugcgugaacgggucguguuucaccgucaugacagauggaccaucugacggccaggcuuccuacaagaucuuucgcauugaaaaagguaagaucgugaaaucaguggagaugaaugcccccaacuaucauuacgaagagugcaguuguuacccugauagcuccgagauuacuugcgucugcagagacaauuggcacgggucuaacaggccauggguuagcuucaaucagaaccucgaauaucagauaggauacaucuguucaggcauuuuuggcgauaauccgcggcccaacgacaagaccgggaguugcggaccuguguccagcaauggugcgaacggcguaaaaggguucucuuuuaaguauggaaacggcguguggaucggucgcacaaagucaaucaguagccgaaauggguucgagaugauuugggauccaaacggcuggaccggaacggacaauaacuuuuccauaaaacaagacaucgucggcauuaaugaauggucuggguacucggggagcuucgugcagcaucccgagcugacuggucuggauuguaucagaccuugcuucuggguugaacucauuaggggccggccaaaggagaacacaaucuggaccuccgggucaaguauaucuuuuuguggagugaauagcgacacugucggcugguccuggcccgauggugcagaguuaccguucacaaucgacaaauga

SEQ ID NO: 146784 - RNA, 1410 nt, Artificial Sequence; identical to SEQ ID NO: 144786
  derived and/or modified CDS sequence (opt3) from neuraminidase__InfluenzaA__ADG42656

SEQ ID NO: 146785 - RNA, 1410 nt, Artificial Sequence; identical to SEQ ID NO: 146699
  derived and/or modified CDS sequence (opt3) from neuraminidase__InfluenzaA__ADG42666

SEQ ID NO: 146786 - RNA, 1410 nt, Artificial Sequence
  derived and/or modified CDS sequence (opt3) from neuraminidase__InfluenzaA__ADG42676
augaaccccaaucagaagaucauuaccauaggcagcgugugcaugacaaucgggauggccaaccugauucuccaaaucggaaauauuaucuccauauggaucucucacucaauucagcuugguaaccagaaucagaucgagauuuguaaccaaagugucaucacuuacgaaaauaacacguggguuaaucagaccuaugugaacauaagcaauacaaacuucgcugcaggccaguccguagugucugucaaacuggccggaaauucgucauugugcccugugagcggaugggcgauuuacaguaaggacaacuccaucagaauuggcucuaaaggugauguuuuugugaucagggagccauucaucagcuguuccccguuagaaugccggaccuuuuuccugacucagggggcucuacucaaugacaagcauucaaacggaacaauuaaagaucgcagucccuaucgaacccugaugagcuguccuauaggcgaggucccaucucccuacaacucccguuuugaaucaguggccuggagcgcaagugccugccacgacggcaucaauuggcuuacuauugggaucucuggaccugauaacggugcuguagcaguucugaaguauaauggcauaauuacagacaccaucaaguccuggagaaacaauaucuugaggacgcaagagagcgagugugccugcgugaacgggucguguuucacugucaugaccgauggaccaucugacggccaggcuuccuacaaaauuuuucggaucgaaaaggguaaaauugugaagucaguggagaugaaugcccccaacuaucauuacgaagagugcaguuguuacccugauagcuccgagauaacaugcgucugccgcgacaauuggcacgggucuaacagaccauggguuagcuucaaucagaaccucgaauaucagaucggauacauuuguucaggcaucuuuggcgauaauccgaggcccaacgacaaaacugggaguugcggaccuguguccagcaauggugcgaacggcguaaagggguucucuuuuaaguauggaaacggcguguggaucggucggaccaaaucaauuaguagccgcaauggguucgagaugauaugggauccaaacggcuggacaggaaccgacaauaacuuuuccaucaagcaagacauugucggcaucaaugaauggucuggguacucggggagcuucgugcagcaucccgagcugacgggucuggauuguauucgaccuugcuucuggguugaacucaucagaggcaggccaaaagagaacacuauauggacauccgggucaaguaucucuuuuuguggagugaauagcgacaccgucggcugguccuggcccgauggugcagaguuaccguucacuauugacaaguga

SEQ ID NO: 146787 - RNA, 1410 nt, Artificial Sequence; identical to SEQ ID NO: 144786
  derived and/or modified CDS sequence (opt3) from neuraminidase__InfluenzaA__ADG42686

SEQ ID NO: 146788 - RNA, 1410 nt, Artificial Sequence; identical to SEQ ID NO: 146363
  derived and/or modified CDS sequence (opt3) from neuraminidase__InfluenzaA__ADG42696

SEQ ID NO: 146789 - RNA, 1410 nt, Artificial Sequence; identical to SEQ ID NO: 146567
  derived and/or modified CDS sequence (opt3) from neuraminidase__InfluenzaA__ADG42706

SEQ ID NO: 146790 - RNA, 1410 nt, Artificial Sequence; identical to SEQ ID NO: 144786
  derived and/or modified CDS sequence (opt3) from neuraminidase__InfluenzaA__ADG42716

SEQ ID NO: 146791 - RNA, 1410 nt, Artificial Sequence; identical to SEQ ID NO: 146074
  derived and/or modified CDS sequence (opt3) from neuraminidase__InfluenzaA__ADG42726

SEQ ID NO: 146792 - RNA, 1410 nt, Artificial Sequence; identical to SEQ ID NO: 145369
  derived and/or modified CDS sequence (opt3) from neuraminidase__InfluenzaA__ADG42746

SEQ ID NO: 146793 - RNA, 1410 nt, Artificial Sequence; identical to SEQ ID NO: 146299
  derived and/or modified CDS sequence (opt3) from neuraminidase__InfluenzaA__ADG42756

SEQ ID NO: 146794 - RNA, 1410 nt, Artificial Sequence; identical to SEQ ID NO: 146074
  derived and/or modified CDS sequence (opt3) from neuraminidase__InfluenzaA__ADG42766

SEQ ID NO: 146795 - RNA, 1410 nt, Artificial Sequence; identical to SEQ ID NO: 146074
  derived and/or modified CDS sequence (opt3) from neuraminidase__InfluenzaA__ADG42776

SEQ ID NO: 146796 - RNA, 1410 nt, Artificial Sequence; identical to SEQ ID NO: 146074
  derived and/or modified CDS sequence (opt3) from neuraminidase__InfluenzaA__ADG42796

SEQ ID NO: 146797 - RNA, 1410 nt, Artificial Sequence
  derived and/or modified CDS sequence (opt3) from neuraminidase__InfluenzaA__ADG42806
augaaccccaaucagaagaucauuaccauaggcagcgugugcaugacaaucgggauggccaaccugauucuccaaaucggaaauauuaucuccauauggaucucucacucaauucagcuugguaaccagaaucagaucgagacuuguaaccaaagugucauuacguacgaaaauaacaccuggguuaaucagacauaugugaacaucagcaauacuaacuucgcugcaggccaguccguagugucugucaaacuggccggaaauucgucauugugcccugugagcggaugggcgauauacaguaaggacaacuccauuagaaucggcucuaaaggugauguuuuugugauuagggagccauucaucagcuguuccccguuagaaugccggaccuuuuuccugacacagggggcucuacucaaugacaagcauucaaacggaaccaucaaagaucgcagucccuaucgaacucugaugagcuguccuauuggcgaggucccaucucccuacaacucccguuuugaaucaguggccuggagcgcaagugccugccacgacggcauaaauuggcuuacaaucgggauuucuggaccugauaacggugcuguagcaguucugaaguauaauggcaucauaaccgacacgauuaaguccuggagaaacaauaucuugaggacucaagagagcgagugugccugcgugaacgggucguguuucaccgucaugacagauggaccaucugacggccaggcuuccuacaaaaucuuucggauugaaaaggguaaaaucgugaagucaguggagaugaaugcccccaacuaucauuacgaagagugcaguuguuacccugauagcuccgagauuacuugcgucugccgcgacaauuggcacgggucuaacagaccauggguuagcuucaaucagaaccucgaauaucagauaggauacaucuguucaggcauuuuuggcgauaauccgaggcccaacgacaaaaccgggaguugcggaccuguguccagcaauggugcgaacggcguaaagggguucucuuuuaaguauggaaacggcguguggaucggucggacaaaaucaaucaguagccgcaauggguucgagaugauuugggauccaaacggcuggaccggaacggacaauaacuuuuccauaaagcaagacaucgucggcauuaaugaauggucuggguacucggggagcuucgugcagcaucccgagcugacuggucuggauuguauccgaccuugcuucuggguugaacucauuagaggcaggccaaaagagaacacaaucuggaccuccgggucaaguauaucuuuuuguggagugaauagcgacacugucuccuggucauggcccgauggcgcagaguuaccguucacaaucgacaaguga

SEQ ID NO: 146798 - RNA, 1410 nt, Artificial Sequence; identical to SEQ ID NO: 144786
  derived and/or modified CDS sequence (opt3) from neuraminidase__InfluenzaA__ADG42816

SEQ ID NO: 146799 - RNA, 1410 nt, Artificial Sequence; identical to SEQ ID NO: 144786
  derived and/or modified CDS sequence (opt3) from neuraminidase__InfluenzaA__ADG42826

SEQ ID NO: 146800 - RNA, 1410 nt, Artificial Sequence; identical to SEQ ID NO: 144786
  derived and/or modified CDS sequence (opt3) from neuraminidase__InfluenzaA__ADG42836

SEQ ID NO: 146801 - RNA, 1410 nt, Artificial Sequence; identical to SEQ ID NO: 146402
  derived and/or modified CDS sequence (opt3) from neuraminidase__InfluenzaA__ADG42846

SEQ ID NO: 146802 - RNA, 1410 nt, Artificial Sequence; identical to SEQ ID NO: 144786
  derived and/or modified CDS sequence (opt3) from neuraminidase__InfluenzaA__ADG42856

SEQ ID NO: 146803 - RNA, 1410 nt, Artificial Sequence; identical to SEQ ID NO: 146398
  derived and/or modified CDS sequence (opt3) from neuraminidase__InfluenzaA__ADG42866

SEQ ID NO: 146804 - RNA, 1410 nt, Artificial Sequence; identical to SEQ ID NO: 144786
  derived and/or modified CDS sequence (opt3) from neuraminidase__InfluenzaA__ADG42876

SEQ ID NO: 146805 - RNA, 1410 nt, Artificial Sequence; identical to SEQ ID NO: 146435
  derived and/or modified CDS sequence (opt3) from neuraminidase__InfluenzaA__ADG42886

SEQ ID NO: 146806 - RNA, 1410 nt, Artificial Sequence; identical to SEQ ID NO: 146378
  derived and/or modified CDS sequence (opt3) from neuraminidase__InfluenzaA__ADG42896

SEQ ID NO: 146807 - RNA, 1410 nt, Artificial Sequence; identical to SEQ ID NO: 146378
  derived and/or modified CDS sequence (opt3) from neuraminidase__InfluenzaA__ADG42906

SEQ ID NO: 146808 - RNA, 1410 nt, Artificial Sequence; identical to SEQ ID NO: 144786
  derived and/or modified CDS sequence (opt3) from neuraminidase__InfluenzaA__ADG42916

SEQ ID NO: 146809 - RNA, 1410 nt, Artificial Sequence; identical to SEQ ID NO: 144786
  derived and/or modified CDS sequence (opt3) from neuraminidase__InfluenzaA__ADG42926

SEQ ID NO: 146810 - RNA, 1410 nt, Artificial Sequence; identical to SEQ ID NO: 144786
  derived and/or modified CDS sequence (opt3) from neuraminidase__InfluenzaA__ADG58909

SEQ ID NO: 146811 - RNA, 1410 nt, Artificial Sequence; identical to SEQ ID NO: 144786
  derived and/or modified CDS sequence (opt3) from neuraminidase__InfluenzaA__ADG58910

SEQ ID NO: 146812 - RNA, 1410 nt, Artificial Sequence
  derived and/or modified CDS sequence (opt3) from neuraminidase__InfluenzaA__ADG58913
augaaccccaaucagaagaucauuaccauaggcagcgugugcaugacaaucgggauggccaaccugauucuccaaaucggaaauauuaucuccauauggaucucucacucaauucagcuugguaaccagaaucagaucgagacuuguaaccaaagugucauuacguacgaaaauaacaccuggguuaaucagacauaugugaacaucagcaauacuaacuucgcugcaggccaguccguagugucugucaaacuggccggaaauucgucauugugcccugugagcgggugggcgauauacaguaaggacaacuccauuagaaucggcucuaaaggugauguuuuugugauuagggagccauucaucagcuguuccccguuagaaugccggaccuuuuuccugacacagggggcucuacucaaugacaagcauucaaacggaaccaucaaagaucgcagucccuaucgaacucugaugagcuguccuauuggcgaggucccaucucccuacaacucccguuuugaaucaguggccuggagcgcaagugccugccacgacggcauaaauuggcuuacaaucgggauuucuggaccugauaacggugcuguagcaguucugaaguauaauggcaucauaaccgacacgauuaaguccuggagaaacaauaucuugaggacucaagagagcgagugugccugcgugaacgggucguguuucaccgucaugacagauggaccaucugacggccaggcuuccuacaaaaucuuucggauugaaaaggguaaaaucgugaagucaguggagaugaaugcccccaacuaucauuacgaagagugcaguuguuacccugauagcuccgagauuacuugcgucugccgcgacaauuggcacgggucuaacagaccauggguuaccuucaaucagaaccucgaauaucagauaggauacaucuguagcggcauuuuuggcgauaauccgaggcccaacgacaaaacagggucaugcggaccugugaguuccaauggugcgaacggcguaaagggguucagcuuuaaguauggaaacggcguguggaucggucggaccaaaucuaucucaagucgcaauggguucgagaugauuugggauccaaacggcuggacgggaacugacaauaacuuuagcauaaagcaagacaucgucggcauuaaugaaugguccggguacucuggaucguucgugcagcaucccgagcugacaggucuggauuguauccgaccuugcuucuggauugaacucaucagaggcaggccaaaagagaacaccauauggacuagcggguccucaaucaguuuuuguggaguuaauucugacacagugggcuggagcuggcccgauggugcagaguuaccguucaccauugacaaguga

SEQ ID NO: 146813 - RNA, 1410 nt, Artificial Sequence; identical to SEQ ID NO: 144786
  derived and/or modified CDS sequence (opt3) from neuraminidase__InfluenzaA__ADG58914

SEQ ID NO: 146814 - RNA, 1410 nt, Artificial Sequence; identical to SEQ ID NO: 144786
  derived and/or modified CDS sequence (opt3) from neuraminidase__InfluenzaA__ADG58916

SEQ ID NO: 146815 - RNA, 1410 nt, Artificial Sequence; identical to SEQ ID NO: 144786
  derived and/or modified CDS sequence (opt3) from neuraminidase__InfluenzaA__ADG58917

SEQ ID NO: 146816 - RNA, 1410 nt, Artificial Sequence
  derived and/or modified CDS sequence (opt3) from neuraminidase__InfluenzaA__ADG58918
augaaccccaaucagaagaucauuaccauaggcagcgugugcaugacaaucgggauggccaaccugauucuccaaaucggaaauauuaucuccauauggaucucucacucaauucagcuugguaaccagaaucagaucgagacuuguaaccaaagugucauuacguacgaaaauaacaccuggguuaaucagacauaugugaacaucagcaauacuaacuucgcugcaggccaguccguagugucugucaaacuggccggaaauucgucauugugcccugugagcgggugggcgauauacaguaaggacaacuccauuagaaucggcucuaaaggugauguuuuugugauuagggagccauucaucagcuguuccccguuagaaugccggaccuuuuuccugacacagggggcucuacucaaugacaagcauucaaacggaaccaucaaagaucgcagucccuaucgaacucugaugagcuguccuauuggcgaggucccaucucccuacaacucccguuuugaaucaguggccuggagcgcaagugccugccacgacggcauaaauuggcuuacaaucgggauuucuggaccugauaacggugcuguagcaguucugaaguauaauggcaucauaaccgacacgauuaaguccuggagaaacaauaucuugaggacucaagagagcgagugugccugcgugaacgggucguguuucaccgucaugacagauggaccaucugacggccaggcuuccuacaaaaucuuucggauugaaaaggguaaaaucgugaagucaguggagaugaaugcccccaacuaucauuacgaagagugcaguuguuacccugauagcuccgagauuacuugcgucugccgcgacaauuggcacgggucuaacagaccauggguuaccuucaaucagaaccucgaauaucagauaggauacaucuguagcggcauuuuuggcgauaauccgaggcccaacgacaaaacagggucaugcggaccugugaguuccaauggugcgaacggcguaaagggguucagcuuuaaguauggaaacggcguguggaucggucggaccaaaucuaucucaagucgcaauggguucgagaugauuugggauccaaacggcuggacgggaacugacaauaacuuuagcauaaagcaagacaucgucggcauuaaugaaugguccggguacucuggaucguucgugcagcaucccgagcugacaggucuggauuguauccgaccuugcuucuggguugaacucauuagaggcaggccaaaagagaacaccaucuggacuagcggguccucaauaaguuuuuguggagucaauucugacacagugggcuggagcuggcccgauggugcagaguuaccguucaccaucgacaaguga

SEQ ID NO: 146817 - RNA, 1410 nt, Artificial Sequence; identical to SEQ ID NO: 146812
  derived and/or modified CDS sequence (opt3) from neuraminidase__InfluenzaA__ADG58919

SEQ ID NO: 146818 - RNA, 1410 nt, Artificial Sequence; identical to SEQ ID NO: 144941
  derived and/or modified CDS sequence (opt3) from neuraminidase__InfluenzaA__ADG58920

SEQ ID NO: 146819 - RNA, 1410 nt, Artificial Sequence; identical to SEQ ID NO: 144941
  derived and/or modified CDS sequence (opt3) from neuraminidase__InfluenzaA__ADG58921

SEQ ID NO: 146820 - RNA, 1410 nt, Artificial Sequence; identical to SEQ ID NO: 144941
  derived and/or modified CDS sequence (opt3) from neuraminidase__InfluenzaA__ADG58922

SEQ ID NO: 146821 - RNA, 1410 nt, Artificial Sequence; identical to SEQ ID NO: 144941
  derived and/or modified CDS sequence (opt3) from neuraminidase__InfluenzaA__ADG58923

SEQ ID NO: 146822 - RNA, 1410 nt, Artificial Sequence; identical to SEQ ID NO: 144941
  derived and/or modified CDS sequence (opt3) from neuraminidase__InfluenzaA__ADG58924

SEQ ID NO: 146823 - RNA, 1410 nt, Artificial Sequence; identical to SEQ ID NO: 144941
  derived and/or modified CDS sequence (opt3) from neuraminidase__InfluenzaA__ADG58925

SEQ ID NO: 146824 - RNA, 1410 nt, Artificial Sequence; identical to SEQ ID NO: 144941
  derived and/or modified CDS sequence (opt3) from neuraminidase__InfluenzaA__ADG58926

SEQ ID NO: 146825 - RNA, 1410 nt, Artificial Sequence; identical to SEQ ID NO: 144941
  derived and/or modified CDS sequence (opt3) from neuraminidase__InfluenzaA__ADG58927

SEQ ID NO: 146826 - RNA, 1410 nt, Artificial Sequence; identical to SEQ ID NO: 145804
  derived and/or modified CDS sequence (opt3) from neuraminidase__InfluenzaA__ADG58928

SEQ ID NO: 146827 - RNA, 1410 nt, Artificial Sequence; identical to SEQ ID NO: 145804
  derived and/or modified CDS sequence (opt3) from neuraminidase__InfluenzaA__ADG58929

SEQ ID NO: 146828 - RNA, 1410 nt, Artificial Sequence
  derived and/or modified CDS sequence (opt3) from neuraminidase__InfluenzaA__ADG58931
augaaccccaaucagaagaucauuaccauaggcagcgugugcaugacaaucgggauggccaaccugauucuccaaaucggaaauacuauuuccaucuggauaaaccacucuauccagcuugguaaucagaaccagauugagacguguaaucaaucagucaucaccuacgaaaacaauacauggguuaaccagacuuaugugaauauuaguaacaccaauuucgcugcaggccagagcguaguguccgucaaacuggccgggaacucuucguugugcccugugucaggaugggcgaucuacagcaaggacaauaguauaagaauuggcuccaaaggugauguuuuugugaucagggagccauucauuucuuguagcccguuagaaugccggacauuuuuccugacccagggggcucuacucaacgacaagcauuccaacggaacuaucaaagaucgcucacccuaucgaacacugaugaguuguccuaucggcgaggucccaagccccuacaauucucguuuugaauccguggccuggucagcaagcgccugccacgacggcauuaacuggcuuaccauagggaucaguggaccugauaauggugcuguagcaguucugaaguauaacggcauuaucacggacacuauaaagucuuggagaaauaacauuuugaggacccaagaguccgagugugccugcgugaaugggagcuguuucacagucaugacugauggaccaucggacggccaggcuucuuacaaaaucuuucggaucgaaaaggguaaaauugugaaguccguggagaugaacgcccccaauuaucauuacgaagagugcucauguuacccugauaguagcgagauuaccugcgucugccgcgacaacuggcacggguccaauagaccauggguuucuuucaaccagaaucucgaauaucagaucggauacauauguagcggcaucuuuggcgauaacccgaggcccaaugacaaaacagggucaugcggaccugugaguuccaacggugcgaacggcguaaagggguucagcuuuaaguauggaaauggcguguggauuggucggaccaaaucuaucucaagucgcaacggguucgagaugaucugggauccaaauggcuggacgggaacugacaacaauuuuagcauuaagcaagacauagucggcaucaacgaaugguccggguacucuggaucguucgugcagcaucccgagcugacaggucuggauuguauucgaccuugcuucuggguugaacucaucagaggcaggccaaaagagaauaccauuuggacuagcggguccucaaucaguuuuuguggagugaacucugacacagucggcuggagcuggcccgauggugcagaguuaccguucaccauagacaaguga

SEQ ID NO: 146829 - RNA, 1410 nt, Artificial Sequence; identical to SEQ ID NO: 146828
  derived and/or modified CDS sequence (opt3) from neuraminidase__InfluenzaA__ADG58932

SEQ ID NO: 146830 - RNA, 1410 nt, Artificial Sequence; identical to SEQ ID NO: 146828
  derived and/or modified CDS sequence (opt3) from neuraminidase__InfluenzaA__ADG58933

SEQ ID NO: 146831 - RNA, 1410 nt, Artificial Sequence; identical to SEQ ID NO: 146828
  derived and/or modified CDS sequence (opt3) from neuraminidase__InfluenzaA__ADG58934

SEQ ID NO: 146832 - RNA, 1410 nt, Artificial Sequence; identical to SEQ ID NO: 146828
  derived and/or modified CDS sequence (opt3) from neuraminidase__InfluenzaA__ADG58935

SEQ ID NO: 146833 - RNA, 1410 nt, Artificial Sequence; identical to SEQ ID NO: 146828
  derived and/or modified CDS sequence (opt3) from neuraminidase__InfluenzaA__ADG58936

SEQ ID NO: 146834 - RNA, 1410 nt, Artificial Sequence; identical to SEQ ID NO: 146828
  derived and/or modified CDS sequence (opt3) from neuraminidase__InfluenzaA__ADG58937

SEQ ID NO: 146835 - RNA, 1410 nt, Artificial Sequence; identical to SEQ ID NO: 146828
  derived and/or modified CDS sequence (opt3) from neuraminidase__InfluenzaA__ADG58938

SEQ ID NO: 146836 - RNA, 1410 nt, Artificial Sequence
  derived and/or modified CDS sequence (opt3) from neuraminidase__InfluenzaA__ADG59589
augaaccccaaucagaagaucauuaccauaggcagcgugugcaugacaaucgggauggccaaccugauucuccaaaucggaaauauuaucuccauauggaucucucacucaauucagcuugguaaccagaaucagaucgagacuuguaaccaaagugucauuacguacgaaaauaacaccuggguuaaucagacauaugugaacaucagcaauacuaacuucgcugcaggccaguccguagugucugucaaacuggccggaaauucgucauugugcccugugagcggaugggcgauauacaguaaggacaacuccauuagaaucggcucuaaaggugauguuuuugugauuagggagccauucaucagcuguuccccguuagaaugccggaccuuuuuccugacacagggggcucuacucaaugacaagcauucaaacggaaccaucaaagaucgcagucccuaucgaacucugaugagcuguccuauuggcgaggucccaucucccuacaacucccguuuugaaucaguggccuggagcgcaagugccugccacgacggcauaaauuggcuuacaaucgggauuucuggaccugauaacggugcuauggcaguacugaaguauaauggcaucauaaccgacacgauuaaguccuggagaaacaauaucuugaggacucaagagagcgagugugccugcguuaacgggucguguuucaccgugaugacagauggaccaucugacggccaggcuuccuacaaaaucuuucggauugaaaaggguaaagucgugaagucaguggagaugaaugcccccaacuaucauuacgaagagugcaguuguuacccugauagcuccgagaucacuugcgucugccgcgacaauuggcacgggucuaacagaccauggguuagcuucaaucagaaccucgaauaucagauuggauacauauguucaggcaucuuuggcgauaauccgaggcccaacgacaaaaccgggaguugcggaccuguguccagcaauggugcgaacggcguaaagggguucucuuuuaaguauggaaacggcguguggauuggucggacaaaaucaaucaguagccgcaauggguucgagaugaucugggauccaaacggcuggaccggaacggacaauaacuuuuccauuaagcaagacauagucggcaucaaugaauggucuggguacucggggagcuucgugcagcaucccgagcugacuggucuggauuguauucgaccuugcuucuggguugaacucaucagaggcaggccaaaagagaacacaauuuggaccuccgggucaaguaucucuuuuuguggagugaauagcgacacugucggcugguccuggcccgauggugcagaguuaccguucacaauagacaaguga

SEQ ID NO: 146837 - RNA, 1410 nt, Artificial Sequence; identical to SEQ ID NO: 144786
  derived and/or modified CDS sequence (opt3) from neuraminidase__InfluenzaA__ADG59590

SEQ ID NO: 146838 - RNA, 1410 nt, Artificial Sequence; identical to SEQ ID NO: 144786
  derived and/or modified CDS sequence (opt3) from neuraminidase__InfluenzaA__ADG59591

SEQ ID NO: 146839 - RNA, 1410 nt, Artificial Sequence; identical to SEQ ID NO: 144786
  derived and/or modified CDS sequence (opt3) from neuraminidase__InfluenzaA__ADG59592

SEQ ID NO: 146840 - RNA, 1410 nt, Artificial Sequence; identical to SEQ ID NO: 146688
  derived and/or modified CDS sequence (opt3) from neuraminidase__InfluenzaA__ADG59593

SEQ ID NO: 146841 - RNA, 1410 nt, Artificial Sequence; identical to SEQ ID NO: 145963
  derived and/or modified CDS sequence (opt3) from neuraminidase__InfluenzaA__ADG59594

SEQ ID NO: 146842 - RNA, 1410 nt, Artificial Sequence; identical to SEQ ID NO: 145963
  derived and/or modified CDS sequence (opt3) from neuraminidase__InfluenzaA__ADG59595

SEQ ID NO: 146843 - RNA, 1410 nt, Artificial Sequence
  derived and/or modified CDS sequence (opt3) from neuraminidase__InfluenzaA__ADG59596
augaaccccaaucagaagaucauuaccauaggcagcgugugcaugacaaucgggauggccaaccugauucuccaaaucggaaauauuaucuccauauggaucucucacucaauucagcuugguaaccagaaucagaucgagacuuguaaccaaagugucauuacguacgaaaauaacaccuggguuaaucagacauaugugaacaucagcaauacuaacuucgcugcaggccaguccguagugucugucaaacuggccggaaauucgucauugugcccugugagcggaugggcgauauacaguaaggacaacuccauuagaaucggcucuaaaggugauguuuuugugauuagggagccauucaucagcuguuccccguuagaaugccggaccuuuuuccugacacagggggcucuacucaaugacaagcauucaaacggaaccaucaaagaucgcagucccuaucgaacucugaugagcuguccuauuggcgaggucccaucucccuacaacucccguuuugaaucaguggccuggagcgcaagugccugccacgacggcauaaauuggcuuacaaucgggauuucuggaccugauaacggugcuguagcaguucugaaguauaauggcaucauaaccgacacgauuaaguccuggagaaacaauaucuugaggacucaagagagcgagugugccugcgugaacgggucguguuucaccgucaugacagauggaccaucugacggccaggcuuccuacaaaaucuuucggauugaaaaggguaaaaucgugaagucaguggagaugaaugcccccaacuaucauuacgaagagugcaguuguuacccugauagcuccgagauuacuugcgucugccgcgacaauuggcacgggucuaacagaccauggguuagcuucaaucagaaccucgaauaucagauaggauacaucuguucaggcauuuuuggcgauaauccgaggcccaacgaccggaccgggaguugcggaccuguguccagcaauggugcgaacggcguaaaaggguucucuuuuaaguauggaaacggcguguggaucggucgcacaaagucaaucaguagccgaaauggguucgagaugauuugggauccaaacggcuggaccggaacggacaauaacuuuuccauaaaacaagacaucgucggcauuaaugaauggucuggguacucggggagcuucgugcagcaucccgagcugacuggucuggauuguaucagaccuugcuucuggguugaacucauuaggggccggccaaaggagaacacaaucuggaccuccgggucaaguauaucuuuuuguggagugaauagcgacacugucggcugguccuggcccgauggugcagaguuaccguucacaaucgacaaauga

SEQ ID NO: 146844 - RNA, 1410 nt, Artificial Sequence; identical to SEQ ID NO: 144786
  derived and/or modified CDS sequence (opt3) from neuraminidase__InfluenzaA__ADG59597

SEQ ID NO: 146845 - RNA, 1410 nt, Artificial Sequence; identical to SEQ ID NO: 144786
  derived and/or modified CDS sequence (opt3) from neuraminidase__InfluenzaA__ADG59598

SEQ ID NO: 146846 - RNA, 1410 nt, Artificial Sequence; identical to SEQ ID NO: 145961
  derived and/or modified CDS sequence (opt3) from neuraminidase__InfluenzaA__ADG59599

SEQ ID NO: 146847 - RNA, 1410 nt, Artificial Sequence; identical to SEQ ID NO: 144786
  derived and/or modified CDS sequence (opt3) from neuraminidase__InfluenzaA__ADG59601

SEQ ID NO: 146848 - RNA, 1410 nt, Artificial Sequence; identical to SEQ ID NO: 146688
  derived and/or modified CDS sequence (opt3) from neuraminidase__InfluenzaA__ADG59602

SEQ ID NO: 146849 - RNA, 1410 nt, Artificial Sequence; identical to SEQ ID NO: 146688
  derived and/or modified CDS sequence (opt3) from neuraminidase__InfluenzaA__ADG59603

SEQ ID NO: 146850 - RNA, 1410 nt, Artificial Sequence; identical to SEQ ID NO: 144786
  derived and/or modified CDS sequence (opt3) from neuraminidase__InfluenzaA__ADG59604

SEQ ID NO: 146851 - RNA, 1410 nt, Artificial Sequence; identical to SEQ ID NO: 144786
  derived and/or modified CDS sequence (opt3) from neuraminidase__InfluenzaA__ADG59605

SEQ ID NO: 146852 - RNA, 1410 nt, Artificial Sequence; identical to SEQ ID NO: 145804
  derived and/or modified CDS sequence (opt3) from neuraminidase__InfluenzaA__ADG59606

SEQ ID NO: 146853 - RNA, 1410 nt, Artificial Sequence; identical to SEQ ID NO: 144786
  derived and/or modified CDS sequence (opt3) from neuraminidase__InfluenzaA__ADG59607

SEQ ID NO: 146854 - RNA, 1410 nt, Artificial Sequence; identical to SEQ ID NO: 144786
  derived and/or modified CDS sequence (opt3) from neuraminidase__InfluenzaA__ADG59608

SEQ ID NO: 146855 - RNA, 1410 nt, Artificial Sequence; identical to SEQ ID NO: 145607
  derived and/or modified CDS sequence (opt3) from neuraminidase__InfluenzaA__ADG59609

SEQ ID NO: 146856 - RNA, 1410 nt, Artificial Sequence; identical to SEQ ID NO: 146688
  derived and/or modified CDS sequence (opt3) from neuraminidase__InfluenzaA__ADG59610

SEQ ID NO: 146857 - RNA, 1410 nt, Artificial Sequence; identical to SEQ ID NO: 145804
  derived and/or modified CDS sequence (opt3) from neuraminidase__InfluenzaA__ADG59611

SEQ ID NO: 146858 - RNA, 1410 nt, Artificial Sequence; identical to SEQ ID NO: 146688
  derived and/or modified CDS sequence (opt3) from neuraminidase__InfluenzaA__ADG59612

SEQ ID NO: 146859 - RNA, 1410 nt, Artificial Sequence
  derived and/or modified CDS sequence (opt3) from neuraminidase__InfluenzaA__ADG59613
augaaccccaaucagaagaucauuaccauaggcagcgugugcaugacaaucgggaugacuaaccugauucuccaacuuggaaauaucauuuccaucuggauaucucacucaauccagcuggguaaccagaaucagauugagacguguaaccaaagugucaucaccuacgaaaauaacacauggguuaaucagacuuaugugaacauuagcaauaccaacuucgccgcuggccaguccguagugucugucaaauuggcaggaaauucgucauuaugcccugugagcgggugggccaucuacaguaaggacaacuccauaagaauuggcucuaaaggugauguuuuugugaucagggagccauucauuagcuguuccccgcuggaaugccggacauuuuuccuaacccagggggcgcuccugaaugacaagcauucaaacggaacuaucaaagaucgcagucccuaucgaacacuuaugagcuguccuaucggcgaggucccaucucccuacaacucccguuuugaaucaguggcuuggagcgccagugcaugccacgacggcauuaauuggcugaccauagggaucucuggaccugauaacggugccguagcuguuuugaaguauaauggcauuaucacggacacuauaaaguccuggagaaacaauauucucaggacccaagagagcgagugugcaugcgugaacgggucguguuucacagucaugacugauggaccaucugacggccaggccuccuacaaaaucuuucggaucgaaaaggguaaaauugugaagucaguggagaugaaugcucccaacuaucauuacgaagagugcaguuguuacccugauagcuccgagauuaccugcgucugccgcgacaauuggcacgggucuaacagaccauggguuagcuucaaucagaaccuggaauaucagaucggauacauauguucaggcaucuuuggcgauaauccgaggcccaacgacaaaacagggaguugcggaccuguguccagcaauggugccaacggcguaaagggguucucuuuuaaguauggaaacggcguguggauuggucggaccaaaucaaucaguagccgcaauggguucgagaugaucugggauccaaacggcuggacgggaacugacaauuccuuuucuauuaagcaagacauagucggcaucaacgaauggucgggguacagcggauccuucgugcagcaucccgagcugacaggucucgauuguauucgaccuugcuucuggguugaauuaaucagaggcaggccaaaagagaauaccguguggacuucagggaguucuauuagcuuuuguggagucaacuccgacacagugggcuggucauggcccgauggugcggagcugccguucaccaucgacaaguga

SEQ ID NO: 146860 - RNA, 1410 nt, Artificial Sequence; identical to SEQ ID NO: 145961
  derived and/or modified CDS sequence (opt3) from neuraminidase__InfluenzaA__ADG59614

SEQ ID NO: 146861 - RNA, 1410 nt, Artificial Sequence; identical to SEQ ID NO: 144786
  derived and/or modified CDS sequence (opt3) from neuraminidase__InfluenzaA__ADH01811

SEQ ID NO: 146862 - RNA, 1410 nt, Artificial Sequence; identical to SEQ ID NO: 144786
  derived and/or modified CDS sequence (opt3) from neuraminidase__InfluenzaA__ADH01821

SEQ ID NO: 146863 - RNA, 1410 nt, Artificial Sequence; identical to SEQ ID NO: 144786
  derived and/or modified CDS sequence (opt3) from neuraminidase__InfluenzaA__ADH01831

SEQ ID NO: 146864 - RNA, 1410 nt, Artificial Sequence; identical to SEQ ID NO: 144786
  derived and/or modified CDS sequence (opt3) from neuraminidase__InfluenzaA__ADH01841

SEQ ID NO: 146865 - RNA, 1410 nt, Artificial Sequence; identical to SEQ ID NO: 144786
  derived and/or modified CDS sequence (opt3) from neuraminidase__InfluenzaA__ADH01851

SEQ ID NO: 146866 - RNA, 1410 nt, Artificial Sequence; identical to SEQ ID NO: 144786
  derived and/or modified CDS sequence (opt3) from neuraminidase__InfluenzaA__ADH01861

SEQ ID NO: 146867 - RNA, 1410 nt, Artificial Sequence; identical to SEQ ID NO: 144786
  derived and/or modified CDS sequence (opt3) from neuraminidase__InfluenzaA__ADH01871

SEQ ID NO: 146868 - RNA, 1410 nt, Artificial Sequence; identical to SEQ ID NO: 144786
  derived and/or modified CDS sequence (opt3) from neuraminidase__InfluenzaA__ADH01881

SEQ ID NO: 146869 - RNA, 1410 nt, Artificial Sequence; identical to SEQ ID NO: 144786
  derived and/or modified CDS sequence (opt3) from neuraminidase__InfluenzaA__ADH01891

SEQ ID NO: 146870 - RNA, 1410 nt, Artificial Sequence; identical to SEQ ID NO: 144786
  derived and/or modified CDS sequence (opt3) from neuraminidase__InfluenzaA__ADH01901

SEQ ID NO: 146871 - RNA, 1410 nt, Artificial Sequence; identical to SEQ ID NO: 144786
  derived and/or modified CDS sequence (opt3) from neuraminidase__InfluenzaA__ADH01911

SEQ ID NO: 146872 - RNA, 1410 nt, Artificial Sequence; identical to SEQ ID NO: 144786
  derived and/or modified CDS sequence (opt3) from neuraminidase__InfluenzaA__ADH01921

SEQ ID NO: 146873 - RNA, 1410 nt, Artificial Sequence; identical to SEQ ID NO: 144786
  derived and/or modified CDS sequence (opt3) from neuraminidase__InfluenzaA__ADH01931

SEQ ID NO: 146874 - RNA, 1410 nt, Artificial Sequence; identical to SEQ ID NO: 146677
  derived and/or modified CDS sequence (opt3) from neuraminidase__InfluenzaA__ADH01941

SEQ ID NO: 146875 - RNA, 1410 nt, Artificial Sequence; identical to SEQ ID NO: 144786
  derived and/or modified CDS sequence (opt3) from neuraminidase__InfluenzaA__ADH01951

SEQ ID NO: 146876 - RNA, 1410 nt, Artificial Sequence; identical to SEQ ID NO: 144786
  derived and/or modified CDS sequence (opt3) from neuraminidase__InfluenzaA__ADH01961

SEQ ID NO: 146877 - RNA, 1410 nt, Artificial Sequence
  derived and/or modified CDS sequence (opt3) from neuraminidase__InfluenzaA__ADH01981
augaaccccaaucagaagaucauuaccauaggcagcgccugcaugacaaucgggauggcuaaccugauucuccaaaucggaaauauuaucuccauauggaucucucacucaauucagcuugguaaccagaaucagacugagacguguaaccaaagugugaucaccuacgaaaauaacacaugggucaaucagacuuauguuaacauuagcaauaccaacuucgcagccggccaguccgugguaucugugaaacuggcgggaaauucgucauugugcccugucagcggaugggcuaucuacaguaaggacaacuccauaagaauuggcucuaaaggugauguguuuguuaucagggagccauucauuagcuguuccccguuagaaugccggacauuuuuccugacccagggggcccuacucaaugacaagcauucaaacggaacuaucaaagaucgcagucccuaucgaacacugaugagcuguccuaucggcgaggugccaucucccuacaacucccguuuugaaucagucgcauggagcgccagugcuugccacgacggcauuaauuggcuuaccauagggaucucuggaccugauaacggugcaguggccguacugaaguauaauggcauuaucacggacacuauaaaguccuggagaaacaauauuuugaggacccaagagagcgagugugcuugcguuaacgggucguguuucacagugaugacugauggaccaucugacggccaggccuccuacaaaaucuuucggaucgaaaaggguaaaauugucaagucaguggagaugaaugcgcccaacuaucauuacgaagagugcaguuguuacccugauagcuccgagauuaccugcgugugccgcgacaauuggcacgggucuaacagaccaugggucagcuucaaucagaaccucgaauaucagaucggauacauauguucaggcaucuuuggcgauaauccgaggcccaacgacaaaacagggaguugcggaccuguuuccagcaauggugcaaacggcgugaagggguucucuuuuaaguauggaaacggcguauggauuggucggaccaaaucaaucaguagccgcaauggguucgagaugaucugggauccaaacggcuggacgggaacugacaauaacuuuuccauuaagcaagacauagugggcaucaaugaauggucuggguacucggggagcuucguccagcaucccgagcugacaggucuggauuguauucgaccuugcuucuggguggaacucaucagaggcaggccaaaagagaacaccauuuggacuuccgggucaaguaucucuuuuuguggaguuaauagcgacacagugggcugguccuggcccgauggugccgaguuaccguucaccauagacaaguga

SEQ ID NO: 146878 - RNA, 1410 nt, Artificial Sequence; identical to SEQ ID NO: 146074
  derived and/or modified CDS sequence (opt3) from neuraminidase__InfluenzaA__ADH01991

SEQ ID NO: 146879 - RNA, 1410 nt, Artificial Sequence; identical to SEQ ID NO: 146743
  derived and/or modified CDS sequence (opt3) from neuraminidase__InfluenzaA__ADH02011

SEQ ID NO: 146880 - RNA, 1410 nt, Artificial Sequence; identical to SEQ ID NO: 145963
  derived and/or modified CDS sequence (opt3) from neuraminidase__InfluenzaA__ADH02021

SEQ ID NO: 146881 - RNA, 1410 nt, Artificial Sequence; identical to SEQ ID NO: 144786
  derived and/or modified CDS sequence (opt3) from neuraminidase__InfluenzaA__ADI24510

SEQ ID NO: 146882 - RNA, 1410 nt, Artificial Sequence; identical to SEQ ID NO: 144786
  derived and/or modified CDS sequence (opt3) from neuraminidase__InfluenzaA__ADI24516

SEQ ID NO: 146883 - RNA, 1410 nt, Artificial Sequence; identical to SEQ ID NO: 144786
  derived and/or modified CDS sequence (opt3) from neuraminidase__InfluenzaA__ADI24518

SEQ ID NO: 146884 - RNA, 1410 nt, Artificial Sequence; identical to SEQ ID NO: 144786
  derived and/or modified CDS sequence (opt3) from neuraminidase__InfluenzaA__ADI24522

SEQ ID NO: 146885 - RNA, 1410 nt, Artificial Sequence; identical to SEQ ID NO: 144786
  derived and/or modified CDS sequence (opt3) from neuraminidase__InfluenzaA__ADI24524

SEQ ID NO: 146886 - RNA, 1410 nt, Artificial Sequence; identical to SEQ ID NO: 144786
  derived and/or modified CDS sequence (opt3) from neuraminidase__InfluenzaA__ADI24526

SEQ ID NO: 146887 - RNA, 1410 nt, Artificial Sequence; identical to SEQ ID NO: 144786
  derived and/or modified CDS sequence (opt3) from neuraminidase__InfluenzaA__ADI24528

SEQ ID NO: 146888 - RNA, 1410 nt, Artificial Sequence; identical to SEQ ID NO: 144786
  derived and/or modified CDS sequence (opt3) from neuraminidase__InfluenzaA__ADI24530

SEQ ID NO: 146889 - RNA, 1410 nt, Artificial Sequence
  derived and/or modified CDS sequence (opt3) from neuraminidase__InfluenzaA__ADI24532
augaaccccaaucagaagaucauuaccauaggcagcgugugcaugacaaucgggauggccaaccugauucuccaaaucggaaauauuaucuccauauggaucucucacucaauucagcuugguaaccagaaucagaucgagacuuguaaccaaagugucauuacguacgaaaauaacaccuggguuaaucagacauaugugaacaucagcaauacuaacuucgcugcaggccaguccguagugucugucaaacuggccgggaauagcucauugugcccugugagcggaugggcgauauacaguaaggacaacuccauuagaaucggcucuaaaggugauguuuuugugauuagggagccauucaucagcuguuccccguuagaaugccggaccuuuuuccugacacagggggcucuacucaaugacaagcauucaaacggaaccaucaaagaucgcagucccuaucgaacucugaugagcuguccuauuggcgaggucccaucucccuacaacucccguuuugaaucaguggccuggagcgcaagugccugccacgacggcauaaauuggcuuacaaucgggauuucuggaccugauaacggugcuguagcaguucugaaguauaauggcaucauaaccgacacgauuaaguccuggagaaacaauaucuugaggacucaagagagcgagugugccugcgugaacgggucguguuucaccgucaugacagauggaccaucugacggccaggcuuccuacaaaaucuuucggauugaaaaggguaaaaucgugaagucaguggagaugaaugcccccaacuaucauuacgaagagugcaguuguuacccugauagcuccgagauuacuugcgucugccgcgacaauuggcacgggucuaacagaccauggguuagcuucaaucagaaccucgaauaucagauaggauacaucuguucaggcauuuuuggcgauaauccgaggcccaacgacaaaaccgggaguugcggaccuguguccagcucuggugcgaauggcguaaagggguucucauuuaaguauggaaacggcguguggaucggucggacaaaaaguaucagcucccgcaacggguucgagaugauuugggauccaaauggcuggaccggaacggacaacaauuuuucuauaaagcaagacaucgucggcauuaacgaauggucgggguacagcggauccuucgugcagcaucccgagcugacuggucuggauuguauccgaccuugcuucuggguugaacucauuagaggcaggccaaaagagaauacaaucuggaccucagggaguucuauaucguuuuguggagugaacuccgacacugucggcuggucauggcccgauggugcagaguuaccguucacaaucgacaaguga

SEQ ID NO: 146890 - RNA, 1410 nt, Artificial Sequence; identical to SEQ ID NO: 144786
  derived and/or modified CDS sequence (opt3) from neuraminidase__InfluenzaA__ADI24538

SEQ ID NO: 146891 - RNA, 1410 nt, Artificial Sequence; identical to SEQ ID NO: 144786
  derived and/or modified CDS sequence (opt3) from neuraminidase__InfluenzaA__ADI24548

SEQ ID NO: 146892 - RNA, 1410 nt, Artificial Sequence; identical to SEQ ID NO: 144786
  derived and/or modified CDS sequence (opt3) from neuraminidase__InfluenzaA__ADI24556

SEQ ID NO: 146893 - RNA, 1410 nt, Artificial Sequence; identical to SEQ ID NO: 144786
  derived and/or modified CDS sequence (opt3) from neuraminidase__InfluenzaA__ADI24558

SEQ ID NO: 146894 - RNA, 1410 nt, Artificial Sequence; identical to SEQ ID NO: 144786
  derived and/or modified CDS sequence (opt3) from neuraminidase__InfluenzaA__ADI24560

SEQ ID NO: 146895 - RNA, 1410 nt, Artificial Sequence; identical to SEQ ID NO: 144786
  derived and/or modified CDS sequence (opt3) from neuraminidase__InfluenzaA__ADI24562

SEQ ID NO: 146896 - RNA, 1410 nt, Artificial Sequence; identical to SEQ ID NO: 144786
  derived and/or modified CDS sequence (opt3) from neuraminidase__InfluenzaA__ADI24564

SEQ ID NO: 146897 - RNA, 1410 nt, Artificial Sequence; identical to SEQ ID NO: 144786
  derived and/or modified CDS sequence (opt3) from neuraminidase__InfluenzaA__ADI24566

SEQ ID NO: 146898 - RNA, 1410 nt, Artificial Sequence; identical to SEQ ID NO: 144786
  derived and/or modified CDS sequence (opt3) from neuraminidase__InfluenzaA__ADI24568

SEQ ID NO: 146899 - RNA, 1410 nt, Artificial Sequence; identical to SEQ ID NO: 144786
  derived and/or modified CDS sequence (opt3) from neuraminidase__InfluenzaA__ADI24570

SEQ ID NO: 146900 - RNA, 1410 nt, Artificial Sequence; identical to SEQ ID NO: 144786
  derived and/or modified CDS sequence (opt3) from neuraminidase__InfluenzaA__ADI24572

SEQ ID NO: 146901 - RNA, 1410 nt, Artificial Sequence; identical to SEQ ID NO: 144786
  derived and/or modified CDS sequence (opt3) from neuraminidase__InfluenzaA__ADI24574

SEQ ID NO: 146902 - RNA, 1410 nt, Artificial Sequence; identical to SEQ ID NO: 144786
  derived and/or modified CDS sequence (opt3) from neuraminidase__InfluenzaA__ADI24576

SEQ ID NO: 146903 - RNA, 1410 nt, Artificial Sequence; identical to SEQ ID NO: 144786
  derived and/or modified CDS sequence (opt3) from neuraminidase__InfluenzaA__ADI24580

SEQ ID NO: 146904 - RNA, 1410 nt, Artificial Sequence; identical to SEQ ID NO: 145961
  derived and/or modified CDS sequence (opt3) from neuraminidase__InfluenzaA__ADI24582

SEQ ID NO: 146905 - RNA, 1410 nt, Artificial Sequence
  derived and/or modified CDS sequence (opt3) from neuraminidase__InfluenzaA__ADI24584
augaaccccaaucagaagaucauuaccauaggcagcgugugcaugacaaucgggauggccaaccugauucuccaaaucggaaauauuaucuccauauggaucucucacucaauucagcuugguaaccagaaucagaucgagacuuguaaccaaagugucauuacguacgaaaauaacaccuggguuaaucagacauaugugaacaucagcaauacuaacuucgcugcaggccaguccguagugccugucaaacuggccggaaauucuucguugugcccagugaacgggugggcgauauacucaaaggacaauagcauuagaaucggcaguaaaggugauguuuuugugauuagggagccguucaucuccuguucucccuuagaaugccggaccuuuuuccugacacagggggcucuacucaacgacaagcauagcaacggaaccaucaaagaucgcuccccuuaucgaacucugaugucauguccaauuggcgagguccccaguccuuacaauagccguuuugaaucuguggccugguccgcaucagccugccacgacggcauaaacuggcuuacaaucgggauuagcggaccagauaauggugcuguagcaguucugaaguauaacggcaucauaaccgacacgauuaagaguuggagaaauaacaucuugaggacucaagagucugagugugccugcgugaauggguccuguuucaccgucaugacagauggacccagcgacggccaggcuucguacaaaaucuuucggauugaaaaggguaaaaucgugaagucuguggagaugaacgccccuaauuaucauuacgaagagugcuccuguuacccagauucaagugagauuacuugcgucugccgcgacaacuggcacgggagcaauagaccguggguuuccuucaaccagaaucucgaauaucagauaggauacaucuguucuggcauuuuuggcgauaaccccaggccuaaugacaaaaccgggagcugcggaccagugucaaguaacggugcgaacggcguaaagggguucuccuuuaaguauggaaauggcguguggaucggucggacaaaaagcaucucuucacgcaacggguucgagaugauuugggaucccaauggcuggaccggaacggacaacaauuuuaguauaaagcaagacaucgucggcauuaacgaauggagcggguacuccggaucuuucgugcagcauccugagcugacuggucuggauuguauccgaccaugcuucuggguugaacucauuagaggcaggcccaaagagaauacaaucuggaccucggggagcuccauaucauuuuguggagugaacagugacacugucggcuggucuuggccggauggugcagaguuaccuuucacaaucgacaaguga

SEQ ID NO: 146906 - RNA, 1410 nt, Artificial Sequence; identical to SEQ ID NO: 145140
  derived and/or modified CDS sequence (opt3) from neuraminidase__InfluenzaA__ADI24592

SEQ ID NO: 146907 - RNA, 1410 nt, Artificial Sequence; identical to SEQ ID NO: 144786
  derived and/or modified CDS sequence (opt3) from neuraminidase__InfluenzaA__ADI24598

SEQ ID NO: 146908 - RNA, 1410 nt, Artificial Sequence; identical to SEQ ID NO: 144786
  derived and/or modified CDS sequence (opt3) from neuraminidase__InfluenzaA__ADI24604

SEQ ID NO: 146909 - RNA, 1410 nt, Artificial Sequence; identical to SEQ ID NO: 144786
  derived and/or modified CDS sequence (opt3) from neuraminidase__InfluenzaA__ADI24620

SEQ ID NO: 146910 - RNA, 1410 nt, Artificial Sequence; identical to SEQ ID NO: 144786
  derived and/or modified CDS sequence (opt3) from neuraminidase__InfluenzaA__ADI24622

SEQ ID NO: 146911 - RNA, 1410 nt, Artificial Sequence; identical to SEQ ID NO: 145140
  derived and/or modified CDS sequence (opt3) from neuraminidase__InfluenzaA__ADI46780

SEQ ID NO: 146912 - RNA, 1410 nt, Artificial Sequence
  derived and/or modified CDS sequence (opt3) from neuraminidase__InfluenzaA__ADI46789
augaaccccaaucagaagaucauuaccauaggcagcgugugcaugacaaucgggauggccaaccugaugcuccaaauuggaaauaucauuuccaucuggauaucucacucaauccagcuugguaaccagaaucagauugagacuuguaaccaaagugucaucacguacgaaaauaacaccuggguuaaucagacauaugugaacauuagcaauacuaacuucgcugcaggccaguccguagugucugucaaacuggccggaaauucgucauugugcccugugagcgggugggcgaucuacaguaaggacaacuccguuagaauaggcucuaaaggugauguguuugucauuagggagccauucaucagcuguuccccguuagaaugccggaccuuuuuccugacacagggggcucuacucaaugacaagcauucaaacggaaccauuaaagaucgcagucccuaucgaacucugaugagcuguccuaucggcgaggugccaucucccuacaacucccguuuugaaucaguagccuggagcgcaagugccugccacgacggcaucaauuggcuuacaauugggauaucuggaccugauaacggugcuguugcagugcugaaguauaauggcaucauuaccgacacgaucaaguccuggagaaacaauauauugaggacucaagagagcgagugugccugcgucaacgggucguguuucaccgugaugacagauggaccaucuaaugaacaggcuuccuacaaaauuuuucggaucgagaagggcaaaaucgugaagucagucgaaaugaacgcccccaauuaucauuacgaggagugcaguuguuacccugacagcuccgaaauuacuugcguuugccgcgauaacuggcacgguucuaauagaccaugggugagcuucaaccagaaucucgaguaucagaucggguacauuuguucaggaauauuuggcgacaacccgaggcccaaugauaaaaccggcaguugcgggccuguauccagcaacggagcgaacggugugaagggcuucucuuuuaaguaugggaauggagucuggaucggccggacaaaaucaauuaguagccgcaacgguuucgaaaugaucugggacccaaauggguggaccggcacggauaacaauuuuuccaucaagcaagacauugugggaauaaacgaguggucuggcuacucggggagcuucguucagcaucccgaacugacuggacuggacuguauccgaccuugcuucuggguggagcucauuagagguaggccaaaagagaauacaaucuggaccuccggcucaaguauuucuuuuuguggggucaacagcgauacugugggaugguccuggcccgacggcgcagaauuaccguucacaaucgauaaguga

SEQ ID NO: 146913 - RNA, 1410 nt, Artificial Sequence; identical to SEQ ID NO: 144786
  derived and/or modified CDS sequence (opt3) from neuraminidase__InfluenzaA__ADI48185

SEQ ID NO: 146914 - RNA, 1410 nt, Artificial Sequence; identical to SEQ ID NO: 144786
  derived and/or modified CDS sequence (opt3) from neuraminidase__InfluenzaA__ADI48187

SEQ ID NO: 146915 - RNA, 1410 nt, Artificial Sequence; identical to SEQ ID NO: 144786
  derived and/or modified CDS sequence (opt3) from neuraminidase__InfluenzaA__ADI48189

SEQ ID NO: 146916 - RNA, 1410 nt, Artificial Sequence; identical to SEQ ID NO: 144786
  derived and/or modified CDS sequence (opt3) from neuraminidase__InfluenzaA__ADI48191

SEQ ID NO: 146917 - RNA, 1410 nt, Artificial Sequence; identical to SEQ ID NO: 144786
  derived and/or modified CDS sequence (opt3) from neuraminidase__InfluenzaA__ADI48193

SEQ ID NO: 146918 - RNA, 1410 nt, Artificial Sequence; identical to SEQ ID NO: 144786
  derived and/or modified CDS sequence (opt3) from neuraminidase__InfluenzaA__ADI48195

SEQ ID NO: 146919 - RNA, 1410 nt, Artificial Sequence
  derived and/or modified CDS sequence (opt3) from neuraminidase__InfluenzaA__ADI48197
augaaccccaaucagaagaucauuaccauaggcagcgugugcaugacaaucgggauggccaaccugauucuccaaaucggaaauauuaucuccauauggaucucucacucaauucaguucgguaaccagaaucagaucgagacuuguaaccaaagugucauuacguacgaaaauaacaccuggguuaaucagacauaugugaacaucagcaauacuaacuuugcugcaggccaguccguagugucugucaaacuugccggaaauucgucacugugcccugugagcggaugggcgauauacaguaaggacaacuccauuagaaucggcucuaaaggugauguuuucgugauuagggagccauuuaucagcuguuccccguuggaaugccggaccuucuuuuuaacacagggggcucugcuaaaugacaagcauucaaacggaaccaucaaagaucgcagucccuaucgaacucucaugagcuguccuauuggcgaggucccaucucccuacaacucccguuucgaaucaguggccuggagcgcaagugccugccacgacggcauaaauuggcugacaaucgggauuucuggaccugauaacggugcuguagcaguucuuaaguauaauggcaucauaaccgacacgauuaaguccuggagaaacaauauccugaggacucaagagagcgagugugccugcgugaacgggucguguuuuaccgucaugacagauggaccaucugacggccaggcuuccuacaaaaucuuccggauugaaaaggguaaaaucgugaagucaguggagaugaaugcccccaacuaucauuacgaagagugcaguuguuacccugauagcuccgagauuacuugcgucugccgcgacaauuggcacgggucuaacagaccauggguuagcuuuaaucagaacuuggaauaucagauaggauacaucuguucaggcauuuucggcgauaauccgaggcccaacgacaaaaccgggaguugcggaccuguguccagcaauggugcgaacggcguaaagggguuuucuuucaaguauggaaacggcguguggaucggucggacaaaaucaaucaguagccgcaauggguuugagaugauuugggauccaaacggcuggaccggaacggacaauaacuucuccauaaagcaagacaucgucggcauuaaugaauggucuggguacucggggagcuucgugcagcaucccgagcucacuggucuggauuguauccgaccuugcuuuuggguugaacugauuagaggcaggccaaaagagaacacaaucuggaccuccgggucaaguauaucuuucuguggagugaauagcgacacugucggcugguccuggcccgauggugcagagcucccguuuacaaucgacaaguga

SEQ ID NO: 146920 - RNA, 1410 nt, Artificial Sequence; identical to SEQ ID NO: 144786
  derived and/or modified CDS sequence (opt3) from neuraminidase__InfluenzaA__ADI48199

SEQ ID NO: 146921 - RNA, 1410 nt, Artificial Sequence; identical to SEQ ID NO: 144786
  derived and/or modified CDS sequence (opt3) from neuraminidase__InfluenzaA__ADI48201

SEQ ID NO: 146922 - RNA, 1410 nt, Artificial Sequence; identical to SEQ ID NO: 144786
  derived and/or modified CDS sequence (opt3) from neuraminidase__InfluenzaA__ADI48203

SEQ ID NO: 146923 - RNA, 1410 nt, Artificial Sequence
  derived and/or modified CDS sequence (opt3) from neuraminidase__InfluenzaA__ADI48205
augaaccccaaucagaagaucauuaccauaggcagcgugugcaugacaaucgggauggccaaccugauucuccaaaucggaaauauuaucuccauauggaucucucacucaauucagcuugguaaccagaaucagaucgagacuuguaaccaaagugucauuacguacgaaaauaacaccuggguuaaucagacauaugugaacaucagcaauacuaacuucgcugcaggccaguccguagugucugucaaacuggccggaaauucgucauugugcccugugagcggaugggcgauauacaguaaggacaacuccauuagaaucggcucuaaaggugauguuuuugugauuagggagccauucaucagcuguucccauuuagaaugccggaccuuuuuccugacacagggggcucuacucaaugacaagcacucaaacggaaccaucaaagaucgcaguccguaucgaacucugaugagcugucccauuggcgaggucccuucuccauacaacucccguuuugaaucaguggccuggagcgcaagugccugccaugacggcauaaauuggcuuacaaucgggauuucuggacccgauaacggugcuguagcaguucugaaguauaauggcaucauaaccgacacgauuaaguccuggagaaacaauaucuugaggacucaagagagcgagugugccugcgugaacgggucguguuucaccgucaugacagauggaccuucugacggccaggcuuccuacaaaaucuuucggauugaaaaggguaaaaucgugaagucaguggagaugaaugccccaaacuaucacuacgaagagugcaguuguuaccccgauagcuccgagauuacuugcgucugccgcgacaauuggcaugggucuaacagaccuuggguuagcuucaaucagaaccucgaauaucagauaggauacaucuguucaggcauuuuuggcgauaauccaaggccgaacgacaaaaccgggaguugcggacccguguccagcaauggugcgaacggcguaaagggguucucuuuuaaguauggaaacggcguguggaucggucggacaaaaucaaucaguagccgcaauggguucgagaugauuugggauccuaacggcuggaccggaacggacaauaacuuuuccauaaagcaagacaucgucggcauuaaugaauggucuggguacucggggagcuucgugcagcacccagagcugacuggucuggauuguauccgacccugcuucuggguugaacucauuagaggcaggccuaaagagaacacaaucuggaccuccgggucaaguauaucuuuuuguggagugaauagcgacacugucggcugguccuggccagauggugcagaguuacccuucacaaucgacaaguga

SEQ ID NO: 146924 - RNA, 1410 nt, Artificial Sequence; identical to SEQ ID NO: 144786
  derived and/or modified CDS sequence (opt3) from neuraminidase__InfluenzaA__ADI48207

SEQ ID NO: 146925 - RNA, 1410 nt, Artificial Sequence; identical to SEQ ID NO: 144786
  derived and/or modified CDS sequence (opt3) from neuraminidase__InfluenzaA__ADI48209

SEQ ID NO: 146926 - RNA, 1410 nt, Artificial Sequence; identical to SEQ ID NO: 144786
  derived and/or modified CDS sequence (opt3) from neuraminidase__InfluenzaA__ADI48211

SEQ ID NO: 146927 - RNA, 1410 nt, Artificial Sequence; identical to SEQ ID NO: 144786
  derived and/or modified CDS sequence (opt3) from neuraminidase__InfluenzaA__ADI48213

SEQ ID NO: 146928 - RNA, 1410 nt, Artificial Sequence; identical to SEQ ID NO: 144786
  derived and/or modified CDS sequence (opt3) from neuraminidase__InfluenzaA__ADI48215

SEQ ID NO: 146929 - RNA, 1410 nt, Artificial Sequence; identical to SEQ ID NO: 144786
  derived and/or modified CDS sequence (opt3) from neuraminidase__InfluenzaA__ADI48217

SEQ ID NO: 146930 - RNA, 1410 nt, Artificial Sequence; identical to SEQ ID NO: 144786
  derived and/or modified CDS sequence (opt3) from neuraminidase__InfluenzaA__ADI48219

SEQ ID NO: 146931 - RNA, 1410 nt, Artificial Sequence; identical to SEQ ID NO: 144786
  derived and/or modified CDS sequence (opt3) from neuraminidase__InfluenzaA__ADI48221

SEQ ID NO: 146932 - RNA, 1410 nt, Artificial Sequence; identical to SEQ ID NO: 144786
  derived and/or modified CDS sequence (opt3) from neuraminidase__InfluenzaA__ADI48625

SEQ ID NO: 146933 - RNA, 1410 nt, Artificial Sequence; identical to SEQ ID NO: 144786
  derived and/or modified CDS sequence (opt3) from neuraminidase__InfluenzaA__ADI48635

SEQ ID NO: 146934 - RNA, 1410 nt, Artificial Sequence; identical to SEQ ID NO: 144786
  derived and/or modified CDS sequence (opt3) from neuraminidase__InfluenzaA__ADI48655

SEQ ID NO: 146935 - RNA, 1410 nt, Artificial Sequence; identical to SEQ ID NO: 144786
  derived and/or modified CDS sequence (opt3) from neuraminidase__InfluenzaA__ADI48665

SEQ ID NO: 146936 - RNA, 1410 nt, Artificial Sequence
  derived and/or modified CDS sequence (opt3) from neuraminidase__InfluenzaA__ADI48675
augaaccccaaucagaagaucauuaccauaggcagcgugugcaugacaaucgggauggccaaccugauucuccaaaucggaaauauuaucuccauauggaucucucacucaauucagcuugguaaccagaaucagaucgagacuuguaaccaaagugucauuacguacgaaaauaacaccuggguuaaucagacauaugugaacaucagcaauacuaacuucgcugcaggccaguccguagugucugucaaacuggccggaaauucgucauugugcccugugagcggaugggcgauauacaguaaggacaacuccauuagaaucggcucuaaaggugauguuuuugugauuagggagccauucaucagcuguuccccguuagaaugccggaccuuuuuccugacacagggggcucuacucaaugacaagcauucaaacggaaccaucaaagaucgcagucccuaucgaacucugaugagcuguccuauuggcgaggucccaucucccuacaacucccguuuugaaucaguggccuggagcgcaagugccugccacgacggcauaaauuggcuuacaaucgggauuucuggaccugauaacggugcuguagcaguucugaaguauaauggcaucauaaccgacacgauuaaguccuggagaaacaauaucuugaggacucaagagagcgagugugccugcgugaacgggucguguuucaccgucaugacagauggaccaucugacggccaggcuuccuacaaaaucuuucggauugaaaaggguaaaaucgugaagucaguggagaugaaugcccccaacuaucauuacgaagagugcaguuguuacccugauagcuccgagauuacuugcgucugccgcgacaauuggcacgggucuaacagaccauggguuagcuucaaucagaaccucgaauaucagauaggauacaucuguucaggcauuuuuggcgauaauccgaggcccaacgacaaaaccgggaguugcggaccuguguccagcaauggugcgaacggcguaaagggguucucuuuuaaguauggaaacggcguguggaucggucggacaaaaucaaucaguagccgcaauggguucgagaugauuugggauccaaacggcuggaccggaacggacaauaacuuuuccauaaagcaagacaucgucggcauuaaugaauggucuggguacucggggagcuucgugcagcaucccgagcugacuggucuggauuguauccgaccuugcuucuggguugaacucauuagaggcagguuaaaagagaacacaaucuggaccuccgggucaaguauaucuuuuuguggagugaauagcgacacugucggcugguccuggccagauggugcagagcugcccuucacaaucgacaaguga

SEQ ID NO: 146937 - RNA, 1410 nt, Artificial Sequence
  derived and/or modified CDS sequence (opt3) from neuraminidase__InfluenzaA__ADI48685
augaaccccaaucagaagaucauuaccauaggcagcgugugcaugacaaucgggauggccaaccugauucuccaaaucggaaauauuaucuccauauggaucucucacucaauucagcuugguaaccagaaucagaucgagacuuguaaccaaagugucauuacguacgaaaauaacaccuggguuaaucagacauaugugaacaucagcaauacuaacuucgcugcaggccaguccguagugucugucaaacuggccggaaauucgucauugugcccugugagcgggugggcgauauacaguaaggacaacuccauuagaaucggcucuaaaggugauguuuuugugauuagggagccauucaucagcuguuccccguuagaaugccggaccuuuuuccugacacagggggcucuacucaaugacaagcauucaaacggaaccaucaaagaucgcagucccuaucgaacucugaugagcuguccuauuggcgaggucccaucucccuacaacucccguuuugaaucaguggccuggagcgcaagugccugccacgacggcauaaauuggcuuacaaucgggauuucuggaccugauaacggugcuguagcaguucugaaguauaauggcaucauaaccgacacgauuaaguccuggagaaacaauaucuugaggacucaagagagcgagugugccugcgugaacggggcuuguuucaccgucaugacagauggaccaucggacggccaggccucuuacaaaaucuuucggauugaaaaggguaaaaucgugaaguccguggagaugaaugcgcccaacuaucauuacgaagagugcucauguuacccugauaguagcgagauuacuugcgucugccgcgacaauuggcacggguccaacagaccauggguuucuuucaaucagaaccucgaauaucagauaggauacaucuguagcggcauuuuuggcgauaauccgaggcccaacgacaaaaccgggucaugcggaccugugaguuccaauggugcaaacggcguaaagggguucagcuuuaaguauggaaacggcguguggaucggucggacaaaaucuaucucaagucgcaauggguucgagaugauuugggauccaaacggcuggaccggaacggacaauaacuuuagcauaaagcaagacaucgucggcauuaaugaaugguccggguacucuggaucguucgugcagcaucccgagcugacuggucuggauuguauccgaccuugcuucuggguugaacucauuagaggcaggccaaaagagaacacaaucuggaccagcggguccucaauaaguuuuuguggagucaauucugacacugugggcuggagcuggcccgauggugccgaguuaccguucacaaucgacaaguga

SEQ ID NO: 146938 - RNA, 1410 nt, Artificial Sequence; identical to SEQ ID NO: 144786
  derived and/or modified CDS sequence (opt3) from neuraminidase__InfluenzaA__ADI48695

SEQ ID NO: 146939 - RNA, 1410 nt, Artificial Sequence; identical to SEQ ID NO: 144776
  derived and/or modified CDS sequence (opt3) from neuraminidase__InfluenzaA__ADI48705

SEQ ID NO: 146940 - RNA, 1410 nt, Artificial Sequence; identical to SEQ ID NO: 144786
  derived and/or modified CDS sequence (opt3) from neuraminidase__InfluenzaA__ADI48715

SEQ ID NO: 146941 - RNA, 1410 nt, Artificial Sequence; identical to SEQ ID NO: 144786
  derived and/or modified CDS sequence (opt3) from neuraminidase__InfluenzaA__ADI48725

SEQ ID NO: 146942 - RNA, 1410 nt, Artificial Sequence; identical to SEQ ID NO: 144786
  derived and/or modified CDS sequence (opt3) from neuraminidase__InfluenzaA__ADI48735

SEQ ID NO: 146943 - RNA, 1410 nt, Artificial Sequence; identical to SEQ ID NO: 144786
  derived and/or modified CDS sequence (opt3) from neuraminidase__InfluenzaA__ADI48745

SEQ ID NO: 146944 - RNA, 1410 nt, Artificial Sequence
  derived and/or modified CDS sequence (opt3) from neuraminidase__InfluenzaA__ADI48755
augaaccccaaucagaagaucauuaccauaggcagcgugugcaugacaaucgggauggccaaccugauucuccaaaucggaaauauuaucuccauauggaucucucacucaauucagcuugguaaccagaaucagaucgagacuuguaaccaaagugucauuacguacgaaaauaacaccuggguuaaucagacauaugugaacaucagcaauacuaacuucgcugcaggccaguccguagugucugucaaacuggccgggaauagcucauugugcccugugagcggaugggcgauauacaguaaggacaacuccauuagaaucggcucuaaaggugauguuuuugugauuagggagccauucaucagcuguuccccguuagaaugccggaccuuuuuccugacacagggggcucuacucaaugacaagcauucaaacggaaccaucaaagaucgcagucccuaucgaacucugaugagcuguccuauuggcgaggucccaucucccuacaacucccguuuugaaucaguggccuggagcgcaagugccugccacgacggcauaaauuggcuuacaaucgggauuucuggaccugauaacggugcuguagcaguucugaaguauaauggcaucauauccgacaccauuaagagcuggagaaacaauaucuugaggacgcaagagucggagugugccugcgugaacgggucuuguuucacugucaugaccgauggaccauccgacggccaggcuucauacaaaaucuuucggauugaaaaggguaaaaucgugaagaguguggagaugaaugcccccaacuaucauuacgaagagugcagcuguuacccugauuccucugagauuacaugcgucugccgcgacaauuggcacgggagcaacagaccauggguuucauucaaucagaaccucgaauaucagauaggauacaucuguaguggcauuuuuggcgauaauccgaggcccaacgacaaaacuggguccugcggaccugugagcucuaauggugcgaacggcguaaagggguucucauuuaaguauggaaacggcguguggaucggucggaccaaaaguaucagcucccgcaauggguucgagaugauuugggauccaaacggcuggacaggaaccgacaauaacuuuucuauaaagcaagacaucgucggcauuaaugaauggucgggguacagcggauccuucgugcagcaucccgagcugacgggucuggauuguauccgaccuugcuucuggguugaacucauuagaggcaggccaaaagagaacacuaucuggacaucagggaguucuauaucguuuuguggagucaauuccgacaccgugggcuggucauggcccgauggugcagaguuaccguucacuaucgacaaguga

SEQ ID NO: 146945 - RNA, 1410 nt, Artificial Sequence; identical to SEQ ID NO: 144786
  derived and/or modified CDS sequence (opt3) from neuraminidase__InfluenzaA__ADI48765

SEQ ID NO: 146946 - RNA, 1410 nt, Artificial Sequence; identical to SEQ ID NO: 144786
  derived and/or modified CDS sequence (opt3) from neuraminidase__InfluenzaA__ADI48775

SEQ ID NO: 146947 - RNA, 1410 nt, Artificial Sequence; identical to SEQ ID NO: 144786
  derived and/or modified CDS sequence (opt3) from neuraminidase__InfluenzaA__ADI48785

SEQ ID NO: 146948 - RNA, 1410 nt, Artificial Sequence; identical to SEQ ID NO: 144786
  derived and/or modified CDS sequence (opt3) from neuraminidase__InfluenzaA__ADI48795

SEQ ID NO: 146949 - RNA, 1410 nt, Artificial Sequence; identical to SEQ ID NO: 144786
  derived and/or modified CDS sequence (opt3) from neuraminidase__InfluenzaA__ADI49032

SEQ ID NO: 146950 - RNA, 1410 nt, Artificial Sequence; identical to SEQ ID NO: 144786
  derived and/or modified CDS sequence (opt3) from neuraminidase__InfluenzaA__ADI49243

SEQ ID NO: 146951 - RNA, 1410 nt, Artificial Sequence; identical to SEQ ID NO: 144786
  derived and/or modified CDS sequence (opt3) from neuraminidase__InfluenzaA__ADI49263

SEQ ID NO: 146952 - RNA, 1410 nt, Artificial Sequence; identical to SEQ ID NO: 144786
  derived and/or modified CDS sequence (opt3) from neuraminidase__InfluenzaA__ADI49273

SEQ ID NO: 146953 - RNA, 1410 nt, Artificial Sequence; identical to SEQ ID NO: 144786
  derived and/or modified CDS sequence (opt3) from neuraminidase__InfluenzaA__ADI49283

SEQ ID NO: 146954 - RNA, 1410 nt, Artificial Sequence; identical to SEQ ID NO: 144786
  derived and/or modified CDS sequence (opt3) from neuraminidase__InfluenzaA__ADI49315

SEQ ID NO: 146955 - RNA, 1410 nt, Artificial Sequence; identical to SEQ ID NO: 144786
  derived and/or modified CDS sequence (opt3) from neuraminidase__InfluenzaA__ADI49325

SEQ ID NO: 146956 - RNA, 1410 nt, Artificial Sequence; identical to SEQ ID NO: 144786
  derived and/or modified CDS sequence (opt3) from neuraminidase__InfluenzaA__ADI49335

SEQ ID NO: 146957 - RNA, 1410 nt, Artificial Sequence
  derived and/or modified CDS sequence (opt3) from neuraminidase__InfluenzaA__ADI49345
augaaccccaaucagaagaucauuaccauaggcagcgugugcaugacaaucgggauggccaaccugauucuccaaaucggaaauauuaucuccauauggaucucucacucaauucagcuugguaaccagaaucagaucgagacuuguaaccaaagugucauuacguacgaaaauaacaccuggguuaaucagacauaugugaacaucagcaauacuaaccuggcugcaggccaguccguagugucugucaaauuggccggaaauucgucauuaugcccugugagcggaugggcgauauacaguaaggacaacuccauuagaaucggcucuaaaggugauguuuucgugauuagggagccauuuaucagcuguuccccgcuggaaugccggaccuucuuucuaacacagggggcucuccugaaugacaagcauucaaacggaaccaucaaagaucgcagucccuaucgaacucuuaugagcuguccuauuggcgacgucccaucucccuacaacucccguuucgagucaguggccuggagcgcaagugccugccacgauggcauaaauuggcugacaaucgggauuucuggaccugacaacggugcuguagcaguuuugaaguauaauggcaucauaaccgauacgauuaaguccuggagaaacaauauccucaggacucaagaaagcgagugugccugcgugaacgggucguguuuuaccgucaugacagacggaccaucugauggccaggcuuccuacaaaaucuuccggauugagaaggguaaaaucgugaagucaguggaaaugaaugcccccaacuaucauuacgaggaaugcaguuguuacccugacagcuccgagauuacuugcgucugccgcgauaauuggcacgggucuaacagaccauggguuagcuuuaaucagaaccuggaguaucagauaggauacaucuguucaggcauuuucggcgacaauccgaggcccaacgauaaaaccgggaguugcggaccuguguccagcaauggugcgaacggcguaaagggguuuucuuucaaguauggaaacggcguguggaucggucggacaaaaucaaucaguagccgcaauggguuugaaaugauuugggacccaaacggcuggaccggaacggacaauaacuucuccauaaagcaagauaucgucggcauuaaugaguggucuggguacucggggagcuuugugcagcaucccgaacugacuggucucgacuguauccgaccuugcuucuggguugaguuaauuagaggcaggccaaaagaaaacacaaucuggaccuccgggucaaguauaucuuucuguggagugaauagcgauacugucggcugguccuggcccgacggugcagagcugccguuuacaaucgauaaguga

SEQ ID NO: 146958 - RNA, 1410 nt, Artificial Sequence; identical to SEQ ID NO: 144786
  derived and/or modified CDS sequence (opt3) from neuraminidase__InfluenzaA__ADI49355

SEQ ID NO: 146959 - RNA, 1410 nt, Artificial Sequence; identical to SEQ ID NO: 144786
  derived and/or modified CDS sequence (opt3) from neuraminidase__InfluenzaA__ADI49365

SEQ ID NO: 146960 - RNA, 1410 nt, Artificial Sequence; identical to SEQ ID NO: 144786
  derived and/or modified CDS sequence (opt3) from neuraminidase__InfluenzaA__ADI49375

SEQ ID NO: 146961 - RNA, 1410 nt, Artificial Sequence; identical to SEQ ID NO: 144786
  derived and/or modified CDS sequence (opt3) from neuraminidase__InfluenzaA__ADI49385

SEQ ID NO: 146962 - RNA, 1410 nt, Artificial Sequence
  derived and/or modified CDS sequence (opt3) from neuraminidase__InfluenzaA__ADI49395
augaaccccaaucagaagaucauuaccauaggcagcgugugcaugacaaucgggauggccaaccugauucuccaaaucggaaauaugauuuccaucuggauaucucacucaauccagcuugguaaccagaaucagauugagacuuguaaccaaagugucaucacguacgaaaauaacaccuggguuaaucagacauaugugaacauuagcaauacuaacuucgcugcaggccaguccguagugucugucaaacuggccggaaauucgucauugugcccugugagcggaugggcgaucuacaguaaggacaacuccauaagaauuggcucuaaaggugauguuuuugugaucagggagccauucauuagcuguuccccguuagaaugccggaccuuuuuccugacacagggggcucuacucaaugacaagcauucaaacggaaccaucaaagaucgcagucccuaucgaacucugaugagcuguccuaucggcgaggucccaucucccuacaacucccguuuugaaucaguggccuggagcgcaagugccugccacgacggcauuaauuggcuuacaauagggaucucuggaccugauaacggugcuguagcaguucugaaguauaauggcauuaucaccgacacgauaaaguccuggagaaacaauauuuugaggacucaagagagcgagugugccugcgugaacgggucguguuucaccgucaugacagauggaccaucugacggccaggcuuccuacaaaaucuuucggaucgaaaaggguaaaauugugaagucaguggagcucaaugcccccaacuaucauuacgaagagugcaguuguuacccugauagcuccgagaucacuugcgucugccgcgacaauuggcacgggucuaacagaccauggguuagcuucaaucagaaccuggaauaucagauuggauacauauguucaggcaucuuuggcgauaauccgaggcccaacgacaaaaccgggaguugcggaccuguguccagcaauggugcgaacggcguaaagggguucucuuuuaaguauggaaacggcguguggauuggucggacaaaaucaaucaguagccgcaauggguucgagaugaucugggauccaaacggcuggaccggaacggacaauaacuuuuccauuaagcaagacauagucggcaucaaugaauggucuggguacucggggagcuucgugcagcaucccgagcugacuggucucgauuguauucgaccuugcuucuggguugaauuaaucagaggcaggccaaaagagaacacaauuuggaccuccgggucaaguaucucuuuuuguggagugaauagcgacacugucggcugguccuggcccgauggugcagagcugccguucacaauagacaaguga

SEQ ID NO: 146963 - RNA, 1410 nt, Artificial Sequence; identical to SEQ ID NO: 144786
  derived and/or modified CDS sequence (opt3) from neuraminidase__InfluenzaA__ADI49720

SEQ ID NO: 146964 - RNA, 1410 nt, Artificial Sequence; identical to SEQ ID NO: 144786
  derived and/or modified CDS sequence (opt3) from neuraminidase__InfluenzaA__ADI49730

SEQ ID NO: 146965 - RNA, 1410 nt, Artificial Sequence; identical to SEQ ID NO: 144786
  derived and/or modified CDS sequence (opt3) from neuraminidase__InfluenzaA__ADI49740

SEQ ID NO: 146966 - RNA, 1410 nt, Artificial Sequence; identical to SEQ ID NO: 144786
  derived and/or modified CDS sequence (opt3) from neuraminidase__InfluenzaA__ADI49750

SEQ ID NO: 146967 - RNA, 1410 nt, Artificial Sequence; identical to SEQ ID NO: 144786
  derived and/or modified CDS sequence (opt3) from neuraminidase__InfluenzaA__ADI49760

SEQ ID NO: 146968 - RNA, 1410 nt, Artificial Sequence; identical to SEQ ID NO: 144816
  derived and/or modified CDS sequence (opt3) from neuraminidase__InfluenzaA__ADI49780

SEQ ID NO: 146969 - RNA, 1410 nt, Artificial Sequence; identical to SEQ ID NO: 144776
  derived and/or modified CDS sequence (opt3) from neuraminidase__InfluenzaA__ADI49790

SEQ ID NO: 146970 - RNA, 1410 nt, Artificial Sequence; identical to SEQ ID NO: 144786
  derived and/or modified CDS sequence (opt3) from neuraminidase__InfluenzaA__ADI49821

SEQ ID NO: 146971 - RNA, 1410 nt, Artificial Sequence; identical to SEQ ID NO: 144776
  derived and/or modified CDS sequence (opt3) from neuraminidase__InfluenzaA__ADI50029

SEQ ID NO: 146972 - RNA, 1410 nt, Artificial Sequence
  derived and/or modified CDS sequence (opt3) from neuraminidase__InfluenzaA__ADI52830
augaaccccaaucagaagaucauuaccauaggcagcgugugcaugacaaucgggauggccaaccugauucuccaaaucggaaauauuaucuccauauggaucucucacucaauucagcuugguaaccagaaucagaucgagacuuguaaccaaagugucauuacguacgaaaauaacaccuggguuaaucagacauaugugaacaucagcaauacuaacuucgcugcaggccaguccguagugucugucaaacuggccggaaauucgucauugugcccugugagcggaugggcgauauacaguaaggacaacuccguuagaauuggcucuaaaggugauguguuugucaucagggagccauucauuagcuguuccccguuagaaugccggaccuuuuuccugacacagggggcucuacucaaugacaagcauucaaacggaaccaucaaagaucgcagucccuaucgaacucugaugagcuguccuaucggcgaggugccaucucccuacaacucccguuuugaaucaguagccuggagcgcaagugccugccacgacggcauuaauuggcuuacaauagggaucucuggaccugauaacggugcuguugcagugcugaaguauaauggcauuaucaccgacacgauaaaguccuggagaaacaauauuuugaggacucaagagagcgagugugccugcgucaacgggucguguuucaccgugaugacagauggaccaucugacggccaggcuuccuacaaaaucuuucggaucgaaaaggguaaaauugugaagucagucgagaugaaugcccccaacuaucauuacgaagagugcaguuguuacccugauagcuccgagaucacuugcguuugccgcgacaauuggcacgggucuaacagaccaugggugagcuucaaucagaaccucgaauaucagauuggauacauauguucaggcaucuuuggcgauaauccgaggcccaacgacaaaaccgggaguugcggaccuguauccagcaauggugcgaacggcgugaagggguucucuuuuaaguauggaaacggcgucuggauuggucggacaaaaucaaucaguagccgcaauggguucgagaugaucugggauccaaacggcuggaccggaacggacaauaacuuuuccauuaagcaagacauagugggcaucaaugaauggucuggguacucggggagcuucguucagcaucccgagcugacuggucuggauuguauucgaccuugcuucuggguggaacucaucagaggcaggccaaaagagaacacaauuuggaccuccgggucaaguaucucuuuuuguggagucaauagcgacacugugggcugguccuggcccgauggugacgaguuaccguucacaauagauaaguga

SEQ ID NO: 146973 - RNA, 1410 nt, Artificial Sequence
  derived and/or modified CDS sequence (opt3) from neuraminidase__InfluenzaA__ADI52831
augaaccccaaucagaagaucauuaccauaggcagcgugugcaugacaaucgggauggccaaccugauucuccaaaucggaaauauuaucuccauauggaucucucacucaauucagcuugguaaccagaaucagaucgagacuuguaaccaaagugucauuacguacgaaaauaacaccuggguuaaucagacauaugugaacaucagcaauacuaacuucgcugcaggccaguccguagugucugucaaacuggccggaaauucgucauugugcccugugagcggaugggcgauauacaguaaggacaacuccauuagaaucggcucuaaaggugauguuuuugugauuagggagccauucaucagcuguuccccguuagaaugccggaccuuuuuccugacacagggggcucuacucaaugacaagcauucaaacggaaccaucaaagaucgcagucccuaucgaacucugaugagcuguccuauuggcgaggucccaucucccuacaacucccguuuugaaucaguggccuggagcgcaagugccugccacgacggcauaaauuggcuuacaaucgggauuucuggaccugauaacggugcuguagcaguucugaaguauaauggcaucauaaccgacacgauuaaguccuggagaaacaauaucuugaggacucaagagagcgagugugccugcgugaacgggucguguuucaccgucaugacagauggaccaucugacggccaggcuuccuacaaaaucuuucggauugaaaaggguaaaaucgugaagucaguggagaugaaugcccccaacuaucauuacgaagagugcaguuguuacccugauagcuccgagauuacuugcgucugccgcgacaauuggcacgggucuaacagaccauggguuagcuucaaucagaaccucgaauaucagauaggauacaucuguucaggcauuuuuggcgauaauccgaggcccaacgacaaaaccgggaguugcggaccuguguccagcaauggugcgaacggcguaaagggguucucuuuuaaguauggaaacggcguguggaucggucggacaaaaucagucaguagccgcaauggguucgagaugaucugggauccaaacggcuggaccggaacggacaauaacuuuuccauuaagcaagacauagugggcaucaaugaauggucuggguacucggggagcuucguucagcaucccgagcugacuggucuggauuguauucgaccuugcuucuggguggaacucaucagaggcaggccaaaagagaacacaauuuggaccuccgggucaaguaucucuuuuuguggagucaauagcgacacugugggcugguccuggcccgauggugcagaguuaccguucacaauagacaaguga

SEQ ID NO: 146974 - RNA, 1410 nt, Artificial Sequence; identical to SEQ ID NO: 144786
  derived and/or modified CDS sequence (opt3) from neuraminidase__InfluenzaA__ADI52832

SEQ ID NO: 146975 - RNA, 1410 nt, Artificial Sequence
  derived and/or modified CDS sequence (opt3) from neuraminidase__InfluenzaA__ADI52833
augaaccccaaucagaagaucauuaccauaggcagcgugugcaugacaaucgggauggccaaccugauucuccaaaucggaaauauuaucuccauauggaucucucacucaauucagcuugguaaccagaaucagaucgagacuuguaaccaaagugucauuacguacgaaaauaacaccuggguuaaucagacauaugugaacaucagcaauacuaacuucgcugcaggccaguccguagugucugucaaacuggccggaaauucgucauugugcccugugagcggaugggcgauauacaguaaggacaacuccauuagaaucggcucuaaaggugauguuuuugugauuagggagccauucaucagcuguuccccguuagaaugccggaccuuuuuccugacacagggggcucuacucaaugacaagcauucaaacggaaccaucaaagaucgcagucccuaucgaacucugaugagcuguccuauuggcgaggccccaucucccuacaacucccguuuugaaucagucgcauggagcgccagugcuugccacgacggcauaaauuggcuuacaaucgggauuucuggaccugauaacggugcaguggccguacugaaguauaauggcaucauaaccgacacgauuaaguccuggagaaacaauaucuugaggacucaagagagcgagugugcuugcguuaacgggucguguuucaccgugaugacagauggaccaucugacggccaggccuccuacaaaaucuuucggauugaaaaggguaaaaucgucaagucaguggagaugaaugcgcccaacuaucauuacgaagagugcaguuguuacccugauagcuccgagauuacuugcgugugccgcgacaauuggcacgggucuaacagaccaugggucagcuucaaucagaaccucgaauaucagauaggauacaucuguucaggcauuuuuggcgauaauccgaggcccaacgacaaaaccgggaguugcggaccuguuuccagcaauggugcaaacggcgugaagggguucucuuuuaaguauggaaacggcguauggaucggucggacaaaaucaaucaguagccgcaauggguucgagaugauuugggauccaaacggcuggaccggaacggacaauaacuuuuccauaaagcaagacaucgugggcauuaaugaauggucuggguacucggggagcuucguccagcaucccgagcugacuggucuggauuguauccgaccuugcuucuggguggaacucauuagaggcaggccaaaagagaacacaaucuggaccuccgggucaaguauaucuuuuuguggaguuaauagcgacacugugggcugguccuggcccgauggugccgaguuaccguucacaaucgacaaguga

SEQ ID NO: 146976 - RNA, 1413 nt, Artificial Sequence; identical to SEQ ID NO: 145509
  derived and/or modified CDS sequence (opt3) from neuraminidase__InfluenzaA__ADI75821

SEQ ID NO: 146977 - RNA, 1410 nt, Artificial Sequence; identical to SEQ ID NO: 145953
  derived and/or modified CDS sequence (opt3) from neuraminidase__InfluenzaA__ADI75832

SEQ ID NO: 146978 - RNA, 1413 nt, Artificial Sequence
  derived and/or modified CDS sequence (opt3) from neuraminidase__InfluenzaA__ADI75854
augaaccccaaucagaagaucauuaccauaggcagcaucuccauugccaucgggauuaucucucugaugcuccaaauaggaucaaucauuaguaucugggcuagccacuccauucagacagguucucagaacaauacuggcaucugcaaccagagaauaauuacguacgaaaauucgaccugggugaaccauacauaugucaauaucaacaauacuaacguuguggcaggggaggacaaaaccucaguaacacuugccggaaauagcagucuguguuccauuucuggcugggcgaucuacaccaaggauaacagcaucaggauugguuccaaaggggacguguucgucauacgggagccuuuuaucucaugcagucacuuggaaugucgcacuuucuuuuuaacacaaggagcucugcuaaaugauaagcauagcaacggcaccgugaaagaccgaucuccauaucgugcccucauguccugcccgcugggcgaggcacccucaccuuacaauagcaaguucgaaaguguugccuggucugcuuccgcaugucacgaugggaugggauggcuuacgauugguaucagcggcccagacaacggggccguggcuguccugaaguauaacggaauaauuacuggcaccaucaaaucguggaagaaacagaucuugagaacacaggagucugagugcguguguaugaaugguuccugcuuuacuauuaugaccgaugggcccucaaacaaggccgcgaguuacaaaaucuucaagauugaaaagggaaaaguaacaaagagcauagagcucaaugcaccuaacuuuuauuacgaagaguguuccugcuacccagacaccggcaucguuaugugugugugcagggauaauuggcauggcucuaaccggcccugggucagcuucaaucagaaccuggacuaucaaauuggguacaucugcucaggaguguuuggugauaauccucgcccagaggacggcgaagggaguuguaacccggugacggucgauggagccaauggcguuaaagguuucuccuauaaguacgggaacggcguguggaucggaagaacuaaaagcaauaggcugcggaagggcuuugagaugauuugggaccccaacggguggacaaauaccgacucugauuucucaguaaaacaggacguggucgcuauaacugauuggaguggauauagcgguuccuuugugcagcacccugaacucacaggcuuagacugcauccgcccauguuucuggguugagcuggugcgagggcuucccagagaaaacaccacgauuuggaccucuggaucgagcaucuccuucugcggcgucaacucagauacagccaauuggaguuggccugacggugcagaguugccauuuacuauugauaaguga

SEQ ID NO: 146979 - RNA, 1410 nt, Artificial Sequence
  derived and/or modified CDS sequence (opt3) from neuraminidase__InfluenzaA__ADI75876
augaaccccaaucagaagaucauuaccauaggcagcgugucccugacaaucucuacuauuugcuucuuuaugcaaaucgccauucucaucacgaccgucacacuucacuucaaacaguacgaguuuaacucaccuccaaauaaccagguuaugcugugugaaccgacuauaaucgagagaaauauuaccgaaaucguguauuugacaaacaccacuauugagaaggaaguaugccccaaauuagcugaguacaggaauuggaguaagccucagugugacaucacaggguucgcaccauuuagcaaagauaacuccauacggcugucugccggaggugacauuugggugacccgcgagcccuaugucucgugcgauccugacaaguguuaccaauucgcgcuaggccaggggacgacucucaauaacgugcauucaaauaacaccguucgagaucguacaccauauagaacucugcuuaugaaugaacugggagugcccuuucacuugggcaccaagcaggucugcaucgcuuggagcaguuccucuugucaugacgguaaagccuggcuccacgugugcauuacaggggaugacaagaacgcaaccgccagcuucaucuacaauggaaggcugguagauuccguugugucauggaguaaagagauccugcggacgcaggaaagcgagugugucugcauuaacggcacuuguacaguggugaugaccgacggcucugcuuccgggaaggcagauacuaaaauacucuuuaucgaggaaggaaagauuguccauacaucaaccuuaagcgguagugcccaacacguugaggaaugcucuugcuauccucgcuacccaggcgugagauguguaugcagggacaacuggaagggguccaaucggccgaucguggauauaaacauuaaagaccacagcgucgugucgucuuacguuuguuccggacuggugggcgacacgccccgcaagaaugauucaaguagcuccucucauugccuugacccuaacaaugaggaaggugggcacggagucaaaggcugggcuuucgaugacggcaacgauguguggauggggcgaaccaucagcgagaagucaagauugggauaugagacauuuaaaguaaucgaagguuggaguaaucauaaguccaaacugcagauuaacaggcagguuaucguggaccggggcaaucguagcggguacucuggaauuuucucagucgagggcaagaguuguauaaaccgcugcuuuuauguggaacuaaucagagguaggaaggaggaaacugagguccucuggaccagcaauuccauugugguuuucugugggacaucuggcacuuacggaaccggcucguggccagauggggccgaccugaaccuuaugcccaucuga

SEQ ID NO: 146980 - RNA, 1410 nt, Artificial Sequence; identical to SEQ ID NO: 145953
  derived and/or modified CDS sequence (opt3) from neuraminidase__InfluenzaA__ADI75887

SEQ ID NO: 146981 - RNA, 1413 nt, Artificial Sequence; identical to SEQ ID NO: 145509
  derived and/or modified CDS sequence (opt3) from neuraminidase__InfluenzaA__ADI75909

SEQ ID NO: 146982 - RNA, 1410 nt, Artificial Sequence; identical to SEQ ID NO: 146532
  derived and/or modified CDS sequence (opt3) from neuraminidase__InfluenzaA__ADI75920

SEQ ID NO: 146983 - RNA, 1413 nt, Artificial Sequence; identical to SEQ ID NO: 145509
  derived and/or modified CDS sequence (opt3) from neuraminidase__InfluenzaA__ADI77352

SEQ ID NO: 146984 - RNA, 1410 nt, Artificial Sequence; identical to SEQ ID NO: 144786
  derived and/or modified CDS sequence (opt3) from neuraminidase__InfluenzaA__ADI77363

SEQ ID NO: 146985 - RNA, 1410 nt, Artificial Sequence; identical to SEQ ID NO: 145963
  derived and/or modified CDS sequence (opt3) from neuraminidase__InfluenzaA__ADI99500

SEQ ID NO: 146986 - RNA, 1410 nt, Artificial Sequence
  derived and/or modified CDS sequence (opt3) from neuraminidase__InfluenzaA__ADI99553
augaaccccaaucagaagaucauuaccauaggcagcgugugcaugacaaucgggauggccaaccugauucuccaaaucggaaauauuaucuccauauggaucucucacucaauucagcuugguaaccagaaucagaucgagacuuguaaccaaagugucauuacguacgaaaauaacaccuggguuaaucagacauaugugaacaucagcaauacuaacuucgcugcaggccaguccguagacucugugaaacuggccggaaauucgucauugugcccugucagcggaugggcgauauacaguaaggauaacuccauuagaaucggcucuaaaggugacguguuuguuauuagggagccauucaucagcuguuccccguuagaaugccggaccuuuuuccugacacagggggcucuacucaaugauaagcauucaaacggaaccaucaaagaccgcagucccuaucgaacucugaugagcuguccuauuggcgaggugccaucucccuacaacucccguuuugaaucagucgccuggagcgcaagugccugccacgauggcauaaauuggcuuacaaucgggauuucuggaccugacaacggugcuguggcaguacugaaguauaauggcaucauaaccgauacgauuaaguccuggagaaacaauaucuugaggacucaagagagcgagugugccugcguuaacgggucguguuucaccgugaugacagacggaccaucugauggccaggcuuccuacaaaaucuuucggauugaaaaggguaaaaucgucaagucaguggagaugaaugcccccaacuaucauuacgaagagugcaguuguuacccugacagcuccgagauuacuugcgugugccgcgauaauuggcacgggucuaacagaccaugggucagcuucaaucagaaccucgaauaucagauaggauacaucuguucaggcauuuuuggcgacaauccgaggcccaacgauaaaaccgggaguugcggaccuguuuccagcaauggugcgaacggcgugaagggguucucuuuuaaguauggaaacggcguauggaucggucggacaaaaucaaucaguagccgcaauggguucgagaugauuugggacccaaacggcuggaccggaacggacaauaacuuuuccauaaagcaagauaucgugggcauuaaugaauggucuggguacucggggagcuucguccagcaucccgagcugacuggucuggacuguauccgaccuugcuucuggguggaacucauuagaggcaggccaaaagagaacacaaucuggaccuccgggucaaguauaucuuuuuguggaguuaauagcgauacugugggcugguccuggcccgacggugcagaguuaccguucacaaucgauaaguga

SEQ ID NO: 146987 - RNA, 1410 nt, Artificial Sequence
  derived and/or modified CDS sequence (opt3) from neuraminidase__InfluenzaA__ADI99563
augaaccccaaucagaagaucauuaccauaggcagcgugugcaugacaaucgggauggccaaccugauucuccaaaucggaaauauuaucuccauauggaucucucacucaauucagcuugguaaccagaaucagaucgagacuuguaaccaaagugucauuacguacgaaaauaacaccuggguuaaucagacauaugugaacaucagcaauacuaacuucgcugcaggccaguccguagugucugucaaacuggccggaaauucgucauugugcccugugagcggaugggcgauauacaguaaggacaacuccauuagaaucggcucuaaaggugauguuuuugugauuagggagccauucaucagcuguuccccguuagaaugccggaccuuuuuccugacacagggggcucuacucaaugacaagcauucaaacggaaccaucaaagaucgcagucccuaucgaacucugaugagcuguccuauuggcgaggucccaucucccuacaacucccguuuugaaucaguggccuggagcgcaagugccugccacgacggcauaaauuggcuuacaaucgggauuucuggaccugauaacggugcuguagcaguucugaaguauaauggcaucauaaccgacacgauuaaguccuggagaaacaauaucuugaggacucaagagagcgagugugccugcgugaacgggucguguuucaccgucaugacagauggaccaucugacggccaggcuuccuacaaaaucuuucggauugaaaaggguaaaaucgugaagucaguggaggucaaugcccccaacuaucauuacgaagagugcaguuguuacccugauagcuccgagauuacuugcguuugccgcgacaauuggcacgggucuaacagaccaugggugagcuucaaucagaaccucgaauaucagauaggauacaucuguucaggcauuuuuggcgauaauccgaggcccaacgacaaaaccgggaguugcggaccuguauccagcaauggugcgaacggcgugaagggguucucuuuuaaguauggaaacggcgucuggaucggucggacaaaaucaaucaguagccgcaauggguucgagaugauuugggauccaaacggcuggaccggaacggacaauaacuuuuccauaaagcaagacaucgugggcauuaaugaauggucuggguacucggggagcuucguucagcaucccgagcugacuggucuggauuguauccgaccuugcuucuggguggaacucauuagaggcaggccaaaagagaacacaaucuggaccuccgggucaaguauaucuuuuuguggagucaauagcgacacugugggcugguccuggcccgauggugcagaguuaccguucacaaucgacaaguga

SEQ ID NO: 146988 - RNA, 1410 nt, Artificial Sequence; identical to SEQ ID NO: 146987
  derived and/or modified CDS sequence (opt3) from neuraminidase__InfluenzaA__ADI99573

SEQ ID NO: 146989 - RNA, 1410 nt, Artificial Sequence; identical to SEQ ID NO: 146987
  derived and/or modified CDS sequence (opt3) from neuraminidase__InfluenzaA__ADI99583

SEQ ID NO: 146990 - RNA, 1410 nt, Artificial Sequence; identical to SEQ ID NO: 146137
  derived and/or modified CDS sequence (opt3) from neuraminidase__InfluenzaA__ADI99593

SEQ ID NO: 146991 - RNA, 1410 nt, Artificial Sequence
  derived and/or modified CDS sequence (opt3) from neuraminidase__InfluenzaA__ADI99613
augaaccccaaucagaagaucauuaccauaggcagcgugugcaugacaaucgggauggccaaccugauucuccaaaucggaaauauuaucuccauauggaucucucacucaauucagcuugguaaccagaaucagaucgagacuuguaaccaaagugucauuacguacgaaaauaacaccuggguuaaucagacauaugugaacaucagcaauacuaacuucgcugcaggccaguccguagugucugucaaacuggccggaaauucgucauugugcccugugagcggaugggcgauauacaguaaggacaacuccauuagaaucggcucuaaaggugauguuuuugugauuagggagccauucaucagcuguuccccguuagaaugccggaccuuuuuccugacacagggggcucuacucaaugacaagcauucaaacggaaccaucaaagaucgcagucccuaucgaacucugaugagcuguccuauuggcgaggucccaucucccuacaacucccguuuugaaucaguggccuggagcgcaagugccugccacgacggcauaaauuggcuuacaaucgggauuucuggaccugauaacggugcuguagcaguucugaaguauaauggcaucauaaccgacacgauuaaguccuggagaaacaauaucuugaggacucaagagagcgagugugccugcgugaacgggucguguuucaccgucaugacagauggaccaucugacggccaggcuuccuacaaaaucuuucggauugaaaaggguaaaaucgugaagucaguggagaugaaugcccccaacuaucauuacgaagagugcaguuguuacccugauagcuccgagauuacuugcgucugccgcgacaauuggcacgggucuaacagaccauggguuagcuucaaucagaaccucgaauaucagauaggauacaucuguucaggcauuuuuggcgauaauccgaggcccaacgacaaaaccgggaguugcggaccuguguccagcaauggugcgaacggcguaaagggguucucuuuuaaguauggaaacggcguguggaucggucggacaaaaucaaucaguagccgcaauggguucgagaugauuugggauccaaacggcuggaccggaacggacaauaacuuuuccauaaagcaagacaucgucggcauuaaugaauggucuggguacucggggagcuucgugcagcaucccgagcugacuggucuggauuguauccgaccuugcuucuggguugaacucauuagaggcaggccaaaagagaacacaaucuggaccuccgggucaauaaucaguuuuuguggagucaauucugacacugugggcuggagcuggcccgauggugcagaguuaccguucacaauugacaaguga

SEQ ID NO: 146992 - RNA, 1410 nt, Artificial Sequence
  derived and/or modified CDS sequence (opt3) from neuraminidase__InfluenzaA__ADI99623
augaaccccaaucagaagaucauuaccauaggcagcgugugcaugacaaucgggauggccaaccugauucuccaaaucggaaauauuaucuccauauggaucucucacucaauucagcuugguaaccagaaucagaucgagacuuguaaccaaagugucauuacguacgaaaauaacaccuggguuaaucagacauaugugaacaucagcaauacuaacuucgcugcaggccaguccguagugucuaugaaacuggccggaaauucgucauugugcccugucagcgggugggcgauauacaguaaggacaacuccauuagaaucggcucuaaaggugauguguuuguuauuagggagccauucaucagcuguuccccguuagaaugccggaccuuuuuccugacacagggggcucuacucaaugacaagcauucaaacggaaccaucaaagaucgcagucccuaucgaacucugaugagcuguccuauuggcgaggugccaucucccuacaacucccguuuugaaucagucgccuggagcgcaagugccugccacgacggcauaaauuggcuuacaaucgggauuucuggaccugauaacggugcuguggcaguacugaaguauaauggcaucauaaccgacacgauuaaguccuggagaaacaauaucuugaggacucaagagagcgagugugccugcguuaacgggucguguuucaccgugaugacagauggaccaucugacggccaggcuuccuacaaaaucuuucggauugaaaaggguaaaaucgucaagucaguggagaugaaugcccccaacuaucauuacgaagagugcaguuguuacccugauagcaaugagauuacuugcgugugccgcgacaacuggcacggguccaauagaccaugggucucuuucaaccagaaucucgaauaucagauaggauacaucuguagcggcauuuuuggcgauaacccgaggcccaaugacaaaaccgggucaugcggaccuguuaguuccaacggugcgaacggcgugaagggguucagcuuuaaguauggaaauggcguauggaucggucggacaaaaucuaucucaagucgcaacggguucgagaugauuugggauccaaauggcuggaccggaacggacaacaauuuuagcauaaagcaagacaucgugggcauuaacgaaugguccggguacucuggaucguucguccagcaucccgagcugacuggucuggauuguauccgaccuugcuucuggguggaacucauuagaggcaggccaaaagagaauacaaucuggaccagcggguccucaauaaguuuuuguggaguuaacucugacacugugggcuggagcuggcccgauggugcagaguuaccguucacaaucgacaaguga

SEQ ID NO: 146993 - RNA, 1410 nt, Artificial Sequence; identical to SEQ ID NO: 146074
  derived and/or modified CDS sequence (opt3) from neuraminidase__InfluenzaA__ADI99633

SEQ ID NO: 146994 - RNA, 1410 nt, Artificial Sequence; identical to SEQ ID NO: 146137
  derived and/or modified CDS sequence (opt3) from neuraminidase__InfluenzaA__ADI99643

SEQ ID NO: 146995 - RNA, 1410 nt, Artificial Sequence; identical to SEQ ID NO: 144786
  derived and/or modified CDS sequence (opt3) from neuraminidase__InfluenzaA__ADI99653

SEQ ID NO: 146996 - RNA, 1410 nt, Artificial Sequence; identical to SEQ ID NO: 144786
  derived and/or modified CDS sequence (opt3) from neuraminidase__InfluenzaA__ADI99663

SEQ ID NO: 146997 - RNA, 1410 nt, Artificial Sequence; identical to SEQ ID NO: 144786
  derived and/or modified CDS sequence (opt3) from neuraminidase__InfluenzaA__ADI99673

SEQ ID NO: 146998 - RNA, 1410 nt, Artificial Sequence; identical to SEQ ID NO: 144786
  derived and/or modified CDS sequence (opt3) from neuraminidase__InfluenzaA__ADI99683

SEQ ID NO: 146999 - RNA, 1410 nt, Artificial Sequence; identical to SEQ ID NO: 146248
  derived and/or modified CDS sequence (opt3) from neuraminidase__InfluenzaA__ADI99703

SEQ ID NO: 147000 - RNA, 1410 nt, Artificial Sequence; identical to SEQ ID NO: 144786
  derived and/or modified CDS sequence (opt3) from neuraminidase__InfluenzaA__ADI99713

SEQ ID NO: 147001 - RNA, 1410 nt, Artificial Sequence; identical to SEQ ID NO: 144786
  derived and/or modified CDS sequence (opt3) from neuraminidase__InfluenzaA__ADI99723

SEQ ID NO: 147002 - RNA, 1410 nt, Artificial Sequence; identical to SEQ ID NO: 144786
  derived and/or modified CDS sequence (opt3) from neuraminidase__InfluenzaA__ADI99733

SEQ ID NO: 147003 - RNA, 1410 nt, Artificial Sequence; identical to SEQ ID NO: 144941
  derived and/or modified CDS sequence (opt3) from neuraminidase__InfluenzaA__ADJ00487

SEQ ID NO: 147004 - RNA, 1410 nt, Artificial Sequence; identical to SEQ ID NO: 144941
  derived and/or modified CDS sequence (opt3) from neuraminidase__InfluenzaA__ADJ00488

SEQ ID NO: 147005 - RNA, 1410 nt, Artificial Sequence; identical to SEQ ID NO: 144941
  derived and/or modified CDS sequence (opt3) from neuraminidase__InfluenzaA__ADJ00489

SEQ ID NO: 147006 - RNA, 1410 nt, Artificial Sequence; identical to SEQ ID NO: 144941
  derived and/or modified CDS sequence (opt3) from neuraminidase__InfluenzaA__ADJ00490

SEQ ID NO: 147007 - RNA, 1410 nt, Artificial Sequence; identical to SEQ ID NO: 144941
  derived and/or modified CDS sequence (opt3) from neuraminidase__InfluenzaA__ADJ00491

SEQ ID NO: 147008 - RNA, 1410 nt, Artificial Sequence; identical to SEQ ID NO: 144786
  derived and/or modified CDS sequence (opt3) from neuraminidase__InfluenzaA__ADJ18160

SEQ ID NO: 147009 - RNA, 1410 nt, Artificial Sequence; identical to SEQ ID NO: 144786
  derived and/or modified CDS sequence (opt3) from neuraminidase__InfluenzaA__ADJ18161

SEQ ID NO: 147010 - RNA, 1410 nt, Artificial Sequence
  derived and/or modified CDS sequence (opt3) from neuraminidase__InfluenzaA__ADJ18162
augauccccaaccagaagauuauaaccaucggcagcgugugcaugacaauugggauggccaaucugauccuccaaauuggaaacaucauauccaucuggauuucucacucaauccagcuugguaaucagaaccagauugagacuuguaaucaaagugucaucacguacgaaaacaauaccuggguuaaccagacauaugugaauauaagcaacacuaauuucgcugcaggccaguccguagugucugucaaacuggccgggaacucgucauugugcccugugagcggaugggcgauuuacaguaaggacaauuccaucagaauuggcucuaaaggugauguuuuugugaucaggaagccauucaucagcuguuccccguuagagugccggaccuuuuuccugacacagggggcucuacucaacgacaaacauucaaauggaaccauuaaggaucgcagucccuaucgaacucugaugagcuguccuauaggcgaagucccaucucccuacaacucccguuuugagucaguggccuggagcgcaagugccugccacgacggcaucaacuggcuuacaauugggaucucuggaccugauaauggugcuguagcaguucugaaguauaacggcauaauuaccgacacgaucaaauccuggagaaauaacaucuugaggacucaagaaagcgagugugccugcgugaaugggucguguuucaccgucaugacagauggaccaucugacggccaggcuuccuacaagauuuuucggaucgagaaagguaagauugugaaaucaguggaaaugaacgcccccaauuaucauuacgaggaaugcaguuguuacccugauagcuccgagauaacuugcgucugccgcgacaacuggcacgggucuaauagaccauggguuagcuucaaccagaaucucgaguaucagaucggauacauuuguucaggcaucuuuggcgauaacccgaggcccaaugacaagaccgggaguugcggaccuguguccagcaacggugcgaauggcguaaagggguucucuuuuaaauauggaaacggcguguggaucggucggacaaagucaauuaguagccgcaacggguucgaaaugauaugggauccaaauggcuggaccggaacggacaacaauuuuuccaucaaacaagacauugucggcaucaacgaguggucuggguacucggguagcuucgugcagcaucccgaacugacuggacuggauuguauucgaccuugcuucuggguugagcucaucagaggcaggccaaaggaaaauacaauauggaccuccgggucaaguaucucuuuuuguggagugaacagcgacacugucggcugguccuggcccgauggugcagaguuaccguucacaauugacaaauga

SEQ ID NO: 147011 - RNA, 1410 nt, Artificial Sequence
  derived and/or modified CDS sequence (opt3) from neuraminidase__InfluenzaA__ADJ18164
augaaccccaagcagaaaaucauuaccauaggcagcgugugcaugacaaucgggauggccaaucugauucuccaaaucggaaacauuaucuccauauggaucucucacucaauucagcuugguaaucagaaccagaucgagacuuguaaucaaagugucauuacguacgaaaacaauaccuggguuaaccagacauaugugaauaucagcaacacuaauuucgcugcaggccaguccguagugucugucaagcuggccgggaacucgucauugugcagcgugaguggaugggcgauauacuccaaagacaauucuauuagaaucggcagcaagggugauguuuuugugauuagggagccuuucaucuccuguucaccauuagaaugccggaccuuuuuccugacacagggggcucuacucaacgacaaacauaguaauggaaccaucaaggaucgcagcccguaucgaacucugaugucuugucccauuggcgaggucccuuccccauacaacucacguuuugaaagcguggccuggagugcaucugccugccacgacggcauaaacuggcuuacaaucgggauuuccggacccgauaauggugcuguagcaguucugaaguauaacggcaucauaaccgacacgauuaaaagcuggagaaauaacaucuugaggacucaagagucggagugugccugcgugaaugggucuuguuucaccgucaugacagauggaccuuccgacggccaggcuucauacaagaucuuucggauugaaaaagguaagaucgugaaaaguguggagaugaacgccccaaauuaucauuacgaagagugcagcuguuaccccgauuccucugagauuacuugcgucugccgcgacaacuggcacgggagcaauagaccuuggguuucauucaaccagaaucucgaauaucagauaggauacaucuguaguggcauuuuuggcgauaacccaaggccgaaugacaagaccggguccugcggacccgugagcucuaacggugcgaauggcguaaagggguucucauuuaaauauggaaacggcguguggaucggucggacaaagaguaucagcucccgcaacggguucgagaugauuugggauccuaauggcuggaccggaacggacaacaauuuuucuauaaaacaagacaucgucggcauuaacgaauggucgggguacagcggauccuucgugcagcauccagagcugacuggucuggauuguauccgacccugcuucuggguugaacucauuagaggcaggccuaaggagaauacaaucuggaccucagggaguucuaucagcuuuuguggagugaacuccgacacugucggcuggucauggccagauggugcagaguuacccuucacaauagacaaauga

SEQ ID NO: 147012 - RNA, 1410 nt, Artificial Sequence; identical to SEQ ID NO: 144786
  derived and/or modified CDS sequence (opt3) from neuraminidase__InfluenzaA__ADJ18166

SEQ ID NO: 147013 - RNA, 1410 nt, Artificial Sequence; identical to SEQ ID NO: 144786
  derived and/or modified CDS sequence (opt3) from neuraminidase__InfluenzaA__ADJ18168

SEQ ID NO: 147014 - RNA, 1410 nt, Artificial Sequence; identical to SEQ ID NO: 144786
  derived and/or modified CDS sequence (opt3) from neuraminidase__InfluenzaA__ADJ18170

SEQ ID NO: 147015 - RNA, 1410 nt, Artificial Sequence
  derived and/or modified CDS sequence (opt3) from neuraminidase__InfluenzaA__ADJ18172
augaaccccaaucagaagaucauuaccauaggcagcgugugcaugacaaucgggauggccaaccugauucucagaaucggaaauauuaucuccauauggaucucucacucaauucaacuugguaaccagaaucagaucgagacuuguaaccagagugucauuacguacgaaaauaacaccuggguuaaucaaacauaugugaacaucagcaauacuaacuucgcugcaggccaguccguagugucugucaaacuggccggaaauucgucauugugcccugugagcgggugggcgauauacaggaaggacaacaguauucggaucggcuccaaaggugauguuuuugugauucgcgagccauucaucucuuguagcccguuagaaugccgaaccuuuuuccugacacagggggcucuacucaaugacaagcauuccaacggaaccaucaaagaucguucacccuauagaacucugaugaguuguccuauuggcgaggucccaagccccuacaacucuagguuugaauccguggccuggucagcaagcgccugccacgacggcauaaauuggcuuacaaucgggauuaguggaccugauaacggugcuguagcaguucugaaguauaauggcaucauaaccgacacgauuaagucuuggcggaacaauaucuugcgcacucaggaguccgagugugccugcgugaacgggagcuguuucaccgucaugacagauggaccaucggacggccaggcuucuuacaaaaucuuuagaauugaaaaggguaaaaucgugaaguccguggagaugaaugcccccaacuaucauuacgaagagugcucauguuacccugauaguagcgagauuacuugcgucugcagggacaauuggcacggguccaaccggccauggguuucuuucaaucaaaaccucgaauaucagauaggauacaucuguagcggcauuuuuggcgauaauccgcgccccaacgacaaaaccgggucaugcggaccugugaguuccaauggugcgaacggcguaaagggguucagcuuuaaguauggaaacggcguguggaucggucgaacaaaaucuaucucaaguagaaauggguucgagaugauuugggauccaaacggcuggaccggaacggacaauaacuuuagcauaaagcaggacaucgucggcauuaaugaaugguccggguacucuggaucguucgugcaacaucccgagcugacuggucuggauuguaucaggccuugcuucuggguugaacucauucggggccguccaaaagagaacacaaucuggaccagcggguccucaauaaguuuuuguggagucaauucugacacugugggcuggagcuggcccgauggugcagaguuaccguucacaaucgacaaguga

SEQ ID NO: 147016 - RNA, 1410 nt, Artificial Sequence; identical to SEQ ID NO: 144786
  derived and/or modified CDS sequence (opt3) from neuraminidase__InfluenzaA__ADJ18174

SEQ ID NO: 147017 - RNA, 1410 nt, Artificial Sequence
  derived and/or modified CDS sequence (opt3) from neuraminidase__InfluenzaA__ADJ18176
augaaccccaaucagaagaucauuaccauaggcagcgugugcaugacaaucgggauggccaaccugauucuccaaaucggaaauauuaucuccauauggaucucucuuucaauucagcuggguaaccagaaucagaucgagacuuguaaccaaagugucauuacguacgaaaauaacaccuggguuaaucagacauaugugaacaucagcaauacuaacuucgcugcaggccaguccguagugucugucaaauuggccggaaauucgucauuaugcccugugagcggaugggcgauauacaguaaggacaacuccauuagaaucggcucuaaaggugauguuuuugugauuagggagccauucaucagcuguuccccgcuggaaugccggaccuuuuuccuaacacagggggcucuccugaaugacaagcacucaaacggaaccaucaaagaucgcagucccuaucgaacucuuaugagcuguccuauuggcgaggucccaucucccuacaacucccguuuugaaucaguggccuggagcgcaagugccugccaugacggcauaaauuggcugacaaucgggauuucuggaccugauaacggugcuguagcaguuuugaaguauaauggcaucauaaccgacacgauuaaguccuggagaaacaauauccucaggacucaagagagcgagugugccugcgugaacgggucguguuucaccgucaugacagauggaccaucugacggccaggcuuccuacaaaaucuuucggauugaaaaggguaaaaucgugaagucaguggagaugaaugcccccaacuaucacuacgaagagugcaguuguuacccugauagcuccgagauuacuugcgucugccgcgacaauuggcaugggucuaacagaccauggguuagcuucaaucagaaccuggaauaucagauaggauacaucuguucaggcauuuuuggcgauaauccgaggcccaacgacaaaaccgggaguugcggaccuguguccagcaauggugcgaacggcguaaagggguucucuuuuaaguauggaaacggcguguggaucggucggacaaaaucaaucaguagccgcaauggguucgagaugauuugggauccaaacggcuggaccggaacggacaauaacuuuuccauaaagcaagacaucgucggcauuaaugaauggucuggguacucggggagcuucgugcagcaccccgagcugacuggucucgauuguauccgaccuugcuucuggguugaauuaauuagaggcaggccaaaagagaacacaaucuggaccuccgggucaaguauaucuuuuuguggagugaauagcgacacugucggcugguccuggcccgauggugcagagcugccguucacaaucgacaaguga

SEQ ID NO: 147018 - RNA, 1410 nt, Artificial Sequence; identical to SEQ ID NO: 144559
  derived and/or modified CDS sequence (opt3) from neuraminidase__InfluenzaA__ADJ37250

SEQ ID NO: 147019 - RNA, 1410 nt, Artificial Sequence
  derived and/or modified CDS sequence (opt3) from neuraminidase__InfluenzaA__ADJ37252
augaaccccaaucagaagaucauuaccauaggcagcgugucccugacaaucucuacuauuugcuucuuuaugcaaaucgccauucucgucacgaccguuacacuucacuucaaacaguacgaguuuaacucaccuccaaauaaccaggugaugcugugugaaccgacuaucauagagagaaauaucaccgaaauuguauauuugacaaacaccacuaucgagaaggaaauuugccccaaauuagcugaguacaggaauuggaguaagccucagugugacaucacaggguucgcaccauuuagcaaagauaacuccauacggcugucugccggaggugacauuugggugacccgcgagcccuaugucucgugcgauccugacaaguguuaccaauucgcgcuaggccaggggacgacucucaauaacgugcauucaaauaacaucguucgagaucguaccccauauagaacacugcuuaugaaugaacugggagugcccuuucacuugggcacuaagcaggucugcauugcuuggagcaguuccucuugucaugacgguaaagccuggcuccacgugugcaucaccggggaugacaagaacgcaacagccagcuucaucuacaauggaaggcugguagauuccguugugucauggaguaaagacauucugcggacccaggagagcgaaugugucugcauaaacggcacguguacuguggugaugacagauggcucugcuuccgggaaggcagacaccaaaauccucuuuauugaggagggaaagaucguccauacuucaacauuaagcgguagugcccaacacguugaagagugcucuugcuauccucgcuacccaggcgugagauguguaugcagggauaacuggaagggguccaaucggccgauaguggacauuaacaucaaagaccacagcaucgucucgucuuacguguguuccggacugguuggcgauacgccccgcaagaaugacucaaguagcuccucucauugccuugauccuaacaaugaagagggugggcacggagugaaaggcugggcuuucgacgauggcaacgacgucuggauggggcgaaccauuagcgaaaagucaagauugggauaugagaccuuuaaagugaucgaggguuggaguaauccaaaguccaaacugcagauuaacaggcagguaauaguugaucggggcaaucguagcggguacucuggaaucuucucaguggaaggcaagaguuguauuaaccgcugcuuuuaugucgagcuaaucagagguaggaaggaagagacagaagugcucuggacuagcaauuccaucgucguguucugugggaccucuggcacauacggaacuggcucguggcccgacggggccaacauuaaucugaugccuauauga

SEQ ID NO: 147020 - RNA, 1410 nt, Artificial Sequence; identical to SEQ ID NO: 144786
  derived and/or modified CDS sequence (opt3) from neuraminidase__InfluenzaA__ADJ37263

SEQ ID NO: 147021 - RNA, 1410 nt, Artificial Sequence; identical to SEQ ID NO: 144776
  derived and/or modified CDS sequence (opt3) from neuraminidase__InfluenzaA__ADJ37273

SEQ ID NO: 147022 - RNA, 1410 nt, Artificial Sequence; identical to SEQ ID NO: 144786
  derived and/or modified CDS sequence (opt3) from neuraminidase__InfluenzaA__ADJ40447

SEQ ID NO: 147023 - RNA, 1410 nt, Artificial Sequence; identical to SEQ ID NO: 144786
  derived and/or modified CDS sequence (opt3) from neuraminidase__InfluenzaA__ADJ40457

SEQ ID NO: 147024 - RNA, 1410 nt, Artificial Sequence; identical to SEQ ID NO: 146137
  derived and/or modified CDS sequence (opt3) from neuraminidase__InfluenzaA__ADJ40467

SEQ ID NO: 147025 - RNA, 1410 nt, Artificial Sequence
  derived and/or modified CDS sequence (opt3) from neuraminidase__InfluenzaA__ADJ40477
augaaccccaaucagaagaucauuaccauaggcagcgugugcaugacaaucgggauggccaaccugauucuccaaaucggaaauauuaucuccauauggaucucucacucaauucagcuugguaaccagaaucagaucgagacuuguaaccaaagugucauuacguacgaaaauaacaccuggguuaaucagacauaugugaacaucagcaauacuaacuucgcugcaggccaguccguagugucugucaaacuggccggaaauucgucauugugcccugugagcggaugggcgauauacaguaaggacaacuccauuagaaucggcucuaaaggugauguuuuugugauuagggagccauucaucagcuguuccccguuagaaugccggaccuuuuuccugacacagggggcucuacucaaugacaagcauucaaacggaaccaucaaagaucgcagucccuaucgaacucugaugagcuguccuauuggcgaggucccaucucccuacaacucccguuuugaaucaguggccuggagcgcaagugccugccacgacggcauaaauuggcuuacaaucgggauuucuggaccugauaacggugcuguagcaguucugaaguauaauggcaucauaaccgacacgauuaaguccuggagaaacaauaucuugaggacucaagagagcgagugugccugcgugaacgggucguguuucaccgucaugacagauggaccaucugacggccaggcuuccuacaaaaucuuucggauugaaaaggguaaaaucgugaagucaguggagaugaaugcccccaacuauuacuacgaagagugcaguuguuauccugauagcuccgagauuacuugcgucugccgcgacaauuggcaugggucuaacagaccauggguuagcuucaaucagaaccucgaauaccagauaggauauaucuguucaggcauuuuuggcgauaauccgaggcccaacgacaaaaccgggaguugcggaccuguguccagcaauggugcgaacggcguaaagggguucucuuuuaaguacggaaacggcguguggaucggucggacaaaaucaaucaguagccgcaauggguucgagaugauuugggauccaaacggcuggaccggaacggacaauaacuuuuccauaaagcaagacaucgucggcauuaaugaauggucuggguauucggggagcuucgugcagcaccccgagcugacuggucuggauuguauccgaccuugcuucuggguugaacucauuagaggcaggccaaaagagaacacaaucuggaccuccgggucaaguauaucuuuuuguggagugaauagcgacacuaugggcugguccuggcccgauggugcagaguuaccguucacaaucgacaaguga

SEQ ID NO: 147026 - RNA, 1410 nt, Artificial Sequence; identical to SEQ ID NO: 144786
  derived and/or modified CDS sequence (opt3) from neuraminidase__InfluenzaA__ADJ40487

SEQ ID NO: 147027 - RNA, 1410 nt, Artificial Sequence; identical to SEQ ID NO: 144786
  derived and/or modified CDS sequence (opt3) from neuraminidase__InfluenzaA__ADJ40507

SEQ ID NO: 147028 - RNA, 1410 nt, Artificial Sequence; identical to SEQ ID NO: 144786
  derived and/or modified CDS sequence (opt3) from neuraminidase__InfluenzaA__ADJ40517

SEQ ID NO: 147029 - RNA, 1410 nt, Artificial Sequence; identical to SEQ ID NO: 144786
  derived and/or modified CDS sequence (opt3) from neuraminidase__InfluenzaA__ADJ40527

SEQ ID NO: 147030 - RNA, 1410 nt, Artificial Sequence
  derived and/or modified CDS sequence (opt3) from neuraminidase__InfluenzaA__ADJ40537
augaaccccaaucagaagaucauuaccauaggcagcgugugcaugacaaucgggauggccaaccugauucuccaaaucggaaauauuaucuccauauggaucucucacucaauucagcuugguaaccagaaucagaucgagacuuguaaccaaagugucauuacguacgaaaauaacaccuggguuaaucagacauaugugaacaucagcaauacuaacuucgcugcaggccaguccgggguaucugugaaacuggccggaaauucgucauugugcccugucagcggcugggcgauauacaguaaggacaacuccauuagaaucgguucuaaaggggauguguuuguuauuagggagccauucaucagcuguuccccguuagaaugccggaccuuuuuccugacacagggagcucuacucaaugacaagcauucaaacggcaccaucaaagaucgcagucccuaucgaacucugaugagcuguccuauuggcgaggugccaucucccuacaacucccguuuugaaucagucgccuggagcgcaagugccugccacgacgggauaaauuggcuuacaaucggaauuucugguccugauaacggcgcuguggcaguacugaaguauaaugggaucauaaccgacacgauuaaguccuggagaaacaauaucuugaggacucaagagagcgagugugccugcguuaacggaucguguuucaccgugaugacagauggcccaucugacggucaggcuuccuacaaaaucuuucggauugaaaaggggaaaaucgucaagucaguggagaugaaugcccccaacuaucauuacgaagagugcaguuguuacccugauagcuccgagauuacuugcgugugccgcgacaauuggcacggaucuaacagaccaugggucagcuucaaucagaaccucgaauaucagauaggcuacaucuguucaggcauuuuuggggauaauccgaggcccaacgacaaaaccggaaguugcgguccuguuuccagcaauggcgcgaacggggugaagggauucucuuuuaaguauggcaacgguguauggaucgggcggacaaaaucaaucaguagccgcaauggcuucgagaugauuugggauccaaacggauggaccggcacggacaauaacuuuuccauaaagcaagacaucguggggauuaaugaauggucuggauacucggguagcuucguccagcaucccgagcugacuggccuggauuguauccgaccuugcuucuggguggaacucauuagagggaggccaaaagagaacacaaucuggaccuccggaucaaguauaucuuuuuguggcguuaauagcgacacuguggguugguccuggcccgauggggcagaguuaccguucacaaucgacaaguga

SEQ ID NO: 147031 - RNA, 1410 nt, Artificial Sequence
  derived and/or modified CDS sequence (opt3) from neuraminidase__InfluenzaA__ADJ40547
augaaccccaaucagaagaucauuaccauaggcagcgugugcaugacaaucgggauggccaaccugauucuccaaaucggaaauauuaucuccauauggaucucucacucaauucagcuugguaaccagaaucagaucgagacuuguaaccaaagugucauuacguacgaaaauaacaccuggguuaaucagacauaugugaacaucagcaauacuaacuucgcugcaggccaguccguagugucugucaaacuggccggaaauucgucauugugcccugugagcggaugggcgauauacaguaaggacaacuccauuagaaucggcucuaaaggugauguuuuugugauuagggagccauucaucagcuguuccccguuagaaugccggaccuuuuuccugacacagggggcucuacucaaugacaagcauucaaacggaaccaucaaagaucgcagucccuaucgaacucugaugagcuguccuauuggcgaggucccaucucccuacaacucccguuuugaaucaguggccuggagcgcaagugccugccacgacggcauaaauuggcuuacaaucgggauuucuggaccugauaacggugcuguagcaguucugaaguauaauggcaucauaaccgacacgauuaaguccuggagaaacaauaucuugaggacucaagagagcgagugugccugcgugaacgggucguguuucaccgucaugacagauggaccaucugacggccaggcuuccuacaaaaucuuucggauugaaaaggguaaaaucauuaagucaguggagaugaaugcccccaacuaucauuacgaagagugcaguuguuacccugauagcuccgagauaacuugcgugugccgcgacaauuggcacgggucuaacagaccaugggucagcuucaaucagaaccucgaauaucagaucggauacauuuguucaggcaucuuuggcgauaauccgaggcccaacgacaaaaccgggaguugcggaccuguuuccagcaauggugcgaacggcgugaagggguucucuuuuaaguauggaaacggcguauggaucggucggacaaaaucaauuaguagccgcaauggguucgagaugauaugggauccaaacggcuggaccggaacggacaauaacuuuuccaucaagcaagacauuaucggcauuaaugaauggucuggguacucggggagcuucgugcagcaucccgagcugacuggucuggauuguauccgaccuugcuucugggucgaacucauaagaggcaggccaaaagagaacacaaucuggaccuccgggucaaguauuucuuuuuguggagugaauagcgacacuguuggcugguccuggcccgauggugcagaguuaccguucacaaucgacaaguga

SEQ ID NO: 147032 - RNA, 1410 nt, Artificial Sequence; identical to SEQ ID NO: 144786
  derived and/or modified CDS sequence (opt3) from neuraminidase__InfluenzaA__ADJ40557

SEQ ID NO: 147033 - RNA, 1410 nt, Artificial Sequence; identical to SEQ ID NO: 144786
  derived and/or modified CDS sequence (opt3) from neuraminidase__InfluenzaA__ADJ40577

SEQ ID NO: 147034 - RNA, 1410 nt, Artificial Sequence; identical to SEQ ID NO: 144786
  derived and/or modified CDS sequence (opt3) from neuraminidase__InfluenzaA__ADJ40587

SEQ ID NO: 147035 - RNA, 1410 nt, Artificial Sequence
  derived and/or modified CDS sequence (opt3) from neuraminidase__InfluenzaA__ADJ40597
augaaccccaaucagaagaucauuaccauaggcagcgugugcaugacaaucgggauggccaaccugauucuccaaaucggaaauauuaucuccauauggaucucucacucaauucagcuugguaaccagaaucagaucgagacuuguaaccaaagugucauuacguacgaaaauaacaccuggguuaaucagacauaugugaacaucagcaauacuaacuucgcugcaggccaguccguagugucugucaaacuggccggaaauucgucauugugcccugugagcgggugggcgauauacaguaaggacaacuccauuagaaucggcucuaaaggugauguuuuugugauuagggagccauucaucagcuguuccccguuagaaugccggaccuuuuuccugacacagggggcucuacucaaugacaagcauucaaacggaaccaucaaagaucgcagucccuaucgaacucugaugagcuguccuauuggcgaggucccaucucccuacaacucccguuuugaaucaguggccuggagcgcaagugccugccacgacggcauaaauuggcuuacaaucgggauuucuggaccugauaacggugcuguagcaguucugaaguauaauggcaucauaaccgacacgauuaaguccuggagaaacaauaucuugaggacucaagagagcgagugugccugcgugaacgggucguguuucaccgucaugacagauggaccaucugacggccaggcuuccuacaaaaucuuucggauugaaaaggguaaaaucgugaagucaguggagaugaaugcccccaacuaucauuacgaagagugcaguuguuacccugauagcuccgagauuacuugcgucugccgcgacaauuggcacgggucuaacagaccauggguuagcuucaaucagaaccucgaauaucagauaggauacaucuguucaggcauuuuuggcgauaauccgaggcccaacgacaaaaccgggaguugcggaccuguguccagcaauggugcgaacggcguaaagggguucucuuuuaaguauggaaacggcguguggaucggucggacaaaaucaaucaguagccgcaauggguucgagaugauuugggauccaaacggcuggaccggaacggacaauaacuuucugauaaagcaagacaucgucggcauuaaugaaugguccggguacucuggaucguucgugcagcaucccgagcugacuggucucgauuguauccgaccuugcuucuggguugaauuaauuagaggcaggccaaaagagaacacaaucuggaccagcggguccucaauaaguuuuuguggagucaauucugacacugugggcuggagcuggcccgauggugcagagcugccguucacaaucgacaaguga

SEQ ID NO: 147036 - RNA, 1410 nt, Artificial Sequence; identical to SEQ ID NO: 144786
  derived and/or modified CDS sequence (opt3) from neuraminidase__InfluenzaA__ADJ40607

SEQ ID NO: 147037 - RNA, 1410 nt, Artificial Sequence; identical to SEQ ID NO: 144786
  derived and/or modified CDS sequence (opt3) from neuraminidase__InfluenzaA__ADJ40617

SEQ ID NO: 147038 - RNA, 1410 nt, Artificial Sequence; identical to SEQ ID NO: 145140
  derived and/or modified CDS sequence (opt3) from neuraminidase__InfluenzaA__ADJ40627

SEQ ID NO: 147039 - RNA, 1410 nt, Artificial Sequence; identical to SEQ ID NO: 144786
  derived and/or modified CDS sequence (opt3) from neuraminidase__InfluenzaA__ADJ40637

SEQ ID NO: 147040 - RNA, 1410 nt, Artificial Sequence; identical to SEQ ID NO: 144786
  derived and/or modified CDS sequence (opt3) from neuraminidase__InfluenzaA__ADJ40657

SEQ ID NO: 147041 - RNA, 1410 nt, Artificial Sequence; identical to SEQ ID NO: 144786
  derived and/or modified CDS sequence (opt3) from neuraminidase__InfluenzaA__ADJ40667

SEQ ID NO: 147042 - RNA, 1410 nt, Artificial Sequence; identical to SEQ ID NO: 144786
  derived and/or modified CDS sequence (opt3) from neuraminidase__InfluenzaA__ADJ40677

SEQ ID NO: 147043 - RNA, 1410 nt, Artificial Sequence
  derived and/or modified CDS sequence (opt3) from neuraminidase__InfluenzaA__ADJ41819
augaaccccaaucagaagaucauuaccauaggcagcgugucccugacaaucgccacuauuugcuuccucaugcaaaucgcuauucuugucacgaccguuacacugcacuuuaaacaguacgaguguucuucaccuccaaacaaucaggugguaccgugcgaacccaucauaaucgagagaaacauuacugaaaucguguauuugaccaauacaaccauugagaaggaaaucuguccuaaauuagucgaguacaggaacuggaguaagccacagugcaaaauaacuggguucgcacccuuuagcaaggacaauuccauucggcugucugccggaggugauaucugggugacacgcgagccuuauguuucgugugacccaggcaagugcuaccaauucgcgcuagggcagggaaccacgcucgauaacaaacauucaaaugacacuauucacgaucgaacccccuaucguacacugcuuaugaacgaacugggcgugccuuuucauuuggguacuagacaggucuguaucgcuuggagcaguuccucuugccacgacgggaaggccuggcuccauguguguaucaccggauacgauaaaaaugcaacagccagcuucauuuaugacggcaggcugguagauuccauaggcucauggaguaagaacauccugcggacccaggagagcgaaugcguuuguauuaaugggacgugcacuguggucaugacagacggaucugcuuccgagcgcgcagauaccaaaauccucuuuauagaggaagguaagauugugcacaucucaccauuaagcggcagugcccaacacguggaggaaugcucuuguuacccgagauaccccggggucaggugcguuugucgggacaacuggaagggauccaaucgcccugugguagauaucaacgugaaagacuauagcauugucucgucuuacgugugcuccggccugguuggugacacuccacgaaagaacgauagaucaaguagcuccuauuguaggaaucccaacaaugagaaagggaaccauggagugaagggcugggcuuucgacgauggcaaugacgucuggauggggcggacaaucucugaagagagccguucaggauacgagaccuuuaaagugauugguggcuggaguacgccuaacuccaaacuucagauaaaucgccagguaaucguugauagcgggaacagaucuggauauucaggcauuuucaguguggaagguaagagcugcaucaauagguguuuuuacgucgaguugauccgggggcgagaacaggagacccgcgugugguggacauccaacucuauugucguguucugcggcacuucgggaaccuauggcacagggagcuggccagacggagccgauauaaaucugaugcccaucuga

SEQ ID NO: 147044 - RNA, 1410 nt, Artificial Sequence; identical to SEQ ID NO: 144786
  derived and/or modified CDS sequence (opt3) from neuraminidase__InfluenzaA__ADJ56642

SEQ ID NO: 147045 - RNA, 1410 nt, Artificial Sequence; identical to SEQ ID NO: 144786
  derived and/or modified CDS sequence (opt3) from neuraminidase__InfluenzaA__ADJ56652

SEQ ID NO: 147046 - RNA, 1410 nt, Artificial Sequence; identical to SEQ ID NO: 144786
  derived and/or modified CDS sequence (opt3) from neuraminidase__InfluenzaA__ADJ80637

SEQ ID NO: 147047 - RNA, 1410 nt, Artificial Sequence; identical to SEQ ID NO: 145804
  derived and/or modified CDS sequence (opt3) from neuraminidase__InfluenzaA__ADJ80647

SEQ ID NO: 147048 - RNA, 1410 nt, Artificial Sequence; identical to SEQ ID NO: 145804
  derived and/or modified CDS sequence (opt3) from neuraminidase__InfluenzaA__ADJ80657

SEQ ID NO: 147049 - RNA, 1410 nt, Artificial Sequence; identical to SEQ ID NO: 144786
  derived and/or modified CDS sequence (opt3) from neuraminidase__InfluenzaA__ADJ80667

SEQ ID NO: 147050 - RNA, 1410 nt, Artificial Sequence; identical to SEQ ID NO: 146699
  derived and/or modified CDS sequence (opt3) from neuraminidase__InfluenzaA__ADJ80677

SEQ ID NO: 147051 - RNA, 1410 nt, Artificial Sequence; identical to SEQ ID NO: 146074
  derived and/or modified CDS sequence (opt3) from neuraminidase__InfluenzaA__ADJ80687

SEQ ID NO: 147052 - RNA, 1410 nt, Artificial Sequence
  derived and/or modified CDS sequence (opt3) from neuraminidase__InfluenzaA__ADJ80697
augaaccccaaucagaagaucauuaccauaggcagcgugugcaugacaaucgggauggccaaccugauucuccaaaucggaaauauuaucuccauauggaucucucacucaauucagcuugguaaccagaaucagaucgagacuuguaaccaaagugucauuacguacgaaaauaacaccuggguuaaucagacauaugugaacaucagcaauacuaacuucgcugcaggccaguccguaauaucugugaaacuggccggaaauucgucauugugcccugucagcggaugggcgauuuacaguaaggacaacuccgugagaaucggcucuaaaggugauguuuuugugauuagggagccauucaucagcuguuccccguuagaaugccggaccuuuuuccugacacagggggcucuacucaaugacaagcauucaaacggaaccaucaaagaucgcagucccuaucgaacucugaugagcuguccuauuggcgaggucccaucucccuacaacucccguuuugaaucaguggccuggagcgcaagugccugccacgacggcauaaauuggcuuacaaucgggauuucuggaccugauaacggugcuguagcaguucugaaguauaauggcaucauaaccgacacgauuaaguccuggagaaacaauaucuugaggacucaagagagcgagugugccugcgugaacgggucguguuucaccgucaugacagauggaccaucugacggccaggcuuccuacaaaaucuuucggauugaaaaggguaaaaucgugaagucaguggagaugaaugcccccaacuaucauuacgaagagugcaguuguuacccugauagcuccgagauuacuugcgucugccgcgacaauuggcacgggucuaacagaccauggguuagcuucaaucagaaccucgaauaucagauaggauacaucuguucaggcauuuuuggcgauaauccgaggcccaacgacaaaaccgggaguugcggaccuguguccagcaauggugcgaacggcguaaagggguucucuuuuaaguauggaaacggcguguggaucggucggacaaaaucaaucaguagccgcaauggguucgagaugauuugggauccaaacggcuggaccggaacggacaauaacuuuuccauaaagcaagacaucgucggcauuaaugaauggucuggguacucggggagcuucgugcagcaucccgagcugacuggucuggauuguauccgaccuugcuucuggguugaacucauuagaggcaggccaaaagagaacacaaucuggaccuccgggucaaguauaucuuuuuguggagugaauagcgacacugucggcugguccuggcccgauggugcagaguuaccguucacaaucgacaaguga

SEQ ID NO: 147053 - RNA, 1410 nt, Artificial Sequence
  derived and/or modified CDS sequence (opt3) from neuraminidase__InfluenzaA__ADJ80717
augaaccccaaucagaagaucauuaccauaggcagcgugugcaugacaaucgggauggccaaccugauucuccaaaucggaaauauuaucuccauauggaucucucacucaauucagcuugguaaccagaaucagaucgagacuuguaaccaaagugucauuacguacgaaaauaacaccuggguuaaucagacauaugugaacaucagcaauacuaacuucgcugcaggccaguccguagugucugucaaacuggccggaaauucgucauugugcccugugagcggaugggcgguuuacaguaaggacaacuccauaagaauuggcucuaaaggugauguguuugucaucagggagccauucauuagcuguuccccguuagaaugccggaccuuuuuccugacacagggggcucuacucaaugacaagcauucaaacggaaccaucaaagaucgcagucccuaucgaacucugaugagcuguccuaucggcgaggugccaucucccuacaacucccguuuugaaucaguagccuggagcgcaagugccugccacgacggcauuaauuggcuuacaauagggaucucuggaccugauaacggugcuguugcagugcugaaguauaauggcauuaucaccgacacgauaaaguccuggagaaacaauauuuugaggacucaagagagcgagugugccugcgucaacgggucguguuucaccgugaugacagauggaccaucugacggccaggcuuccuacaaaaucuuucggaucgaaaaggguaaaauugugaagucagucgagaugaaugcccccaacuaucauuacgaagagugcaguuguuacccugauagcuccgagaucacuugcguuugccgcgacaauuggcacgggucuaacagaccaugggugagcuucaaucagaaccucgaauaucagauuggauacauauguucaggcaucuuuggcgauaauccgaggcccaacgacaaaaccgggaguugcggaccuguauccagcaauggugcgaacggcgugaagggguucucuuuuaaguauggaaacggcgucuggauuggucggacaaaaucaaucaguagccgcaauggguucgagaugaucugggauccaaacggcuggaccggaacggacaauaacuuuuccauuaagcaagacauagugggcaucaaugaauggucuggguacucggggagcuucguucagcaucccgagcugacuggucuggauuguauucgaccuugcuucuggguggaacucaucagaggcaggccaaaagagaacacaauuuggaccuccgggucaaguaucucuuuuuguggagucaauagcgacacugugggcugguccuggcccgauggugcagaguuaccguucacaauagacaaguga

SEQ ID NO: 147054 - RNA, 1410 nt, Artificial Sequence
  derived and/or modified CDS sequence (opt3) from neuraminidase__InfluenzaA__ADJ80727
augaaccccaaucagaagaucauuaccauaggcagcgugugcaugacaaucgggauggccaaccugauucuccaaaucggaaauauuaucuccauauggaucucucacucaauucagcuugguaaccagaaucagaucgagacuuguaaccaaagugucauuacguacgaaaauaacaccuggguuaaucagacauaugugaacaucagcaauacuaacuucgcugcaggccaguccguagugucugucaaacuggccggaaauucgucauugugcccugugagcggauggguuauauacaguaaggacaacuccauuagaaucggcucuaaaggugauguguuugucauuagggagccauucaucagcuguuccccguuagaaugccggaccuuuuuccugacacagggggcgcuacucaaugacaagcauucaaacggaaccaucaaagaucgcagucccuaucgaacucugaugagcuguccuauuggcgaggugccaucucccuacaacucccguuuugaaucaguagcuuggagcgccagugcaugccacgacggcauaaauuggcuuacaaucgggauuucuggaccugauaacggugccguugcugugcugaaguauaauggcaucauaaccgacacgauuaaguccuggagaaacaauaucuugaggacucaagagagcgagugugcaugcgucaacgggucguguuucaccgugaugacagauggaccaucugacggccaggccuccuacaaaaucuuucggauugaaaaggguaaaaucgugaagucagucgagaugaaugcucccaacuaucauuacgaagagugcaguuguuacccugauagcuccgagauuacuugcguuugccgcgacaauuggcacgggucuaacagaccaugggugagcuucaaucagaaccucgaauaucagauaggauacaucuguucaggcauuuuuggcgauaauccgaggcccaacgacaaaaccgggaguugcggaccuguauccagcaauggugccaacggcgugaagggguucucuuuuaaguauggaaacggcgucuggaucggucggacaaaaucaaucaguagccgcaauggguucgagaugauuugggauccaaacggcuggaccggaacggacaauaacuuuuccauaaagcaagacaucgugggcauuaaugaauggucuggguacucggggagcuucguucagcaucccgagcugacuggucuggauuguauccgaccuugcuucuggguggaacucauuagaggcaggccaaaagagaacacaaucuggaccuccgggucaaguauaucuuuuuguggagucaauagcgacacugugggcugguccuggcccgauggugcggaguuaccguucacaaucgacaaguga

SEQ ID NO: 147055 - RNA, 1410 nt, Artificial Sequence; identical to SEQ ID NO: 145553
  derived and/or modified CDS sequence (opt3) from neuraminidase__InfluenzaA__ADJ80737

SEQ ID NO: 147056 - RNA, 1410 nt, Artificial Sequence
  derived and/or modified CDS sequence (opt3) from neuraminidase__InfluenzaA__ADJ80747
augaaccccaaucagaagaucauuaccauaggcagcgugugcaugacaaucgggauggccaaccugauucuccaaaucggaaauauuaucuccauauggaucucucacucaauucagcuugguaaccagaaucagaucgagacuuguaaccaaagugucauuacguacgaaaauaacaccuggguuaaucagacauaugugaacaucagcaauacuaacuucgcugcaggccaguccguagugucugucaaacuggccgggucgagcagcuugugcccugugaguggaugggcgauauacuccaaggacaauucuauuagaaucggcagcaaaggugauguuuuugugauuagggagccauucaucuccuguucaccguuagaaugccggaccuuuuuccugacacagggggcucuacucaacgacaagcauaguaauggaaccaucaaagaucgcagccccuaucgaacucugaugucuuguccuauuggcgaggucccaucccccuacaacucacguuuugaaagcguggccuggagugcaucugccugccacgacggcauaaacuggcuuacaaucgggauuuccggaccugauaauggugcuguagcaguucugaaguauaacggcaucauaaccgacacgauuaagagcuggagaaauaacaucuugaggacucaagagucggagugugccugcgugaaugggucuuguuucaccgucaugacagauggaccauccgacggccaggcuucauacaaaaucuuucggauugaacgcgguaagaucgugaaaaguguggagaugaacgcccccaauuaucauuacgaagagugcagcuguuacccugauuccucugagauuacuugcgucugcagagacaacuggcacgggagcaauaggccauggguuucauucaaccagaaucucgaauaucagauaggauacaucuguaguggcauuuuuggcgauaacccgcggcccaaugacaagaaaggguccugcggaccugugagcucuaacggugcgaauggcguaaagggguucucauuuaaguauggaaacggcguguggaucggucgcaccaaaaguaucagcucccgaaacggguucgagaugauuugggauccaaauggcuggacaggaaccgacaacaauuuuucuauaaagcaagacaucgucgaaauuaacgaguggucgggcuacagcggguccuucgugcagcaucccgaacugacgggacuggauuguaucagaccuugcuucuggguugagcucauuaggggucggccaaaagagaauacuaucuggacaucaggcaguucuauaucauuuuguggggugaacuccgacaccgucggauggucauggcccgauggcgcagaauuaccguucacuaucgacaaguga

SEQ ID NO: 147057 - RNA, 1410 nt, Artificial Sequence; identical to SEQ ID NO: 144786
  derived and/or modified CDS sequence (opt3) from neuraminidase__InfluenzaA__ADJ80757

SEQ ID NO: 147058 - RNA, 1410 nt, Artificial Sequence; identical to SEQ ID NO: 144786
  derived and/or modified CDS sequence (opt3) from neuraminidase__InfluenzaA__ADJ80767

SEQ ID NO: 147059 - RNA, 1410 nt, Artificial Sequence; identical to SEQ ID NO: 145369
  derived and/or modified CDS sequence (opt3) from neuraminidase__InfluenzaA__ADJ80777

SEQ ID NO: 147060 - RNA, 1410 nt, Artificial Sequence; identical to SEQ ID NO: 144786
  derived and/or modified CDS sequence (opt3) from neuraminidase__InfluenzaA__ADJ80787

SEQ ID NO: 147061 - RNA, 1410 nt, Artificial Sequence
  derived and/or modified CDS sequence (opt3) from neuraminidase__InfluenzaA__ADJ80797
augaaccccaaucagaagaucauuaccauaggcagcgugugcaugacaaucgggauggccaaccugauucuccaaaucggaaauauuaucuccauauggaucucucacucaauucagcuugguaacaaaaaucagaucgagacuuguaaccagagugucauuacguacgaaaauaacaccuggguuaaucaaacauaugugaacaucagcaauacuaacuucgcugcaggccaguccguagugucugucaagcuggccggaaauucgucauugugcccugugagcggaugggcgauauacaguaaagacaacuccauuagaaucggcucuaagggugauguuuuugugauuagggagccauucaucagcuguuccccguuagaaugccggaccuuuuuccugacacagggggcucuacucaaugacaaacauucaaacggaaccaucaaggaucgcagucccuaucgaacucugaugagcuguccuauuggcgaggucccaucucccuacaacucccguuuugaaucaguggccuggagcgcaagugccugccacgacggcauaaauuggcuuacaaucgggauuucuggaccugauaacggugcuguagcaguucugaaguauaauggcaucauaaccgacacgauuaaauccuggagaaacaauaucuugaggacucaggagagcgagugugccugcgugaacgggucguguuucaccgucaugacagauggaccaucugacggccaggcuuccuacaagaucuuucggauugaaaaagguaagaucgugaaaucaguggagaugaaugcccccaacuaucauuacgaagagugcaguuguuacccugauagcuccgagauuacuugcgucugccgcgacaauuggcacgggucuaacagaccauggguuagcuucaaucaaaaccucgaauaucagauaggauacaucuguucaggcauuuuuggcgauaauccgaggcccaacgacaagaaggggaguugcggaccuguguccagcaauggugcgaacggcguaaaaggguucucuuuuaaguauggaaacggcguguggaucggucggaccaaaucaaucaguagccgcaauggguucgagaugauuugggauccaaacggcuggacaggaaccgacaauaacuuuuccauaaagcaggacaucgucggcauuaaugaauggucuggguacucggggagcuucgugcaacaucccgagcugacgggucuggauuguauccgaccuugcuucuggguugaacucauuagaggcaggccaaaagagaacacuaucuggacauccgggucaaguauaucuuuuuguggagugaauagcgacaccgucggcugguccuggcccgauggugcagaguuaccguucacuaucgacaaguga

SEQ ID NO: 147062 - RNA, 1410 nt, Artificial Sequence; identical to SEQ ID NO: 145804
  derived and/or modified CDS sequence (opt3) from neuraminidase__InfluenzaA__ADJ80807

SEQ ID NO: 147063 - RNA, 1410 nt, Artificial Sequence; identical to SEQ ID NO: 144786
  derived and/or modified CDS sequence (opt3) from neuraminidase__InfluenzaA__ADJ80817

SEQ ID NO: 147064 - RNA, 1410 nt, Artificial Sequence; identical to SEQ ID NO: 144786
  derived and/or modified CDS sequence (opt3) from neuraminidase__InfluenzaA__ADJ80827

SEQ ID NO: 147065 - RNA, 1410 nt, Artificial Sequence; identical to SEQ ID NO: 146299
  derived and/or modified CDS sequence (opt3) from neuraminidase__InfluenzaA__ADJ80837

SEQ ID NO: 147066 - RNA, 1410 nt, Artificial Sequence; identical to SEQ ID NO: 146797
  derived and/or modified CDS sequence (opt3) from neuraminidase__InfluenzaA__ADJ80851

SEQ ID NO: 147067 - RNA, 1410 nt, Artificial Sequence
  derived and/or modified CDS sequence (opt3) from neuraminidase__InfluenzaA__ADJ80861
augaaccccaaucagaagaucauuaccauaggcagcgugugcaugacaaucgggauggccaaccugauucuccaaaucggaaauauuaucuccauauggaucucucacucaauucagcuugguaaccagaaucagaucgagacuuguaaccaaagugucauuacguacgaaaauaacaccuggguuaaucagacauaugugaacaucagcaauacuaacuucgcugcaggccaguccguagugucugucaaacuggccggaaauucgucauugugcccugugagcgggugggcgauauacaguaaggacaacuccauuagaaucggcucuaaaggugauguuuuugugauuagggagccauucaucagcuguuccccguuagaaugccggaccuuuuuccugacacagggggcucuacucaaugacaagcauucaaacggaaccaucaaagaucgcagucccuaucgaacucugaugagcuguccuauuggcgaggucccaucucccuacaacucccguuuugaaucaguggccuggagcgcaagugccugccacgacggcauaaauuggcuuacaaucgggauuucuggaccugauaacggugcuguagcaguucugaaguauaauggcaucauaaccgacacgauuaaguccuggagaaacaauaucuugaggacucaagagagcgagugugccugcgugaacgggucguguuucaccgucaugacagauggaccaucugacggccaggcuuccuacaaaaucuuucggauugaaaaggguaaaaucgugaagucaguggagaugaaugcccccaacuaucauuacgaagagugcaguuguuacccugauagcuccgagauuacuugcgucugccgcgacaauuggcacgggucuaacagaccauggguuagcuucaaucagaaccucgaauaucagauaggauacaucuguucaggcauuuuuggcgauaauccgaggcccaacgacaaaaccgggaguugcggaccuguguccccaaauggugcgaacggcguaaagggguucagcuuuaaguauggaaacggcguguggaucggucggacaaaaucuaucucaagucgcaauggguucgagaugauuugggaucccaacggcuggaccggaacggacaauaacuuuagcauaaagcaagacaucgucggcauuaaugaaugguccggguacucuggaucguucgugcagcauccugagcugacuggucuggauuguauccgaccaugcuucuggguugaacucauuagaggcaggcccaaagagaacacaaucuggaccagcggguccucaauaaguuuuuguggagucaauucugacacugugggcuggagcuggccggauggugcagaguuaccuuucacaaucgacaaguga

SEQ ID NO: 147068 - RNA, 1410 nt, Artificial Sequence; identical to SEQ ID NO: 147061
  derived and/or modified CDS sequence (opt3) from neuraminidase__InfluenzaA__ADJ80871

SEQ ID NO: 147069 - RNA, 1410 nt, Artificial Sequence; identical to SEQ ID NO: 144786
  derived and/or modified CDS sequence (opt3) from neuraminidase__InfluenzaA__ADJ80886

SEQ ID NO: 147070 - RNA, 1410 nt, Artificial Sequence
  derived and/or modified CDS sequence (opt3) from neuraminidase__InfluenzaA__ADJ80896
augaaccccaaucagaagaucauuaccauaggcagcgugugcaugacaaucgggauggccaaccugauucuccaaaucggaaauauuaucuccauauggaucucucacucaauucagcuugguaaccagaaucagaucgagacuuguaaccaaaguauuaucacguacgaaaauaacaccugggucaaucagacauauguuaacauaagcaauacuaacuucgcugcaggccaguccgugguaucugugaaacugaccggaaauucgucauugugcccugucagcggaugggccauuuacaguaaggacaacuccaucagaauuggcucuaaaggugauguguuuguuaucagggagccauucaucagcuguuccccguuagaaugccggacauuuuuccugacccagggggcgcuacucaaugacaagcauucaaacggaacuauuaaagaucgcagucccuaucgaacacugaugagcuguccuauaggcgaggugccaucucccuacaacucccguuuugaaucagucgcuuggagcgccagugcaugccacgacggcaucaauuggcuuaccauugggaucucuggaccugauaacggugccguggcuguacugaaguauaauggcauaauuacggacacuaucaaguccuggagaaacaauaucuugaggacccaagagagcgagugugcaugcguuaacgggucguguuucacagugaugacugauggaccaucugacggccaggccuccuacaaaauuuuucggaucgaaaaggguaaaauugucaagucaguggagaugaaugcucccaacuaucauuacgaagagugcaguuguuacccugauagcuccgagauaaccugcgugugccgcgacaauuggcacgggucuaacagaccaugggucagcuucaaucagaaccucgaauaucagaucggauacauuuguucaggcaucuuuggcgauaauccgaggcccaacgacaaaacagggaguugcggaccuguuuccagcaauggugccaacggcgugaagggguucucuuuuaaguauggaaacggcguauggaucggucggaccaaaucaauuaguagccgcaauggguucgagaugauaugggauccaaacggcuggacgggaacugacaauaacuuuuccaucaagcaagacauugugggcaucaaugaauggucuggguacucggggagcuucguccagcaucccgagcugacaggucuggauuguauucgaccuugcuucuggguggaacucaucagaggcaggccaaaagagaacaccauauggacuuccgggucaaguaucucuuuuuguggaguuaauagcgacacagugggcugguccuggcccgauggugcggaguuaccguucaccauugacaaguga

SEQ ID NO: 147071 - RNA, 1410 nt, Artificial Sequence
  derived and/or modified CDS sequence (opt3) from neuraminidase__InfluenzaA__ADJ80913
augaaccccaaucagaagaucauuaccauaggcagcgugugcaugacaaucgggauggccaaccugauucuccaaaucggaaauauuaucuccauauggaucucucacucaauucagcuugguaaccagaaucagaucgagacuuguaaccaaagugucauuacguacgaaaauaacaccuggguuaaucagacauaugugaacaucagcaauacuaacuucgcugcaggccaguccguagugucugucaaacuggccgggucgucaucauugugcccugugaguggaugggcgauauacuccaaggacaauucuauuagaaucggcagcaaaggugauguuuuugugauuagggagccauucaucuccuguucaccguuagaaugccggaccuuuuuccugacacagggggcucuacucaacgacaagcauaguaauggaaccaucaaagaucgcagccccuaucgaacucugaugucuuguccuauuggcgaggucccaucccccuacaacucacguuuugaaagcguggccuggagugcaucugccugccacgacggcauaaacuggcuuacaaucgggauuuccggaccugauaauggugcuguagcaguucugaaguauaacggcaucauaaccgacacgauuaagagcuggagaaauaacaucuugaggacucaagagucggagugugccugcgugaaugggucuuguuucaccgucaugacagauggaccauccgacggccaggcuucauacaaaaucuuucggauugaaaaggguaaaaucgugaagaguguggagaugaacgcccccaauuaucauuacgaagagugcagcuguuacccugauuccucugagauuacuugcgucugccgcgacaacuggcacgggagcaauagaccauggguuucauucaaccagaaucucgaauaucagauaggauacaucuguaguggcauuuuuggcgauaacccgaggcccaaugacaaaaagggguccugcggaccugugagcucuaacggugcgaauggcguaaagggguucucauuuaaauauggaaacggcguguggaucggucggaccaagaguaucagcucccgcucuggguucgagaugauuugggauccaaacggcuggacaggaaccgacaauaacuuuucgauaaaacaagacaucgucggcauuaaugaauggagcggguacuccggaucauucgugcagcaucccgagcugacgggucuggauuguauccgaccuugcuucuggguugaacucauuagaggcaggccaaaggagaacacuaucuggacaagugggucuagcauauccuuuuguggagugaauagcgacaccgucggcuggagcuggcccgauggugcagaguuaccguucacuaucgacaaauga

SEQ ID NO: 147072 - RNA, 1410 nt, Artificial Sequence; identical to SEQ ID NO: 144786
  derived and/or modified CDS sequence (opt3) from neuraminidase__InfluenzaA__ADJ80930

SEQ ID NO: 147073 - RNA, 1410 nt, Artificial Sequence; identical to SEQ ID NO: 144786
  derived and/or modified CDS sequence (opt3) from neuraminidase__InfluenzaA__ADJ80950

SEQ ID NO: 147074 - RNA, 1410 nt, Artificial Sequence; identical to SEQ ID NO: 146074
  derived and/or modified CDS sequence (opt3) from neuraminidase__InfluenzaA__ADJ80960

SEQ ID NO: 147075 - RNA, 1410 nt, Artificial Sequence; identical to SEQ ID NO: 147061
  derived and/or modified CDS sequence (opt3) from neuraminidase__InfluenzaA__ADJ80970

SEQ ID NO: 147076 - RNA, 1410 nt, Artificial Sequence; identical to SEQ ID NO: 144786
  derived and/or modified CDS sequence (opt3) from neuraminidase__InfluenzaA__ADJ80980

SEQ ID NO: 147077 - RNA, 1410 nt, Artificial Sequence; identical to SEQ ID NO: 147061
  derived and/or modified CDS sequence (opt3) from neuraminidase__InfluenzaA__ADJ80996

SEQ ID NO: 147078 - RNA, 1410 nt, Artificial Sequence
  derived and/or modified CDS sequence (opt3) from neuraminidase__InfluenzaA__ADJ81006
augaaccccaaucagaagaucauuaccauaggcagcgugugcaugacaaucgggauggccaaccugauucuccaagucggaaauaucauuuccaucuggauaucucacucaauccagcuugguaaccagaaucagauugagacuuguaaccaaaguaucauuacguacgaaaauaacaccuggguuaaucagacauaugugaacaucagcaauacuaacuucgcugcaggccaguccguagugucugucaaacuggccggaaauucgucauugugcccugugagcggaugggcgauauacaguaaggacaacuccauuagaaucggcucuaaaggugauguuuuugugauuagggagccauucaucagcuguuccccguuagaaugccggaccuuuuuccugacacagggggcucuacucaaugacaagcauucaaacggaaccaucaaagaucgcagucccuaucgaacucugaugagcuguccuauuggcgaggucccaucucccuacaacucccguuuugaaucaguggccuggagcgcaagugccugccacgacggcauaaauuggcuuacaaucgggauuucuggaccugauaacggugcuguagcaguucugaaguauaauggcaucauaaccgacacgauuaaguccuggagaaacaauaucuugaggacucaagagagcgagugugccugcgugaacgggucguguuucaccgucaugacagauggaccaucugacggccaggcuuccuacaaaaucuuucggauugaaaaggguaaaaucgugaagucaguggagaugaaugcccccaacuaucauuacgaagagugcaguuguuacccugauagcuccgagauuacuugcgucugccgcgacaauuggcacgggucuaacagaccauggguuagcuucaaucagaaccucgaauaucagauaggauacaucuguucaggcauuuuuggcgauaauccgaggcccaacgacaaaaccgggaguugcggaccuguguccagcaauggugcgaacggcguaaagggguucucuuuuaaguauggaaacggcguguggaucggucggacaaaaucaaccaguagccgcaauggguucgagaugaucugggauccaaacggcuggacgggaacugacaauaacuuuuccauuaagcaagacauagucggcaucaaugaauggucuggguacucggggagcuucgugcagcaucccgagcugacaggucuggauuguauucgaccuugcuucuggguugaacucaucagaggcaggccaaaagagaacaccauuuggacuuccgggucaaguaucucuuuuuguggagugaauagcgacacagucggcugguccuggcccgauggugcagaguuaccguucaccauagacaaguga

SEQ ID NO: 147079 - RNA, 1410 nt, Artificial Sequence; identical to SEQ ID NO: 146797
  derived and/or modified CDS sequence (opt3) from neuraminidase__InfluenzaA__ADJ81016

SEQ ID NO: 147080 - RNA, 1410 nt, Artificial Sequence; identical to SEQ ID NO: 146986
  derived and/or modified CDS sequence (opt3) from neuraminidase__InfluenzaA__ADJ81026

SEQ ID NO: 147081 - RNA, 1410 nt, Artificial Sequence; identical to SEQ ID NO: 144786
  derived and/or modified CDS sequence (opt3) from neuraminidase__InfluenzaA__ADJ81036

SEQ ID NO: 147082 - RNA, 1410 nt, Artificial Sequence
  derived and/or modified CDS sequence (opt3) from neuraminidase__InfluenzaA__ADJ81046
augaaccccaaucagaagaucauuaccauaggcagcgugugcaugacagucgggauggccaaccugauccuccaaauuggaaauaucauuuccaucuggauaucucacucaauccagcuugguaaccagaaucagauugagacuuguaaccaaaguguuaucacguacgaaaauaacaccugggugaaucagacauauguaaacauuagcaauacuaacuucgcugcaggccaguccguggucucugugaaacuggccggaaauucgucauugugcccuguuagcgggugggcgaucuacaguaaggacaacuccauaagaauuggcucuaaaggugauguguuugucaucagggagccauucauuagcuguuccccguuagaaugccggaccuuuuuccugacacagggggcucuacucaaugacaagcauucaaacggaaccaucaaagaucgcagucccuaucgaacucugaugagcuguccuaucggcgaggugccaucucccuacaacucccguuuugaaucaguagccuggagcgcaagugccugccacgacggcauuaauuggcuuacaauagggaucucuggaccugauaacggugcuguugcagugcugaaguauaauggcauuaucaccgacacgauaaaguccuggagaaacaauauuuugaggacucaagagagcgagugugccugcgucaacgggucguguuucaccgugaugacagauggaccaucugacggccaggcuuccuacaaaaucuuucggaucgaaaaggguaaaauugugaagucagucgagaugaaugcccccaacuaucauuacgaagagugcaguuguuacccugauagcuccgagaucacuugcguuugccgcgacaauuggcacgggucuaacagaccaugggugagcuucaaucagaaccucgaauaucagauuggauacauauguucaggcaucuuuggcgauaauccgaggcccaacgacaaaaccgggaguugcggaccuguauccagcaauggugcgaacggcgugaagggguucucuuuuaaguauggaaacggcgucuggauuggucggacaaaaucaaucaauagucgcaacggguucgagaugaucugggauccaaauggcuggaccggaacggacaacaauuuuagcauuaagcaagacauagugggcacuaacgaaugguccggguacucuggaucguucguucagcaucccgagcugacaggucuggauuguauccgaccuugcuucuggguggaacucauuagaggcaggccaaaagagaauaccaucuggacuagcggguccucaauuaguuuuuguggagucaacucugacacagugggcuggagcuggcccgauggugcagaguuaccguucaccaucgacaaguga

SEQ ID NO: 147083 - RNA, 1410 nt, Artificial Sequence
  derived and/or modified CDS sequence (opt3) from neuraminidase__InfluenzaA__ADJ81056
augaaccccaaucagaagaucauuaccauaggcagcgugugcaugacaaucgggauggccaaccugauucuccaaaucggaaauauuaucuccauauggaucucucacucaauucagcuugguaaccagaaucagaucgagacuuguaaccaaagugucauuacguacgaaaauaacaccuggguuaaucagacauaugugaacaucagcaauacuaacuucgcugcaggccaguccguagugccugucaaacuggccgggucuucgucauugugcccagugagcggaugggcgauauacaguaaggacaauuccauuagaaucggcucuaaaggugauguuuuugugauuagggagccguucaucagcuguucccccuuagaaugccggaccuuuuuccugacacagggggcucuacucaacgacaagcauucaaauggaaccaucaaagaucgcaguccuuaucgaacucugaugagcuguccaauuggcgagguccccucuccuuacaacucccguuuugaaucaguggccuggagcgcaagugccugccacgacggcauaaacuggcuuacaaucgggauuucuggaccagauaauggugcuguagcaguucugaaguauaacggcaucauaaccgacacgauuaaguccuggagaaauaacaucuugaggacucaagagagcgagugugccugcgugaaugggucguguuucaccgucaugacagauggacccucugacggccaggcuuccuacaaaaucuuucggauugaaaaggguaaaaucgugaagucaguggagaugaacgccccuaauuaucauuacgaagagugcaguuguuacccagauagcuccgagauuacuugcgucugccgcgacaacuggcacgggucuaauagaccguggguuagcuucaaccagaaucucgaauaucagauaggauacaucuguucaggcauuuuuggcgauaaccccaggccuaaugacaaaaaggggaguugcggaccaguguccagcaacggugcgaauggcguaaagggguucucuuuuaaauauggaaacggcguguggaucggucggaccaagucaaucaacagucgcaauggguucgagaugauuugggaucccaacggcuggacaggaaccgacaauaacuuuagcauaaaacaagacaucgucggcauuaaugaaugguccggguacucuggaucguucgugcagcauccugagcugacgggucuggauuguauccgaccaugcuucuggguugaacucauuagaggcaggcccaaggagaacacuaucuggacaagcggguccucaauaaguuuuuguggagucaauucugacaccgugggcuggagcuggccggauggugcagaguuaccuuucacuaucgacaaauga

SEQ ID NO: 147084 - RNA, 1410 nt, Artificial Sequence; identical to SEQ ID NO: 146074
  derived and/or modified CDS sequence (opt3) from neuraminidase__InfluenzaA__ADJ81066

SEQ ID NO: 147085 - RNA, 1410 nt, Artificial Sequence; identical to SEQ ID NO: 144647
  derived and/or modified CDS sequence (opt3) from neuraminidase__InfluenzaA__ADJ84775

SEQ ID NO: 147086 - RNA, 1410 nt, Artificial Sequence
  derived and/or modified CDS sequence (opt3) from neuraminidase__InfluenzaA__ADJ88785
augaaccccaaucagaagaucauuaccauaggcagcgugucccugacaaucucuacuauuugcuucuuuaugcaaaucgccauucucaucacgaccgucacacuucacuucaaacaguacgaguuuaacucaccuccaaauaaccagguuaugcugugugaaccgacuauaaucgagagaaauauuaccgaaaucguguauuugacaaacaccacuauugagaaggaaaucugccccaaauuagcugaguacaggaauuggaguaagccucagugugacauaacaggguucgcaccauuuagcaaagauaacuccauucggcugucugccggaggugacaucuggguaacccgcgagcccuaugugucgugcgauccugacaaguguuaccaauucgcgcuaggccaggggacgacucucaauaacguccauucaaauaacaccgugcgagaucguacaccauauagaacucugcuuaugaaugaacugggaguucccuuucacuugggcaccaaacaggugugcauugcuuggagcaguuccucuugucaugacgguaaggccuggcuccacgucugcaucacaggggaugacaagaacgcaaccgccagcuucaucuacaauggaaggcugguggauuccguaguuucauggaguaaagagauucugcggacgcaggaaagcgagugugugugcauaaacggcacuuguacagucgugaugaccgacggcucugcuuccgggaaggcagauacuaaaauccucuuuauugaggaaggaaagaucgugcauacaucaaccuuaagcgguagugcccaacacgucgaggaaugcucuugcuauccucgcuacccaggcguuagaugugugugcagggacaacuggaagggguccaaucggccgauaguagauauuaacaucaaagaccacagcguggucucgucuuacguguguuccggacugguuggcgacacgccccgcaagaaugauucaaguagcuccucucauugccuugacccuaacaaugaggaaggugggcacggagugaaaggcugggcuuucgaugacggcaacgaugucuggauggggcgaaccaucagcgagaagucaagauugggauaugagacauuuaaagugauugaagguuggaguaaucauaaguccaaacugcagaucaacaggcagguaauuguugaccggggcaaucguagcggguacucuggaauauucucaguggagggcaagaguuguaucaaccgcugcuuuuaugucgaacuaauuagagguaggaaggaggaaacugaggugcucuggaccagcaauuccaucgucguguucugugggacaucuggcacuuacggaaccggcucguggccagauggggccgaccugaaccuuaugcccaucuga

SEQ ID NO: 147087 - RNA, 1410 nt, Artificial Sequence; identical to SEQ ID NO: 144786
  derived and/or modified CDS sequence (opt3) from neuraminidase__InfluenzaA__ADK21716

SEQ ID NO: 147088 - RNA, 1410 nt, Artificial Sequence; identical to SEQ ID NO: 144786
  derived and/or modified CDS sequence (opt3) from neuraminidase__InfluenzaA__ADK21726

SEQ ID NO: 147089 - RNA, 1410 nt, Artificial Sequence; identical to SEQ ID NO: 144786
  derived and/or modified CDS sequence (opt3) from neuraminidase__InfluenzaA__ADK21736

SEQ ID NO: 147090 - RNA, 1410 nt, Artificial Sequence
  derived and/or modified CDS sequence (opt3) from neuraminidase__InfluenzaA__ADK21746
augaaccccaaucagaagaucauuaccauaggcagcgugugcaugacaaucgggauggccaaccugauucuccaaaucggaaauauuaucuccauauggaucucucacucaauucagcuugguaaccagaaucagaucgagacuuguaaccaaaguauuaucacguacgaacauaauaccugggucaaccagacauauguuaauauaagcaacacuaauuucgcugcaggccaguccgugguaucugugaaacuggccgggaacucgucauugugcccugucagcggaugggcgauuuacaguaaggacaauuccaucagaauuggcucuaaaggugauguguuuguuaucagggagccauucaucagcuguuccccguuagaaugccggaccuuuuuccugacacagggggcucuacucaacgacaagcacucaaauggaaccauuaaagaucgcagucccuaucgaacucugaugagcuguccuauaggcgaggugccaucucccuacaacucccguuuugaaucagucgccuggagcgcaagugccugccaugacggcaucaacuggcuuacaauugggaucucuggaccugauaauggugcuguggcaguacugaaguauaacggcauaauuaccgacacgaucaaguccuggagaaauaacaucuugaggacucaagagagcgagugugccugcguuaaugggucguguuucaccgugaugacagauggaccaucugacggccaggcuuccuacaaaauuuuucggaucgaaaaggguaaaauugucaagucaguggagaugaacgcccccaauuaucacuacgaagagugcaguuguuacccugauagcuccgagauaacuugcgugugccgcgacaacuggcaugggucuaauagaccaugggucagcuucaaccagaaucucgaauaucagaucggauacauuuguucaggcaucuuuggcgauaacccgaggcccaaugacaaaaccgggaguugcggaccuguuuccagcaacggugcgaauggcgugaagggguucucuuuuaaguauggaaacggcguauggaucggucggacaaaaucaauuaguagccgcuccggguucgagaugauaugggauccaaacggcuggaccggaacggacaauaacuuuucuaucaagcaagacauugugggcaucaaugaauggucgggguacagcggauccuucguccagcaccccgagcugacuggucuggauuguauucgaccuugcuucuggguggaacucaucagaggcaggccagaggagaacacaauauggaccucagggaguucuaucagcuuuuguggaguuaauuccgacacugugggcuggucauggcccgauggugcagaauuaccguucacaauugacaaauga

SEQ ID NO: 147091 - RNA, 1410 nt, Artificial Sequence; identical to SEQ ID NO: 144786
  derived and/or modified CDS sequence (opt3) from neuraminidase__InfluenzaA__ADK21756

SEQ ID NO: 147092 - RNA, 1410 nt, Artificial Sequence; identical to SEQ ID NO: 144786
  derived and/or modified CDS sequence (opt3) from neuraminidase__InfluenzaA__ADK21766

SEQ ID NO: 147093 - RNA, 1410 nt, Artificial Sequence; identical to SEQ ID NO: 146217
  derived and/or modified CDS sequence (opt3) from neuraminidase__InfluenzaA__ADK21776

SEQ ID NO: 147094 - RNA, 1410 nt, Artificial Sequence; identical to SEQ ID NO: 144786
  derived and/or modified CDS sequence (opt3) from neuraminidase__InfluenzaA__ADK21786

SEQ ID NO: 147095 - RNA, 1410 nt, Artificial Sequence; identical to SEQ ID NO: 144786
  derived and/or modified CDS sequence (opt3) from neuraminidase__InfluenzaA__ADK21796

SEQ ID NO: 147096 - RNA, 1410 nt, Artificial Sequence; identical to SEQ ID NO: 144786
  derived and/or modified CDS sequence (opt3) from neuraminidase__InfluenzaA__ADK21806

SEQ ID NO: 147097 - RNA, 1410 nt, Artificial Sequence; identical to SEQ ID NO: 144786
  derived and/or modified CDS sequence (opt3) from neuraminidase__InfluenzaA__ADK21816

SEQ ID NO: 147098 - RNA, 1410 nt, Artificial Sequence; identical to SEQ ID NO: 146764
  derived and/or modified CDS sequence (opt3) from neuraminidase__InfluenzaA__ADK21826

SEQ ID NO: 147099 - RNA, 1410 nt, Artificial Sequence; identical to SEQ ID NO: 146677
  derived and/or modified CDS sequence (opt3) from neuraminidase__InfluenzaA__ADK21836

SEQ ID NO: 147100 - RNA, 1410 nt, Artificial Sequence
  derived and/or modified CDS sequence (opt3) from neuraminidase__InfluenzaA__ADK21846
augaaccccaaucagaagaucauuaccauaggcagcgugugcaugacaaucgggauggccaaccugauucuccaaaucggaaauauuaucuccauauggaucucucacucaauucagcuugguaaccagaaucagaucgagacuuguaaccaaagugucauuacguacgaaaauaacaccuggguuaaucagacauaugugaacaucagcaauacuaacuucgcugcaggccaguccguagugucugucaaacuggccggaaauucgucauugugcccugugagcggaugggcgauauacaguaaggacaacuccauuagaaucggcucuaaaggugauguuuuugugauuagggagccauucaucagcuguuccccguuagaaugccggaccuuuuuccugacacagggggcucuacucaaugacaagcauucaaacggaaccaucaaagaucgcagucccuaucgaacucugaugagcuguccuauuggcgaggucccaucucccuacaacucccguuuugaaucaguggccuggagcgcaagugccugccacgacggcauaaauuggcuuacaaucgggauuucuggaccugauaacggugcuguagcaguucugaaguauaauggcaucauaaccgacacgauuaaguccuggagaaacaauaucuugaggacucaagagagcgagugugccugcgugaacgggucguguuucaccgucaugacagauggaccaucugacggccaggcuuccuacaaaaucuuucggauugaaaaggguaaaaucgugaagucaguggagaugaaugcccccaacuaucauuacgaagagugcaguuguuacccugauagcuccgagauuacuugcgucugccgcgacaauuggcacgggucuaacagaccauggguuagcuucaaucagaaccucgaauaucagauaggauacaucuguucaggcauuuuuggcgauaauccgaggcccaacgacaaaaccgggaguugcggaccuguguccagcaauggugcgaacggcguaaagggguucucuuuuaaguauggaaacggcguguggaucggucggacaaaaucaaucaguagccgcaauggguucgagaugauuugggauccaaacggcuggaccggaacggacaauaacuuuuccaugaagcaagacauagucggcaucaaugaauggucuggguacucggggagcuucgugcagcaucccgagcugacuggucuggauuguauucgaccuugcuucuggguugaacucaucagaggcaggccaaaagagaacacaauuugggcauccgggucaaguaucucuuuuuguggagugaauagcgacaccgucggcugguccuggcccgauggugccgaguuaccguucacuauagacaaguga

SEQ ID NO: 147101 - RNA, 1410 nt, Artificial Sequence; identical to SEQ ID NO: 144786
  derived and/or modified CDS sequence (opt3) from neuraminidase__InfluenzaA__ADK21856

SEQ ID NO: 147102 - RNA, 1410 nt, Artificial Sequence; identical to SEQ ID NO: 144786
  derived and/or modified CDS sequence (opt3) from neuraminidase__InfluenzaA__ADK21866

SEQ ID NO: 147103 - RNA, 1410 nt, Artificial Sequence; identical to SEQ ID NO: 144786
  derived and/or modified CDS sequence (opt3) from neuraminidase__InfluenzaA__ADK21876

SEQ ID NO: 147104 - RNA, 1410 nt, Artificial Sequence; identical to SEQ ID NO: 144786
  derived and/or modified CDS sequence (opt3) from neuraminidase__InfluenzaA__ADK21886

SEQ ID NO: 147105 - RNA, 1410 nt, Artificial Sequence
  derived and/or modified CDS sequence (opt3) from neuraminidase__InfluenzaA__ADK21896
augaaccccaaucagaagaucauuaccauaggcagcgugugcaugacaaucgggauggccaaccugauucuccaaaucggaaauauuaucuccauauggaucucucacucaauucagcuugguaaccagaaucagaucgagacuuguaaccaaagugucauuacguacgaaaauaacaccuggguuaaucagacauaugugaacaucagcaauacuaacuucgcugcaggccaguccguagugucugucaaacuggccggaaauucgucauugugcccugugagcggaugggcgauauacaguaaggacaacuccauuagaaucggcucuaaaggugauguuuuugugauuagggagccauucaucagcuguuccccguuagaaugccggaccuuuuuccugacacagggggcucuacucaaugacaagcauucaaacggaaccaucaaagaucgcagucccuaucgaacucugaugagcuguccuauuggcgaggucccaucucccuacaacucccguuuugaaucaguggccuggagcgcaagugccugccacgacggcauaaauuggcuuacaaucgggauuucuggaccugauaacggugcuguagcaguucugaaguauaauggcaucauaaccgacacgauuaaguccuggagaaacaauaucuugaggacucaagagagcgagugugccugcgugaacgggucguguuucaccgucaugacagauggaccaucugacggccaggcuuccuacaaaaucuuucggauugaaaaggguaaaaucgugaagucaguggagaugaaugcccccaacuaucauuacgaagagugcaguuguuacccugauagcuccgagauuacuugcgucugccgcgacaauuggcacgggucuaacagaccauggguuagcuucaaucagaaccucgaauaucagauaggauacaucuguucaggcauuuuuggcgauaauccgaggcccaacgacaaaaccgggaguugcggaccuguguccagcaauggugcgaacggcguaaagggguucucuuuuaaguauggaaacggcguguggaucggucggacaaaaucaaucaguagccgcaauggguucgagaugauuugggauccaaacggcuggaccggaacggacaauaacuuuuccauaaagcaagacaucgucggcacuaaugaauggucuggguacucggggagcuucgugcagcaucccgagcugacaggucuggauuguauucgaccuugcuucuggguugaacucaucagaggcaggccaaaagagaacaccauuuggacuuccgggucaaguaucucuuuuuguggagugagcuccgacacagucggcuggucauggcccgauggugcagaguuaccguucaccauagacaaguga

SEQ ID NO: 147106 - RNA, 1410 nt, Artificial Sequence
  derived and/or modified CDS sequence (opt3) from neuraminidase__InfluenzaA__ADK21906
augaaccccaaucagaagaucauuaccauaggcagcgugugcaugacaaucgggauggccaaccugauucuccaaaucggaaauauuaucuccauauggaucucucacucaauucagcuugguaaccagaaucagaucgagacuuguaaccaaagugucauuacguacgaaaauaacaccuggguuaaucagacauaugugaacaucagcaauacuaacuucgcugcaggccaguccguagugucugucaaacuggccgggaauagcucauugugcccugugagcggaugggcgauauacaguaaggacaacuccauuagaaucggcucuaaaggugauguuuuugugauuagggagccauucaucagcuguuccccguuagaaugccggaccuuuuuccugacacagggggcucuacucaaugacaagcauucaaacggaaccaucaaagaucgcagucccuaucgaacucugaugagcuguccuauuggcgaggucccaucucccuacaacucccguuuugaaucaguggccuggagcgcaagugccugccacgacggcauaaauuggcuuacaaucgggauuucuggaccugauaacggugcuguagcaguucugaaguauaauggcaucauaaccgacacgauuaaguccuggagaaacaauaucuugaggacucaagagagcgagugugccugcgugaacgggucguguuucaccgucaugacagauggaccaucugacggccaggcuuccuacaaaaucuuucggauugaaaaggguaaaaucgugaagucaguggagaugaaugcccccaacuaucauuacgaagagugcaguuguuacccugauagcuccgagauuacuugcgucugccgcgacaauuggcacgggucuaacagaccauggauaucguucaaucagaaccucgaauaucagaucggauacauuuguucaggcaucuuuggcgauaauccgaggcccaacgacaaaaccgggaguugcggaccuguuuccagcaauggugcgaacggcgugaagggguucucuuuuaaguauggaaacggcguauggaucggucggacaaaaucaauugggagucgcaauggcuucgagaugauaugggauccaaacggauggaccggcacggacaauaacuuuagcaucaagcaagacauuguggggaucaaugaaugguccggauacucugguucguucguccagcaucccgagcugacuggccuggauuguauucgaccuugcuucuggguggaacucaucagagggaggccaaaagagaacacaauauggaccagcggauccucaaucaguuuuuguggcguuaauucugacacuguggguuggagcuggcccgauggggcagaguuaccguucacaauugacaaguga

SEQ ID NO: 147107 - RNA, 1410 nt, Artificial Sequence; identical to SEQ ID NO: 144786
  derived and/or modified CDS sequence (opt3) from neuraminidase__InfluenzaA__ADK21916

SEQ ID NO: 147108 - RNA, 1410 nt, Artificial Sequence; identical to SEQ ID NO: 144786
  derived and/or modified CDS sequence (opt3) from neuraminidase__InfluenzaA__ADK21926

SEQ ID NO: 147109 - RNA, 1410 nt, Artificial Sequence; identical to SEQ ID NO: 144786
  derived and/or modified CDS sequence (opt3) from neuraminidase__InfluenzaA__ADK21936

SEQ ID NO: 147110 - RNA, 1410 nt, Artificial Sequence
  derived and/or modified CDS sequence (opt3) from neuraminidase__InfluenzaA__ADK21946
augaaccccaaucagaagaucauuaccauaggcagcgugugcaugacaaucgggauggccaaccugauucuccaaaucggaaauauuaucuccauauggaucucucacucaauucagcuugguaaccagaaucagaucgagacuuguaaccaaagugucauuacguacgaaaauaacaccuggguuaaucagacauaugugaacaucagcaauacuaacuucgcugcaggccaguccguagugucugucaaacuggccggaaauucgucauugugcccugugagcggaugggcgauauacaguaaggacaacuccauuagaaucggcucuaaaggugauguuuuugugauuagggagccauucaucagcuguuccccguuagaaugccggaccuuuuuccugacacagggggcucuacucaaugacaagcauucaaacggaaccaucaaagaucgcagucccuaucgaacucugaugagcuguccuauuggcgaggucccaucucccuacaacucccguuuugaaucaguggccuggagcgcaagugccugccacgacggcauaaauuggcuuacaaucgggauuucuggaccugauaacggugcuguagcaguucugaaguauaauggcaucauaaccgacacgauuaaguccuggagaaacaauaucuugaggacucaagagagcgagugugccugcgugaacgggucguguuucaccgucaugacagauggaccaucugacggccaggcuuccuacaaaaucuuucggauugaaaaggguaaaaucgugaagucaguggagaugaaugcccccaacuaucauuacgaagagugcaguuguuacccugauagcuccgagauuacuugcgucugccgcgacaauuggcacgggucuaacagaccauggguuagcuucaaucagaaccucgaauaucagauaggauacaucuguucaggcauuuuuggcgauaauccgaggcccaacgacaaaaccgggaguugcggaccuguguccagcaauggugcgaacggcguaaagggguucucuuuuaaguauggaaacggcguguggaucggucggacaaaaucaaucaguagccgcaauggguucgagaugauuugggauccaaacggcuggaccggaacggacaauaacuuuuccauaaagcaagacaucgucggcauuaaugaauggucuggguacucggggagcuucgugcagcaucccgagcugacugguauggauuguauccgaccuugcuucuggguugaacugauuagaggcaggccaaaagagaacacaaucuggaccuccgggucaaguauaucuuuuuguggagugaauagcgacacugucggcugguccuggcccgauggugcagagcucccguucacaaucgacaaguga

SEQ ID NO: 147111 - RNA, 1410 nt, Artificial Sequence
  derived and/or modified CDS sequence (opt3) from neuraminidase__InfluenzaA__ADK21956
augaaccccaaucagaagaucauuaccauaggcagcgugugcaugacaaucgggauggccaaccugauucuccaaaucggaaauauuaucuccauauggaucucucacucaauucagcuugguaaccagaaucagaucgagacuuguaaccaaagugucauuacguacgaaaauaacaccuggguuaaucagacauaugugaacaucagcaauacuaacuucgcugcaggccaguccguagugucugucaaacuggccggaaauucgucauugugcccugugagcggaugggcgauauacaguaaggacaacuccauuagaaucggcucuaaaggugauguuuuugugauuagggagccauucaucagcuguuccccguuagaaugccggaccuuuuuccugacacagggggcucuacucaaugacaagcauucaaacggaaccaucaaagaucgcagucccuaucgaacucugaugagcuguccuauuggcgaggucccaucucccuacaacucccguuuugaaucaguggccuggagcgcaagugccugccacgacggcauaaauuggcuuacaaucgggauuucuggaccugauaacggugcuguagcaguucugaaguauaauggcaucauaaccgacacgauuaaguccuggagaaacaauaucuugaggacucaagagagcgagugugccugcgugaacgggucguguuucaccgucaugacagauggaccaucugacggccaggcuuccuacaaaaucuuuaagauugaaaaagguaagaucgugaaaucaguggagaugaaugcccccaacuaucauuacgaagagugcaguuguuacccugauagcuccgagauuacuugcgucugccgggacaauuggcacgggucuaaccgcccauggguuagcuucaaucagaaccucgaauaucagauaggauacaucuguucaggcauuuuuggcgauaauccgagacccaacgacaagaccgggaguugcggaccuguguccagcaauggugcgaacggcguaaagggguucucuuuuaaauauggaaacggcguguggaucgguaggacaaagucaaucaguagccggaauggguucgagaugauuugggauccaaacggcuggaccggaacggacaauaacuuuuccauaaaacaagacaucgucggcauuaaugaauggucuggguacucggggagcuucgugcagcaucccgagcugacuggucuggauuguauccgcccuugcuucuggguugaacucauucgaggcagaccaaaggagaacacaaucuggaccuccgggucaaguauaucuuuuuguggagugaauagcaacacugucggcugguccuggcccgacggugcagaguuaccguucacaaucgauaaauga

SEQ ID NO: 147112 - RNA, 1410 nt, Artificial Sequence; identical to SEQ ID NO: 144786
  derived and/or modified CDS sequence (opt3) from neuraminidase__InfluenzaA__ADK32393

SEQ ID NO: 147113 - RNA, 1410 nt, Artificial Sequence; identical to SEQ ID NO: 144786
  derived and/or modified CDS sequence (opt3) from neuraminidase__InfluenzaA__ADK32403

SEQ ID NO: 147114 - RNA, 1410 nt, Artificial Sequence; identical to SEQ ID NO: 144786
  derived and/or modified CDS sequence (opt3) from neuraminidase__InfluenzaA__ADK32413

SEQ ID NO: 147115 - RNA, 1410 nt, Artificial Sequence
  derived and/or modified CDS sequence (opt3) from neuraminidase__InfluenzaA__ADK32423
augaaccccaaucagaagaucauuaccauaggcagcgugugcaugacaaucgggaugacuaaccugauucuccaaaucggaaauauuaucuccauauggaucucucacucaauucagcuugguaaccagaaucagaucgagacguguaaccaaagugucauuaccuacgaaaauaacacauggguuaaucagacuuaugugaacaucagcaauaccaacuucgccgcuggccaguccguagugucugucaaacuggcaggaaauucgucauugugcccugugagcggaugggccauauacaguaaggacaacuccauuagaaucggcucuaaaggugauguuuuugugauuagggagccauucaucagcuguuccccguuagaaugccggacauuuuuccugacccagggggcgcuacucaaugacaagcauucaaacggaacuaucaaagaucgcagucccuaucgaacacugaugagcuguccuauuggcgaggucccaucucccuacaacucccguuuugaaucaguggcuuggagcgccagugcaugccacgacggcauaaauuggcuuaccaucgggauuucuggaccugauaacggugccguagcuguucugaaguauaauggcaucauaacggacacuauuaaguccuggagaaacaauaucuugaggacccaagagagcgagugugcaugcgugaacgggucguguuucacagucaugacugauggaccaucugacggccaggccuccuacaaaaucuuucggauugaaaaggguaaaaucgugaagucaguggagaugaaugcucccaacuaucauuacgaagagugcaguuguuacccugauagcuccgagauuaccugcgucugccgcgacaauuggcacgggucuaacagaccauggguuagcuucaaucagaaccucgaauaucagauaggauacaucuguucaggcauuuuuggcgauaauccgaggcccaacgacaaaacagggaguugcggaccuguguccagcaauggugccaacggcguaaagggguucucuuuuaaguauggaaacggcguguggaucggucggaccaaaucaaucaguagccgcaauggguucgagaugauuugggauccaaacggcuggacgggaacugacaauaacuuuuccauaaagcaagacaucgucggcauuaaugaauggucuggguacucggggagcuucgugcagcaucccgagcugacaggucuggauuguauccgaccuugcuucuggguugaacucauuagaggcaggccaaaagagaacaccaucuggacuuccgggucaaguauaucuuuuuguggagugaauagcgacacagucggcugguccuggcccgauggugcggaguuaccguucaccaucgacaaguga

SEQ ID NO: 147116 - RNA, 1410 nt, Artificial Sequence; identical to SEQ ID NO: 144786
  derived and/or modified CDS sequence (opt3) from neuraminidase__InfluenzaA__ADK32433

SEQ ID NO: 147117 - RNA, 1410 nt, Artificial Sequence; identical to SEQ ID NO: 144786
  derived and/or modified CDS sequence (opt3) from neuraminidase__InfluenzaA__ADK32443

SEQ ID NO: 147118 - RNA, 1410 nt, Artificial Sequence
  derived and/or modified CDS sequence (opt3) from neuraminidase__InfluenzaA__ADK32453
augaaccccaaucagaagaucauuaccauaggcagcgugugcaugacaaucgggauggccaaccugauucuccaaaucggaaauauuaucuccauauggaucucucacucaauucagcuugguaaccagaaucagaucgagacuuguaaccaaagugucauuacguacgaaaauaacaccuggguuaaucagacauaugugaacaucagcaauacuaacuucgcugcaggccaguccguagugucugucaaacugucggggaauagcucauugugcccugugaguggaugggccauauacuccaaggacaacucuguuagaauuggcagcaaaggugauguguuugucaucagggagccauucauuuccuguucaccguuagaaugccggaccuuuuuccugacacagggggcgcuacucaaugacaagcauaguaacggaaccaucaaagaucgcagccccuaucgaacucugaugucuuguccuaucggcgaggugccaucccccuacaacucacguuuugaaagcguagcuuggagugccucugcaugccacgacggcauuaauuggcuuacaauagggaucuccggaccugauaacggugccguugcugugcugaaguauaauggcauuaucaccgacacgauaaagagcuggagaaacaauauuuugaggacucaagagucggagugugcaugcgucaacgggucuuguuucaccgugaugacagauggaccauccgacggccaggccucauacaaaaucuuucggaucgaaaaggguaaaauugugaagagugucgagaugaaugcucccaacuaucauuacgaagagugcagcuguuacccugauuccucugagaucacuugcguuugccgcgacaauuggcacgggagcaacagaccaugggugucauucaaucagaaccucgaauaucagauuggauacauauguaguggcaucuuuggcgauaauccgaggcccaacgacaaaaccggguccugcggaccuguaagcucuaauggugccaacggcgugaagggguucucauuuaaguauggaaacggcgucuggauuggucggacaaaaaguaucagcucccgcaauggguucgagaugaucugggauccaaacggcuggaccggaacggacaauaacuuuucuauuaagcaagacauagugggcaucaaugaauggucgggguacagcggauccuucguucagcaucccgagcugacuggucuggauuguauucgaccuugcuucuggguggaacucaucagaggcaggccaaaagagaacacaauuuggaccucagggaguucuaucagcuuuuguggagucaauuccgacacugugggcuggucauggcccgauggugcggaguuaccguucacaauagacaaguga

SEQ ID NO: 147119 - RNA, 1410 nt, Artificial Sequence
  derived and/or modified CDS sequence (opt3) from neuraminidase__InfluenzaA__ADK32463
augaaccccaaucagaagaucauuaccauaggcagcgugugcaugacaaucgggauggccaaccugauucuccaaaucggaaauauuaucuccauauggaucucucacucaauucagcuugguaaccagaaucagaucgagacuuguaaccaaagugucauuacguacgaaaauaacaccuggguuaaucagacauaugugaacaucagcaauacuaacuucgcugcaggccaguccguagugucugucaaacuggccggaaauucgucauugugcccugugagcggaugggcgauauacaguaaggacaacuccauuagaaucggcucuaaaggugauguuuuugugauuagggagccauucaucagcuguuccccguuagaaugccggaccuuuuuccugacacagggggcucuaaucaaugacaagcauucaaacggaaccauuaaagaucgcagucccuaucgaacucucaugagcuguccuauaggcgaggucccaucucccuacaacucccguuuugaaucaguggccuggagcgcaagugccugccacgacggcaucaauuggcugacaauugggaucucuggaccugauaacggugcuguagcaguucuuaaguauaauggcauaauuaccgacacgaucaaguccuggagaaacaauauccugaggacucaagagagcgagugugccugcgugaacgggucguguuucaccgucaugacagauggaccaucugacggccaggcuuccuacaaaauuuuucggaucgaaaaggguaaaauugugaagucaguggagaugaaugcccccaacuaucauuacgaagagugcaguuguuacccugauagcuccgagauaacuugcgucugccgcgacaauuggcacgggucuaacagaccauggguuagcuucaaucagaacuuggaauaucagaucggauacauuuguucaggcaucuuuggcgauaauccgaggcccaacgacaaaaccgggaguugcggaccuguguccagcaauggugcgaacggcguaaagggguucucuuuuaaguauggaaacggcguguggaucggucggacaaaaucaauuaguagccgcaauggguucgagaugauaugggauccaaacggcuggaccggaacggacaauaacuuuuccaucaagcaagacauugucggcaucaaugaauggucuggguacucggggagcuucgugcagcaucccgagcucacuggucuggauuguauucgaccuugcuucuggguugaacugaucagaggcaggccaaaagagaacacaauauggaccuccgggucaaguaucucuuuuuguggagugaauagcgacacugucggcugguccuggcccgauggugcagagcucccguucacaauugacaaguga

SEQ ID NO: 147120 - RNA, 1410 nt, Artificial Sequence; identical to SEQ ID NO: 144786
  derived and/or modified CDS sequence (opt3) from neuraminidase__InfluenzaA__ADK32473

SEQ ID NO: 147121 - RNA, 1410 nt, Artificial Sequence; identical to SEQ ID NO: 144786
  derived and/or modified CDS sequence (opt3) from neuraminidase__InfluenzaA__ADK32483

SEQ ID NO: 147122 - RNA, 1410 nt, Artificial Sequence; identical to SEQ ID NO: 144786
  derived and/or modified CDS sequence (opt3) from neuraminidase__InfluenzaA__ADK32493

SEQ ID NO: 147123 - RNA, 1410 nt, Artificial Sequence; identical to SEQ ID NO: 146699
  derived and/or modified CDS sequence (opt3) from neuraminidase__InfluenzaA__ADK32505

SEQ ID NO: 147124 - RNA, 1410 nt, Artificial Sequence
  derived and/or modified CDS sequence (opt3) from neuraminidase__InfluenzaA__ADK32640
augaaccccaaucagaagaucauuaccauaggcagcgugugcaugacaaucgggauggccaaccugauucuccaaaucggaaauauuaucuccauauggaucucucacucaauucagcuugguaaccagaaucagaucgagacuuguaaccaaagugucauuacguacgaaaauaacaccuggguuaaucagacauaugugaacaucagcaauacuaacuucgcugcaggccaguccguagccucugugaaacuggcgggaaauucgucauugugcccugucagcggaugggcuauauacaguaaggacaacuccauuagaaucggcucuaaaggugauguguuuguuauuagggagccauucaucagcuguuccccguuagaaugccggaccuuuuuccugacacagggggcccuacucaaugacaagcauucaaacggaaccaucaaagaucgcagucccuaucgaacucugaugagcuguccuauuggcgaggugccaucucccuacaacucccguuuugaaucagucgcauggagcgccagugcuugccacgacggcauaaauuggcuuacaaucgggauuucuggaccugauaacggugcaguggccguacugaaguauaauggcaucauaaccgacacgauuaaguccuggagaaacaauaucuugaggacucaagagagcgagugugcuugcguuaacgggucguguuucaccgugaugacagauggaccaucugacggccaggccuccuacaaaaucuuucggauugaaaaggguaaaaucgucaagucaguggagaugaaugcgcccaacuaucauuacgaagagugcaguuguuacccugauagcuccgagauuacuugcgugugccgcgacaauuggcacgggucuaacagaccaugggucagcuucaaucagaaccucgaauaucagauaggauacaucuguucaggcauuuuuggcgauaauccgaggcccaacgacaaaaccgggaguugcggaccuguuuccagcaauggugcaaacggcgugaagggguucucuuuuaaguauggaaacggcguauggaucggucggacaaaaucaaucaguagccgcaauggguucgagaugauuugggauccaaacggcuggaccggaacggacaauaacuuuuccauaaagcaagacaucgugggcauuaaugaauggucuggguacucggggagcuucguccagcaucccgagcugacuggucuggauuguauccgaccuugcuucuggguggaacucauuagaggcaggccaaaagagaacacaaucuggaccuccgggucaaguauaucuuuuuguggaguuaauagcgacacugugggcugguccuggcccgauggugccgaguuaccguucacaaucgacaaguga

SEQ ID NO: 147125 - RNA, 1410 nt, Artificial Sequence; identical to SEQ ID NO: 144786
  derived and/or modified CDS sequence (opt3) from neuraminidase__InfluenzaA__ADK32650

SEQ ID NO: 147126 - RNA, 1410 nt, Artificial Sequence; identical to SEQ ID NO: 144786
  derived and/or modified CDS sequence (opt3) from neuraminidase__InfluenzaA__ADK32660

SEQ ID NO: 147127 - RNA, 1410 nt, Artificial Sequence; identical to SEQ ID NO: 144786
  derived and/or modified CDS sequence (opt3) from neuraminidase__InfluenzaA__ADK32670

SEQ ID NO: 147128 - RNA, 1410 nt, Artificial Sequence
  derived and/or modified CDS sequence (opt3) from neuraminidase__InfluenzaA__ADK32680
augaaccccaaucagaagaucauuaccauaggcagcgugugcaugacaaucgggauggccaaccugauucuccaaaucggaaauauuaucuccauauggaucucucacucaauucagcuugguaaccagaaucagaucgagacuuguaaccaaagugucauuacguacaaaaauaacaccuggguuaaucagacauaugugaacaucagcaauacuaacuucgcugcaggccaguccguagugucugucaagcuggccggaaauucgucauugugcccugugagcggaugggcgauauacaguaaagacaacuccauuagaaucggcucuaagggugauguuuuugugauuagggaaccauucaucagcuguuccccguuagagugccggaccuuuuuccugacacagggggcucuacucaaugacaaacauucaaacggaaccaucaaggaucgcagucccuaucgaacucugaugagcuguccuauuggcgaagucccaucucccuacaacucccguuuugagucaguggccuggagcgcaagugccugccacgacggcauaaauuggcuuacaaucgggauuucuggaccugauaacggugcuguagcaguucugaaguauaauggcaucauaaccgacacgauuaaauccuggagaaacaauaucuugaggacucaagaaagcgagugugccugcgugaacgggucguguuucaccgucaugacagauggaccaucugacggccaggcuuccuacaagaucuuucggauugagaaagguaagaucgugaaaucaguggaaaugaaugcccccaacuaucauuacgaggaaugcaguuguuacccugauagcuccgagauuacuugcgucugccgcgacaauuggcacgggucuaacagaccauggguuagcuucaaucagaaccucgaguaucagauaggauacaucuguucaggcauuuuuggcgauaauccgaggcccaacgacaagaccgggaguugcggaccuguguccagcaauggugcgaacggcguaaagggguucucuuuuaaauauggaaacggcguguggaucggucggacaaagucaaucaguagccgcaauggguucgaaaugauuugggauccaaacggcuggaccggaacggacaauaacuuuuccauaaaacaagacaucgucggcauuaaugaguggucuggguacucggggagcuucgugcagcaucccgaacugacuggucuggauuguauccgaccuugcuucuggguugagcucauuagaggcaggccaaaggaaaacacaaucuggaccuccgggucaaguauaucuuuuuguggagugaauagcgacacugucggcugguccuggcccgauggugcagaguuaccguucacaaucgacaaauga

SEQ ID NO: 147129 - RNA, 1410 nt, Artificial Sequence; identical to SEQ ID NO: 144786
  derived and/or modified CDS sequence (opt3) from neuraminidase__InfluenzaA__ADK32690

SEQ ID NO: 147130 - RNA, 1410 nt, Artificial Sequence; identical to SEQ ID NO: 144786
  derived and/or modified CDS sequence (opt3) from neuraminidase__InfluenzaA__ADK32700

SEQ ID NO: 147131 - RNA, 1410 nt, Artificial Sequence; identical to SEQ ID NO: 144786
  derived and/or modified CDS sequence (opt3) from neuraminidase__InfluenzaA__ADK32779

SEQ ID NO: 147132 - RNA, 1410 nt, Artificial Sequence; identical to SEQ ID NO: 144786
  derived and/or modified CDS sequence (opt3) from neuraminidase__InfluenzaA__ADK33614

SEQ ID NO: 147133 - RNA, 1410 nt, Artificial Sequence; identical to SEQ ID NO: 144786
  derived and/or modified CDS sequence (opt3) from neuraminidase__InfluenzaA__ADK33624

SEQ ID NO: 147134 - RNA, 1410 nt, Artificial Sequence; identical to SEQ ID NO: 144786
  derived and/or modified CDS sequence (opt3) from neuraminidase__InfluenzaA__ADK33634

SEQ ID NO: 147135 - RNA, 1410 nt, Artificial Sequence
  derived and/or modified CDS sequence (opt3) from neuraminidase__InfluenzaA__ADK33644
augaaccccaaucagaagaucauuaccauaggcagcgugugcaugacaaucgggauggccaaccugauucuccaaaucggaaauauuaucuccauauggaucucucacucaauucagcuugguaaccagaaucagaucgagacuuguaaccaaagugucauuacguacgaaaauaacaccuggguuaaucagacauaugugaacaucagcaauacuaacuucgcugcaggccaguccguagugucugucaaacuggccgggaauagcucauugugcccugugagcggaugggcgauauacaguaaggacaacuccauuagaaucggcucuaaaggugauguuuuugugauuagggagccauucaucagcuguuccccguuagaaugccggaccuuuuuccugacacagggggcucuacucaaugacaagcauucaaacggaaccaucaaagaucgcagucccuaucgaacucugaugagcuguccuauuggcgaggucccaucucccuacaacucccguuuugaaucaguggccuggagcgcaagugccugccacgacggcauaaauuggcuuacaaucgggauuucuggauccgauaacggugcuguagcaguucugaaguauaauggcaucauaaccgacacgauuaagagcuggagaaacaauaucuugaggacucaagagucggagugugccugcgugaacgggucuuguuucaccgucaugacagauggaccuuccgacggccaggcuucauacaaaaucuuucggauugaaaaggguaaaaucgugaagaguguggagaugaaugccccaaacuaucauuacgaagagugcagcuguuaccccgauuccucugagauuacuugcgucugccgcgacaauuggcacgggagcaacagaccuuggguuucauucaaucagaaccucgaauaucagauaggauacaucuguaguggcauuuuuggcgauaauccaaggccgaacgacaaaaccggguccugcggacccgugagcucuaauggugcgaacggcguaaagggguucucauuuaaguauggaaacggcguguggaucggucggacaaaaaguaucagcucccgcaauggguucgagaugauuugggauccuaacggcuggaccggaacggacaauaacuuuucuauaaagcaagacaucgucggcauuaaugaauggucgggguacagcggauccuucgugcagcauccagagcugacuggucuggauuguauccgacccugcuucuggguugaacucauuagaggcaggccuaaagagaacacaaucuggaccucagggaguucuauaucguuuuguggagucaauuccgacacugugggcuggucauggccagauggugcagaguuacccuucacaaucgacaaguga

SEQ ID NO: 147136 - RNA, 1410 nt, Artificial Sequence; identical to SEQ ID NO: 146517
  derived and/or modified CDS sequence (opt3) from neuraminidase__InfluenzaA__ADK33654

SEQ ID NO: 147137 - RNA, 1410 nt, Artificial Sequence; identical to SEQ ID NO: 146517
  derived and/or modified CDS sequence (opt3) from neuraminidase__InfluenzaA__ADK33664

SEQ ID NO: 147138 - RNA, 1410 nt, Artificial Sequence; identical to SEQ ID NO: 144786
  derived and/or modified CDS sequence (opt3) from neuraminidase__InfluenzaA__ADK33674

SEQ ID NO: 147139 - RNA, 1410 nt, Artificial Sequence; identical to SEQ ID NO: 144786
  derived and/or modified CDS sequence (opt3) from neuraminidase__InfluenzaA__ADK33684

SEQ ID NO: 147140 - RNA, 1410 nt, Artificial Sequence; identical to SEQ ID NO: 146137
  derived and/or modified CDS sequence (opt3) from neuraminidase__InfluenzaA__ADK33694

SEQ ID NO: 147141 - RNA, 1410 nt, Artificial Sequence; identical to SEQ ID NO: 144786
  derived and/or modified CDS sequence (opt3) from neuraminidase__InfluenzaA__ADK33704

SEQ ID NO: 147142 - RNA, 1410 nt, Artificial Sequence; identical to SEQ ID NO: 144786
  derived and/or modified CDS sequence (opt3) from neuraminidase__InfluenzaA__ADK33714

SEQ ID NO: 147143 - RNA, 1410 nt, Artificial Sequence; identical to SEQ ID NO: 144786
  derived and/or modified CDS sequence (opt3) from neuraminidase__InfluenzaA__ADK33744

SEQ ID NO: 147144 - RNA, 1410 nt, Artificial Sequence
  derived and/or modified CDS sequence (opt3) from neuraminidase__InfluenzaA__ADK33754
augaaccccaaucagaagaucauuaccauaggcagcgugugcaugacaaucgggauggccaacuucauucugcaaaucggaaauauuaucuccauauggaucucucacucaauucagcucgguaaccagaaucagaucgagacuuguaaccaaagugucauuacguacgaaaauaacaccuggguuaaucagacauaugugaacaucagcaauacuaacuuugcugcaggccaguccguagugucugucaaacuugccggaaauucgucacugugcccugugagcggaugggcgauauacaguaaggacaacuccauuagaaucggcucuaaaggugauguuuucgugauuagggagccauuuaucagcuguuccccguuggaaugccggaccuucuuuuuaacacagggggcucugcuaaaugacaagcauucaaacggaaccaucaaagaucgcagucccuaucgaacucucaugagcuguccuauuggcgaggucccaucucccuacaacucccguuucgaaucaguggccuggagcgcaagugccugccacgacggcauaaauuggcugacaaucgggauuucuggaccugauaacggugcuguagcaguucuuaaguauaauggcaucauaaccgacacgauuaaguccuggagaaacaauauccugaggacucaagagagcgagugugccugcgugaacgggucguguuuuaccgucaugacagauggaccaucugacggccaggcuuccuacaaaaucuuccggauugaaaaggguaaaaucgugaagucaguggagaugaaugcccccaacuaucauuacgaagagugcaguuguuacccugauagcuccgagauuacuugcgucugccgcgacaauuggcacgggucuaacagaccauggguuagcuuuaaucagaacuuggaauaucagauaggauacaucuguucaggcauuuucggcgauaauccgaggcccaacgacaaaaccgggaguugcggaccuguguccagcaauggugcgaacggcguaaagggguuuucuuucaaguauggaaacggcguguggaucggucggacaaaaucaaucaguagccgcaauggguuugagaugauuugggauccaaacggcuggaccggaacggacaauaacuucuccauaaagcaagacaucgucggcauuaaugaauggucuggguacucggggagcuucgugcagcaucccgagcucacuggucuggauuguauccgaccuugcuuuuggguugaacugauuagaggcaggccaaaagagaacacaaucuggaccuccgggucaaguauaucuuucuguggagugaauagcgacacugucggcugguccuggcccgauggugcagagcucccguuuacaaucgacaaguga

SEQ ID NO: 147145 - RNA, 1410 nt, Artificial Sequence
  derived and/or modified CDS sequence (opt3) from neuraminidase__InfluenzaA__ADK33764
augaaccccaaucagaagaucauuaccauaggcagcgugugcaugacaaucgggauggccaacuucauucugcaaaucggaaauauuaucuccauauggaucucucacucaauucagcucgguaaccagaaucagaucgagacuuguaaccaaagugucauuacguacgaaaauaacaccuggguuaaucagacauaugugaacaucagcaauacuaacuuugcugcaggccaguccguagugucugucaaacuugccggaaauucgucacugugcccugugagcggaugggcgauauacaguaaggacaacuccauuagaaucggcucuaaaggugauguuuucgugauuagggagccauuuaucagcuguuccccguuggaaugccggaccuucuuuuuaacacagggggcucugcuaaaugacaagcauucaaacggaaccaucaaagaucgcagucccuaucgaacucucaugagcuguccuauuggcgaggucccaucucccuacaacucccguuucgaaucaguggccuggagcgcaagugccugccacgacggcauaaauuggcugacaaucgggauuucuggaccugauaacggugcuguagcaguucuuaaguauaauggcaucauaaccgacacgauuaaguccuggagaaacaauauccugaggacucaagagagcgagugugccugcgugaacgggucguguuuuaccgucaugacagauggaccaucugacggccaggcuuccuacaaaaucuuccggauugaaaaggguaaaaucgugaagucaguggagaugaaugcccccaacuaucauuacgaagagugcaguuguuacccugauagcuccgagauuacuugcgucugccgcgacaauuggcacgggucuaacagaccauggguuagcuuuaaucagaacuuggaauaucagaugggauacauauguucaggcaucuucggcgauaauccgaggcccaacgacaaaaccgggaguugcggaccuguguccagcaauggugcgaacggcguaaagggguuuucuuucaaguauggaaacggcguguggauuggucggacaaaaucaaucaguagccgcaauggguuugagaugaucugggauccaaacggcuggaccggaacggacaauaacuucuccauuaagcaagacauagucggcaucaaugaauggucuggguacucggggagcuucgugcagcaucccgagcucacuggucuggauuguauucgaccuugcuuuuggguugaacugaucagaggcaggccaaaagagaacacaauuuggaccuccgggucaaguaucucuuucuguggagugaauagcgacacugucggcugguccuggcccgauggugcagagcucccguuuacaauagacaaguga

SEQ ID NO: 147146 - RNA, 1410 nt, Artificial Sequence
  derived and/or modified CDS sequence (opt3) from neuraminidase__InfluenzaA__ADK33774
augaaccccaaucagaagaucauuaccauaggcagcgugugcaugacaaucgggauggccaaccugauucuccaaaucggaaauauuaucuccauauggaucucucacucaauucagcuugguaaccagaaucagaucgagacuuguaaccaaagugucauuacguacgaaaauaacaccuggguuaaucagacauaugugaacaucagcaauacuaacuucgcugcaggccaguccguagugucugucaaacuggugggaaauucgucauugugcccuguuagcggaugggccauauacaguaaggacaacuccauuagaaucggcucuaaaggugauguguuugucauuagggagccauucaucagcuguuccccguuagaaugccggaccuuuuuccugacacagggggcgcuacucaaugacaagcauucaaacggaaccaucaaagaucgcagucccuaucgaacucugaugagcuguccuauuggcgaggugccaucucccuacaacucccguuuugaaucaguagcuuggagcgccagugcaugccacgacggcauaaauuggcuuacaaucgggauuucuggaccugauaacggugccguugcugugcugaaguauaauggcaucauaaccgacacgauuaaguccuggagaaacaauaucuugaggacucaagagagcgagugugcaugcgucaacgggucguguuucaccgugaugacagauggaccaucugacggccaggccuccuacaaaaucuuucggauugaaaaggguaaaaucgugaagucagucgagaugaaugcucccaacuaucauuacgaagagugcaguuguuacccugauagcuccgagauuacuugcguuugccgcgacaauuggcacgggucuaacagaccaugggugagcuucaaucagaaccucgaauaucagaugggauacauauguucaggcaucuuuggcgauaauccgaggcccaacgacaaaaccgggaguugcggaccuguauccagcaauggugccaacggcgugaagggguucucuuuuaaguauggaaacggcgucuggauuggucggacaaaaucaaucaguagccgcaauggguucgagaugaucugggauccaaacggcuggaccggaacggacaauaacuuuuccauuaagcaagacauagugggcaucaaugaauggucuggguacucggggagcuucguucagcaucccgagcugacuggucuggauuguauucgaccuugcuucuggguggaacucaucagaggcaggccaaaagagaacacaauuuggaccuccgggucaaguaucucuuuuuguggagucaauagcgacacugugggcugguccuggcccgauggugcggaguuaccguucacaauagacaaguga

SEQ ID NO: 147147 - RNA, 1410 nt, Artificial Sequence; identical to SEQ ID NO: 145760
  derived and/or modified CDS sequence (opt3) from neuraminidase__InfluenzaA__ADK33784

SEQ ID NO: 147148 - RNA, 1410 nt, Artificial Sequence; identical to SEQ ID NO: 144786
  derived and/or modified CDS sequence (opt3) from neuraminidase__InfluenzaA__ADK33794

SEQ ID NO: 147149 - RNA, 1410 nt, Artificial Sequence; identical to SEQ ID NO: 144786
  derived and/or modified CDS sequence (opt3) from neuraminidase__InfluenzaA__ADK33804

SEQ ID NO: 147150 - RNA, 1410 nt, Artificial Sequence
  derived and/or modified CDS sequence (opt3) from neuraminidase__InfluenzaA__ADK33814
augaaccccaaucagaagaucauuaccauaggcagcgugugcaugacaaucgggauggccaaccugauucuccaaaucggaaauauuaucuccauauggaucucucacucaauucagcuugguaaccagaaucagaucgagacuuguaaccaaagugucauuacguacgaaaauaacaccuggguuaauaaaacauaugugaacaucagcaauacuaacuucgcugcaggccaguccguagugucugucaagcuggccggaaauucgucauugugcccugugagcggaugggcgauauacaguaaagacaacuccauuagaaucggcucuaagggugauguuuuugugauuagggagccauucaucagcuguuccccguuagaaugccggaccuuuuuccugacacagggggcucuacucaaugacaaacauucaaacggaaccaucaaggaucgcagucccuaucgaacucugaugagcuguccuauuggcgaggucccaucucccuacaacucccguuuugaaucaguggccuggagcgcaagugccugccacgacggcauaaauuggcuuacaaucgggauuucuggaccugauaacggugcuguagcaguucugaaguauaauggcaucauaaccgacacgauuaaauccuggagaaacaauaucuugaggacucaggagagcgagugugccugcgugaacgggucguguuucaccgucaugacagauggaccaucugacggccaggcuuccuacaagaucuuucggauugaaaaagguaagaucgugaaaucaguggagaugaaugcccccaacuaucauuacgaagagugcaguuguuacccugauagcuccgagauuacuugcgucugccgcgacaauuggcacgggucuaacagaccauggguuagcuucaaucaaaaccucgaauaucagaugggauacauauguucaggcaucuuuggcgauaauccgaggcccaacgacaagaccgggaguugcggaccuguguccagcaauggugcgaacggcguaaagggguucucuuuuaaauauggaaacggcguguggauuggucggacaaagucaaucaguagccgcaauggguucgagaugaucugggauccaaacggcuggaccggaacggacaauaacuuuuccauuaaacaggacauagucggcaucaaugaauggucuggguacucggggagcuucgugcaacaucccgagcugacuggucuggauuguauucgaccuugcuucuggguugaacucaucagaggcaggccaaaggagaacacaauuuggaccuccgggucaaguaucucuuuuuguggagugaauagcgacacugucggcugguccuggcccgauggugcagaguuaccguucacaauagacaaauga

SEQ ID NO: 147151 - RNA, 1410 nt, Artificial Sequence
  derived and/or modified CDS sequence (opt3) from neuraminidase__InfluenzaA__ADK33824
augaaccccaaucagaagaucauuaccauaggcagcgugugcaugacaaucgggauggccaaccugauucuccaaaucggaaauauuaucuccauauggaucucucacucaauucagcuugguaaccagaaucagaucgagacuuguaaccaaagugucauuacguacgaaaauaacaccuggguuaaucagacauauaucaacauaagcaauacuaacuucgcugcaggccaguccgugguaucugugaaacuggccggaaauucgucauugugcccugucagcggaugggcgauuuacaguaaggacaacuccaucagaauuggcucuaaaggugauguguuuguuaucagggagccauucaucagcuguuccccguuagaaugccggaccuuuuuccugacacagggggcucuacucaaugacaagcauucaaacggaaccauuaaagaucgcagucccuaucgaacucugaugagcuguccuauaggcgaggugccaucucccuacaacucccguuuugaaucagucgccuggagcgcaagugccugccacgacggcaucaauuggcuuacaauugggaucucuggaccugauaacggugcuguggcaguacugaaguauaauggcauaauuaccgacacgaucaaguccuggagaaacaauaucuugaggacucaagagagcgagugugccugcguuaacgggucguguuucaccgugaugacagauggaccaucugacggccaggcuuccuacaaaauuuuucggaucgaaaaggguaaaauugucaagucaguggagaugaaugcccccaacuaucauuacgaagagugcaguuguuacccugauagcuccgagauaacuugcgugugccgcgacaauuggcacgggucuaacagaccaugggucagcuucaaucagaaccucgaauaucagaucggauacauuuguucaggcaucuuuggcgauaauccgaggcccaacgacaaaaccgggaguugcggaccuguuuccagcaauggugcgaacggcgugaagggguucucuuuuaaguauggaaacggcguauggaucggucggacaaaaucaauuaguagccgcaauggguucgagaugauaugggauccaaacggcuggaccggaacggacaauaacuuuuccaucaagcaagacauugugggcaucaaugaauggucuggguacucggggagcuucguccagcaucccgagcugacuggucuggauuguauucgaccuugcuucuggguggaacucaucagaggcaggccaaaagagaacacaauauggaccuccgggucaaguaucucuuuuuguggaguuaauagcgacacugugggcugguccuggcccgauggugcagaguuaccguucacaauugacaaguga

SEQ ID NO: 147152 - RNA, 1410 nt, Artificial Sequence; identical to SEQ ID NO: 145963
  derived and/or modified CDS sequence (opt3) from neuraminidase__InfluenzaA__ADK33834

SEQ ID NO: 147153 - RNA, 1410 nt, Artificial Sequence
  derived and/or modified CDS sequence (opt3) from neuraminidase__InfluenzaA__ADK33844
augaaccccaaucagaagaucauuaccauaggcagcgugugcaugacaaucgggauggccaaccugauucuccaaaucggaaauauuaucuccauauggaucucucacucaauucagcuugguaaccagaaucagaucgagacuuguaaccaaagugucauuacguacgaaaauaacaccuggguuaaucagacauaugugaacaucagcaauacuaacuucgcugcaggccaguccguagugucugccaaacuggcgggaaauucgccuuugugcccagucucagggugggcuauauacagcaaggacaacaguauuagaaucggcuccaaaggugauguguuuguuauuagggagccguucaucucuuguagccccuuagaaugccggaccuuuuuccugacacagggggcccuacucaaugacaagcauuccaacggaaccaucaaagaucgcucaccuuaucgaacucugaugaguuguccaauuggcgaggugcccagcccuuacaacucucguuuugaauccgucgcauggucagccagcgcuugccacgacggcauaaauuggcuuacaaucgggauuaguggaccagauaacggugcaguggccguacugaaguauaauggcaucauaaccgacacgauuaagucuuggagaaacaauaucuugaggacucaagaguccgagugugcuugcguuaacgggagcuguuucaccgugaugacagauggacccucggacggccaggccucuuacaaaaucuuucggauugaaaaggguaaaaucgucaaguccguggagaugaaugcgccuaacuaucauuacgaagagugcucauguuacccagauaguagcgagauuacuugcgugugccgcgacaauuggcacggguccaacagaccgugggucucuuucaaucagaaccucgaauaucagauaggauacaucuguagcggcauuuuuggcgauaaucccaggccuaacgacaaaaccgggucaugcggaccaguuaguuccaauggugcaaacggcgugaagggguucagcuuuaaguauggaaacggcguauggaucggucggacaaaaucuaucucaagucgcaauggguucgagaugauuugggaucccaacggcuggaccggaacggacaauaacuuuagcauaaagcaagacaucgugggcauuaaugaaugguccggguacucuggaucguucguccagcauccugagcugacuggucuggauuguauccgaccaugcuucuggguggaacucauuagaggcaggcccaaagagaacacaaucuggaccagcggguccucaauaaguuuuuguggaguuaauucugacacugugggcuggagcuggccggauggugccgaguuaccuuucacaaucgacaaguga

SEQ ID NO: 147154 - RNA, 1410 nt, Artificial Sequence; identical to SEQ ID NO: 145963
  derived and/or modified CDS sequence (opt3) from neuraminidase__InfluenzaA__ADK33854

SEQ ID NO: 147155 - RNA, 1410 nt, Artificial Sequence; identical to SEQ ID NO: 146677
  derived and/or modified CDS sequence (opt3) from neuraminidase__InfluenzaA__ADK33864

SEQ ID NO: 147156 - RNA, 1410 nt, Artificial Sequence
  derived and/or modified CDS sequence (opt3) from neuraminidase__InfluenzaA__ADK33874
augaaccccaaucagaagaucauuaccauaggcagcgugugcaugacaaucgggauggccaaccugauucuccaaaucggaaauauuaucuccauauggaucucucacucaauucagcuugguaaccagaaucagaucgagacuuguaaccaaagugucauuacguacgaaaauaacaccuggguuaaucagacauaugugaacaucagcaauacuaacuucgcugcaggccaguccguagugucugucaaacuggccggaaauucgucauugugcccugugagcggaugggcgauauacaguaaggacaacuccauuagaaucggcucuaaaggugauguuuuugugauuagggagccauucaucagcuguuccccguuagaaugccggaccuuuuuccugacacagggggcucuacucaaugacaagcauucaaacggaaccaucaaagaucgcagucccuaucgaacucugaugagcuguccuauuggcgaggucccaucucccuacaacucccguuuugaaucaguggccuggagcgcaagugccugccacgacggcauaaauuggcuuacaaucgggauuucuggaccugauaacggugcuguagcaguucugaaguauaauggcaucauaaccgacacgauuaaguccuggagaaacaauaucuugaggacucaagagagcgagugugccugcgugaacgggucguguuucaccgucaugacagauggaccaucugacggccaggcuuccuacaaaaucuuucggauugaaaaggguaaaaucgugaagucaguggagaugaaugcccccaacuaucauuacgaagagugcaguuguuacccugauagcuccgagauuacuugcgucugccgcgacaauuggcacgggucuaacagaccauggguuagcuucaaucagaaccucgaauaucagauaggauaccuguguucaggcaucuuuggcgauaauccgaggcccaacgacaaaaccgggaguugcggaccuguguccagcaauggugcgaacggcguaaagggguucucuuuuaaguauggaaacggcguguggauuggucggacaaaaucaaucaguagccgcaauggguucgagaugaucugggauccaaacggcuggaccggaacggacaauaacuuuuccauuaagcaagacauagucggcaucaaugaauggucuggguacucggggagcuucgugcagcaucccgagcugacuggucucgauuguauucgaccuugcuucuggguugaauuaaucagaggcaggccaaaagagaacacaauuuggaccuccgggucaaguaucucuuuuuguggagugaauagcgacacugucggcugguccuggcccgauggugcagagcugccguucacaauagacaaguga

SEQ ID NO: 147157 - RNA, 1410 nt, Artificial Sequence; identical to SEQ ID NO: 144786
  derived and/or modified CDS sequence (opt3) from neuraminidase__InfluenzaA__ADK33884

SEQ ID NO: 147158 - RNA, 1410 nt, Artificial Sequence; identical to SEQ ID NO: 145963
  derived and/or modified CDS sequence (opt3) from neuraminidase__InfluenzaA__ADK33894

SEQ ID NO: 147159 - RNA, 1410 nt, Artificial Sequence; identical to SEQ ID NO: 145963
  derived and/or modified CDS sequence (opt3) from neuraminidase__InfluenzaA__ADK33904

SEQ ID NO: 147160 - RNA, 1410 nt, Artificial Sequence; identical to SEQ ID NO: 146743
  derived and/or modified CDS sequence (opt3) from neuraminidase__InfluenzaA__ADK33914

SEQ ID NO: 147161 - RNA, 1410 nt, Artificial Sequence
  derived and/or modified CDS sequence (opt3) from neuraminidase__InfluenzaA__ADK33924
augaaccccaaucagaagaucauuaccauaggcagcgugugcaugacaaucgggauggccaaccugauucuccaaaucggaaauauuaucuccauauggaucucucacucaauucagcuugguaaccagaaucagaucgagacuuguaaccaaagugucauuacguacgaaaauaacaccuggguuaaucagacauaugugaacaucagcaauacuaacuucgcugcaggccaguccguagugucugucaaacuggccggaaauucgucauugugcccugugagcggaugggcgauauacaguaaggacaacuccauuagaaucggcucuaaaggugauguuuuugugauuagggagccauucaucagcuguuccccguuagaaugccggaccuuuuuccugacacagggggcucuacucaaugacaagcauucaaacggaaccaucaaagaucgcagucccuaucgaacucugaugagcuguccuauuggcgaggucccaucucccuacaacucccguuuugaaucaguggccuggagcgcaagugccugccacgacggcauaaauuggcuuacaaucgggauuucuggaccugauaacggugcuguagcaguucugaaguauaauggcaucauaaccgacacgauuaaguccuggagaaacaauaucuugaggacucaagagagcgagugugccugcgugaacgggucguguuucaccgucaugacagauggaccaucugacggccaggcuuccuacaaaaucuuucggauugaaaaggguaaaaucgugaagucaguggagaugaaugcccccaacuaucauuacgaagagugcaguuguuacccugauagcuccgagauuacuugcgucugccgcgacaauuggcacgggucuaacagaccauggguuagcuucaaucagaaccucgaauaucagauaggauacaucuguucaggcauuuuuggcgauaauccgaggcccaacgacaaaaccgggaguugcggaccuguguccagcaauggugcgaacggcguaaagggguucucuuuuaaguauggaaacggcguguggaucggucggacaaaaucaaucaguagccgcaauggguucgagaugauuugggauccaaacggcuggaccggaacggacaauaacuuuuccauaaagcaagacaucgucggcauuaaugaauggucuggguacucggggagcuucgugcagcaucccgagcugacuggucuggauuguauccgaccuugcuucuggguugaacucauuagaggcaggccaaaagagaacacaaucuggaccuccgggucaaguauaucuuuuuguggagugaauagcaacacugucggcugguccuggcccgacggugcagaguuaccguucacaaucgauaaguga

SEQ ID NO: 147162 - RNA, 1410 nt, Artificial Sequence; identical to SEQ ID NO: 144786
  derived and/or modified CDS sequence (opt3) from neuraminidase__InfluenzaA__ADK33934

SEQ ID NO: 147163 - RNA, 1410 nt, Artificial Sequence; identical to SEQ ID NO: 144786
  derived and/or modified CDS sequence (opt3) from neuraminidase__InfluenzaA__ADK33944

SEQ ID NO: 147164 - RNA, 1410 nt, Artificial Sequence; identical to SEQ ID NO: 146743
  derived and/or modified CDS sequence (opt3) from neuraminidase__InfluenzaA__ADK33954

SEQ ID NO: 147165 - RNA, 1410 nt, Artificial Sequence; identical to SEQ ID NO: 144786
  derived and/or modified CDS sequence (opt3) from neuraminidase__InfluenzaA__ADK33964

SEQ ID NO: 147166 - RNA, 1410 nt, Artificial Sequence; identical to SEQ ID NO: 145893
  derived and/or modified CDS sequence (opt3) from neuraminidase__InfluenzaA__ADK33974

SEQ ID NO: 147167 - RNA, 1410 nt, Artificial Sequence; identical to SEQ ID NO: 144786
  derived and/or modified CDS sequence (opt3) from neuraminidase__InfluenzaA__ADK33984

SEQ ID NO: 147168 - RNA, 1410 nt, Artificial Sequence
  derived and/or modified CDS sequence (opt3) from neuraminidase__InfluenzaA__ADK39016
augaaccccaaucagaagaucauuaccauaggcagcgugugcaucacaauugggauggccaaccugauccuccaaauuggaaauaucauauccaucuggauuucucacucaauccagcuugguaaccagaaucagauugagacuuguaaccaaagugucaucacguacgaaaauaacaccuggguuaaucagacauaugugaacauaagcaauacuaacuucgcugcaggccaguccguagugucugucaaacuggccggaaauucgucauugugcccugugagcgggugggcgauuuacaguaaggacaacuccaucagaauuggcucuaaaggugauguuuuugugaucagggagccauucaucagcuguuccccguuagaaugccggaccuuuuuccugacacagggggcucuacucaaugacaagcauucaaacggaaccauuaaagaucgcagucccuaucgaacucugaugagcuguccuauaggcgaggucccaucucccuacaacucccguuuugaaucaguggccuggagcgcaagugccugccacgacggcaucucuuggcuuacaauugggaucuccggaccugauaauggugcuguagcaguucugaaguauaacggcauaauuaccgacacgaucaagagcuggagaaauaacaucuugaggacucaagagucggagugugccugcgugaaugggucuuguuucaccgucaugacagauggaccauccgacggccaggcuucauacaaaauuuuucggaucgaaaaggguaaaauugugaagaguguggagaugaacgcccccaauuaucauuacgaagagugcagcuguuacccugauuccucugagauaacuugcgucugccgcgacaacuggcacgggagcaauagaccauggguuucauucaaccagaaucucgaauaucagaucggauacauuuguaguggcaucuuuggcgauaacccgaggcccaaugacaaaaccggguccugcggaccugugagcucuaacggugcgaauggcguaaagggguucucauuuaaguauggaaacggcguguggaucggucggacaaaaaguauuagcucccgcaacggguucgagaugauaugggauccagacggcuggaccggaacggacaauaacuuuucuaucaagcaagauauugucggcaucaaugaauggucgggguacagcggauccuucgugcagcaucccgagcugacuggucuggacuguauucgaccuugcuucuggguugaacucaucagaggcaggccaaaagagaacacaauauggaccucagggaguucuaucagcuuuuguggagucaauuccgauacugugggcuggucauggcccgacggugcagaguuaccguucacaauugauaaguga

SEQ ID NO: 147169 - RNA, 1410 nt, Artificial Sequence; identical to SEQ ID NO: 144647
  derived and/or modified CDS sequence (opt3) from neuraminidase__InfluenzaA__ADK45315

SEQ ID NO: 147170 - RNA, 1410 nt, Artificial Sequence
  derived and/or modified CDS sequence (opt3) from neuraminidase__InfluenzaA__ADK45413
augaaccccaaucagaagaucauuaccauaggcagcgugucccugacaaucucuacuauuugcuucuuuaugcaaaucgccauucucaucacgaccgucacacuucacuucaaacaguacgaguuuaacucaccuccaaauaaccagguuaugcuguaugaaccgacuauaaucgagagaaauauuaccgaaaucguguacuugacaaacaccacuauugagaaggaaaucugucccaaauuagcugaguauaggaauuggaguaagccucagugcgacauaacaggguucgcaccauuuagcaaagauaacuccauucggcugucugccggaggugacaucuggguaacccgcgagcccuacgugucgugugauccugacaagugcuaucaauucgcgcuaggccaggggacgacucucaauaacguccauucaaauaacaccgugcgagaucguacaccauacagaacucugcuuaugaaugaacugggaguucccuuucacuugggcaccaaacagguguguauugcuuggagcaguuccucuugccaugacgguaaggccuggcuccacgucuguaucacaggggaugacaagaacgcaaccgccagcuucaucuauaauggaaggcugguggauuccguaguuucauggaguaaagacauucugcggacgcaggagagcgaaugcguguguauaaacggcacuugcacagucgugaugaccgauggcucugcuuccgggaaggcagacacuaaaauccucuuuauugaggagggaaagaucgugcauacaucaaccuuaagcgguagugcccaacacgucgaagaguguucuugcuacccucgcuacccaggcguuagaugcguguguagggauaacuggaagggguccaaucggccgauaguagacauuaacaucaaagaccacagcaucgcuucgucuuaugugugcuccggacuggucggcgauacgccccgcaagaaugacucaaguagcuccucucauugucuugauccuaacaaugaagagggugggcacggagugaaaggcugggccuucgacgauggcaacgacguuuggauggggcgaaccauuagcgaaaagucaagauugggauacgagacauuuaaagugaucgaggguuggaguaauccaaaguccaaacugcagauuaacaggcaggucauaguggaucggggcaaucguagcggguauucuggaaucuucucaguagaaggcaagaguugcauuaaccgcuguuuuuacguugagcuaaucagagguaggaaggaagagacugaagugcucuggaccagcaauuccaucgucguguucugcgggacaucuggcacuuauggaaccggcucguggcccgacggggcgaacauuaaucugaugccuauauga

SEQ ID NO: 147171 - RNA, 1410 nt, Artificial Sequence
  derived and/or modified CDS sequence (opt3) from neuraminidase__InfluenzaA__ADK45424
augaaccccaaucagaagaucauuaccauaggcagcgugucccugacaaucucuacuauuugcuucuuuaugcaaaucgccauucucaucacgaccgucacacuucacuucaaacaguacgaguuuaacucaccuccaaauaaccagguuaugcugugugaaccgacuauaaucgagagaaauauuaccgaaaucguguauuugacaaacaccacuauugagaaggaaaucugccccaaauuagcugaguacaggaauuggaguaagccucagugugacauaacaggguucgcaccauuuagcaaagauaacuccauucggcugucugccggaggugacaucuggguaacccgcgagcccuaugugucgugcgauccugacaaguguuaccaauucgcgcuaggccaggggacgacucucaauaacguccauucaaauaacaccgugcgagaucguacaccauauagaacucugcuuaugaaugaacugggaguucccuuucacuugggcaccaaacaggugugcauugcuuggagcaguuccucuugucaugacgguaaggccuggcuccacgucugcaucacaggggaugacaagaacgcaaccgccagcuucaucuacaauggaaggcugguggauuccguaguuucauggaguaaagagauucugcggacgcaggaaagcgagugugugugcauaaacggcacuuguacagucgugaugaccgacggcucugcuuccgggaaggcagauacuaaaauccucuuuauugaggaaggaaagaucgugcauacaucaaccuuaagcgguagugcccaacacgucgaggaaugcucuugcuauccucgcuacccaggcguuagaugugugugcagggacaacuggaagggguccaaucggccgauaguagauauuaacaucaaagaccacagcaucgugucgucuuaccuguguuccggacuugucggcgacacgccccgcaagaaugauucaaguagcuccucucauugcuuggacccuaacaaugaggaaggugggcacggagugaaaggcugggcuuucgaugacggcaacgauguuuggauggggcgaaccauuagcgagaagucaagacugggauaugagacauuuaaagugaucgaagguuggaguaauccaaaguccaaacuacagauuaacaggcaggucauaguggaccggggcaaucguagcggguacucuggaaucuucucaguagagggcaagaguuguauuaaccgcugcuuuuauguugaacucaucagagguaggaaggaggaaacugaggugcuguggaccagcaauuccaucgucguguucugugggacaucuggcacuuacggaaccggcucguggcccgauggggccgacauuaaccuuaugccuauauga

SEQ ID NO: 147172 - RNA, 1410 nt, Artificial Sequence; identical to SEQ ID NO: 145953
  derived and/or modified CDS sequence (opt3) from neuraminidase__InfluenzaA__ADK45446

SEQ ID NO: 147173 - RNA, 1410 nt, Artificial Sequence
  derived and/or modified CDS sequence (opt3) from neuraminidase__InfluenzaA__ADK45457
augaaccccaaucagaagaucauuaccauaggcagcgugucccugacaaucucuacuauuugcuucuuuaugcagaucgccauucucaucacgaccgucacacuucacuucaaacaguacgaguuuaacucaccuccaaauaaccagguuaugcugugugaaccgacuauaaucgagagaaauauuaccgaaaucguguauuugacaaacaccacuauugagaaggaaaucugccccaaauuagcugaguacaggaauuggaguaagccucagugugacauaacaggguucgcaccauuuagcaaagauaacuccauucggcugucugccggaggugacaucuggguaacccgcgagcccuaugugucgugcgauccugacaaguguuaccaauucgcgcuaggccaggggacgacucucaauaacguccauucaaauaacaccgugcgagaucguacaccauauagaacucugcuuaugaaugaacugggaguucccuuucacuugggcaccaaacaggugugcauugcuuggagcaguuccucuugucaugacgguaaggccuggcuccacgucugcaucacaggggaugacaagaacgcaaccgccagcuucaucuacaauggaaggcugguggauuccguaguuucauggaguaaagagauucugcggacgcaggaaagcgagugugugugcauaaacggcacuuguacagucgugaugaccgacggcucugcuuccgggaaggcagauacuaaaauccucuuuauugaggaaggaaagaucgugcauacaucaaccuuaagcgguagugcccaacacgucgaggaaugcucuugcuauccucgcuacccaggcguuagaugugugugcagggacaacuggaagggguccaaucggccgauaguagauauuaacaucaaagaccacagcaucgugucgucuuacgucuguuccggacuggugggcgacacgccccgcaagaaugauucaagugguagcucccauugccuugacccuaacaaugaggaagggggacacggcguuaaaggcugggcuuucgaugacgggaacgauguguggaugggacgaaccauuucugaaaagagcagauuggguuaugagacauuuaaagucaucgagggcuggucaaauccaaagaguaaacugcagauuaacaggcaagugauaguagaccgggggaaucguuccggauacagcggcaucuucucuguugaggguaagucauguauuaaccgcugcuuuuauguggaacuaaucagagggaggaaggaggaaacugagguccucuggaccaguaauagcaucguggucuucuguggcacauccggaacuuacggcaccgggucuuggcccgauggagccgacauuaaccugaugccuauauga

SEQ ID NO: 147174 - RNA, 1410 nt, Artificial Sequence
  derived and/or modified CDS sequence (opt3) from neuraminidase__InfluenzaA__ADK45479
augaaccccaaucagaagaucauuaccauaggcagcgugucccugacaaucucuacuauuugcuucuuuaugcaaaucgccauucucaucacgaccgucacacuucacuucaaacaguacgaguuuaacucaccuccaaauaaccagguuaugcugugugaaccgacuauaaucgagagaaauauuaccgaaaucguguauuugacaaacaccacuauugagaaggaaaucugccccaaauuagcugaguacaggaauuggaguaagccucagugugacauaacaggguucgcaccauuuagcaaagauaacuccauucggcugucugccggaggugacaucuggguaacccgcgagcccuaugugucgugcgauccugacaaguguuaccaauucgcgcuaggccaggggacgacucucaauaacguccauucaaauaacaccgugcgagaucguacaccauauagaacucugcuuaugaaugaacugggaguucccuuucacuugggcaccaaacaggugugcauugcuuggagcaguuccucuugucaugacgguaaggccuggcuccacgucugcaucacaggggaugacaagaacgcaaccgccagcuucaucuacaauggaaggcugguggauuccguaguuucauggaguaaagacauucugcggacgcaggagagcgaaugugugugcauaaacggcacuuguacagucgugaugaccgauggcucugcuuccgggaaggcagacacuaaaauccucuuuauugaggagggaaaggugguccauacaucaaccuuaagcgguagugcccaacacguugaagagugcucuugcuauccucgcuacccaggcgugagauguguaugcagggauaacuggaagggguccaaucggccgaucguggacauaaacauuaaagaccacagcaucgucucgucuuacguguguuccggacugguuggcgauacgccccgcaagaaugacucaaguagcuccucucauugccuugauccuaacaaugaagagggugggcacggagugaaaggcugggcuuucgacgauggcaacgacgucuggauggggcgaaccaucagcgaaaagucaagauugggauaugagacauuuaaagugauugaggguuggaguaaucauaaguccaaacugcagaucaacaggcagguaauuguugaucggggcaaucguagcggguacucuggaauauucucaguggaaggcaagaguuguaucaaccgcugcuuuuaugucgagcuaauuagagguaggaaggaagaggccgaagugcucuggacuagcaauuccaucgucguguucugugggaccucuggcacauacggaacuggcucguggccagacggggcggaucugaaccuuaugcccaucuga

SEQ ID NO: 147175 - RNA, 1410 nt, Artificial Sequence; identical to SEQ ID NO: 144786
  derived and/or modified CDS sequence (opt3) from neuraminidase__InfluenzaA__ADK48799

SEQ ID NO: 147176 - RNA, 1410 nt, Artificial Sequence; identical to SEQ ID NO: 146699
  derived and/or modified CDS sequence (opt3) from neuraminidase__InfluenzaA__ADK62686

SEQ ID NO: 147177 - RNA, 1410 nt, Artificial Sequence; identical to SEQ ID NO: 146137
  derived and/or modified CDS sequence (opt3) from neuraminidase__InfluenzaA__ADK62696

SEQ ID NO: 147178 - RNA, 1410 nt, Artificial Sequence; identical to SEQ ID NO: 145369
  derived and/or modified CDS sequence (opt3) from neuraminidase__InfluenzaA__ADK64994

SEQ ID NO: 147179 - RNA, 1410 nt, Artificial Sequence
  derived and/or modified CDS sequence (opt3) from neuraminidase__InfluenzaA__ADK65002
augaaccccaaucagaagaucauuaccauaggcagcgugugcaugacaaucgggauggccaaccugauucuccaaaucggaaauauuaucuccauauggaucucucacucaauucagcuugguaaccagaaucagaucgagacuuguaaccaaagugucauuacguacgaaaauaacaccuggguuaaucagacauaugugaacaucagcaauacuaacuucgcugcaggccaguccguagugucugucaaacuggccggaaauucgucauugugcccugugagcgggugggcgauauacaguaaggacaacuccauuagaaccggcucuaaaggugauguuuuugugaucagggagccauucauuagcuguuccccguuagaaugccggacauuuuuccugacccagggggcucuacucaaugacaagcauucaaacggaacuaucaaagaucgcagucccuaucgaacacugaugagcuguccuaucggcgaggucccaucucccuacaacucccguuuugaaucaguggccuggagcgcaagugccugccacgacggcauuaauuggcuuaccauagggaucucuggaccugauaacggugcuguagcaggccugaaguauaaugggauuaucacggacacuauaaaguccuggagaaacaauauuuugaggacccaagagagcgagugugccugcguuaacggaucguguuucacagugaugacugauggcccaucugacggucaggcuuccuacaaaaucuuucggaucgaaaaggggaaaauugucaagucaguggagaugaaugcccccaacuaucauuacgaagagugcaguuguuacccugauagcuccgagauuaccugcgugugccgcgacaauuggcacggaucuaacagaccaugggucagcuucaaucagaaccucgaauaucagaucggcuacauauguucaggcaucuuuggggauaauccgaggcccaacgacaaaacaggaaguugcgguccuguuuccagcaauggcgcgaacggggugaagggauucucuuuuaaguauggcaacgguguauggauugggcggaccaaaucaaucaguagccgcaauggcuucgagaugaucugggauccaaacggauggacgggcacugacaauaacuuuuccauuaagcaagacauaguggggaucaaugaauggucuggauacucggguagcuucguccagcaucccgagcugacaggccuggauuguauucgaccuugcuucuggguggaacucaucagagggaggccaaaagagaacaccauuuggacuuccggaucaaguaucucuuuuuguggcguuaauagcgacacaguggguugguccuggcccgauggggcagaguuaccguucaccauagacaaguga

SEQ ID NO: 147180 - RNA, 1410 nt, Artificial Sequence; identical to SEQ ID NO: 144786
  derived and/or modified CDS sequence (opt3) from neuraminidase__InfluenzaA__ADK65010

SEQ ID NO: 147181 - RNA, 1410 nt, Artificial Sequence
  derived and/or modified CDS sequence (opt3) from neuraminidase__InfluenzaA__ADK65018
augaaccccaaucagaagaucauuaccauaggcagcgugugcaugacaaucgggauggccaaccugauucuccaaaucggaaauauuaucuccauauggaucucucacucaauucagcuugguaaccagaaucagaucgagacuuguaaccaaagugucauuacguacgaaaauaacaccuggguuaaucagacauaugugaacaucagcaauacuaacuucgcugcaggccaguccguagugucugucaaacuggccggaaauucgucauugugcccugugagcgggugggcgauauacaguaaggacaacuccauuagaaucggcucuaaaggugauguuuuugugauuagggagccauucaucagcuguuccccguuagaaugccggaccuuuuuccugacacagggggcucuacucaaugacaagcauucaaacggaaccaucaaagaucgcagucccuaucgaacucugaugagcuguccuauuggcgaggucccaucucccuacaacucccguuuugaaucaguggccuggccugcaagcgccugccacgacggcauaaauuggcuuacaaucgggauuaguggaccagauaacggugcuguagcaguucugaaguauaauggcaucauaaccgacacgauuaagucuuggagaaacaauaucuugaggacucaagaguccgagugugccugcgugaacgggagcuguuucaccaucaugacagauggacccucggacggccaggcuucuuacaaaauuuuucggaucgaaaaggguaaaauugucaaguccauagagaugaaugccccuaacuaucauuacgaagagugcucauguuacccagauaguagcgagaucacuugcgugugccgcgacaauuggcacggguccaacagaccgugggugucuuucaaucagaaccucgaauaucagauuggauacaucuguagcggcaucuuuggcgauaaucccaggccuaacgacaaaaccgggucaugcggaccagucaguuccaauggugcgaacggcguuaagggguucagcuuuaaguauggaaacggcguguggauuggucggacaaaaucuauaucaagucgcaauggguucgagaugaucugggaucccaacggcuggaccggaacggacaauaacuuuagcauuaagcaagacaucguaggcauuaaugaaugguccggguacucuggaucguucgugcagcauccugagcugacuggucuggauuguauccgaccaugcuucugggucgaacucauaagaggcaggcccaaagagaacacaaucuggaccagcggguccucaauuaguuuuuguggaguuaauucugacacugugggcuggagcuggccggauggugcagaguuaccuuucacaaucgacaaguga

SEQ ID NO: 147182 - RNA, 1410 nt, Artificial Sequence
  derived and/or modified CDS sequence (opt3) from neuraminidase__InfluenzaA__ADK87290
augaaccccaaucagaagaucauuaccauaggcagcgugucccugacaaucucuacuauuugcuucuuuaugcagaucgccauucucaucacgaccgucacacuucacuucaaacaguacgaguuuaacucaccuccaaauaaccagguuaugcugugugaaccgacuauaaucgagagaaauauuaccgaaaucguguauuugacaaacaccacuauugagaaggaaaucugccccaaauuagcugaguacaggaauuggaguaagccucagugugacauaacaggguucgcaccauuuagcaaagauaacuccauucggcugucugccggaggugacaucuggguaacccgcgagcccuaugugucgugcgauccugacaaguguuaccaauucgcgcuaggccaggggacgacucucaauaacguccauucaaauaacaccgugcgagaucguacaccauauagaacucugcuuaugaaugaacugggaguucccuuucacuugggcaccaaacaggugugcauugcuuggagcaguuccucuugucaugacgguaaggccuggcuccacgucugcaucacaggggaugacaagaacgcaaccgccagcuucaucuacaauggaaggcugguggauuccguaguuucauggaguaaagagauucugcggacgcaggaaagcgagugugugugcauaaacggcacuuguacagucgugaugaccgacggcucugcuuccgggaaggcauauacuaaaauccucuuuauugaggaaggaaagaucgugcauacaucaaccuuaagcgguagugcccaacacgucgaggaaugcucuugcuacccucgcuacccaggcguuagaugugugugcagggauaacuggaagggguccaaucggccgauaguagacauuaacaucaaagaucacagcaucgugucgucuuaugucuguuccggacuggugggcgacacgccccgcaagaaugacucaaguagcuccucucauugccuugauccuaacaaugaggaaggugggcacggaguuaaaggcugggcuuucgacgauggcaacgacguguggauggggcgaaccauuagcgagaagucaagauugggauacgagacauuuaaagucaucgaagguuggaguaauccaaaguccaaacugcagauuaacaggcaagugauaguagaucggggcaaucguagcggguauucuggaaucuucucaguugagggcaagaguuguauuaaccgcugcuuuuacguggaacuaaucagagguaggaaggaggaaacugagguccucuggaccagcaauuccaucguggucuucugugggacaucuggcacuuauggaaccggcucguggcccgacggggccgauauuaaccugaugccuguguga

SEQ ID NO: 147183 - RNA, 1410 nt, Artificial Sequence
  derived and/or modified CDS sequence (opt3) from neuraminidase__InfluenzaA__ADK87292
augaaccccaaucagaagaucauuaccauaggcagcgugucccugacaaucucuacuauuugcuucuuuaugcaaaucgccauucucaucacgaccgucacacuucacuucaaacaguacgaguuuaacucaccuccaaauaaccagguuaugcugugugaaccgacuauaaucgagagaaauauuaccgaaaucguguauuugacaaacaccacuauugagaaggaaaucugccccaaauuagcugaguacaggaauuggaguaagccucagugugacauaacaggguucgcaccauuuagcaaagauaacuccauucggcugucugccggaggugacaucuggguaacccgcgagcccuaugugucgugcgauccugacaaguguuaccaauucgcgcuaggccaggggacgacucucaauaacguccauucaaauaacaccgugcgagaucguacaccauauagaacucugcuuaugaaugaacugggaguucccuuucacuugggcaccaaacaggugugcauugcuuggagcaguuccucuugucaugacgguaaggccuggcuccacgucugcaucacaggggaugacaagaacgcaaccgccagcuucaucuacaauggaaggcugguggauuccguaguuucauggaguaaagagauucugcggacgcaggaaagcgagugugugugcauaaacggcacuuguacagucgugaugaccgacggcucugcuuccgggaaggcagauacuaaaauccucuuuauugaggaaggaaagaucgugcauacaucaaccuuaagcgguagugcccaacacgucgaggaaugcucuugcuauccucgcuacccaggcguuagaugugugugcagggacaacuggaagggguccaaucggccgauaguagauauuaacaucaaagaccacagcaucgugucgucuuacgcuuguuccggacuggucggcgacacgccccgcaagaaugauucaaguagcuccucucauugccuugacccuaacaaugaggaaggugggcacggagugaaaggcugggccuucgaugacggcaacgauguuuggauggggcgaaccauuagcgagaagucaagauugggauaugagacauuuaaagugaucgaagguuggaguaauccaaaguccaaacugcagauuaacaggcaggucauaguggaccggggcaaucguagcggguacucuggaaucuucucaguagagggcaagaguuguauuaaccgcugcuuuuauguugaacuaaucagagguaggaaggaggaaacugaggugcucuggaccagcaauuccaucgucguguucugugggacaucuggcacuuacggaaccggcucguggcccgauggggcggacauuaaccugaugccugucuga

SEQ ID NO: 147184 - RNA, 1410 nt, Artificial Sequence
  derived and/or modified CDS sequence (opt3) from neuraminidase__InfluenzaA__ADK87294
augaaccccaaucagaagaucauugccauaggcagcgugucccugaccaucucuacaauuugcuucuuucuccaaaucgcuauucuuaucacuacggucacccugcacuucaaacaguacgaguuuaacucaccuccaaauaaccagguuauguugugugaaccgacaauaaucgagagaaauauuacugaaaucguguauuuaaccaacacaaccauugagaaggaaaucugccccaaacuggcagaguacaggaauuggaguaagccucagugugacauaacuggguucgccccauuuagcaaagauaacuccauucggcuaucugcgggaggugacaucuggguaacacgcgagcccuaugugucgugcgauccugacaaguguuaccaauucgcucucggccaggggaccacgcugaauaacguccauucaaauaacacugugcgagaucguaccccauauagaacacuucugaugaaugaauugggaguucccuuucaccucggcacuaaacaggugugcauugccuggagcaguuccucuuguagggacgguaaggcauggcugcaugucugcaucaccggggaugacaagaacgccacagcuagcuucaucuacaauggacggcugguggauuccguaguuucauggaguaaagagauucuccgcacccaggaaagcgagugugugugcauaaacggcacguguacugucgugaugacagacggcucugcauccgggaaggccgauaccaaaaucuuauuuauugaggaaggaaagaucgugcacacuucaacacugagcgguagugcucaacaugucgaggaaugcucuugcuauccuagauacccaggcguuaggugugugugccgggacaccgggaagggauccaaccgcccgauaguagauauuaauaucaaagaccacagcaucgugucgucuuacgucuguuccggccuugugggugacacgccccgaaagaacgauucaaguagcuccucucacugcuuggacccuaauaacgaggaagggggacauggcguuaaaggcugggccuucgaugacgggaaugauguguggaugggaagaaccauuagcgagaagucaaggcuggguuaugagacauuuaaagucaucgaaggcuggaguaacccaaaguccaaacuacagauuaaucgucaggugauaguagaccgggggaaccgcagcggauacucuggcaucuucucaguugaggguaagaguuguauuaauagaugcuuuuauguggaacucaucagggggcggaaggaggaaacugagguccuguggaccagcaacaauaucguggucuucuguggcacauccggaacuuacggcaccgggucuuggcccgauggagcggacauuaaccuuaugccuguguga

SEQ ID NO: 147185 - RNA, 1410 nt, Artificial Sequence
  derived and/or modified CDS sequence (opt3) from neuraminidase__InfluenzaA__ADK87297
augaaccccaaucagaagaucauuaccauaggcagcgugugcaugacaaucgggauggccaaccugauucuccaaaucggaaauauuaucuccauauggaucucucacucaauucagcuugguaaccagaaucagaucgagacuuguaaccaaagugucauuacguacgaaaauaacaccuggguuaaucagacauaugugaacaucagcaauacuaacuucgcugcaggccaguccguagugucugucaaacuggccggaaauucgucauugugcccugugagcggaugggcgauauacaguaaggacaacuccauuagaaucggcucuaaaggugauguuuuugugauuagggagccauucaucagcuguuccccguuagaaugccggaccuuuuuccugacacagggggcucuacucaaugacaagcauucaaacggaaccaucaaaaaccgcagucccuaucgaacucugaugagcuguccuauuggcgaggucccaucucccuacaauucccguuuugaaucaguggccuggagcgcaagugccugccacgauggcauaaacuggcuuacaaucgggauuucuggaccugacaauggugcuguagcaguucugaaguauaacggcaucauaaccgauacgauuaaguccuggagaaauaacaucuugaggacucaagagagcgagugugccugcgugaaugggucguguuucaccgucaugacagacggaccaucugauggccaggcuuccuacaaaaucuuucggauugaaaaggguaaaaucgugaagucaguggagaugaacgcccccaauuaucauuacgaagagugcaguuguuacccugacagcuccgagauuacuugcgucugccgcgauaacuggcacgggucuaauagaccauggguuagcuucaaccagaaucucgaauaucagauaggauacaucuguucaggcauuuuuggcgacaacccgaggcccaaugauaaaaccgggaguugcggaccuguguccagcaacggugcgaacggcguaaagggguucucuuuuaaguauggaaauggcguguggaucggucggacaaaaucaaucaguagccgcaacggguucgagaugauuugggacccaaauggcuggaccggaacggauaacaauuuuuccauaaagcaagacaucgucggcauuaacgaauggucuggguacucggggagcuucgugcagcaucccgagcugacuggucuggacuguauccgaccuugcuucuggguugaacucauuagaggcaggccaaaagagaauacaaucuggaccuccgggucaaguauaucuuuuuguggagugaacagcgauacugucggcugguccuggcccgacggugcagaguuaccguucacaaucgauaaguga

SEQ ID NO: 147186 - RNA, 1410 nt, Artificial Sequence
  derived and/or modified CDS sequence (opt3) from neuraminidase__InfluenzaA__ADK87299
augaaccccaaucagaagaucauuaccauaggcagcgugugcaugacaaucgggauggccaaccugauucuccaaaucggaaauauuaucuccauauggaucucucacucaauucagcuugguaaccagaaucagaucgagacuuguaaccaaagugucauuacguacgaaaauaacaccuggguuaaucagacauaugugaacaucagcaauacuaacuucgcugcaggccaguccguagugucugucaaacuggccggaaauucgucauugugcccugugagcggaugggcgauauacaguaaggacaacuccauuagaaucggcucuaaaggugauguuuuugugauuagggagccauucaucagcuguuccccguuagaaugccggaccuuuuuccugacacagggggcucuacucaaugacaagcauucaaacggaaccaucaaagaucgcagucccuaucgaacucugaugagcuguccuauuggcgaggucccaucucccuacaacucccguuuugaaucaguggccuggagcgcaagugccugccacgacggcauaaauuggcuuacaaucgggauuucuggaccugauaacggugcuguagcaguucugaaguauaauggcaucauaaccgacacgauuaaguccuggagaaacaauaucuugaggacucaagagagcgagugugccugcgugaacgggucguguuucaccgucaugacagauggaccaucugacggccaggcuuccuuuaaaaucuuccggauugaaaaggguaaaaucgugaagucaguggagaugaaugcccccaacuaccauuaugaagagugcaguuguuacccugauagcuccgagauuacuugcgucugccgcgacaauuggcacgggucuaacagaccauggguuagcuuuaaucagaaccucgaauaccagauaggauauaucuguucaggcauuuucggcgauaauccgaggcccaacgacaaaaccgggaguugcggaccuguguccagcaauggugcgaacggcguaaagggguuuucuuucaaguacggaaacggcguguggaucggucggacaaaaucaaucaguagccgcaauggguuugagaugauuugggauccaaacggcuggaccggaacggacaauaacuucuccauaaagcaagacaucgucggcauuaaugaauggucuggguauucggggagcuucgugcagcaucccgagcugacuggucuggauuguauccgaccuugcuuuuggguugaacucauuagaggcaggccaaaagagaacacaaucuggaccuccgggucaaguauaucuuucuguggagugaauagcgacacugucggcugguccuggcccgauggugcagaguuaccguuuacaaucgacaaguga

SEQ ID NO: 147187 - RNA, 1410 nt, Artificial Sequence
  derived and/or modified CDS sequence (opt3) from neuraminidase__InfluenzaA__ADK87301
augaaccccaaucagaagaucauuaccauaggcagcgugucccugacaaucucuacuauuugcuucuuuaugcaaaucgccauucucaucacgaccgucacacuucacuucaaacaguacgaguuuaacucaccuccaaauaaccagguuaugcugugugaaccgacuauaaucgagagaaauauuaccgaaaucguguauuugacaaacaccacuauugagaaggaaaucugccccaaauuagcugaguacaggaauuggaguaagccucagugugacauaacaggguucgcaccauuuagcaaagauaacuccauucggcugucugccggaggugacaucuggguaacccgcgagcccuaugugucgugcgauccugacaaguguuaccaauucgcgcuaggccaggggacgacucucaauaacguccauucaaauaacaccgugcgagaucguacaccauauagaacucugcuuaugaaugaacugggaguucccuuucacuugggcaccaaacaggugugcauugcuuggagcaguuccucuugucaugacgguaaggccuggcuccacgucugcaucacaggggaugacaagaacgcaaccgccagcuucaucuacaauggaaggcugguggauuccguaguuucauggaguaaagagauucugcggacgcaggaaagcgagugugugugcauaaacggcacuuguacagucgcuaugaccgacggcucugcauccgggaaggccgauacuaaaauccucuuuauugaggaaggaaagaucgugcauacaucaaccuuaagcgguagugcucaacacguggaggaaugcucuugcuauccucgcuacccaggcgucagauguguuugcagggacaacuggaagggguccaaucggccgauaguggauauuaacaucaaagaccacagcaucguaucgucuuacguguguuccggacuggucggcgacacgccccgcaagaaugauucaaguagcuccucucauugccuugacccuaacaaugaggaaggugggcacggagugaaaggcugggccuucgaugacggcaacgauguuuggauggggcgaaccauuagcgagaagucaagauugggauaugagacauuuaaagugaucgaagguuggaguaauccaaaguccaaacugcagauuaacaggcaggucauaguggaccggggcaaucguagcggguacucuggaaucuucucaguagagggcaagaguuguauuaaccgcugcuuuuauguugaacuaaucagagguaggaaggaggaaacugaggugcucuggaccagcaauuccaucgucguguucugugggacaucuggcacuuacggaaccggcucguggcccgauggggcggacauuaaccugaugccuauauga

SEQ ID NO: 147188 - RNA, 1410 nt, Artificial Sequence; identical to SEQ ID NO: 144647
  derived and/or modified CDS sequence (opt3) from neuraminidase__InfluenzaA__ADK87303

SEQ ID NO: 147189 - RNA, 1410 nt, Artificial Sequence
  derived and/or modified CDS sequence (opt3) from neuraminidase__InfluenzaA__ADK87305
augaaccccaaucagaagaucauuaccauaggcagcgugucccugacaaucucuacuauuugcuucuuuaugcagaucgccauucucaucacgaccgucacacuucacuucaaacaguacgaguuuaacucaccuccaaauaaccagguuaugcugugugaaccgacuauaaucgagagaaauauuaccgaaaucguguauuugacaaacaccacuauugagaaggaaaucugccccaaauuagcugaguacaggaauuggaguaagccucagugugacauaacaggguucgcaccauuuagcaaagauaacuccauucggcugucugccggaggugacaucuggguaacccgcgagcccuaugugucgugcgauccugacaaguguuaccaauucgcgcuaggccaggggacgacucucaauaacguccauucaaauaacaccgugcgagaucguacaccauauagaacucugcuuaugaaugaacugggaguucccuuucacuugggcaccaaacaggugugcauugcuuggagcaguuccucuugucaugacgguaaggccuggcuccacgucugcaucacaggggaugacaagaacgcaaccgccagcuucaucuacaauggaaggcugguggauuccguaguuucauggaguaaagagauucugcggacgcaggaaagcgagugugugugcauaaacggcacuuguacagucgugaugaccgacggcucugcuuccgggaaggcagauacuaaaauccucuuuauugaggaaggaaagaucgugcauacaucaaccuuaagcgguagugcccaacacgucgaggaaugcucuugcuauccucgcuacccaggcguuagaugugugugcagggacaacuggaagggguccaaucggccgauaguagauauuaacaucaaagaccacagcaucgugucgucuuacgucuguuccggacuggugggcgacacgccccgcaagaaugauucaaguagcuccucucauugccuugacccuaacaaugaggaaggugggcacggaguuaaaggcugggcuuucgaugacggcaacgauguguggauggggcgaaccauuagcgagaagucaagauugggauaugagacauuuaaagucaucgaagguuggaguaauccaaaguccaaacugcagauuaacaggcaagugauaguaggccgggggaaucguagcggauacucuggcaucuucucaguugaggguaagaguuguauuaaccgcugcuuuuauguggaacuaaucagagggaggaaggaggaaacugagguccucuggaccagcaauuccaucguggucuucuguggcacaucuggaacuuacggcaccgggucguggcccgacggagccgauauuaaccugaugccuguguga

SEQ ID NO: 147190 - RNA, 1410 nt, Artificial Sequence
  derived and/or modified CDS sequence (opt3) from neuraminidase__InfluenzaA__ADK87307
augaaccccaaucagaaggugaucaccauuggcagcgucucccugacaauaucuacuaucugcuucuuuaugcaaauugccauccucauuacgaccguuacacuucacuucaaacaguacgaguuuaacucaccuccaaauaaccaggugaugcugugugaaccgacuaucauagagagaaauaucaccgaaauuguauauuugacaaacaccacuaucgagaaggaaauuugccccaaauuagcugaguacaggaauuggaguaagccucagugugacaucacaggguucgcaccauuuagcaaagauaacuccauacggcugucugccggaggugacauuugggugacccgcgagcccuaugucucgugcgauccugacaaguguuaccaauucgcgcuaggccaggggacgacucucaauaacgugcauucaaauaacaccguucgagaucguacaccauauagaacucugcuuaugaaugaacugggagugcccuuucacuugggcaccaagcaggucugcaucgcuuggagcaguuccucuugucaugacgguaaagccuggcuccacgugugcauuacaggggaugacaagaacgcaaccgccagcuucaucuacaauggaaggcugguagauuccguugugucauggaguaaagagauccugcggacgcaggaaagcgagugugucugcauuaacggcacuuguacaguggugaugaccgacggcucugcuuccgggaaggcagauacuaaaauacucuuuaucgaggaaggaaagauuguccauacaucaaccuuaagcgguagugcccaacacguugaggaaugcucuugcuauccucgcuacccaggcgugagauguguaugcagggacaacuggaagggguccaaucggccgaucguggauauaaacauuaaagaccacagcaucgucucgucuuacguguguuccggacugguuggcgacacgccccgcaagaaugauucaaguagcuccucucauugccuugacccuaacaaugaggaaggugggcacggagugaaaggcugggcuuucgaugacggcaacgaugucuggauggggcgaaccaucagcgagaagucaagauugggauaugagacauuuaaagugauugaagguuggaguaauccaaaguccaaacugcagaucaacaggcagguaauuguuggccgggggaaucguagcggauacucuggcauauucucaguggaggguaagaguuguaucaaccgcugcuuuuaugucgaacuaauugggggcagaaaggaggaaacugaggugcucuggaccagcaauuccaucgucguguucuguggaacaucuggcacuuacgggaccggaucguggcccgacggugccgauaucaaccugaugccuguuuga

SEQ ID NO: 147191 - RNA, 1410 nt, Artificial Sequence
  derived and/or modified CDS sequence (opt3) from neuraminidase__InfluenzaA__ADK87312
augaaccccaaucagaccaucauuacaauaggcagcgugugcaugacuaucgggauggccaaccugauucuccaaaucggaaauauuaucuccauauggaucucucacucaauucagcuugguaaccagaaucagaucgagacguguaaccaaagugucauuaccuacgaaaauaacacauggguuaaucagacuuaugugaacaucagcaauaccaacuucgcugcaggccaguccguaauaucugugaagcuggccggaaauucgucauugugcccugucagcgggugggcgauuuacaguaaagacaacaauaucagaauuggcuccaagggugauguguuuguuaucagggagccauucaucucuuguagcccguuagaaugccggacauuuuuccugacccagggggcucuacucaacgacaaacauuccaacggaacuauuaaggaucgcucacccuaucgaacacugaugaguuguccuauaggcgaggugccaagccccuacaauucucguuuugaauccgucgccuggucagcaagcgccugccacgacggcaucaacuggcuuaccauugggaucaguggaccugauaauggugcuguggcaguacugaaauauaacggcauaauuacggacacuaucaagucuuggagaaauaacaucuugaggacccaagaguccgagugugccugcguuaaugggagcuguuucacagugaugacugauggaccaucggacggccaggcuucuuacaagauuuuucggaucgaaaaagguaagauugucaaauccguggagaugaacgcccccaauuaucauuacgaagagugcucauguuacccugauaguagcgagauaaccugcgugugccgcgacaacuggcacggguccaauagaccaugggucucuuucaaccagaaucucgaauaucagaucggauacauuuguagcggcaucuuuggcgauaacccgaggcccaaugacaagacagggucaugcggaccuguuaguuccaacggugcgaacggcgugaaaggguucagcuuuaaguauggaaauggcguauggaucggucggaccaagucuauuucaagucgcaacggguucgagaugauaugggauccaaauggcuggacgggaacugacaacaauuuuagcaucaaacaagacauugugggcaucaacgaaugguccggguacucuggaucguucguccagcaucccgagcugacaggucuggauuguauucgaccuugcuucuggguggaacucaucagaggcaggccaaaggagaauaccauauggacuagcggguccucaaucaguuuuuguggaguuaacucugacacagugggcuggagcuggcccgauggugcagaguuaccguucaccauugacaaauga

SEQ ID NO: 147192 - RNA, 1410 nt, Artificial Sequence
  derived and/or modified CDS sequence (opt3) from neuraminidase__InfluenzaA__ADK87314
augaaccccaaucagaagaucauuaccauaggcagcgugucccugacaaucucuacuauuugcuucuuuaugcaaaucgccauucucaucacgaccgucacacuucacuucaaacaguacgaguuuaacucaccuccaaauaaccagguuaugcugugugaaccgacuauaaucgaggggaauauuaccgaaaucguguauuugacaaacaccacuauugagaaggaaaugugccccaaauuagcugaguacagaaauuggaguaagccucagugugacaucacaggauucgcaccauuuagcaaagauaacuccauaaggcugucugccgguggcgacauuuggguaacccgggagcccuaugugucgugcgauccugacaaguguuaccaauucgcgcuagggcagggaacgacucucaauaacguccauucaaauaacaccgugcgcgaucgaacaccauaucguacucugcuuaugaaugaacugggcguucccuuucacuuggguaccaaacaggugugcaucgcuuggagcaguuccucuugucaugacgggaaggccuggcuccacgucugcauuacaggagaugacaagaacgcaaccgccagcuucaucuacaauggcagacugguggauuccguaguuucauggaguaaagagauccugaggacgcaggaaagcgagugugugugcauuaacggcacuuguacagucgugaugaccgacgggucugcuuccggaaaggcagauacuaaaauacucuuuaucgaggaagguaagauugugcauacaucaaccagcaguggcucugcccaacacgucgaggaaugcuccugcuauccucgguacccagggguucgcugugugugcagagacaacuggaagggaagcaauaggccgaucguagauauaaacauuaaagaccacucgaucgugucuuccuacgucuguucaggcuuagugggugacacgccccggaagaaugauaguagcuccucuagccauugccuggacccuaacaaugaggaagggggacacggcguuaaaggcugggcuuucgaugacgggaacgauguguggaugggacgcaccaucucagagaagagucgacuugguuaugagacauuuaaagucauugaaggcugguccaauccaaagagcaaauugcagaucaacagacaggugauuguagacagggggaaucggucuggauacucaggcauauucaguguugaggguaagagcuguaucaaccguugcuuuuauguggaacugauucgcgggagaaaggaggaaacugagguccuauggaccuccaauucuaucguggucuucuguggcacaucgggaacuuacggcaccgggagcuggcccgauggagccgacaucaaccucaugccuguguga

SEQ ID NO: 147193 - RNA, 1410 nt, Artificial Sequence
  derived and/or modified CDS sequence (opt3) from neuraminidase__InfluenzaA__ADK87316
augaaccccaaucagaagaucauuaccauaggcagcgugugcaugacaaucgggauggccaaccugauucuccaaaucggaaauauuaucuccauauggaucucucacucaauucagcuugguaaccagaaucagaucgagacuuguaaccaaagugucauuacguacgaaaauaacaccuggguuaaucagacauaugugaacaucagcaauacuaacuucgcugcaggccaguccguagugucugucaaacuggccggaaauucgucauugugcccugugagcggaugggcgauauacaguaaggacaacuccauuagaaucggcucuaaaggugauguuuuugugauuagggagccauucaucagcuguuccccguuagaaugccggaccuuuuuccugacacagggggcucuacucaaugacaagcauucaaacggaaccaucaaagaucgcagucccuaucgaacucugaugagcuguccuauuggcgaggucccaucucccuacaacucccguuuugaaucaguggccuggagcgcaagugccugccacgacggcauaaauuggcuuacaaucgggauuucuggaccugauaacggugcuguagcaguucugaaguauaauggcaucauaaccgacacgauuaaguccuggagaaacaauaucuugaggacucaagagagcgagugugccugcgugaacgggucguguuucaccgucaugacagauggaccaucugacggccaggcuuccuacaaaaucuuucggauugaaaaggguaaaaucgugaagucaguggagaugaaugcccccaacuaucauuacgaagagugcaguuguuacccugauagcuccgagauuacuugcgucugccgcgacaauuggcacgggucuaacagaccauggguuagcuucaaucagaaccucgaauaucagauaggauacaucuguucaggcauuuuuggcgauaauccgaggcccaacgacaaaaccgggaguugcggaccuguguccagcaauggugcgaacggcguaaagggguucucuuuuaaguauggaaacggcguguggaucggucggacaaaaucaaucaguagccgcaauggguucgagaugauuugggauccaaacggcuggaccggaacggacaauaacuuuuccauaaagcaagacaucgucggcauuaaugaauggucuggguacucggggagcuucgugcagcaucccgagaucacuggucuggauuguauucgaccuugcuucuggguugaacugaucagaggcaggccaaaagagaacacaauauggaccuccgggucaaguaucucuuuuuguggagugaauagcgacacugucggcugguccuggcccgauggugcagagcucccguucacaauugacaaguga

SEQ ID NO: 147194 - RNA, 1410 nt, Artificial Sequence
  derived and/or modified CDS sequence (opt3) from neuraminidase__InfluenzaA__ADK87318
augaaccccaaucagaagaucauuaccauaggcagcgugugcaugacaaucgggauggccaaccugauucuccaaaucggaaauauuaucuccauauggaucucucacucaauucagcuugguaaccagaaucagaucgagacuuguaaccaaagugucauuacguacgaaaauaacaccuggguuaaucagacauaugugaacaucagcaauacuaacuucgcugcaggccaguccguagugucugucaaacuggccggaaauucgucauugugcccugugagcggaugggcgauauacaguaaggacaacuccauuagaaucggcucuaaaggugauguuuuugugauuagggagccauucaucagcuguuccccguuagaaugccggaccuuuuuccugacacagggggcucuacucaaugacaagcauucaaacggaaccaucaaagaucgcagucccuaucgaacucugaugagcuguccuauuggcgaggucccaucucccuacaacucccguuuugaaucaguggccuggagcgcaagugccugccacgacggcauaaauuggcuuacaaucgggauuucuggaccugauaacggugcuguagcaguucugaaguauaauggcaucauaaccgacacgauuaaguccuggagaaacaauaucuugaggacucaagagagcgagugugccugcgugaacgggucguguuucaccgucaugacagauggaccaucugacggccaggcuuccuacaaaaucuuucggauugaaaaggguaaaaucgugaagucaguggagaugaaugcccccaacuaucauuacgaagagugcaguuguuacccugauagcuccgagauuacuugcgucugccgcgacaauuggcacgggucuaacagaccauggguuagcuucaaucagaaccucgaauaucagauaggauacaucuguucaggcauuuuuggcgauaauccgaggcccaacgacaaaaccgggaguugcggaccuguguccagcaauggugcgaacggcguaaagggguucucuuuuaaguauggaaacggcguguggaucggucggacaaaaucaaucaguagccgcaauggguucgagaugauuugggauccaaacggcuggaccggaacggacaauaacuuuuccauaaagcaagacaucgucggcauuaaugaauggucuggguacucggggagcuucgugcagcaucccgagcugacuggucuggauuguauccgaccuugcuccuggguugaacucauuagaggcaggccaaaagagaacacaaucuggaccucagggaguucuacuagcuucuguggagucaauuccgacacagugggcuggucauggcccgauggugcagaguuaccguuuaccauagacaaguga

SEQ ID NO: 147195 - RNA, 1410 nt, Artificial Sequence
  derived and/or modified CDS sequence (opt3) from neuraminidase__InfluenzaA__ADK87320
augaaccccaaucagaagaucauuaccauaggcagcgugugcaugacaaucgggauggccaaccugauucuccaaaucggaaauauuaucuccauauggaucucucacucaauucagcuugguaaccagaaucagaucgagacuuguaaccaaagugucauuacguacgaaaauaacaccuggguucaucagacauaugugaauaucagcaacacuaauuucgcugcaggccaguccguagugucugucaaacuggccgggaacucgucauugugcccugugagcggaugggcgauauacaguaaggacaauuccauuagaaucggcucuaaaggugauguuuuugugauuagggagccauucaucagcuguuccccguuagaaugccggaccuuuuuccugacacagggggcucuacucaacgacaagcacucaaauggaaccaucaaagaucgcagucccuaucgaacucugaugagcuguccuauuggcgaggucccaucucccuacaacucccguuuugaaucaguggccuggagcgcaagugccugccaugacggcauaaacuggcuuacaaucgggauuucuggaccugauaauggugcuguagcaguucugaaguauaacggcaucauaaccgacacgauuaaguccuggagaaauaacaucuugaggacucaagagagcgagugugccugcgugaaugggucguguuucaccgucaugacagauggaccaucugacggccaggcuuccuacaaaaucuuucggauugaaaaggguaaaaucgugaagucaguggagaugaacgcccccaauuaucacuacgaagagugcaguuguuacccugauagcuccgagauuacuugcgucugccgcgacaacuggcaugggucuaauagaccauggguuagcuucaaccagaaucucgaauaucagauaggauacaucuguucaggcauuuuuggcgauaacccgaggcccaaugacaaaaccgggaguugcggaccuguguccagcaacggugcgaauggcguaaagggguucucuuuuaaguauggaaacggcguguggaucggucggacaaaaucaaucaguagccgcaacggguucgagaugauuugggauccaaauggcuggaccggaacggacaacaauuuuuccauaaagcaagacaucgucggcauuaacgaauggucuggguacucggguagcuucgugcagcaccccgagcugacuggacugaauuguauccgaccuugcuucuggguugaacucauuagaggcaggccaaaagagaacacaaucuggaccuccgggucaaguauaucuuuuuguggagugaauagcgauacugucggcugguccuggcccgacggugcagaguuaccguucacaaucgauaaguga

SEQ ID NO: 147196 - RNA, 1410 nt, Artificial Sequence
  derived and/or modified CDS sequence (opt3) from neuraminidase__InfluenzaA__ADK87324
augaaccccaaucagaagaucauuaccauaggcagcgugucccugacaaucucuacuauuugcuuccucaugcagaucgccauucuuaucacgaccgucacacugcacuuuaaacaguacgaguucaacucaccuccaaauaaccagguuauguugugugaaccgacuauaaucgagagaaauauuaccgaaaucguguauuuaacaaacaccacuauugagaaggaaaucugccccaaacuggcugaguacaggaauuggaguaagccucagugugacauaacaggguuugcaccauucagcaaagauaacuccauucggcuaucugccggaggugacaucuggguaacccgcgagcccuaugugucgugcgauccuggcaaguguuaccaauuugcgcucgggcagggaacgacucugaauaacguccauucaaauaacaccgugcgagaccguacaccauauagaacucuucugaugaaugaauugggcguucccuuccaccucgguaccaaacaggugugcauugcuuggagcaguuccucuugucaugaugggaaggccuggcugcacgucugcaucacaggagacgaugagaacgcaaccgccagcuuuaucuacaauggcaggcugguggacuccguaguuucauggaguaaggaaauucuccggacgcaggagagcgagugugugugcauaaacggcacuuguacagucgugaugaccgaugggucugcuuccggaaaagcagacacuaagaucuuauucauugaagaggguaaaaucgugcauacaucaacccugagcggcagugcccaacacgucgaagagugcucuugcuauccucgcuacccagggguuagaugugugugcagggauaacuggaagggauccaaucggccgauaguagacauuaacaucaaggaucacagcaucgugucgucuuacgucuguuccggccuugugggugacacgccccgcaaaaaugacucaaguagcuccucucauugcuuggauccuaacaaugaagaagggggacacggcguuaagggcugggcuuuugacgaugggaacgacguguggaugggacgaaccauuagcgagaaaucaagacuggguuaugagacauucaaggucaucgagggcuggaguaauccaaaauccaagcuacagauuaacaggcaagugauaguagaucgggggaaucguagcggauacucuggcaucuuuucaguugaagguaaaaguuguauuaaccgcugcuucuauguggagcucaucagagggaggaaggaagagacugagguccuguggaccagcaauuccaucguggucuuuuguggcacaucuggaacuuacggcaccgggucguggcccgacggagccgauauuaaccuuaugccuguguga

SEQ ID NO: 147197 - RNA, 1410 nt, Artificial Sequence
  derived and/or modified CDS sequence (opt3) from neuraminidase__InfluenzaA__ADK87327
augaaccccaaucagaagaucaugaccauuggcagcgugucccugacaauaucuacuaucugcuucuuuaugcaaauugccauccucauuacgaccgucacacuucacuucaaacaguacgaguuuaacucaccuccaaauaaccagguuaugcugugugaaccgacuaucauagagagaaauaucaccgaaauuguguauuugacaaacaccacuaucgagaaggaaauuugccccaaauuagcugaguacaggaauuggaguaagccucagugugacaucacaggguucgcaccauuuagcaaagauaacuccauacggcugucugccggaggugacauuuggguaacccgcgagcccuaugugucgugcgauccugacaaguguuaccaauucgcgcuaggccaggggacgacucucaauaacguccauucaaauaacaccgugcgagaucguacaccauauagaacucugcuuaugaaugaacugggaguucccuuucacuugggcaccaaacaggugugcaucgcuuggagcaguuccucuugucaugacgguaaggccuggcuccacgucugcauuacaggggaugacaagaacgcaaccgccagcuucaucuacaauggaaggcugguggauuccguaguuucauggaguaaagagauccugcggacgcaggaaagcgagugugugugcauuaacggcacuuguacagucgugaugaccgacggcucugcuuccgggaaggcagauacuaaaauacucuuuaucgaggaaggaaagauugugcauacaucaaccuuaagcgguagugcccaacacgucgaggaaugcucuugcuauccucgcuacccaggcguuagaugugugugcagggacaacuggaagggguccaaucggccgaucguagauauaaacauuaaagaccacagcaucgugucgucuuacgucuguuccggacuggugggcgacacgccccgcaagaaugauucaaguagcuccucucauugccuugacccuaacaaugaggaaggugggcacggaguuaaaggcugggcuuucgaugacggcaacgauguguggauggggcgaaccaucagcgagagaucaagguugggauaugagacauuuaaggucauugaagguuggaguaauccaaaauccaagcugcagaucaaccgucaggugauuguagaccggggcaaucgcagcggguacucuggaauauucucaguugagggcaaaaguuguaucaacagaugcuuuuauguggaacuaauuaggggucggaaggaggaaacugagguccucuggaccagcaauuccaucguggucuucugugggacaucuggcacuuacggaaccggcucguggcccgauggggccgacaucaaccugaugccuguguga

SEQ ID NO: 147198 - RNA, 1410 nt, Artificial Sequence; identical to SEQ ID NO: 144786
  derived and/or modified CDS sequence (opt3) from neuraminidase__InfluenzaA__ADK87329

SEQ ID NO: 147199 - RNA, 1410 nt, Artificial Sequence
  derived and/or modified CDS sequence (opt3) from neuraminidase__InfluenzaA__ADK87330
augaaccccaaucagaagaucauuaccauaggcagcgugugcaugacaaucgggauggccaaccugauucuccaaaucggaaauauuaucuccauauggaucucucacucaauucagcuugguaaccagaaucagaucgagacuuguaaccaaagugucauuacguacgaaaauaacaccuggguuaaucagacauaugugaacaucagcaauacuaacuucgcugcaggccaguccguagugucugucaaacuggccggaaauucgucauugugcccugugagcggaugggcgauauacaguaaggacaacuccauuagaaucggcucuaaaggugauguuuuugugauuagggagccauucaucagcuguuccccguuagaaugccggaccuuuuuccugacacagggggcucuacucaaugacaagcauucaaacggaaccaucaaagaucgcagucccuaucgaacucugaugagcuguccuauuggcgaggucccaucucccuacaacucccguuuugaaucaguggccuggagcgcaagugccugccacgacggcauaaauuggcuuacaaucgggauuucuggaccugauaacggugcuguagcaguucugaaguauaauggcaucauaaccgacacgauuaaguccuggagaaacaauaucuugaggacucaagagagcgagugugccugcgugaacgggucguguuucaccgucaugacagauggaccaucugacggccaggcuuccuacaaaaucuuucggauugaaaaggguaaaaucgugaagucaguggagaugaaugcccccaacuaucauuacgaagagugcaguuguuacccugauagcuccgagauuacuugcgucugccgcgacaauuggcacgggucuaacagaccauggguuagcuucaaucagaaccucgaauaucagauaggauacaucuguucaggcauuuuuggcgauaauccgaggcccaacgacaaaaccgggaguugcggaccuguguccagcaauggugcgaacggcguaaagggguucucuuuuaaguauggaaacggcguguggaucggucggacaaaaucaaucaguagccgcaauggguucgagaugauuugggauccaaacggcuggaccggaacggacaauaacuuuuccauaaagcaagacaucgucggcauuaaugaauggucuggguacucggggagcuucgugcagcaucccgagcugacuggucuggauuguauccgaccuugcuucuggguugaacucauuagaggcaggccaaaagagaacacaaucugggcauccgggucaaguauaucuuuuuguggagugaauagcgacaccgucggcugguccuggcccgauggugccgaguuaccguucacuaucgacaaguga

SEQ ID NO: 147200 - RNA, 1410 nt, Artificial Sequence; identical to SEQ ID NO: 144786
  derived and/or modified CDS sequence (opt3) from neuraminidase__InfluenzaA__ADK87331

SEQ ID NO: 147201 - RNA, 1410 nt, Artificial Sequence
  derived and/or modified CDS sequence (opt3) from neuraminidase__InfluenzaA__ADK87332
augaaccccaaucagaagaucauuaccauaggcagcgugugcaugacaaucgggauggccaaccugauucuccaaaucggaaauauuaucuccauauggaucucucacucaauucagcuugguaaccagaaucagaucgagacuuguaaccaaagugucauuacguacgaaaauaacaccuggguuaaucagacauaugugaacaucagcaauacuaacuucgcugcaggccaguccguagugucugucaaacuggccggaaauucgucauugugcccugugagcggaugggcgauauacaguaaggacaacuccauuagaaucggcucuaaaggugauguuuuugugauuagggagccauucaucagcuguuccccguuagaaugccggaccuuuuuccugacacagggggcucuacucaaugacaagcauucaaacggaaccaucaaagaucgcagucccuaucgaacucugaugagcuguccuauuggcgaggucccaucucccuacaacucccguuuugaaucaguggccuggagcgcaagugccugccacgacggcauaaauuggcuuacaaucgggauuucuggaccugauaacggugcuguagcaguucugaagcauaauggcaucauaaccgacacgauuaaguccuggagaaacaauaucuugaggacucaagagagcgagugugccugcgugaacgggucguguuucaccgucaugacagauggaccaucugacggccaggcuuccuauaaaaucuuucggauugaaaaggguaaaaucgugaagucaguggagaugaaugcccccaacuaccacuaugaagagugcaguuguuacccugauagcuccgagauuacuugcgucugccgcgacaauuggcaugggucuaacagaccauggguuagcuucaaucagaaccucgaauaccagauaggauauaucuguucaggcauuuuuggcgauaauccgaggcccaacgacaaaaccgggaguugcggaccuguguccagcaauggugcgaacggcguaaagggguucucuuuuaaguacggaaacggcguguggaucggucggacaaaaucaaucaguagccgcaauggguucgagaugauuugggauccaaacggcuggaccggaacggacaauaacuuuuccauaaagcaagacaucgucggcauuaaugaauggucuggguauucggggagcuucgugcagcaccccgagcugacuggucuggauuguauccgaccuugcuucuggguugaacucauuagaggcaggccaaaagagaacacaaucuggaccuccgggucaaguauaucuuuuuguggagugaauagcgacacugucggcugguccuggcccgauggugcagaguuaccguucacaaucgacaaguga

SEQ ID NO: 147202 - RNA, 1410 nt, Artificial Sequence
  derived and/or modified CDS sequence (opt3) from neuraminidase__InfluenzaA__ADK87333
augaaccccaaucagaagaucauuaccauaggcagcgugugcaugacaaucgggauggccaaccugauucuccaaaucggaaauauuaucuccauauggaucucucacucaauucagcuugguaaccagaaucagaucgagacuuguaaccaaagugucauuacguacgaaaauaacaccuggguuaaucagacauaugugaacaucagcaauacuaacuucgcugcaggccaguccguagugucugucaaacuggccggaaauucgucauugugcccugugagcggaugggcgauauacaguaaggacaacuccauuagaaucggcucuaaaggugauguuuuugugauuagggagccauucaucagcuguuccccguuagaaugccggaccuuuuuccugacacagggggcucuacucaaugacaagcauucaaacggaaccaucaaagaucgcagucccuaucgaacucugaugagcuguccuauuggcgaggucccaucucccuacaacucccguuuugaaucaguggccuggagcgcaagugccugccacgacggcauaaauuggcuuacaaucgggauuucuggaccugauaacggugcuguagcaguucugaaguauaauggcaucauaaccgacacgauuaaguccuggagaaacaauaucuugaggacucaagagagcgagugugccugcgugaacgggucguguuucaccgucaugacagauggaccaucugacggccaggcuuccuacaaaaucuuucggauugaaaaggguaaaaucgugaagucaguggagaugaaugcccccaacuaucauuacgaagagugcaguuguuacccuuauagcuccgagauuacuugcgucugccgcgauaauuggcacgggucuaacagaccauggguuagcuucaaucagaaccucgaauaccagauaggauauaucuguucaggcauuuuuggcgacaauccgaggcccaacgauaaaaccgggaguugcggaccuguguccagcaauggugcgaacggcguaaagggguucucuuuuaaguacggaaacggcguguggaucggucggacaaaaucaaucaguagccgcaauggguucgagaugauuugggacccaaacggcuggaccggaacggauaauaacuuuuccauaaagcaagacaucgucggcauuaaugaauggucuggguauucggggagcuucgugcagcaucccgagcugacuggucuggacuguauccgaccuugcuucuggguugaacucauuagaggcaggccaaaagagaacacaaucuggaccuccgggucaaguauaucuuuuuguggagugaauagcgauacugucggcugguccuggcccgacggugcagaguuaccguucacaaucgauaaguga

SEQ ID NO: 147203 - RNA, 1410 nt, Artificial Sequence
  derived and/or modified CDS sequence (opt3) from neuraminidase__InfluenzaA__ADK87335
augaaccccaaucagaagaucauuaccauaggcagcgugucccugacaaucucuacuauuugcuucuuuaugcaaaucgccauucucaucacgaccgucacacuucacuucaaacaguacgaguuuaacucaccuccaaauaaccagguuaugcugugugaaccgacuauaaucgagagaaauauuaccgaaaucguguauuugacaaacaccacuauugagaaggaaaucugccccaaauuagcugaguacaggaauuggaguaagccucagugugacauaacaggguucgcaccauuuagcaaagauaacuccauucggcugucugccggaggugacaucuggguaacccgcgagcccuaugugucgugcgauccugaccgacguuaccaauucgcgcuaggccaggggacgacucucaauaacguccauucagauaauaccgugagagacaggacaccauaucggacucugcuuaugaacgaacugggaguucccuuucacuugggcaccaaacagguguguauugcuuggagcaguuccucuugccaugaugguaaggccuggcuccacgucuguaucacaggggacgauaaaaaugcaaccgccagcuucaucuacaacggacgccugguggacuccguaguuucauggaguaaggagauucugagaacgcaggaaagcgagugcguguguauaaauggcacuugcacagucgugaugaccgauggcucugcuuccgggaaagcagacacuaagauccucuuuauugaggaaggaaaaaucgugcauacaucaaccuuaagcgguaacgcccaacacgucgaggaauguaguugcuauccuagguacccaggcguucggugcgugugucgcgauaacuggaaggggucuaaucgaccgauaguagacauuaacaucaaggaccacuccaucgugagcucguacgucugcucuggacuggugggcgauacgcccagaaagaaugacuccucaaguagcucccauugucuugauccuaacaaugaggaaggugggcacggaguuaagggcugggcuuucgacgauggcaacgacguguggauggggaggaccauuucugagaaaagccgguugggauaugagacauuuaaggucaucgaagguuggucaaauccaaaaaguaagcugcagauuaaccgucaggugauaguagaucgcggcaauagauccggguacagcggaaucuucucuguugagggcaaaucaugcauuaacagguguuuuuauguggaacuaauccggggucgaaaggaggaaacugagguccucuggaccaguaauagcaucguggucuucugcgggacauccggcacuuacggaaccggcucuuggcccgacggggccgauauuaaccugaugccuauauga

SEQ ID NO: 147204 - RNA, 1410 nt, Artificial Sequence
  derived and/or modified CDS sequence (opt3) from neuraminidase__InfluenzaA__ADK87337
augaaccccaaucagaagaucauuaccauaggcagcgugucccugacaaucucuacuauuugcuucuuuaugcaaaucgccauucucaucacgaccgucacacuucacuucaaacaguacgaguuuaacucaccuccaaauaaccagguuaugcugugugaaccgacuauaaucgagagaaauauuaccgaaaucguguauuugacaaacaccacuauugagaaggaaaucugccccaaauuagcugaguacaggaauuggaguaagccucagugugacauaacaggguucgcaccauuuagcaaagauaacuccauucggcugucugccggaggugacaucuggguaacccgcgagcccuaugugucgugcgauccugacaaguguuaccaauucgcgcuaggccaggggacgacucucaauaacguccauucaaauaacgcugugcgagaucguaccccauauagaacacugcuuaugaaugaacugggaguucccuuucacuugggcacuaaacaggugugcauugccuggagcaguuccucuugucaugacgguaaggcauggcuccacgucugcaucaccggggaugacaagaacgccacagcuagcuucaucuacaauggaaggcugguggauuccguaguuucauggaguaaagagauucugcggacccaggaaagcgagugugugugcauaaacggcacguguacugucgugaugacagacggcucugcauccgggaaggccgauaccaaaauccucuuuauugaggaaggaaagaucgugcauacuucaacauuaagcgguaacgcucaacacgucgaggaaugcaguugcuauccucgcuacccaggcguuagaugugugugcagggacaauuggaaggggucuaaccggccgauaguagauauuaauaucaaagaccacuccaucgugagcucguacgucuguucuggacuggugggcgacacccccaggaagaacgauuccucaaguagcucccauugccuugacccuaauaacgaggaaggugggcacggaguuaaaggcugggccuucgaugacggcaaugauguguggauggggcgaacgauuucugagaagaguagauugggauaugagaccuuuaaagucaucgaagguuggucaaacccaaagaguaaacugcagauuaaucgccaggugauaguagaccggggcaaccguuccggguacagcggaaucuucucuguugagggcaagucauguauuaaucgcugcuuuuauguggaacuaaucagagguaggaaggaggaaacagagguccucuggacuagcaacagcaucguggucuucugugggaccuccggcacauacggaacuggcucuuggcccgauggggcggacauuaaucugaugccuauauga

SEQ ID NO: 147205 - RNA, 1410 nt, Artificial Sequence
  derived and/or modified CDS sequence (opt3) from neuraminidase__InfluenzaA__ADK87339
augaaccccaaucagaagaucauuaccauaggcagcaucugcaugacaauugggauggccaaccugauccuccaaauuggaaauaucauauccaucuggauuucucacucaauccagcuugguaaccagaaucagauugagacuuguaaccaaagugugaucacguacgaaaauaacaccugggucaaucagacauauguuaacauaagcaauacuaacuucgcugcaggccaguccgugguaucugugaaacuggccggaaauucgucauugugcccugucagcggaugggcgauuuacaguaaggacaacuccaucagaauuggcucuaaaggugauguguuuguuaucagggagccauucaucagcuguuccccguuagaaugccggaccuuuuuccugacacagggggcucuacucaaugacaagcauucaaacggaaccauuaaagaucgcagucccuaucgaacucugaugagcuguccuauaggcgaggugccaucucccuacaacucccguuuugaaucagucgccuggagcgcaagugccugccacgacggcaucaauuggcuuacaauugggaucucuggaccugauaacggugcuguggcaguacugaaguauaauggcauaauuaccgacacgaucaaguccuggagaaacaauaucuugaggacucaagagagcgagugugccugcguuaacgggucguguuucaccgugaugacagauggaccaucugacggccaggcuuccuacaaaauuuuucggaucgaaaaggguaaaauugucaagucaguggagaugaaugcccccaacuaucauuacgaagagugcaguuguuacccugauagcuccgagauaacuugcgugugccgcgacaauuggcacgggucuaacagaccaugggucagcuucaaucagaaccucgaauaucagaucggauacauuuguucaggcaucuuuggcgauaauccgaggcccaacgacaaaaccgggaguugcggaccuguuuccagcaauggugcgaacggcgugaagggguucucuuuuaaguauggaaacggcguauggaucggucggacaaaaucaauuaguagccgcaauggguucgagaugauaugggauccaaacggcuggaccggaacggacaauaacuuuuccaucaagcaagacauugugggcaucaaugaauggucuggguacucggggagcuucguccagcaucccgagcugacuggucuggauuguauucgaccuugcuucuggguggaacucaucagaggcaggccaaaagagaacacaauauggaccuccgggucaaguaucucuuuuuguggaguuaauagcgacacugugggcugguccuggcccgauggugcagaguuaccguucacaauugacaaguga

SEQ ID NO: 147206 - RNA, 1410 nt, Artificial Sequence; identical to SEQ ID NO: 144786
  derived and/or modified CDS sequence (opt3) from neuraminidase__InfluenzaA__ADK90209

SEQ ID NO: 147207 - RNA, 1410 nt, Artificial Sequence; identical to SEQ ID NO: 144786
  derived and/or modified CDS sequence (opt3) from neuraminidase__InfluenzaA__ADK90213

SEQ ID NO: 147208 - RNA, 1410 nt, Artificial Sequence; identical to SEQ ID NO: 144786
  derived and/or modified CDS sequence (opt3) from neuraminidase__InfluenzaA__ADK90217

SEQ ID NO: 147209 - RNA, 1410 nt, Artificial Sequence; identical to SEQ ID NO: 146765
  derived and/or modified CDS sequence (opt3) from neuraminidase__InfluenzaA__ADK90221

SEQ ID NO: 147210 - RNA, 1410 nt, Artificial Sequence; identical to SEQ ID NO: 146765
  derived and/or modified CDS sequence (opt3) from neuraminidase__InfluenzaA__ADK90225

SEQ ID NO: 147211 - RNA, 1410 nt, Artificial Sequence; identical to SEQ ID NO: 144786
  derived and/or modified CDS sequence (opt3) from neuraminidase__InfluenzaA__ADK90229

SEQ ID NO: 147212 - RNA, 1410 nt, Artificial Sequence; identical to SEQ ID NO: 144786
  derived and/or modified CDS sequence (opt3) from neuraminidase__InfluenzaA__ADK90233

SEQ ID NO: 147213 - RNA, 1410 nt, Artificial Sequence
  derived and/or modified CDS sequence (opt3) from neuraminidase__InfluenzaA__ADK90241
augaaccccaaucagaagaucauuaccauaggcagcgugugcaugacaaucgggauggccaaccugauucuccaaaucggaaauauuaucuccauauggaucucucacucaauucagcuugguaaccagaaucagaucgagacuuguaaccaaagugucauuacguacgaaaauaacaccuggguuaaucagacauaugugaacaucagcaaugcuaacuucgcagccggccaguccguagugucugucaaacuggcgggaaauucgucauugugcccugugagcggaugggcuauauacaguaaggacaacuccauuagaaucggcucuaaaggugauguuuuugugauuagggagccauucaucagcuguuccccguuagaaugccggaccuuuuuccugacucagggggcccuacucaaugacaagcauucaaacggaacaaucaaagaucgcaguccccaccgaacccugaugagcuguccuauuggcgaggucccaucucccuauaacucccguuuugaaucaguggcauggagcgccagugcuugccaugacggcauaaauuggcuuacuaucgggauuucuggaccugauaacggugcaguagccguucugaaguacaauggcaucauaacagacaccauuaaguccuggagaaacaauaucuugaggacgcaagagagcgagugugcuugcgugaacgggucguguuucacugucaugaccgauggaccaucugacggccaggccuccuauaaaaucuuucggauugaaaaggguaaaaucgugaagucaguggagaugaaugcgcccaacuaccacuaugaagagugcaguuguuacccugauagcuccgagauuacaugcgucugccgcgacaauuggcaugggucuaacagaccauggguuagcuucaaucagaaccucgaauaccagauaggauauaucuguucaggcauuuuuggcgauaauccgaggcccaacgacaaaacugggaguugcggaccuguguccagcaauggugcaaacggcguaaagggguucucuuuuaaguacggaaacggcguguggaucggucggaccaaaucaaucaguagccgcaauggguucgagaugauuugggauccaaacggcuggacaggaaccgacaauaacuuuuccauaaagcaagacaucgucggcauuaaugaauggucuggguauucggggagcuucgugcagcaccccgagcugacgggucuggauuguauccgaccuugcuucuggguugaacucauuagaggcaggccaaaagagaacacuaucuggacauccgggucaaguauaucuuuuuguggagugaauagcgacaccgucggcugguccuggcccgauggugccgaguuaccguucacuaucgacaaguga

SEQ ID NO: 147214 - RNA, 1410 nt, Artificial Sequence; identical to SEQ ID NO: 146765
  derived and/or modified CDS sequence (opt3) from neuraminidase__InfluenzaA__ADK90245

SEQ ID NO: 147215 - RNA, 1410 nt, Artificial Sequence
  derived and/or modified CDS sequence (opt3) from neuraminidase__InfluenzaA__ADK90249
augaaccccaaucagaagaucauuaccauaggcagcgugugcaugacaaucgggauggccaaccugauucuccaaaucggaaauauuaucuccauauggaucucucacucaauucagcuugguaaccagaaucagaucgagacuuguaaccaaagugucauuacguacgaaaauaacaccuggguuaaucagacauaugugaacaucagcaauacuaacuucgcugcaggccaguccguagugucugucaaacuggccggaaauucgucauugugcccugugagcggaugggcgauauacaguaaggacaacuccauuagaaucggcucuaaaggugauguuuuugugauuagggagccauucaucagcuguuccccguuagaaugccggaccuuuuuccugacacagggggcucuacucaaugacaagcauucaaacggaaccaucaaagaucgcagucccuaucgaacucugaugagcuguccuauuggcgaggucccaucucccuacaacucccguuuugaaucaguggccuggagcgcaagugccugccacgacggcauaaauuggcuuacaaucgggauuucuggaccugauaacggugcuguagcaguucugaaguauaauggcaucauaaccgacacgauuaaguccuggagaaacaauaucuugaggacucaagagagcgagugugccugcgugaacgggucguguuucaccgucaugacagauggaccaucugacggccaggcuuccuacaaaaucuuucggauugaaaaggguaaaaucgugaagucaguggagaugaaugcccccaacuaucauuacgaagagugcaguuguuacccugauagcuccgagauuacuugcgucugccgcgacaauuggcacgggucuaacagaccauggguuagcuucaaucagaaccucgaauaucagauaggauacaucuguucaggcauuuuuggcgauaauccgaggcccaacgacaaaaccgggaguugcggaccuguguccagcaauggugcgaacggcguaaagggguucucuuuuaaguauggaaacggcguguggaucggucggacaaaaucaaucaguagccgcaauggguucgagaugauuugggauccaaacggcuggaccggaacggacaauaacuuuuccaugaagcaagacauagucggcaucaaugaauggucuggguacucggggagcuucgugcagcaucccgagcugacuggucuggauuguauucgaccuugcuucuggguugaacucaucagaggcaggccaaaagagaacacaauuuggaccuccgggucaaguaucucuuuuuguggagugaauagcgacacugucggcugguccuggcccgauggugcagaguuaccguucacaauagacaaguga

SEQ ID NO: 147216 - RNA, 1410 nt, Artificial Sequence; identical to SEQ ID NO: 147215
  derived and/or modified CDS sequence (opt3) from neuraminidase__InfluenzaA__ADK90253

SEQ ID NO: 147217 - RNA, 1410 nt, Artificial Sequence
  derived and/or modified CDS sequence (opt3) from neuraminidase__InfluenzaA__ADK90257
augaaccccaaucagaagaucauuauaaucggcagcgugugcaugaccauugggauggccaaccugauccuccaaauuggaaauaucauauccaucuggauuucucacucaauccagcuugguaaccagaaucagauugagacauguaaccaaagugucaucacuuacgaaaauaacacguggguuaaucagaccuaugugaacauaagcaauacaaacuucgcugcaggccaguccguagugucugucaaacuggccggaaauucgucauugugcccugugagcggaugggcgauuuacaguaaggacaacuccaucagaauuggcucuaaaggugauguuuuugugaucagggagccauucaucagcuguuccccguuagaaugccggaccuuuuuccugacucagggggcucuacucaaugacaagcauucaaacggaacaauuaaagaucgcaguccccaccgaacccugaugagcuguccuauaggcgaggucccaucucccuauaacucccguuuugaaucaguggccuggagcgcaagugccugccaugacggcaucaauuggcuuacuauugggaucucuggaccugauaacggugcuguagcaguucugaaguacaauggcauaauuacagacaccaucaaguccuggagaaacaauaucuugaggacgcaagagagcgagugugccugcgugaacgggucguguuucacugucaugaccgauggaccaucugacggccaggcuuccuauaaaauuuuucggaucgaaaaggguaaaauugugaagucaguggagaugaaugcccccaacuaccacuaugaagagugcaguuguuacccugauagcuccgagauaacaugcgucugccgcgacaauuggcaugggucuaacagaccauggguuagcuucaaucagaaccucgaauaccagaucggauauauuuguucaggcaucuuuggcgauaauccgaggcccaacgacaaaacugggaguugcggaccuguguccagcaauggugcgaacggcguaaagggguucucuuuuaaguacggaaacggcguguggaucggucggaccaaaucaauuaguagccgcaauggguucgagaugauaugggauccaaacggcuggacaggaaccgacaauaacuuuuccaucaagcaagacauugucggcaucaaugaauggucuggguauucggggagcuucgugcagcaccccgagcugacgggucuggauuguauucgaccuugcuucuggguugaacucaucagaggcaggccaaaagagaacacuauauggacauccgggucaaguaucucuuuuuguggagugaauagcgacaccgucggcugguccuggcccgauggugcagaguuaccguucacuauugacaaguga

SEQ ID NO: 147218 - RNA, 1410 nt, Artificial Sequence; identical to SEQ ID NO: 145140
  derived and/or modified CDS sequence (opt3) from neuraminidase__InfluenzaA__ADK90261

SEQ ID NO: 147219 - RNA, 1410 nt, Artificial Sequence
  derived and/or modified CDS sequence (opt3) from neuraminidase__InfluenzaA__ADK90265
augaaccccaaucagaagaucauuaccauaggcagcgugugcaugacaaucgggauggccaaccugauucuccaaaucggaaauauuaucuccauauggaucucucacucaauucagcuugguaaccagaaucagaucgagacuuguaaccaaagugucauuacguacgaaaauaacaccuggguuaaucagacauaugugaacaucagcaauacuaacuucgcugcaggccaguccguagugucugucaaacuggccggaaauucgucauugugcccugugagcggaugggcgauauacaguaaggacaacuccauuagaaucggcucuaaaggugauguuuuugugauuagggagccauucaucagcuguuccccguuagaaugccggaccuuuuuccugacacagggggcucuacucaaugacaagcauucaaacggaaccaucaaagaucgcagucccuaucgaacucugaugagcuguccuauuggcgaggucccaucucccuacaacucccguuuugaaucaguggccuggagcgcaagugccugccacgacggcauaaauuggcuuacaaucgggauuucuggaccugauaacggugcuguagcaguucugaaguauaauggcaucauaaccgacacgauuaaguccuggagaaacaauaucuugaggacucaagagagcgagugugccugcgugaacgggucguguuucaccgucaugacagauggaccaucugacggccaggcuuccuacaaaaucuuucggauugaaaaggguaaaaucgugaagucaguggagaugaaugcccccaacuaucauuacgaagagugcaguuguuacccugauagcuccgagauuacuugcgucugccgcgacaauuggcacgggucuaacagaccauggguuagcuucaaucagaaccucgaauaucagaugggauacauauguucaggcaucuuuggcgauaauccgaggcccaacgacaaaaccgggaguugcggaccuguguccagcaauggugcgaacggcguaaagggguucucuuuuaaguauggaaacggcguguggauuggucggacaaaaucaaucaguagccgcaauggguucgagaugaucugggauccaaacggcuggaccggaacggacaauaacuuuuccauuaagcaagacauagucggcaucaaugaauggucuggguacucggggagcuucgugcagcaucccgagcugacuggucuggauuguauucgaccuugcuucuggguugaacucaucagaggcaggccaaaagagaacacaauuuggaccuccgggucaaguaucucuuuuuguggagugaauagcgacacugucggcugguccuggcccgauggugcagaguuaccguucacaauagacaaguga

SEQ ID NO: 147220 - RNA, 1410 nt, Artificial Sequence
  derived and/or modified CDS sequence (opt3) from neuraminidase__InfluenzaA__ADK90269
augaaccccaaucagaagaucauuaccauaggcagcgugugcaugacaaucgggauggccaaccugauucuccaaaucggaaauauuaucuccauauggaucucucacucaauucagcuugguaaccagaaucagaucgagaaauguaaccaaagugucauuacuuacgaaaauaacacguggguuaaucagaccuaugugaacaucagcaauacaaacuucgcugcaggccaguccguagugucugucaagcuggccggaaauucgucauugugcccugugagcggaugggcgauauacaguaaagacaacuccauuagaaucggcucuaagggugauguuuuugugauuagggagccauucaucagcuguuccccguuagaaugccggaccuuuuuccugacucagggggcucuacucaaugacaaacauucaaacggaacaaucaaggaucgcagucccuaucgaacccugaugagcuguccuauuggcgaggucccaucucccuacaacucccguuuugaaucaguggccuggagcgcaagugccugccacgacggcauaaauuggcuuacuaucgggauuucuggaccugauaacggugcuguagcaguucugaaguauaauggcaucauaacagacaccauuaaauccuggagaaacaauaucuugaggacgcaagagagcgagugugccugcgugaacgggucguguuucacugucaugaccgauggaccaucugacggccaggcuuccuacaagaucuuucggauugaaaaagguaagaucgugaaaucaauugagaugaaugcccccaacuaucauuacgaagagugcaguuguuacccugauagcuccgagauaacaugcgugugccgcgacaauuggcacgggucuaacagaccaugggucagcuucaaucagaaccucgaauaucagaucggauacauuuguucaggcaucuuuggcgauaauccgaggcccaacgacaagacugggaguugcggaccuguuuccagcaauggugcgaacggcgugaagggguucucuuuuaaauauggaaacggcguauggaucggucggaccaagucaauuaguagccgcaauggguucgagaugauaugggauccaaacggcuggacaggaaccgacaauaacuuuuccaucaaacaagacauugugggcaucaaugaauggucuggguacucggggagcuucguccagcaucccgagcugacgggucuggauuguauucgaccuugcuucuggguggaacucaucagaggcaggccaaaggagaacacuauauggacauccgggucaaucauuaguuuuuguggaguuaauucugacaccgugggcuggagcuggcccgauggugcagaguuaccguucacuaucgacaaauga

SEQ ID NO: 147221 - RNA, 1410 nt, Artificial Sequence; identical to SEQ ID NO: 144786
  derived and/or modified CDS sequence (opt3) from neuraminidase__InfluenzaA__ADK90273

SEQ ID NO: 147222 - RNA, 1410 nt, Artificial Sequence; identical to SEQ ID NO: 144786
  derived and/or modified CDS sequence (opt3) from neuraminidase__InfluenzaA__ADK90277

SEQ ID NO: 147223 - RNA, 1410 nt, Artificial Sequence; identical to SEQ ID NO: 144786
  derived and/or modified CDS sequence (opt3) from neuraminidase__InfluenzaA__ADK90281

SEQ ID NO: 147224 - RNA, 1410 nt, Artificial Sequence
  derived and/or modified CDS sequence (opt3) from neuraminidase__InfluenzaA__ADK90289
augaaccccaaucagaagaucauuaccauaggcagcgugugcaugacaaucgggauggccaaccugauucuccaaaucggaaauauuaucuccauauggaucucucacucaauucagcuugguaaccagaaucugaucgagacuuguaaccagagugucauuacguacgaaaauaacaccuggguuaaucaaacauaugugaacaucagcaauacuaacuucgcugcaggccaguccguagugucugucaaauuggccggaaauucgucauuaugcccugugagcggaugggcgauauacaguaaggacaacuccauuagaaucggcucuaaaggugauguuuuugugauuagggagccauucaucagcuguuccccgcuggaaugccggaccuuuuuccuaacacagggggcucuccugaaugacaagcauucaaacggaaccaucaaagaucgcagucccuaucgaacucuuaugagcuguccuauuggcgaggucccaucucccuacaacucccguuuugaaucaguggccuggagcgcaagugccugccacgacggcauaaauuggcugacaaucgggauuucuggaccugauaacggugcuguagcaguuuugaaguauaauggcaucauaaccgacacgauuaaguccuggagaaacaauauccucaggacucaggagagcgagugugccugcgugaacgggucguguuucaccgucaugacagauggaccaucugacggccaggcuuccuacaaaaucuuucggauugaaaaggguaaaaucgugaagucaguggagaugaaugcccccaacuaucauuacgaagagugcaguuguuacccugauagcuccgagauuacuugcgucugccgcgacaauuggcacgggucuaacagaccauggguuagcuucaaucaaaaccuggaauaucagauaggauacaucuguucaggcauuuuuggcgauaauccgaggcccaacgacaaaaccgggaguugcggaccuguguccagcaauggugcgaacggcguaaagggguucucuuuuaaguauggaaacggcguguggaucggucggacaaaaucaaucaguagccgcaauggguucgagaugauuugggauccaaacggcuggaccggaacggacaauaacuuuuccauaaagcaggacaucgucggcauuaaugaauggucuggguacucggggagcuucgugcaacaucccgagcugacuggucucgauuguauccgaccuugcuucuggguugaauuaauuagaggcaggccaaaagagaacacaaucuggaccuccgggucaaguauaucuuuuuguggagugaauagcgacacugucggcugguccuggcccgauggugcagagcugccguucacaaucgacaaguga

SEQ ID NO: 147225 - RNA, 1410 nt, Artificial Sequence; identical to SEQ ID NO: 146765
  derived and/or modified CDS sequence (opt3) from neuraminidase__InfluenzaA__ADK90293

SEQ ID NO: 147226 - RNA, 1410 nt, Artificial Sequence; identical to SEQ ID NO: 146677
  derived and/or modified CDS sequence (opt3) from neuraminidase__InfluenzaA__ADK90297

SEQ ID NO: 147227 - RNA, 1410 nt, Artificial Sequence; identical to SEQ ID NO: 144786
  derived and/or modified CDS sequence (opt3) from neuraminidase__InfluenzaA__ADK90301

SEQ ID NO: 147228 - RNA, 1410 nt, Artificial Sequence; identical to SEQ ID NO: 146677
  derived and/or modified CDS sequence (opt3) from neuraminidase__InfluenzaA__ADK90305

SEQ ID NO: 147229 - RNA, 1410 nt, Artificial Sequence; identical to SEQ ID NO: 144786
  derived and/or modified CDS sequence (opt3) from neuraminidase__InfluenzaA__ADK90309

SEQ ID NO: 147230 - RNA, 1410 nt, Artificial Sequence
  derived and/or modified CDS sequence (opt3) from neuraminidase__InfluenzaA__ADK90313
augaaccccaaucacaagaucauuaccauaggcagcgugugcaugacaaucgggauggccaaccugauucuccagaucggaaauauuaucuccauauggaucucucauucaauucaacuugguaaccagaaucagaucgagacuuguaaccagagugucauuacguacgaaaauaacaccuggguuaaucaaacauaugugaacaucagcaauacuaacuucgcugcaggccaguccguagugucugucaaacuggccggaaauucgucauugugcccugugagcggaugggcgauauacaguaaggacaacuccauuagaaucggcucuaaaggugauguuuuugugauuagggagccauucaucagcuguuccccguuagaaugccggaccuuuuuccugacacagggggcucuacucaaugacaagcacucaaacggaaccaucaaagaucgcaguccccaucgaacucugaugagcuguccuauuggcgaggucccaucucccuauaacucccguuuugaaucaguggccuggagcgcaagugccugccacgacggcauaaauuggcuuacaaucgggauuucuggaccugauaacggugcuguagcaguucugaaguacaauggcaucauaaccgacacgauuaaguccuggagaaacaauaucuugaggacucaggagagcgagugugccugcgugaacgggucguguuucaccgucaugacagauggaccaucugacggccaggcuuccuauaaaaucuuucggauugaaaaggguaaaaucgugaagucaguggagaugaaugcccccaacuaccauuaugaagagugcaguuguuacccugauagcuccgagauuacuugcgucugccgcgacaauuggcacgggucuaacagaccauggguuagcuucaaucaaaaccucgaauaccagauaggauauaucuguucaggcauuuuuggcgauaauccgaggcccaacgacaaaaccgggaguugcggaccuguguccagcaauggugcgaacggcguaaagggguucucuuuuaaguacggaaacggcguguggaucggucggacaaaaucaaucaguagccgcaauggguucgagaugauuugggauccaaacggcuggaccggaacggacaauaacuuuuccauaaagcaggacaucgucggcauuaaugaauggucuggguauucggggagcuucgugcaacaccccgagcugacuggucuggauuguauccgaccuugcuucuggguugaacucauuagaggcaggccaaaagagaacacaaucuggaccuccgggucaaguauaucuuuuuguggagugaauagcgacacugucggcugguccuggcccgauggugcagaguuaccguucacaaucgacaaguga

SEQ ID NO: 147231 - RNA, 1410 nt, Artificial Sequence; identical to SEQ ID NO: 144786
  derived and/or modified CDS sequence (opt3) from neuraminidase__InfluenzaA__ADK90317

SEQ ID NO: 147232 - RNA, 1410 nt, Artificial Sequence; identical to SEQ ID NO: 146765
  derived and/or modified CDS sequence (opt3) from neuraminidase__InfluenzaA__ADK90321

SEQ ID NO: 147233 - RNA, 1410 nt, Artificial Sequence; identical to SEQ ID NO: 144786
  derived and/or modified CDS sequence (opt3) from neuraminidase__InfluenzaA__ADK90325

SEQ ID NO: 147234 - RNA, 1410 nt, Artificial Sequence
  derived and/or modified CDS sequence (opt3) from neuraminidase__InfluenzaA__ADK90329
augaaccccaaucagaagaucauuaccauaggcagcgugugcaugacaaucgggauggccaaccugauucuccaaaucggaaauauuaucuccauauggaucucucacucaauucagcuugguaaccagaaucagaucgagacuuguaacagaagugucauuacguacgaaaauaacaccuggguuaaucaaacauaugugaacaucagcaauacuaacuucgcugcaggccaguccguagugucugucaaacuggccggaaauucgucauugugcccugugagcgggugggcgauauacaguaaggacaacuccauuaggaucggcucuaaaggugauguuuuugugauucgggagccauucaucagcuguuccccguuagaaugccgcaccuuuuuccugacacagggggcucuacucaaugacaagcauucaaacggaaccaucaaagaucgaagucccuaucguacucugaugagcuguccuauuggcgaggucccaucucccuacaacuccagauuugaaucaguggccuggagcgcaagugccugccacgacggcauaaauuggcuuacaaucgggauuucuggaccugauaacgaggcuguagcaguucugaaguauaaugguaucauaaccgacacgauuaaguccuggaggaacaauaucuugcggacucaggagagcgaaugugccugcgugaacggcucguguuucaccgucaugacagaugggccaucugacggacaggcuuccuacaaaaucuuucgcauugagaagggcaaaaucgugaagucaguggaaaugaaugcccccaacuaucauuacgaggagugcaguuguuacccugauagcuccgaaauuacuugcgucugcagagacaauuggcacgguucuaacaggccauggguuagcuucaaucaaaaccucgaguaucagauaggguacaucuguucaggaauuuuuggcgauaauccgcggcccaacgacaaaaccggcaguugcgggccuguguccagcaauggagcgaacgguguaaagggcuucucuuuuaaguaugggaacggaguguggaucggccgcacaaaaucaaucaguagccgaaaugguuucgaaaugauuugggauccaaacggguggaccggcacggacaauaacuuuuccauaaagcaggacaucgucggaauuaaugaguggucuggcuacucggggagcuucgugcaacaucccgaacugacuggacuggauuguaucagaccuugcuucuggguugagcucauuaggggucggccaaaagagaacacaaucuggaccuccggcucaaguauaucuuuuuguggggugaauagcgacacugucggaugguccuggcccgauggcgcagaauuaccguucacaaucgacaaguga

SEQ ID NO: 147235 - RNA, 1410 nt, Artificial Sequence
  derived and/or modified CDS sequence (opt3) from neuraminidase__InfluenzaA__ADK90333
augaaccccaaucagaagaucauuaccauaggcagcgugugcaugacaaucgggauggccaaccugauucuccaaaucggaaauauuaucuccauauggaucucucacucaauucagcuugguaacaaaaaucagaucgagacuuguaaccagagugucauuacguacgaaaauaacaccuggguuaaucaaacauaugugaacaucagcaauacuaacuucgcugcaggccaguccguagugucugucaagcuggccggaaauucgucauugugcccugugagcggaugggcgauauacaguaaagacaacuccauuagaaucggcucuaagggugauguuuuugugauuagggagccauucaucagcuguuccccguuagaaugccggaccuuuuuccugacacagggggcucuacucaaugacaaacauucaaacggaaccaucaaggaucgcagucccuaucgaacucugaugagcuguccuauuggcgaggucccaucucccuacaacucccguuuugaaucaguggccuggagcgcaagugccugccacgacggcauaaauuggcuuacaaucgggauuucuggaccugauaacggugcuguagcaguucugaaguauaauggcaucauaaccgacacgauuaaauccuggagaaacaauaucuugaggacucaggagagcgagugugccugcgugaacgggucguguuucaccgucaugacagauggaccaucugacggccaggcuuccuacaagaucuuucggauugaaaaagguaagaucgugaaaucaguggagaugaaugcccccaacuaucauuacgaagagugcaguuguuacccugauagcuccgagauuacuugcgucugccgcgacaauuggcacgggucuaacagaccauggguuagcuucaaucaaaaccucgaauaucagauaggauacaucuguucaggcauuuuuggcgauaauccgaggcccaacgacaagaccgggaguugcggaccuguguccagcaauggugcgaacggcguaaagggguucucuuuuaaauauggaaacggcguguggaucggucggacaaagucaaucaguagccgcaauggguucgagaugauuugggauccaaacggcuggaccggaacggacaauaacuuuuccauaaaacaggacaucgucggcauuaaugaauggucuggguacucggggagcuucgugcaacaucccgagcugacuggucuggauuguauccgaccuugcuucuggguugaacucauuagaggcaggccaaaggagaacacaaucuggaccuccgggucaaguauaucuuuuuguggagugaauagcgacacugucggcugguccuggcccgauggugcagaguuaccguucacaaucgacaaauga

SEQ ID NO: 147236 - RNA, 1410 nt, Artificial Sequence; identical to SEQ ID NO: 146765
  derived and/or modified CDS sequence (opt3) from neuraminidase__InfluenzaA__ADK90337

SEQ ID NO: 147237 - RNA, 1410 nt, Artificial Sequence; identical to SEQ ID NO: 145845
  derived and/or modified CDS sequence (opt3) from neuraminidase__InfluenzaA__ADK90341

SEQ ID NO: 147238 - RNA, 1410 nt, Artificial Sequence; identical to SEQ ID NO: 145845
  derived and/or modified CDS sequence (opt3) from neuraminidase__InfluenzaA__ADK90345

SEQ ID NO: 147239 - RNA, 1410 nt, Artificial Sequence; identical to SEQ ID NO: 145845
  derived and/or modified CDS sequence (opt3) from neuraminidase__InfluenzaA__ADK90349

SEQ ID NO: 147240 - RNA, 1410 nt, Artificial Sequence; identical to SEQ ID NO: 146765
  derived and/or modified CDS sequence (opt3) from neuraminidase__InfluenzaA__ADK90353

SEQ ID NO: 147241 - RNA, 1410 nt, Artificial Sequence; identical to SEQ ID NO: 144786
  derived and/or modified CDS sequence (opt3) from neuraminidase__InfluenzaA__ADK90357

SEQ ID NO: 147242 - RNA, 1410 nt, Artificial Sequence; identical to SEQ ID NO: 146765
  derived and/or modified CDS sequence (opt3) from neuraminidase__InfluenzaA__ADK90361

SEQ ID NO: 147243 - RNA, 1410 nt, Artificial Sequence; identical to SEQ ID NO: 145760
  derived and/or modified CDS sequence (opt3) from neuraminidase__InfluenzaA__ADK90365

SEQ ID NO: 147244 - RNA, 1410 nt, Artificial Sequence; identical to SEQ ID NO: 144786
  derived and/or modified CDS sequence (opt3) from neuraminidase__InfluenzaA__ADK90369

SEQ ID NO: 147245 - RNA, 1410 nt, Artificial Sequence; identical to SEQ ID NO: 144786
  derived and/or modified CDS sequence (opt3) from neuraminidase__InfluenzaA__ADK90373

SEQ ID NO: 147246 - RNA, 1410 nt, Artificial Sequence
  derived and/or modified CDS sequence (opt3) from neuraminidase__InfluenzaA__ADK90377
augaaccccaaucagaagaucauuaccauaggcagcgugugcaugacaaucgggaugacuaaccugauucuccaaaucggaaauauuaucuccauauggaucucucacucaauucagcuugguaaccagaaucagaucgagacguguaaccaaagugucauuaccuacgaaaauaacacauggguuaaucagacuuaugugaacaucagcaauaccaacuucgccgcuggccaguccguagugucugucaaacuggcaggaaauucgucauugugcccugugagcggaugggccauauacaguaaggacaacuccauuagaaucggcucuaaaggugauguuuuugugauuagggagccauucaucagcuguuccccguuagaaugccggacauuuuuccugacccagggggcgcuacucaaugacaagcauucaaacggaacuaucaaagaucgcaguccccaccgaacacugaugagcuguccuauuggcgaggucccaucucccuauaacucccguuuugaaucaguggcuuggagcgccagugcaugccaugacggcauaaauuggcuuaccaucgggauuucuggaccugauaacggugccguagcuguucugaaguacaauggcaucauaacggacacuauuaaguccuggagaaacaauaucuugaggacccaagagagcgagugugcaugcgugaacgggucguguuucacagucaugacugauggaccaucugacggccaggccuccuauaaaaucuuucggauugaaaaggguaaaaucgugaagucaguggagauggaugcucccaauuaccacuaugaagagugcaguuguuacccugacagcuccgagauuauaugcgucugccgcgauaacuggcaugggucuaauagaccauggguuagcuucaaccagaaucucgaauaccagaucggauauauuuguucaggcaucuuuggcgacaacccgaggcccaaugauaaaaccgggaguugcggaccuguguccagcaacggugccaauggcguaaagggguucucuuuuaaguacggaaacggcguguggaucggucggacaaaaucaauuaguagccgcaacggguucgagaugauaugggacccaaauggcuggaccggaacggacaacaauuuuuccaucaagcaagauauugucggcaucaacgaauggucuggguauucggggagcuucgugcagcaccccgagcugacuggucuggacuguauucgaccuugcuucuggguugaacucaucagaggcaggccaaaagagaauacaauauggaccuccgggucaaguaucucuuuuuguggagugaacagcgauacugucggcugguccuggcccgacggugcggaguuaccguucacaauugauaaguga

SEQ ID NO: 147247 - RNA, 1410 nt, Artificial Sequence; identical to SEQ ID NO: 146765
  derived and/or modified CDS sequence (opt3) from neuraminidase__InfluenzaA__ADK90381

SEQ ID NO: 147248 - RNA, 1410 nt, Artificial Sequence
  derived and/or modified CDS sequence (opt3) from neuraminidase__InfluenzaA__ADK90385
augaaccccaaucagaagaucauuaccauaggcagcgugugcaugacaaucgggauggccaaccugauucuccaaaucggaaauauuaucuccauauggaucucucacucaauucagcuugguaaccagaaucagaucgagacuuguaaccaaagugucauuacguacgaaaauaacaccuggguuaaucagacauaugugaacaucagcaauacuaacuucgcugcaggccaguccguagugucugucaaacugucggggaauagcagcuugugcccugugaguggaugggccauauacuccaaggacaacucuauuagaaucggcagcaaaggugauguuuuugugauuagggagccauucaucuccuguucaccguuagaaugccggaccuuuuuccugacacagggggcgcuacucaaugacaagcauaguaacggaaccaucaaagaucgcagcccccaccgaacucugaugucuuguccuauuggcgaggucccaucccccuauaacucacguuuugaaagcguggcuuggagugccucugcaugccaugacggcauaaauuggcuuacaaucgggauuuccggaccugauaacggugccguagcuguucugaaguacaauggcaucauaaccgacacgauuaagagcuggagaaacaauaucuugaggacucaagagucggaguguaccugcgugaacgggucuuguuucacagucaugacugauggaccauccgacggccaggcaucauauaaaaucuuucggauugaaaaggguaaaaucgugaagaguguggagaugaaugcccccaacuaccacuaugaagagugcagcuguuacccugauuccucugagauuaccugcgucugccgcgacaauuggcaugggagcaacagaccauggguuucauucaaucagaaccucgaauaccagauaggauauaucuguaguggcauuuuuggcgauaauccgaggcccaacgacaaaacaggguccugcggaccugugagcucuaauggugcuaacggcguaaagggguucucauuuaaguacggaaacggcguguggaucggucggaccaaaaguaucagcucccgcaauggguucgagaugauuugggauccaaacggcuggacgggaacugacaauaacuuuucuauaaagcaagacaucgucggcauuaaugaauggucgggguauagcggauccuucgugcagcaccccgagcugacaggucuggauuguauccgaccuugcuucuggguugaacucauuagaggcaggccaaaagagaacaccaucuggacuucagggaguucuauaucauuuuguggagucaauuccgacacagugggcuggucauggcccgauggugccgaguuaccguucaccaucgacaaguga

SEQ ID NO: 147249 - RNA, 1410 nt, Artificial Sequence; identical to SEQ ID NO: 144786
  derived and/or modified CDS sequence (opt3) from neuraminidase__InfluenzaA__ADK90389

SEQ ID NO: 147250 - RNA, 1410 nt, Artificial Sequence; identical to SEQ ID NO: 146765
  derived and/or modified CDS sequence (opt3) from neuraminidase__InfluenzaA__ADK90393

SEQ ID NO: 147251 - RNA, 1410 nt, Artificial Sequence; identical to SEQ ID NO: 146677
  derived and/or modified CDS sequence (opt3) from neuraminidase__InfluenzaA__ADK90397

SEQ ID NO: 147252 - RNA, 1410 nt, Artificial Sequence; identical to SEQ ID NO: 144786
  derived and/or modified CDS sequence (opt3) from neuraminidase__InfluenzaA__ADK90401

SEQ ID NO: 147253 - RNA, 1410 nt, Artificial Sequence
  derived and/or modified CDS sequence (opt3) from neuraminidase__InfluenzaA__ADK90405
augaaccccaaucagaagaucauuaccauaggcagcgugugcaugacaaucgggauggccaaccugauucuccaaaucggaaauauuaucuccauauggaucucucacucaauucagcuugguaaccagaaucagaucgagacuuguaaccaaagugucauuacguacgaaaauaacaccuggguuaaucagacauaugugaacaucagcaauacuaacuucgcugcaggccaguccguagugucugucaaacuggccggaaauucgucauugugcccugugagcggaugggcgauauacaguaaggacaacuccauuagaaucggcucuaaaggugauguuuuugugauuagggagccauucaucagcuguuccccguuagaaugccggaccuuuuuccugacacagggggcucuacucaaugacaagcauucaaacggaaccaucaaagaucgcaguccccaccgaacucugaugagcuguccuauuggcgaggucccaucucccuauaacucccguuuugaaucaguggccuggagcgcaagugccugccaugacggcauaaauuggcuuacaaucgggauuucuggaccugauaacggugcuguagcaguucugaaguacaauggcaucauaaccgacacgauuaaguccuggagaaacaauaucuugaggacucaagagagcgaguguaccugcgugaacgggucguguuucacagucaugacugauggaccaucugacggccaggccuccuauaaaaucuuucggauugaaaaggguaaaaucgugaagucaguggagaugaaugcucccaacuaccacuaugaagagugcaguuguuacccugauagcuccgagauuaccugcgucugccgcgacaauuggcaugggucuaacagaccauggguuagcuucaaucagaaccucgaauaccagauaggauauaucuguucaggcauuuuuggcgauaauccgaggcccaacgacaaaacagggaguugcggaccuguguccagcaauggugccaacggcguaaagggguucucuuuuaaguacggaaacggcguguggaucggucggaccaaaucaaucaguagccgcaauggguucgagaugauuugggauccaaacggcuggacgggaacugacaauaacuuuuccauaaagcaagacaucgucggcauuaaugaauggucuggguauucggggagcuucgugcagcaccccgagcugacaggucuggauuguauccgaccuugcuucuggguugaacucauuagaggcaggccaaaagagaacaccaucuggacuuccgggucaaguauaucuuuuuguggagugaauagcgacacagucggcugguccuggcccgauggugcggaguuaccguucaccaucgacaaguga

SEQ ID NO: 147254 - RNA, 1410 nt, Artificial Sequence; identical to SEQ ID NO: 144786
  derived and/or modified CDS sequence (opt3) from neuraminidase__InfluenzaA__ADK90409

SEQ ID NO: 147255 - RNA, 1410 nt, Artificial Sequence
  derived and/or modified CDS sequence (opt3) from neuraminidase__InfluenzaA__ADK90413
augaaccccaaucagaagaucauuaccauaggcagcgugugcaugacaaucgggauggccaaccugauucuccaaaucggaaauauuaucuccauauggaucucucacucaauucagcuugguaaccagaaucagaucgagacuuguaaccaaagugucauuacguacgaaaauaacaccuggguuaaucagacauaugugaacaucagcaauacuaacuucgcugcaggccaguccguagugucugucaaacuggccggaaauucgucauugugcccugugagcggaugggcgauauacaguaaggacaacuccauuagaaucggcucuaaaggugauguuuuugugauuagggagccauucaucagcuguuccccguuagaaugccggaccuuuuuccugacacagggggcucuacucaaugacaagcauucaaacggaaccaucaaagaucgcaguccccaccgaacucugaugagcuguccuauuggcgaggucccaucucccuauaacucccguuuugaaucaguggccuggagcgcaagugccugccaugacggcauaaauuggcuuacaaucgggauuucuggaccugauaacggugcuauggcaguacugaaguacaauggcaucauaaccgacacgauuaaguccuggagaaacaauaucuugaggacucaagagagcgagugugccugcguuaacgggucguguuucaccgugaugacagauggaccaucugacggccaggcuuccuauaaaaucuuucggauugaaaaggguaaaaucgucaagucaguggagaugaaugcccccaacuaccacuaugaagagugcaguuguuacccugauagcuccgagauuacuugcgugugccgcgacaauuggcaugggucuaacagaccaugggucagcuucaaucagaaccucgaauaccagauaggauauaucuguucaggcauuuuuggcgauaauccgaggcccaacgacaaaaccgggaguugcggaccuguuuccagcaauggugcgaacggcgugaagggguucucuuuuaaguacggaaacggcguauggaucggucggacaaaaucaaucaguagccgcaauggguucgagaugauuugggauccaaacggcuggaccggaacggacaauaacuuuuccauaaagcaagacaucgugggcauuaaugaauggucuggguauucggggagcuucguccagcaccccgagcugacuggucuggauuguauccgaccuugcuucuggguggaacucauuagaggcaggccaaaagagaacacaaucuggaccuccgggucaaguauaucuuuuuguggaguuaauagcgacacugugggcugguccuggcccgauggugcagaguuaccguucacaaucgacaaguga

SEQ ID NO: 147256 - RNA, 1410 nt, Artificial Sequence; identical to SEQ ID NO: 144786
  derived and/or modified CDS sequence (opt3) from neuraminidase__InfluenzaA__ADK90417

SEQ ID NO: 147257 - RNA, 1410 nt, Artificial Sequence; identical to SEQ ID NO: 144786
  derived and/or modified CDS sequence (opt3) from neuraminidase__InfluenzaA__ADK90421

SEQ ID NO: 147258 - RNA, 1410 nt, Artificial Sequence; identical to SEQ ID NO: 144786
  derived and/or modified CDS sequence (opt3) from neuraminidase__InfluenzaA__ADK90425

SEQ ID NO: 147259 - RNA, 1410 nt, Artificial Sequence; identical to SEQ ID NO: 144786
  derived and/or modified CDS sequence (opt3) from neuraminidase__InfluenzaA__ADK90429

SEQ ID NO: 147260 - RNA, 1410 nt, Artificial Sequence; identical to SEQ ID NO: 144647
  derived and/or modified CDS sequence (opt3) from neuraminidase__InfluenzaA__ADK94194

SEQ ID NO: 147261 - RNA, 1410 nt, Artificial Sequence; identical to SEQ ID NO: 144647
  derived and/or modified CDS sequence (opt3) from neuraminidase__InfluenzaA__ADK94205

SEQ ID NO: 147262 - RNA, 1410 nt, Artificial Sequence; identical to SEQ ID NO: 145953
  derived and/or modified CDS sequence (opt3) from neuraminidase__InfluenzaA__ADK94216

SEQ ID NO: 147263 - RNA, 1410 nt, Artificial Sequence; identical to SEQ ID NO: 144647
  derived and/or modified CDS sequence (opt3) from neuraminidase__InfluenzaA__ADK94227

SEQ ID NO: 147264 - RNA, 1410 nt, Artificial Sequence; identical to SEQ ID NO: 144647
  derived and/or modified CDS sequence (opt3) from neuraminidase__InfluenzaA__ADK94238

SEQ ID NO: 147265 - RNA, 1410 nt, Artificial Sequence; identical to SEQ ID NO: 147171
  derived and/or modified CDS sequence (opt3) from neuraminidase__InfluenzaA__ADK94260

SEQ ID NO: 147266 - RNA, 1410 nt, Artificial Sequence; identical to SEQ ID NO: 147171
  derived and/or modified CDS sequence (opt3) from neuraminidase__InfluenzaA__ADK94271

SEQ ID NO: 147267 - RNA, 1410 nt, Artificial Sequence; identical to SEQ ID NO: 144647
  derived and/or modified CDS sequence (opt3) from neuraminidase__InfluenzaA__ADK94293

SEQ ID NO: 147268 - RNA, 1410 nt, Artificial Sequence; identical to SEQ ID NO: 144647
  derived and/or modified CDS sequence (opt3) from neuraminidase__InfluenzaA__ADK94304

SEQ ID NO: 147269 - RNA, 1410 nt, Artificial Sequence
  derived and/or modified CDS sequence (opt3) from neuraminidase__InfluenzaA__ADK94326
augaaccccaaucagaagaucauuaccauaggcagcgugucccugacaaucucuacuauuugcuucuuuaugcaaaucgccauucucaucacgaccgucacacuucacuucaaacaguacgaguuuaacucaccuccaaauaaccagguuaugcugugugaaccgacuauaaucgagagaaauauuaccgaaaucguguauuugacaaacaccacuauugagaaggaaaucugccccaaauuagcugaguacaggaauuggaguaagccucagugugacauaacaggguucgcaccauuuagcaaagauaacuccauucggcugucugccggaggugacaucuggguaacccgcgagcccuaugugucgugcgauccugacaaguguuaccaauucgcgcuaggccaggggacgacucucaauaacauucauucaaauaacaccguccgagaucguacaccauauagaacucugcuuaugaaugaacugggagugcccuuucacuugggcaccaagcagguuugcaucgcuuggagcaguuccucuugucaugacgguaaagccuggcuccacgugugcaucacaggggaugacaagaacgcaaccgccagcuucauuuacaauggaaggcuggucgauuccgugguaucauggaguaaagagauacugcggacgcaggaaagcgaguguguuugcaucaacggcacuuguacaguggucaugaccgacggcucugcuuccgggaaggcagauacuaaaauucucuuuaucgaggaaggaaagauagugcauacaucaaccuuaagcgguagugcccaacacguggaggaaugcucuugcuauccucgcuacccaggcgucagauguguuugcagggacaacuggaagggguccaaucggccgauuguggauaucaacaucaaagaccacagcauuguaucgucuuacguguguuccggacuggucggcgacacgccccgcaagaaugauucaaguagcuccucucauugccuugacccuaacaaugaggaaggugggcacggagugaaaggcugggcuuucgaugacggcaacgauguuuggauggggcgaaccaucagcgagaagucaagauugggauaugagacauuuaaagugauugaagguuggaguaauccaaaguccaaacugcagauaaacaggcaggucaucguggaccggggcaaucguagcggguacucuggaauuuucucaguagagggcaagaguuguaucaaccgcugcuuuuauguugaacuaaucagagguaggaaggaggaaacugaggugcucuggaccagcaauuccauugucguguucugugggacaucuggcacuuacggaaccggcucguggcccgauggggccgacauaaaccugaugccuaucuga

SEQ ID NO: 147270 - RNA, 1410 nt, Artificial Sequence; identical to SEQ ID NO: 145953
  derived and/or modified CDS sequence (opt3) from neuraminidase__InfluenzaA__ADK94337

SEQ ID NO: 147271 - RNA, 1410 nt, Artificial Sequence; identical to SEQ ID NO: 144647
  derived and/or modified CDS sequence (opt3) from neuraminidase__InfluenzaA__ADK94444

SEQ ID NO: 147272 - RNA, 1410 nt, Artificial Sequence
  derived and/or modified CDS sequence (opt3) from neuraminidase__InfluenzaA__ADK94479
augaaccccaaucagaagaucauuaccauaggcagcgugucccugacaaucucuacuauuugcuuccucaugcaaaucgccauucuuacgaccacagucacucugcacuuuaaacaguacgaguucaacucaccuccaaauaaccagguuauguugugugaaccgaccacaaucgagagaaauauaaccgaaaucguguauuuaacuaacacaaccauugagaaggaaaucugccccaaacuggcugaguacaggaauuggaguaagccucagugugacauuacgggguuugcaccauucagcaaagauaacuccauccggcuaucugccggaggugacauauggguaacucgcgagcccuaugugucgugcgauccugacaaguguuaccaauuugcgcucggccaggggaccacacugaauaacguccauucaaauaacacugugcgagaucguaccccauauagaacacuucugaugaaugaauugggaguucccuuccaccucggcaccaaacaggugugcauugcuuggagcaguuccucuugucaugacgguaaggccuggcugcacgucugcaucacgggggaugacaagaacgcaacugccagcuuuauuuacaauggaaaacugguggauuccguaguuucauggaguaaggagauccucaggacacaggaaagcgagugugugugcaucaacggcaccuguacugucgugaugacagacggcucugcuuccgggaaagcagauaccaagauuuuauucauagaggaaggaaagaucgugcauacgucaacccugagcgguagugcccaacacgucgaggaaugcucuugcuauccucgguacccaggcguucgcugugugugcagagacaacuggaaaggguccaauaggccgauuguagauaucaacauaaaggaccacagcauugugucgucuuaccuuuguuccggauuggucggcgacacaccccggaaaaaugauucaaguagcuccucucauugccuggacccuaacaaugaggaaggugggcacggagugaagggcugggcuuuugaugacggcaacgauguuuggauggggcgcacuaucagcgagaaaucacgacuaggauaugagaccuucaaggugaucgaagguuggaguaauccaaaauccaagcuccagauuaacagacaggucaucguggacaggggcaaucggagcggguacucuggaauauuuucaguagagggcaagaguuguauuaaccguugcuucuauguugaacugauccgcgguagaaaagaggaaacaggggugcuuuggacuagcaauuccauugucguguuuuguggcaccucuggaacauacggcaccgggucguggcccgauggagccgacaucaaccugaugccuaucuga

SEQ ID NO: 147273 - RNA, 1410 nt, Artificial Sequence; identical to SEQ ID NO: 144647
  derived and/or modified CDS sequence (opt3) from neuraminidase__InfluenzaA__ADK94490

SEQ ID NO: 147274 - RNA, 1410 nt, Artificial Sequence; identical to SEQ ID NO: 144647
  derived and/or modified CDS sequence (opt3) from neuraminidase__InfluenzaA__ADK94501

SEQ ID NO: 147275 - RNA, 1410 nt, Artificial Sequence
  derived and/or modified CDS sequence (opt3) from neuraminidase__InfluenzaA__ADK94512
augaaccccaaucagaagaucauuaccauaggcagcgugucccugacaaucucuacuauuugcuucuuuaugcaaaucgccauucucaucacgaccgucacacuucacuucaaacaguacgaguuuaacucaccuccaaauaaccagguuaugcugugugaaccgacuauaaucgagagaaauauuaccgaaaucguguauuugacaaacaccacuauugagaaggaaaucugccccaaauuagcugaguacaggaauuggaguaagccucagugugacauaacaggguucgcaccauuuagcaaagauaacuccauucggcugucugccggaggugacaucuggguaacccgcgagcccuaugugucgugcgauccugacaaguguuaccaauucgcgcuaggccaggggacgacucucaauaacguccauucaaauaacaccgugcgagaucguacaccauauagaacucugcuuaugaaugaacugggaguucccuuucacuugggcaccaaacaggugugcauugcuuggagcaguuccucuugucaugacgguaaggccuggcuccacgucugcaucacaggggaugacaagaacgcaaccgccagcuucaucuacaauggaaggcugguggauuccguaguuucauggaguaaagagauucugcggacgcaggaaagcgagugugugugcauaaacggcacuuguacagucgugaugaccgacggcucugcuuccgggaaggcagauacuaaaauccucuuuauugaggaaggacgcaucgugcauacaucaaccuuaagcgguagugcccaacacgucgaggaaugcucuugcuauccuagauacccaggcguuaggugugugugccgggacaacuggaagggguccaaucgcccgauaguagauauuaacaucaaggaccacagcaucgugucgucuuacgucuguuccggacuggugggcgacacgccccggaaaaaugauucaaguagcuccucucauugccuugacccuaacaaugaggaaggugggcacggaguuaagggcugggcuuucgaugacggcaacgauguguggauggggagaaccauuagcgagaaaucaagguugggauaugagacauuuaaggucaucgaagguuggaguaauccaaaauccaagcugcagauuaaccgacaggugauaguagaccguggcaaucgcagcggguacucuggaaucuucucaguugagggcaaaaguuguauuaacagaugcuuuuauguggaacuaaucaggggucggaaggaggaaacugagguccucuggaccagcaauuccaucguggucuucugugggacaucuggcacuuacggaaccggcucguggcccgauggggccgacauuaaccugaugccuauauga

SEQ ID NO: 147276 - RNA, 1410 nt, Artificial Sequence; identical to SEQ ID NO: 144647
  derived and/or modified CDS sequence (opt3) from neuraminidase__InfluenzaA__ADK94534

SEQ ID NO: 147277 - RNA, 1410 nt, Artificial Sequence; identical to SEQ ID NO: 147171
  derived and/or modified CDS sequence (opt3) from neuraminidase__InfluenzaA__ADK94556

SEQ ID NO: 147278 - RNA, 1410 nt, Artificial Sequence; identical to SEQ ID NO: 144647
  derived and/or modified CDS sequence (opt3) from neuraminidase__InfluenzaA__ADK94567

SEQ ID NO: 147279 - RNA, 1410 nt, Artificial Sequence; identical to SEQ ID NO: 144647
  derived and/or modified CDS sequence (opt3) from neuraminidase__InfluenzaA__ADK94578

SEQ ID NO: 147280 - RNA, 1410 nt, Artificial Sequence; identical to SEQ ID NO: 144647
  derived and/or modified CDS sequence (opt3) from neuraminidase__InfluenzaA__ADK94589

SEQ ID NO: 147281 - RNA, 1410 nt, Artificial Sequence; identical to SEQ ID NO: 146337
  derived and/or modified CDS sequence (opt3) from neuraminidase__InfluenzaA__ADK98504

SEQ ID NO: 147282 - RNA, 1410 nt, Artificial Sequence
  derived and/or modified CDS sequence (opt3) from neuraminidase__InfluenzaA__ADK98506
augaaccccaaucagaagaucauuaccauaggcagcgugugcaugacaaucgggauggccaaccugauucuccaaaucggaaauauuaucuccauauggaucucucacucaauucagcuugguaaccagaaucagaucgagacuuguaaccaaaaugucauuacguacgaaaacaauaccuggguuaaccagacauaugugaauaucaguaacacuaauuucgcugcaggccagagcguaguguccgucaaacuggccgggaacucuucguugugcccugugucaggaugggcgauauacagcaaggacaauaguauuagaaucggcuccaaaggugauguuuuugugauuagggagccauucaucucuuguagcccguuagaaugccggaccuuuuuccugacacagggggcucuacucaacgacaagcauuccaacggaaccaucaaagaucgcucacccuaucgaacucugaugaguuguccuauuggcgaggucccaagccccuacaauucucguuuugaauccguggccuggucagcaagcgccugccacgacggcauaaacuggcuuacaaucgggauuaguggaccugauaauggugcuguagcaguucugaaguauaacggcaucauaaccgacacgauuaagucuuggagaaauaacaucuugaggacucaagaguccgagugugccugcgugaaugggagcuguuucaccgucaugacagauggaccaucggacggccaggcuucuuacaaaaucuuucggauugaaaaggguaaaaucgugaaguccguggagaugaacgcccccaauuaucauuacgaagagugcucauguuacccugauaguagcgagauuacuugcgucugccgcgacaacuggcacggguccaauagaccauggguuucuuucaaccagaaucucgaauaucagauaggauacaucuguagcggcauuuuuggcgauaacccgaggcccaaugacaaaaccgggucaugcggaccugugaguuccaacggugcgaacggcguaaagggguucagcuuuaaguauggaaauggcguguggaucggucggacaaaaucuaucucaagucgcaacggguucgagaugauuugggauccaaauggcuggaccggaacggacaacaauuuuagcauaaagcaagacaucgucggcauuaacgaaugguccggguacucuggaucguucgugcagcaucccgagcugacuggucuggauuguauccgaccuugcuucuggguugaacucauuagaggcaggccaaaagagaauacaaucuggaccagcggguccucaauaaguuuuuguggagugaacucugacacugucggcuggagcuggcccgauggugcagaguuaccguucacaaucgacaaguga

SEQ ID NO: 147283 - RNA, 1410 nt, Artificial Sequence
  derived and/or modified CDS sequence (opt3) from neuraminidase__InfluenzaA__ADK98626
augaaccccaaucagaagaucauuaccauaggcagcgugucccugacaaucucuacuauuugcuucuuuaugcaaaucgccauucucaucacgaccgucacacuucacuucaaacaguacgaguuuaacucaccuccaaauaaccagguuaugcugugugaaccgacuaugauagagagaaauaucaccgaaauuguguauuugacaaacaccacuaucgagaaggaaauuugccccaaauuagcugaguacaggaauuggaguaagccucagugugacaucacaggguucgcaccauuuagcaaagauaacuccauacggcugucugccggaggugacauuuggguaacccgcgagcccuaugugucgugcgauccugacaaguguuaccaauucgcgcuaggccaggggacgacucucaauaacguccauucaaauaacaccgugcgagaucguacaccauauagaacucugcuuaugaaugaacugggaguucccuuucacuugggcaccaaacaggugugcaucgcuuggagcaguuccucuugucaugacgguaaggccuggcuccacgucugcauuacaggggaugacaagaacgcaaccgccagcuucaucuacaauggaaggcugguggauuccguaguuucauggaguaaagagauccugcggacgcaggaaagcgagugugugugcauuaacggcacuuguacagucgugaugaccgacggcucugcuuccgggaaggcagauacuaaaauacucuuuaucgaggaaggaaagauugugcauacaucaaccuuaagcgguagugcccaacacgucgaggaaugcucuugcuauccucgcuacccaggcguuagaugugugugcagggacaacuggaagggguccaaucggccgaucguagauauaaacauuaaagaccacagcaucgugucgucuuaccuguguuccggacuugucggcgacacgccccgcaagaaugauucaaguagcuccucucauugcuuggacccuaacaaugaggaaggugggcacggagugaaaggcugggcuuucgaugacggcaacgauguuuggauggggcgaaccaucagcgagaagucaagacugggauaugagacauuuaaagugauugaagguuggaguaauccaaaguccaaacuacagaucaacaggcaggucauuguggaccggggcaaucguagcggguacucuggaauauucucaguagagggcaagaguuguaucaaccgcugcuuuuauguugaacucauuagagguaggaaggaggaaacugaggugcuguggaccagcaauuccaucgucguguucugugggacaucuggcacuuacggaaccggcucguggcccgauggggccgacaucaaccuuaugccuauuuga

SEQ ID NO: 147284 - RNA, 1410 nt, Artificial Sequence; identical to SEQ ID NO: 145953
  derived and/or modified CDS sequence (opt3) from neuraminidase__InfluenzaA__ADK98637

SEQ ID NO: 147285 - RNA, 1410 nt, Artificial Sequence
  derived and/or modified CDS sequence (opt3) from neuraminidase__InfluenzaA__ADK98648
augaaccccaaucagaagaucauuaccauaggcagcgugucccugacaaucucuacuauuugcuucuuuaugcaaaucgccauucucgucacgaccguuacacuucacuucaaacaguacgaguuuaacucaccuccaaauaaccaggugaugcugugugaaccgacuaucauagagagaaauaucaccgaaauuguauauuugacaaacaccacuaucgagaaggaaauuugccccaaauuagcugaguacaggaauuggaguaagccucagugugacaucacaggguucgcaccauuuagcaaagauaacuccauacggcugucugccggaggugacauuugggugacccgcgagcccuaugucucgugcgauccugacaaguguuaccaauucgcgcuaggccaggggacgacucucaauaacgugcauucaaauaacaccguucgagaucguacaccauauagaacucugcuuaugaaugaacugggagugcccuuucacuugggcaccaagcaggucugcaucgcuuggagcaguuccucuugucaugacgguaaagccuggcuccacgugugcauuacaggggaugacaagaacgcaaccgccagcuucaucuacaauggaaggcugguagauuccguugugucauggaguaaagacauccugcggacgcaggagagcgaaugugucugcauuaacggcacuuguacaguggugaugaccgauggcucugcuuccgggaaggcagacacuaaaauacucuuuaucgaggagggaaagauuguccauacaucaaccuuaagcgguagugcccaacacguugaagagugcucuugcuauccucgcuacccaggcgugagauguguaugcagggauaacuggaagggguccaaucggccgaucguggacauaaacauuaaagaccacagcaucgucucgucuuacguguguuccggacugguuggcgauacgccccgcaagaaugacucaaguagcuccucucauugccuugauccuaacaaugaagagggugggcgaggagugaaaggcugggcuuucgacgauggcaacgacgucuggauggggagaaccaucagcgaaaagucaagguugggauaugagacauuuaaagugauugaggguuggaguaauccaaaguccaaacugcagaucaaccggcagguaauuguugaucguggcaaucgcagcggguacucuggaauauucucaguggaaggcaagaguuguaucaacagaugcuuuuaugucgagcuaauuaggggucggaaggaagagacugaagugcucuggaccagcaauuccaucgucguguucugugggacaucuggcacuuacggaaccggcucguggcccgacggggccaacaucaaucugaugccuauuuga

SEQ ID NO: 147286 - RNA, 1410 nt, Artificial Sequence
  derived and/or modified CDS sequence (opt3) from neuraminidase__InfluenzaA__ADK98659
augaaccccaaucagaagaucauuaccauaggcagcgugucccugacaaucucuacuauuugcuucuuuaugcagaucgccauucucaucacgaccgucacacuucacuucaaacaguacgaguuuaacucaccuccaaauaaccagguuaugcugugugaaccgacuauaaucgagagaaauauuaccgaaaucguguauuugacaaacaccacuauugagaaggaaaucugccccaaauuagcugaguacaggaauuggaguaagccucagugugacauaacaggguucgcaccauuuagcaaagauaacuccauucggcugucugccggaggugacaucuggguaacccgcgagcccuaugugucgugcgauccugacaaguguuaccaauucgcgcuaggccaggggacgacucucaauaacguccauucaaauaacaccgugcgagaucguacaccauauagaacucugcuuaugaaugaacugggaguucccuuucacuugggcaccaaacaggugugcauugcuuggagcaguuccucuugucaugacgguaaggccuggcuccacgucugcaucacaggggaugacaagaacgcaaccgccagcuucaucuacaauggaaggcugguggauuccguaguuucauggaguaaagagauucugcggacgcaggaaagcgagugugugugcauaaacggcacuuguacagucgugaugaccgacggcucugcuuccgggaaggcagauacuaaaauccucuuuauugaggaaggaaagaucgugcauacaucaaccuuaagcgguagugcccaacacgucgaggaaugcucuugcuauccucgcuacccaggcguuagaugugugugcagggacaacuggaagggguccaaucggccgauaguagauauuaacaucaaagaccacagcaucgugucgucuuacgucuguuccggacuggugggcgacacgccccgcaagaaugauucaaguagcuccggucauugccuugacccuaacaaugaggaagggggacacggcguuaaaggcugggcuuucgaugacgggaacgauguguggaugggacgaaccauuucugaaaagagcagauuggguuaugagacauuuaaagucaucgagggcuggucaaaucauaagaguaaacugcagauuaacaggcaagugauaguagaccgggggaaucguuccggauacagcggcaucuucucuguugaggguaagucauguauuaaccgcugcuuuuauguggaacuaaucagagggaggaaggaggaaacugagguccucuggaccaguaauagcaucguggucuucuguggcacauccggaacuuacggcaccgggucuuggccagauggagccgaccugaaccuuaugcccauuuga

SEQ ID NO: 147287 - RNA, 1410 nt, Artificial Sequence; identical to SEQ ID NO: 147171
  derived and/or modified CDS sequence (opt3) from neuraminidase__InfluenzaA__ADK98670

SEQ ID NO: 147288 - RNA, 1410 nt, Artificial Sequence
  derived and/or modified CDS sequence (opt3) from neuraminidase__InfluenzaA__ADK98681
augaaccccaaucagaagaucauuaccauaggcagcgugucccugacaaucucuacuauuugcuucuuuaugcagaucgccauucucaucacgaccgucacacuucacuucaaacaguacgaguuuaacucaccuccaaauaaccagguuaugcugugugaaccgacuauaaucgagagaaauauuaccgaaaucguguauuugacaaacaccacuauugagaaggaaaucugccccaaauuagcugaguacaggaauuggaguaagccucagugugacauaacaggguucgcaccauuuagcaaagauaacuccauucggcugucugccggaggugacaucuggguaacccgcgagcccuaugugucgugcgauccugacaaguguuaccaauucgcgcuaggccaggggacgacucucaauaacguccauucaaauaacaccgugcgagaucguacaccauauagaacucugcuuaugaaugaacugggaguucccuuucacuugggcaccaaacaggugugcauugcuuggagcaguuccucuugucaugacgguaaggccuggcuccacgucugcaucacaggggaugacaagaacgcaaccgccagcuucaucuacaauggaaggcugguggauuccguaguuucauggaguaaagagauucugcggacgcaggaaagcgagugugugugcauaaacggcacuuguacagucgugaugaccgacggcucugcuuccggggaggcagauacuaagauccucuuuauugaagagggaaaaaucgugcauacaucaaccuuaagcgguagugcccaacacgucgaagagugcucuugcuauccucgcuacccaggcguuagaugugugugcagggacaacuggaagggguccaaucggccgauaguagauauuaacaucaaggaccacagcaucgugucgucuuacgucuguuccggacuggugggcgacacgccccgcaaaaaugauucaaguagcuccucucauugccuugacccuaacaaugaagagggugggcacggaguuaagggcugggcuuucgaugacggcaacgauguguggauggggcgaaccauuagcgagaaaucaagauugggauaugaaacauuuaaggucaucgaggguuggaguaauccaaaauccaagcugcagacuaacaggcaagugauuguagaccggggcaaucguagcggguacucuggaauauucucaguugaaggcaaaaacuguaucaaucgcugcuuuuauguggagcuaauuagagguaggaaggaagagaccgagguccucuggacaaguaacagcaucguggucuucugugggacuuccggcaccuacggaacaggcucuuggcccgauggggccgacaucaaucugaugccuauuuga

SEQ ID NO: 147289 - RNA, 1410 nt, Artificial Sequence
  derived and/or modified CDS sequence (opt3) from neuraminidase__InfluenzaA__ADK98703
augaaccccaaucagaagaucauuaccauaggcagcgugucccugacaaucucuacuauuugcuucuuuaugcaaacggccauccucauuaccacagucacucuucacuucaaacaguacgaguuuaacucaccuccaaauaaccagguuaugcugugugaaccgaccaucauagagagaaauaucacagaaauuguguauuugaccaacacuacaaucgagaaggaaauuugccccaaauuagcugaguacaggaauuggaguaagccucagugugacaucaccggguucgcaccauuuagcaaagauaacuccauacggcugucugccggaggugacauuuggguaacgcgcgagcccuaugugucgugcgauccugacaaguguuaccaauucgcgcuaggccaggggacuacccucaauaacguccauucaaauaacacagugcgagaucguacuccauauagaacccugcuuaugaaugaacugggaguucccuuucacuugggcacaaaacaggugugcaucgcuuggagcaguuccucuugucaugacgguaaggccuggcuccacgucugcauuaccggggaugacaagaacgcaacggccagcuucaucuacaauggaaggcugguggauuccguaguuucauggaguaaagagauccugcggacucaggaaagcgagugugugugcauuaacggcacauguaccgucgugaugacugacggcucugcuuccggggaggcagauacaaagauacucuuuaucgaagagggaaaaauugugcauaccucaacguuaagcgguagugcccaacacgucgaagagugcucuugcuauccucgcuacccaggcguuagaugugugugcagggacaacuggaagggguccaaucggccgaucguagauauaaacauuaaggaccacagcaucgugucgucuuacgucuguuccggacuggugggcgacacccccaggaaaaaugauucaaguagcuccucucauugccuugacccuaacaaugaagagggugggcacggaguuaagggcugggcuuucgaugacggcaacgauguguggauggggcgaacaaucagcgagaaaucaagauugggauaugaaacuuuuaaggucauugaggguuggaguaauccaaaauccaagcugcagaccaaccgccaggugaucguagaccggggcaaucguagcggguacucuggaauuuucucaguugaaggcaaaaacuguauaaaucgcugcuuuuauguggagcuaaucagagguaggaaggaagagacagagguccucuggaccaguaacagcauuguggucuucugugggacuuccggcacauacggaaccggcucuuggcccgauggggccgacaucaaucugaugccuaucuga

SEQ ID NO: 147290 - RNA, 1410 nt, Artificial Sequence; identical to SEQ ID NO: 146532
  derived and/or modified CDS sequence (opt3) from neuraminidase__InfluenzaA__ADK98725

SEQ ID NO: 147291 - RNA, 1410 nt, Artificial Sequence; identical to SEQ ID NO: 147171
  derived and/or modified CDS sequence (opt3) from neuraminidase__InfluenzaA__ADK98736

SEQ ID NO: 147292 - RNA, 1410 nt, Artificial Sequence
  derived and/or modified CDS sequence (opt3) from neuraminidase__InfluenzaA__ADK98747
augaaccccaaucagaagaucauuaccauaggcagcgugucccugacaaucucuacuauuugcuucuuuaugcaaaucgccauucucgucacgaccguuacacuucacuucaaacaguacgaguuuaacucaccuccaaauaaccaggugaugcugugugaaccgacuaucauagagagaaauaucaccgaaauuguauauuugacaaacaccacuaucgagaaggaaauuugccccaaauuagcugaguacaggaauuggaguaagccucagugugacaucacaggguucgcaccauuuagcaaagauaacuccauacggcugucugccggaggugacauuugggugacccgcgagcccuaugucucgugcgauccugacaaguguuaccaauucgcgcuaggccaggggacgacucucaauaacgugcauucaaauaacaccguucgagaucguacaccauauagaacucugcuuaugaaugaacugggagugcccuuucacuugggcaccaagcaggucugcaucgcuuggagcaguuccucuugucaugacgguaaagccuggcuccacgugugcauuacaggggaugacaagaacgcaaccgccagcuucaucuacaauggaaggcugguagauuccguugugucauggaguaaagacauccugcggacgcaggagagcgaaugugucugcauuaacggcacuuguacaguggugaugaccgauggcucugcuuccgggaaggcagacacuaaaauacucuuuaucgaggagggaaagauuguccauacaucaaccuuaagcgguagugcccaacacguugaagagugcucuugcuauccucgcuacccaggcgugagauguguaugcagggauaacuggaagggguccaaucggccgaucguggacauaaacaugaaagaccacagcauugucucgucuuacguguguuccggacugguuggcgauacgccccgcaagaaugacucaaguagcuccucucauugccuugauccuaacaaugaagagggugggcacggagugaaaggcugggcuuucgacgauggcaacgacgucuggauggggcgaaccaucagcgaaaagucaagauugggauaugagacauuuaaagugaucgaggguuggaguaauccaaaguccaaacugcagauuaacaggcagguaaucguugaucggggcaaucguagcggguacucuggaauuuucucaguggaaggcaagaguuguauaaaccgcugcuuuuaugucgagcuaaucagagguaggaaggaagagacugaagugcucuggaccagcaauuccauugucguguucugugggacaucuggcacuuacggaaccggcucguggcccgacggggccaacaucaaucugaugccuaucuga

SEQ ID NO: 147293 - RNA, 1410 nt, Artificial Sequence
  derived and/or modified CDS sequence (opt3) from neuraminidase__InfluenzaA__ADK98758
augaaccccaaucagaagaucauuaccauaggcagcgugucccugacaaucucuacuauuugcuucuuuaugcaaaucgccauucucgucacgaccguuacacuucacuucaaacaguacgaguuuaacucaccuccaaauaaccaggugaugcugugugaaccgacuaucauagagagaaauaucaccgaaauuguauauuugacaaacaccacuaucgagaaggaaauuugccccaaauuagcugaguacaggaauuggaguaagccucagugugacaucacaggguucgcaccauuuagcaaagauaacuccauacggcugucugccggaggugacauuugggugacccgcgagcccuaugucucgugcgauccugacaaguguuaccaauucgcgcuaggccaggggacgacucucaauaacgugcauucaaauaacaccguucgagaucguacaccauauagaacucugcuuaugaaugaacugggagugcccuuucacuugggcaccaagcaggucugcaucgcuuggagcaguuccucuugucaugacgguaaagccuggcuccacgugugcauuacaggggaugacaagaacgcaaccgccagcuucaucuacaauggaaggcugguagauuccguugugucauggaguaaagacauccugcggacgcaggagagcgaaugugucugcauuaacggcacuuguacaguggugaugaccgauggcucugcuuccgggaaggcaaacacuaaaauacucuuuaucgaggagggaaagauuguccauacaucaaccuuaagcgguagugcccaacacguugaagagugcucuugcuauccucgcuacccaggcgugagauguguaugcagggacaauuggaagggguccaaccggccgaucguggauauaaauauuaaagaccacagcaucgucucgucuuacguguguuccggacugguuggcgacacgccccgcaagaacgauucaaguagcuccucucauugccuugacccuaauaacgaagagggugggcacggagugaaaggcugggcuuucgaugacggcaaugaugucuggauggggcgaaccaucagcgaaaagucaagauugggauaugagacauuuaaagugauugaggguuggaguaacccaaaguccaaacugcagaucaauaggcagguaauuguugaccggggcaaccguagcggguacucuggaauauucucaguggaaggcaagaguuguaucaaucgcugcuuuuaugucgagcuaauuagagguaggaaggaagagacugaagugcucuggaccagcaacuccaucgucguguucugugggacaucuggcacuuacggaaccggcucguggcccgauggggccaauaucaaccugaugccuauuuga

SEQ ID NO: 147294 - RNA, 1410 nt, Artificial Sequence; identical to SEQ ID NO: 146532
  derived and/or modified CDS sequence (opt3) from neuraminidase__InfluenzaA__ADK98769

SEQ ID NO: 147295 - RNA, 1410 nt, Artificial Sequence; identical to SEQ ID NO: 147086
  derived and/or modified CDS sequence (opt3) from neuraminidase__InfluenzaA__ADK98780

SEQ ID NO: 147296 - RNA, 1410 nt, Artificial Sequence; identical to SEQ ID NO: 146532
  derived and/or modified CDS sequence (opt3) from neuraminidase__InfluenzaA__ADK98791

SEQ ID NO: 147297 - RNA, 1410 nt, Artificial Sequence; identical to SEQ ID NO: 144647
  derived and/or modified CDS sequence (opt3) from neuraminidase__InfluenzaA__ADK98802

SEQ ID NO: 147298 - RNA, 1410 nt, Artificial Sequence
  derived and/or modified CDS sequence (opt3) from neuraminidase__InfluenzaA__ADK98813
augaaccccaaucagaagaucauuaccauaggcagcgugucccugacaaucucuacuauuugcuucuuuaugcaaaucgccauucucaucacgaccgucacacuucacuucaaacaguacgaguuuaacucaccuccaaauaaccagguuaugcugugugaaccggcuauaaucgagagaaauauuacugaaaucguguauuugaccaacacaaccauugagaaggaaaucugccccaaauuagcagaguacaggaauuggaguaagccucagugugacauaacuggguucgccccauuuagcaaagauaacuccauucggcugucugcgggaggugacaucuggguaacacgcgagcccuaugugucgugcgauccugacaaguguuaccaauucgcucuaggccaggggaccacgcucaauaacguccauucaaauaacacugugcgagaucguaccccauauagaacacugcuuaugaaugaacugggaguucccuuucacuugggcacuaaacaggugugcauugccuggagcaguuccucuugucaugacgguaaggcauggcuccacgucugcaucaccggggaugacaagaacgccacagcuagcuucaucuacaauggaaggcugguggauuccguaguuucauggaguaaagagauucugcggacccaggaaagcgagugugugugcauaaacggcacguguacugucgugaugacagacggcucugcauccgggaaggccgauaccaaaauccucuuuauugaggaaggaaagaucgugcauacuucaacauuaagcgguagugcucaacacgucgaggaaugcucuugcuauccucgcuacccaggcguuagaugugugugcagggacaacuggaagggguccaaucggccgauaguagauauuaacaucaaagaccacagcaucgugucgucuuacgucuguuccggacuggugggcgacacccccaggaagaaugauucaaguagcuccucucauugccuugacccuaacaaugaggaaggugggcacggaguuaaaggcugggccuucgaugacggcaacgauguguggauggggcgaacgauuagcgagaagucaagauugggauaugagaccuuuaaagucaucgaagguuggaguaaucauaaguccaaacugcagauuaaccgccaggugauaguagaccggggcaaucguagcggguacucuggaaucuucucaguugagggcaagaguuguauuaaccgcugcuuuuauguggaacuaaucagagguaggaaggaggaaacagagguccucuggacuagcaauuccaucguggucuucugugggaccucuggcacauacggaacuggcucguggccagauggggcggaccugaaccuuaugcccauuuga

SEQ ID NO: 147299 - RNA, 1410 nt, Artificial Sequence; identical to SEQ ID NO: 144647
  derived and/or modified CDS sequence (opt3) from neuraminidase__InfluenzaA__ADK98824

SEQ ID NO: 147300 - RNA, 1410 nt, Artificial Sequence; identical to SEQ ID NO: 146532
  derived and/or modified CDS sequence (opt3) from neuraminidase__InfluenzaA__ADK98835

SEQ ID NO: 147301 - RNA, 1410 nt, Artificial Sequence; identical to SEQ ID NO: 147171
  derived and/or modified CDS sequence (opt3) from neuraminidase__InfluenzaA__ADK98846

SEQ ID NO: 147302 - RNA, 1410 nt, Artificial Sequence
  derived and/or modified CDS sequence (opt3) from neuraminidase__InfluenzaA__ADK98857
augaaccccaaucagaagaucauuaccauaggcagcgugucccugacaaucucuacuauuugcuucuuuaugcaaaucgccauucucgucacgaccguuacacuucacuucaaacaguacgaguuuaacucaccuccaaauaaccaggugaugcugugugaaccgacuaucauagagagaaauaucaccgaaauuguauauuugacaaacaccacuaucgagaaggaaauuugccccaaauuagcugaguacaggaauuggaguaagccucagugugacaucacaggguucgcaccauuuagcaaagauaacuccauacggcugucugccggaggugacauuugggugacccgcgagcccuaugucucgugcgauccugacaaguguuaccaauucgcgcuaggccaggggacgacucucaauaacgugcauucaaauaacaccguucgagaucguacaccauauagaacucugcuuaugaaugaacugggagugcccuuucacuugggcaccaagcaggucugcaucgcuuggagcaguuccucuugucaugacgguaaagccuggcuccacgugugcauuacaggggaugacaagaacgcaaccgccagcuucaucuacaauggaaggcugguagauuccguugugucauggaguaaagacauccugcggacgcaggagagcgaaugugucugcauuaacggcacuuguacaguggugaugaccgauggcucugcuuccgggaaggcagacacuaaaauacucuuuaucgaggagggaaagauuguccauacaucaaccuuaagcgguagugcccaacacguugaagagugcucuugcuauccucgcuacccaggcgugagauguguaugcagggauaacuggaagggguccaaucggccgaucguggacauaaacauuaaagaccacagcaucgucucgucuuacguguguuccggacugguuggcgauacgccccgcaagaaugacucaaguagcuccucucauugccuugauccuaacaaugaagagggugggcacggagugaaaggcugggcuuucgacgauggcaacgacgucuggauggggcgaaccaucagcgaaaagucaagauugggauaugagacauuuaaagugauugaggguuggaguaaucauaaguccaaacugcagaucaacaggcagguaauuguugaucggggcaaucguagcggguacucuggaauauucucaguggaaggcaagaguuguaucaaccgcugcuuuuaugucgagcuaauuagagguaggaaggaagagacugaagugcucuggaccagcaauuccaucgucguguucugugggacaucuggcacuuacggaaccggcucguggccagacggggccaacaucaaucugaugcccauuuga

SEQ ID NO: 147303 - RNA, 1410 nt, Artificial Sequence
  derived and/or modified CDS sequence (opt3) from neuraminidase__InfluenzaA__ADK98868
augaaccccaaucagaagaucauuaccauaggcagcgugucccugacaaucucuacuauuugcuucuuuaugcagaucgccauucucaucacgaccgucacacuucacuucaaacaguacgaguuuaacucaccuccaaauaaccagguuaugcugugugaaccgacuauaaucgagagaaauauuaccgaaaucguguauuugacaaacaccacuauugagaaggaaaucugccccaaauuagcugaguacaggaauuggaguaagccucagugugacauaacaggguucgcaccauuuagcaaagauaacuccauucggcugucugccggaggugacaucuggguaacccgcgagcccuaugugucgugcgauccugacaaguguuaccaauucgcgcuaggccaggggacgacucucaauaacguccauucaaauaacaccgugcgagaucguacaccauauagaacucugcuuaugaaugaacugggaguucccuuucacuugggcaccaaacaggugugcauugcuuggagcaguuccucuugucaugacgguaaggccuggcuccacgucugcaucacaggggaugacaagaacgcaaccgccagcuucaucuacaauggaaggcugguggauuccguaguuucauggaguaaagagauucugcggacgcaggaaagcgagugugugugcauaaacggcacuuguacagucgugaugaccgacggcucugcuuccgggaaggcagauacuaaaauccucuuuauugaggaaggaaagaucgugcauacaucaaccuuaagcgguagugcccaacacgucgaggaaugcucuugcuauccucgcuacccaggcguuagaugugugugcagggacaacuggaagggguccaaucggccgauaguagauauuaacaucaaagaccacagcaucgugucgucuuacgucuguuccggacuggugggcgacacgccccgcaagaaugauucaaguagcuccucucauugccuugacccuaacaaugaggaaggugggcacggaguuaaaggcugggcuuucgaugacggcaacgauguguggauggggcgaaccauuagcgagaagucaagauugggauaugagacauuuaaagucaucgaagguuggaguaauccaaaguccaaacugcagauuaacaggcaagugauaguagaccggggcaaucguagcggguacucuggaaucuucucaguugagggcaagaguuguauuaaccgcugcuuuuauguggaacuaaucagagguaggaaggaggaaaaugagguccucuggacuagcaacuccaucguggucuucugugggaccucuggcacauacggaacuggcucguggcccgauggggccgacauuaaucugaugccuauauga

SEQ ID NO: 147304 - RNA, 1410 nt, Artificial Sequence
  derived and/or modified CDS sequence (opt3) from neuraminidase__InfluenzaA__ADK98879
augaaccccaaucagaagaucauuaccauaggcagcgugucccugacaaucucuacuauuugcuucuuuaugcaaaucgccauucucaucacgaccgucacacuucacuucaaacaguacgaguuuaacucaccuccaaauaaccaggcuaugcugugugaaccgacuauaaucgagagaaauauuaccgaaaucguuuauuugacaaacaccacuauugagaaggaaaucugccccaaauuagcagaguacaggaauuggaguaagccucagugugacauaacaggguucgccccauuuagcaaagauaacuccauucggcugucugcgggaggugacaucugggugacccgcgagcccuauguaucgugcgauccugacaaguguuaccaauucgcucuaggccaggggacgacucucaauaacgugcauucaaauaacaccguccgagaucguacaccauauagaacucugcuuaugaaugaacugggagugcccuuucacuugggcaccaagcagguuugcauugccuggagcaguuccucuugucaugacgguaaagcauggcuccacgugugcaucacaggggaugacaagaacgccaccgcuagcuucaucuacaauggaaggcuggucgauuccgugguaucauggaguaaagagauucugcggacgcaggaaagcgaguguguuugcauaaacggcacuuguacaguggucaugaccgacggcucugcauccgggaaggccgauacuaaaauccucuuuauugaggaaggaaagaucgugcauacaucaaccuuaagcgguagugcucaacacguggaggaaugcucuugcuauccucgcuacccaggcgucagauguguuugcagggacaacuggaagggguccaaucggccgauaguggauauuaacaucaaagaccacagcaucguaucgucuuacguguguuccggacuggucggcgacacgccccgcaagaaugauucaaguagcuccucucauugccuugacccuaacaaugaggaaggugggcacggagugaaaggcugggccuucgaugacggcaacgauguuuggauggggcgaaccauuagcgagaagucaagauugggauaugagacauuuaaagugaucgaagguuggaguaauccaaaguccaaacugcagauuaacaggcaggucauaguggaccggggcaaucguagcggguacucuggaaucuucucaguagagggcaagaguuguauuaaccgcugcuuuuauguugaacuaaucagagguaggaaggaggaaacugaggugcucuggaccagcaauuccaucgucguguucugugggacaucuggcacuuacggaaccggcucguggcccgauggggcggacauuaaccugaugccuauauga

SEQ ID NO: 147305 - RNA, 1410 nt, Artificial Sequence; identical to SEQ ID NO: 147171
  derived and/or modified CDS sequence (opt3) from neuraminidase__InfluenzaA__ADK98890

SEQ ID NO: 147306 - RNA, 1410 nt, Artificial Sequence; identical to SEQ ID NO: 146532
  derived and/or modified CDS sequence (opt3) from neuraminidase__InfluenzaA__ADK98901

SEQ ID NO: 147307 - RNA, 1410 nt, Artificial Sequence; identical to SEQ ID NO: 147086
  derived and/or modified CDS sequence (opt3) from neuraminidase__InfluenzaA__ADK98912

SEQ ID NO: 147308 - RNA, 1410 nt, Artificial Sequence; identical to SEQ ID NO: 147171
  derived and/or modified CDS sequence (opt3) from neuraminidase__InfluenzaA__ADK98923

SEQ ID NO: 147309 - RNA, 1410 nt, Artificial Sequence; identical to SEQ ID NO: 145953
  derived and/or modified CDS sequence (opt3) from neuraminidase__InfluenzaA__ADK98945

SEQ ID NO: 147310 - RNA, 1410 nt, Artificial Sequence
  derived and/or modified CDS sequence (opt3) from neuraminidase__InfluenzaA__ADK98956
augaaccccaaucagaagaucauuaccauaggcagcgugucccugacaaucucuacuauuugcuucuuuaugcaaaucgccauucucaucacgaccgucacacuucacuucaaacaguacgaguuuaacucaccuccaaauaaccagguuaugcugugugaaccgacuauaaucgagagaaauauuaccgaaaucguguauuugacaaacaccacuauugagaaggaaaucugccccaaauuagcugaguacaggaauuggaguaagccucagugugacauaacaggguucgcaccauuuagcaaagauaacuccauucggcugucugccggaggugacaucuggguaacccgcgagcccuaugugucgugcgauccugacaaguguuaccaauucgcgcuaggccaggggacgacucucaauaacguccauucaaauaacaccgugcgagaucguacaccauauagaacucugcuuaugaaugaacugggaguucccuuucacuugggcaccaaacaggugugcauugcuuggagcaguuccucuugucaugacgguaaggccuggcuccacgucugcaucacaggggaugacaagaacgcaaccgccagcuucaucuacaauggaaggcugguggauuccguaguuucauggaguaaagagauucugcggacgcaggaaagcgagugugugugcauaaacggcacuuguacagucgugaugaccgacggcucugcuuccgggaaggcagauacuaaaauccucuuuauugaggaaggaaagaucgugcauacaucaaccuuaagcgguagugcccaacacgucgaggaaugcucuugcuauccucgcuacccaggcguuagaugugugugcagggacaacuggaagggguccaaucggccgauaguagauauuaacaucaaagaccacagcguggucucgucuuacguguguuccggacugguuggcgacacgccccgcaagucagauaguagcuccucuagccauugccuugacccuaauaacgaggaaggugggcacggagugaaaggcugggcuuucgaugacggcaaugaugucuggauggggcgaaccaucucagagaagaguagauugggauaugagacauuuaaagugauugaagguugguccaaccauaagagcaaacugcagaucaauaggcagguaauuguugaccggggcaaccguucuggguacucaggaauauucaguguggagggcaagagcuguaucaaucgcugcuuuuaugucgaacuaauuagagguaggaaggaggaaacugaggugcucuggaccuccaacucuaucgucguguucugugggacaucgggcacuuacggaaccggcagcuggccagauggggccgaccugaaucuuaugcccaucuga

SEQ ID NO: 147311 - RNA, 1410 nt, Artificial Sequence; identical to SEQ ID NO: 146532
  derived and/or modified CDS sequence (opt3) from neuraminidase__InfluenzaA__ADK98967

SEQ ID NO: 147312 - RNA, 1410 nt, Artificial Sequence; identical to SEQ ID NO: 147171
  derived and/or modified CDS sequence (opt3) from neuraminidase__InfluenzaA__ADK98978

SEQ ID NO: 147313 - RNA, 1410 nt, Artificial Sequence; identical to SEQ ID NO: 147310
  derived and/or modified CDS sequence (opt3) from neuraminidase__InfluenzaA__ADK98989

SEQ ID NO: 147314 - RNA, 1410 nt, Artificial Sequence; identical to SEQ ID NO: 144647
  derived and/or modified CDS sequence (opt3) from neuraminidase__InfluenzaA__ADK99000

SEQ ID NO: 147315 - RNA, 1410 nt, Artificial Sequence; identical to SEQ ID NO: 147310
  derived and/or modified CDS sequence (opt3) from neuraminidase__InfluenzaA__ADK99011

SEQ ID NO: 147316 - RNA, 1410 nt, Artificial Sequence
  derived and/or modified CDS sequence (opt3) from neuraminidase__InfluenzaA__ADK99022
augaaccccaaucagaagaucauuaccauaggcagcgugucccugacaaucucuacuauuugcuucuuuaugcaaaucgccauucucgucacgaccguuacacuucacuucaaacaguacgaguuuaacucaccuccaaauaaccaggugaugcugugugacccgacuaucauagaaagaaauaucaccgagauuguauauuugacaaacaccacuaucgaaaaggagauuugccccaaauuagcugaauacaggaauuggaguaagccucagugugauaucacaggguucgcaccauuuagcaaagacaacuccauacggcugucugccggaggugauauuugggugacccgcgagcccuaugucucgugcgacccugauaaguguuaccaauucgcgcuaggccaggggacgacucucaauaacgugcauucaaauaacaccguucgagaccguacaccauauagaacucugcuuaugaaugagcugggagugcccuuucacuugggcaccaagcaggucugcaucgcuuggagcaguuccucuugucaugaugguaaagccuggcuccacgugugcauuacaggggacgauaagaacgcaaccgccagcuucaucuacaauggaaggcugguagacuccguugugucauggaguaaagauauccugcggacgcaggaaagcgagugugucugcauuaacggcacuuguacaguggugaugaccgacggcucugcuuccgggaaggcagauacuaaaauacucuuuaucgaagagggaaagauuguccauacaucaaccuuaagcgguagugcccaacacguugaggaaugcucuugcuauccucgcuacccaggcgugagauguguaugcagggacaacuggaagggguccaaucggccgaucguggacauaaacauuaaagaucacagcaucgucucgucuuacguguguuccggacugguuggcgacacgccccgcaagaaugauucaaguagcuccucucauugccuugacccuaacaaugaggaaggugggcacggagugaaaggcugggcuuucgaugacggcaacgaugucuggauggggcgaaccaucagcgagaagucaagauugggauaugaaacauuuaaagugauugaggguuggaguaauccaaaguccaaacugcagaucaacaggcagguaauuguugaccggggcaaucguagcggguacucuggaauauucucaguggagggcaagaguuguaucaaccgcugcuuuuaugucgaacuaauuagagguaggaaggaggaaacugaggugcucuggaccagcaauuccaucgucguguucugugggacaucuggcacuuacggaaccggcucguggcccgauggggccaacaucaaucugaugccuauuuga

SEQ ID NO: 147317 - RNA, 1410 nt, Artificial Sequence; identical to SEQ ID NO: 144647
  derived and/or modified CDS sequence (opt3) from neuraminidase__InfluenzaA__ADK99033

SEQ ID NO: 147318 - RNA, 1410 nt, Artificial Sequence
  derived and/or modified CDS sequence (opt3) from neuraminidase__InfluenzaA__ADK99044
augaaccccaaucagaagaucauuaccauaggcagcgugucccugacaaucucuacuauuugcuucuuuaugcaaaucgccauucucaucacgaccgucacacuucacuucaaacaguacgaguuuaacucaccuccaaauaaccagguuaugcugugugaaccgacuauaaucgagagaaauaagaccgaaauuguguauuugacaaacaccacuaucgagaaagaaauuugccccaaguuagcugaguacaggaauuggaguaaaccucagugugacaucacaggguucgcaccauuuagcaaggauaacuccauacggcugucugccggaggugacauuuggguaacccgcgagcccuaugugucgugcgauccugacaaguguuaccaauucgcgcuaggccaggggacgacucucaauaacggacauucaaauaacaccguccgagaucguacaccauauagaacucugcuuaugaaugaacugggcgugcccuuucacuuggguaccaaacagguuugcaucgcuuggagcaguuccucuugucaugacgggaaggccuggcuccacgugugcauuacaggagaugacaaaaacgcaaccgccagcuucaucuacaauggcaagcuggucgauuccgugguaucauggaguaaagagauccugaggacgcaggaaagcgaguguguuugcauuaacggcacuuguacaguggucaugaccgacgggucugcuuccggaaaggcagauacuaagauacucuuuaucgaggaagguaaaauugugcauacaucaaccuuaagcggcagugcccaacacguggaggaaugcucuugcuauccucgguacccagggguccgcuguguuugcagagacaacuggaagggauccaauaggccgaucguggauauaaacauuaaagaccacagcaucguaucgucuuacguguguuccggccuggucggugacacgccccggaagaaugauucaaguagcuccucucauugccuugacccuaacaaugaggaagggggacacggcgugaaaggcugggcuuucgaugacgggaacgauguuuggaugggacgcaccaucagcgagaagucacgauuggguuaugagacauuuaaagugauugaaggcuggaguaaucauaaguccaagcugcagaucaacagacaggucauuguggacagggggaaucggagcggauacucuggcauauucucaguagaggguaaaaguuguaucaaccguugcuuuuauguugaacuaauucgcgggagaaaggaggaaacugaggugcucuggaccagcaauuccaucgucguguucuguggcacaucuggaacuuacggcaccgggucguggccagauggagccgaccugaaccuuaugcccaucuga

SEQ ID NO: 147319 - RNA, 1410 nt, Artificial Sequence
  derived and/or modified CDS sequence (opt3) from neuraminidase__InfluenzaA__ADK99055
augaaccccaaucagaagaucauuaccauaggcagcgugucccugacaaucucuacuauuugcuucuuuaugcagaucgccauucucaucacgaccgucacacuucacuucaaacaguacgaguuuaacucaccuccaaauaaccagguuaugcugugugaaccgacuauaaucgagagaaauauuaccgaaaucguguauuugacaaacaccacuauugagaaggaaaucugccccaaauuagcugaguacaggaauuggaguaagccucagugugacauaacaggguucgcaccauuuagcaaagauaacuccauucggcugucugccggaggugacaucuggguaacccgcgagcccuaugugucgugcgauccugacaaguguuaccaauucgcgcuaggccaggggacgacucucaauaacguccauucaaauaacaccgugcgagaucguacaccauauagaacucugcuuaugaaugaacugggaguucccuuucacuugggcaccaaacaggugugcauugcuuggagcaguuccucuugucaugacgguaaggccuggcuccacgucugcaucacaggggaugacaagaacgcaaccgccagcuucaucuacaauggaaggcugguggauuccguaguuucauggaguaaagagauucugcggacgcaggaaagcgagugugugugcauaaacggcacuuguacagucgugaugaccgacggcucugcuuccgggaaggcagauacuaaaauccucuuuauugaggaaggaaagaucgugcauacaucaaccuuaagcgguagugcccaacacgucgaggaaugcucuugcuauccucgcuacccaggcguuagaugugugugcagggacaacuggaagggguccaaucggccgauaguagauauuaacaugaaagaccacagcaucgugucgucuuacgucuguuccggacuggugggcgacacgccccgcaagaaugauucaaguagcuccucucauugccuugacccuaacaaugaggaaggugggcacggaguuaaaggcugggcuuucgaugacggcaacgauguguggauggggcgaaccaucagcgagaagucaagauugggauaugagacauuuaaagucauugaagguuggaguaauccaaaguccaaacugcagaucaacaggcaagugauuguagaccggggcaaucguagcggguacucuggaauauucucaguugagggcaagaguuguaucaaccgcugcuuuuauguggaacuaauuagagguaggaaggaggaaacugagguccucuggaccagcaauuccaucguggucuucugugggacaucuggcacuuacggaaccggcucguggcccgauggggccgacaucaaccugaugccuauuuga

SEQ ID NO: 147320 - RNA, 1410 nt, Artificial Sequence
  derived and/or modified CDS sequence (opt3) from neuraminidase__InfluenzaA__ADK99066
augaaccccaaucagaagaucauuaccauaggcagcgugucccugacaaucucuacuauuugcuucuuuaugcaaaucgccauucucaucacgaccgucacacuucacuucaaacagugugaguuuaacucaccuccaaauaaccagguuaugcugugcgaaccgacuauaaucgagagaaauauuaccgaaaucguguacuugacaaacaccacuauugagaagaaaaucugucccaaguuagcugaauauaggaauuggaguaaaccucagugcgacauaacaggguucgcaccauuuagcaaggauaacuccauucggcugucugccggaggugacaucuggguaacccgcgagcccuacgugucgugugauccugacaagugcuaucaauucgcgcuaggccaggggacgacucucaauaacguccauucaaauaacaccgugcgagaucguacaccauacagaacucugcuuaugaaugagcugggaguucccuuucacuugggcaccaaacagguguguauugcuuggagcaguuccucuugccaugacgguaaggccuggcuccacgucuguaucacaggggaugacaaaaacgcaaccgccagcuucaucuauaauggaaggcugguggauuccguaguuucauggaguaaggaaauucugcggacgcaggagagcgaaugcguguguauaaacggcacuugcacagucgugaugaccgacggcucugcuuccgggaaagcagauacuaagauccucuuuauugaggagggaaagaucgugcauacaucaaccuuaagcgguagugcccaacacgucgaagagugcucuuguuacccucgcuauccaggcguuagaugcguguguagggacaacuggaaaggguccaaucggccgauaguagauauuaacaucaaggaccacagcaucgugucgucuuaccugugcuccggacuugucggcgacacgccccgcaaaaaugauucaaguagcuccucucauuguuuggacccuaacaaugaagagggugggcacggagugaagggcugggcuuucgaugacggcaacgauguuuggauggggcgaaccauuagcgaaaaaucaagacugggauacgagacauuuaaggugaucgaggguuggaguaauccaaaauccaagcuacagauuaacaggcaggucauaguggaccggggcaaucguagcggguauucuggaaucuucucaguagaaggcaagaguugcauuaaccgcuguuuuuacguugagcucaucagagguaggaaagaagagacugaagugcuguggaccagcaauuccaucgucguguucugcgggacaucuggcacuuauggaaccggcucguggcccgauggggccaacauuaaucuuaugccuauauga

SEQ ID NO: 147321 - RNA, 1410 nt, Artificial Sequence
  derived and/or modified CDS sequence (opt3) from neuraminidase__InfluenzaA__ADK99077
augaaccccaaucagaagaucauuaccauaggcagcgugucccugacaaucucuacuauuugcuucuuuaugcaaaucgccauucucaucacgaccgucacacuucacuucaaacaguacgaguuuaacucaccuccaaauaaccagguuaugcugugugaaccgacuauaaucgagagaaauauuaccgaaaucguguauuugacaaacaccacuauugagaaggaaaucugccccaaauuagcugaguacaggaauuggaguaagccucagugugacauaacaggguucgcaccauuuagcaaagauaacuccauucggcugucugccggaggugacaucuggguaacccgcgagcccuaugugucgugcgauccugacaaguguuaccaauucgcgcuaggccaggggacgacucucaauaacguccauucaaauaacaccgugcgagaucguacaccauauagaacucugcuuaugaaugaacugggaguucccuuucacuugggcaccaaacaggugugcauugcuuggagcaguuccucuugucaugacgguaaggccuggcuccacgucugcaucacaggggaugacaagaacgcaaccgccagcuucaucuacaauggaaggcugguggauuccguaguuucauggaguaaagacauucugcggacgcaggagagcgaaugugugugcauaaacggcacuuguacagucgugaugaccgauggcucugcuuccgggaaggcagacacuaaaauccucuuuauugaggagggaaaggugguccauacaucaaccuuaagcgguagugcccaacacguugaagagugcucuugcuauccucgcuacccaggcgugagauguguaugcagggauaacuggaagggguccaaucggccgaucguggacauaaacauuaaagaccacagcaucgucucgucuuacguguguuccggacugguuggcgauacgccccgcaagaaugacucaaguagcuccucucauugccuugauccuaacaaugaagagggugggcacggagugaaaggcugggcuuucgacgauggcaacgacgucuggauggggcgaaccaucagcgaaaagucaagauugggauaugagacauuuaaagugauugaggguuggaguaaucauaaguccaaacugcagaucaacaggcagguaauuguugaucggggcaaucguagcggguacucuggaauauucucaguggaaggcaagaguuguaucaaccgcugcuuuuaugucgagcuaauuagagguaggaaggaagagacugaagugcucuggaccagcaauuccaucgucguguucugugggacaucuggcacuuacggaaccggcucguggccagacggggccgaucugaaccuuaugcccaucuga

SEQ ID NO: 147322 - RNA, 1410 nt, Artificial Sequence; identical to SEQ ID NO: 147086
  derived and/or modified CDS sequence (opt3) from neuraminidase__InfluenzaA__ADK99088

SEQ ID NO: 147323 - RNA, 1410 nt, Artificial Sequence; identical to SEQ ID NO: 146532
  derived and/or modified CDS sequence (opt3) from neuraminidase__InfluenzaA__ADK99099

SEQ ID NO: 147324 - RNA, 1410 nt, Artificial Sequence
  derived and/or modified CDS sequence (opt3) from neuraminidase__InfluenzaA__ADK99110
augaaccccaaucagaagaucauuaccauaggcagcgugucccugacaaucucuacuauuugcuucuuuaugcaaaucgccauucucgucacgaccguuacacuucacuucaaacaguacgaguuuaacccuccaccgaauaaccaggugaugcugugugaacccacuaucauagagagaaauaucaccgaaauuguauauuugacaaacaccacuaucgagaaggaaauuugcccuaaauuagcugaguacaggaauuggucaaagccacagugugacaucacaggguucgcacccuuuaguaaagauaacagcauacggcuguccgccggaggugacauuugggugacccgcgagccuuaugucucuugcgauccagacaaguguuaccaauucgcgcuaggccaggggacgacucucaauaacgugcauucgaauaacaccguucgagaucguacacccuauagaacucugcuuaugaaugaacugggagugccuuuucacuugggcaccaagcaggucugcaucgcuuggucaagcaguuccugucaugacgguaaagccuggcuccacgugugcauuacaggggaugacaagaacgcaaccgccucuuucaucuacaauggaaggcugguagauagcguuguguccuggucaaaagacauccugcggacgcaggagagugaaugugucugcauuaacggcacuuguacaguggugaugaccgauggcagcgcuucugggaaggcagacacuaaaauacucuuuaucgaggagggaaagauuguccauacauccaccuuaucagguagcgcccaacacguugaagagugcaguugcuauccacgcuacccgggcgugagauguguaugcagggauaacuggaaggggucuaaucggcccaucguggacauaaacauuaaagaccacuccaucgucagcucguacguguguucuggacugguuggcgauacgccucgcaagaaugacuccucaaguagcucccauugccuugauccaaacaaugaagagggugggcacggagugaaaggcugggcuuucgacgauggcaacgacgucuggauggggcgaaccaucucugaaaagagcagauugggauaugagacauuuaaagugauugaggguuggucaaaucccaagaguaaacugcagaucaacaggcagguaauuguugaucggggcaaucguuccggguacagcggaauauucucuguggaaggcaagucauguaucaaccgcugcuuuuaugucgagcuaauuagagguaggaaggaagagacugaagugcucuggaccaguaauagcaucgucguguucugugggacauccggcacuuacggaaccggcucuuggccugacggggccaacaucaaucugaugccaauuuga

SEQ ID NO: 147325 - RNA, 1410 nt, Artificial Sequence; identical to SEQ ID NO: 147171
  derived and/or modified CDS sequence (opt3) from neuraminidase__InfluenzaA__ADK99121

SEQ ID NO: 147326 - RNA, 1410 nt, Artificial Sequence
  derived and/or modified CDS sequence (opt3) from neuraminidase__InfluenzaA__ADK99132
augaaccccaaucagaagaucauuaccauaggcagcgugucccugacaaucucuacuauuugcuucuuuaugcagaucgccauucucaucacgaccgucacacuucacuucaaacaguacgaguuuaacucaccuccaaauaaccagguuaugcugugugaaccgacuauaaucgagagaaauauuaccgaaaucguguauuugacaaacaccacuguagagaaggaaauuugccccaaauuagcugaguacaggaauuggaguaagccucagugugacaucacaggguucgcaccauuuagcaaagauaacuccauacggcugucugccggaggugacauuugggugacccgcgagcccuaugucucgugcgauccugacaaguguuaccaauucgcgcuaggccaggggacgacucucaauaacgugcauucaaauaacaccguucgagaucguacaccauauagaacucugcuuaugaaugaacugggagugcccuuucacuugggcaccaagcaggucugcaucgcuuggagcaguuccucuugucaugacgguaaagccuggcuccacgugugcauuacaggggaugacaagaacgcaaccgccagcuucaucuacaauggaaggcugguagauuccguugugucauggaguaaagagauccugcggacgcaggaaagcgagugugucugcauuaacggcacuuguacaguggugaugaccgacggcucugcuuccgggaaggcagauacuaaaauacucuuuaucgaggaaggaaagauuguccauacaucaaccuuaagcgguagugcccaacacguugaggaaugcucuugcuauccucgcuacccaggcgugagauguguaugcagggacaacuggaagggguccaaucggccgaucguggauauaaacauuaaagaccacagcaucgucucgucuuaccuguguuccggacuugugggcgacacgccccgcaagaaugauucaaguagcuccucucauugcuuggacccuaacaaugaggaaggugggcacggaguuaaaggcugggcuuucgaugacggcaacgauguguggauggggcgaaccaucagcgagaagucaagacugggauaugagacauuuaaagucauugaagguuggaguaauccaaaguccaaacuacagaucaacaggcaagugauuguagaccggggcaaucguagcggguacucuggaauauucucaguugagggcaagaguuguaucaaccgcugcuuuuauguggaacucauuagagguaggaaggaggaaacugagguccuguggaccagcaauuccaucguggucuucugugggacaucuggcacuuacggaaccggcucguggcccgauggggccgacaucaaccuuaugccuauuuga

SEQ ID NO: 147327 - RNA, 1410 nt, Artificial Sequence; identical to SEQ ID NO: 147171
  derived and/or modified CDS sequence (opt3) from neuraminidase__InfluenzaA__ADK99143

SEQ ID NO: 147328 - RNA, 1410 nt, Artificial Sequence; identical to SEQ ID NO: 144647
  derived and/or modified CDS sequence (opt3) from neuraminidase__InfluenzaA__ADK99154

SEQ ID NO: 147329 - RNA, 1410 nt, Artificial Sequence
  derived and/or modified CDS sequence (opt3) from neuraminidase__InfluenzaA__ADK99176
augaaccccaaucagaagaucauuaccauaggcagcgugucccugacaaucucuacuauuugcuucuuuaugcaaaucgccauucucgucacgaccguuacacuucacuucaaacaguacgaguuuaacucaccuccaaauaaccaggugaugcugugugaaccgacuaucauagagagaaauaucaccgaaauuguauauuugacaaacaccacuaucgagaaggaaauuugcuuaaaacuggcugaguacaggaauuggaguaagccccagugugacaucacaggguucgcaccuuuuagcaaagauaacuccauacggcuaucugccggaggugacauuugggugacccgcgagccauaugucucgugcgaucccgacaaguguuaccaauucgcgcucggccaggggacgacucugaauaacgugcauucaaauaacaccguucgagaucguacaccuuauagaacucuucugaugaaugaauugggagugccauuucaccucggcaccaagcaggucugcaucgcuuggagcaguuccucuugucaugacgguaaagccuggcugcacgugugcauuacaggggaugacaagaacgcaaccgccagcuucaucuacaauggaaggcugguagauuccguugugucauggaguaaagacauccuccggacgcaggagagcgaaugugucugcauuaacggcacuuguacaguggugaugaccgauggcucugcuuccgggaaggcagacacuaaaauauuauuuaucgaggagggaaagauuguccauacaucaacccugagcgguagugcccaacacguugaagagugcucuugcuauccccgcuacccuggcgugagauguguaugcagggauaacuggaagggguccaaucggccaaucguggacauaaacauuaaagaccacagcaucgucucgucuuacguguguuccggacuuguuggcgauacgccgcgcaagaaugacucaaguagcuccucucauugcuuggaucccaacaaugaagagggugggcacggagugaaaggcugggcuuucgacgauggcaacgacgucuggauggggcgaaccaucagcgaaaagucaagacugggauaugagacauuuaaagugauugaggguuggaguaauccuaaguccaaacuacagaucaacaggcagguaauuguugaucggggcaaucguagcggguacucuggaauauucucaguggaaggcaagaguuguaucaaccgcugcuuuuaugucgagcucauuagagguaggaaggaagagacugaagugcuguggaccagcaauuccaucgucguguucugugggacaucuggcacuuacggaaccggcucguggccagacggggccaacaucaaucuuaugcccauuuga

SEQ ID NO: 147330 - RNA, 1410 nt, Artificial Sequence; identical to SEQ ID NO: 147321
  derived and/or modified CDS sequence (opt3) from neuraminidase__InfluenzaA__ADK99187

SEQ ID NO: 147331 - RNA, 1410 nt, Artificial Sequence; identical to SEQ ID NO: 146532
  derived and/or modified CDS sequence (opt3) from neuraminidase__InfluenzaA__ADK99198

SEQ ID NO: 147332 - RNA, 1410 nt, Artificial Sequence; identical to SEQ ID NO: 147171
  derived and/or modified CDS sequence (opt3) from neuraminidase__InfluenzaA__ADK99220

SEQ ID NO: 147333 - RNA, 1410 nt, Artificial Sequence
  derived and/or modified CDS sequence (opt3) from neuraminidase__InfluenzaA__ADK99231
augaaccccaaucagaagaucauuaccauaggcagcgugucccugacaaucucuacuauuugcuucuuuaugcaaaucgccauucucaucacgaccgucacacuucacuucaaacaguacgaguuuaacucaccuccaaauaaccagguuaugcugugugaaccgacuauaaucgagagaaauauuaccgaaaucguguauuugacaaacaccacuauugagaaggaaaucugccccaaauuagcugaguacaggaauuggaguaagccucagugugacauaacaggguucgcaccauuuagcaaagauaacuccauucggcugucugccggaggugacaucuggguaacccgcgagcccuaugugucgugcgauccugacaauuguuaccaauucgcgcuaggccaggggacgacucucaacaauguccauucaaacaauaccgugcgagaucguacaccauauagaacucugcuuaugaacgaacugggaguucccuuucacuugggcaccaaacaggugugcauugcuuggagcaguuccucuugucaugacgguaaggccuggcuccacgucugcaucacaggggaugacaagaaugcaaccgccagcuucaucuacaacggaaggcugguggauuccguaguuucauggaguaaggagauucugcggacgcaggaaagcgagugugugugcauaaacggcacuuguacagucgugaugaccgacggcucugcuuccgggaaagcagauacuaagauccucuuuauugaggaaggaaaaaucgugcauacaucaaccuuaagcgguagugcccaacacgucgaggaaugcucuugcuauccucgcuacccaggcguuagaugugugugcagggacaauuggaagggguccaaccggccgauaguagauauuaauaucaaggaccacagcaucgugucgucuuaccuguguuccggacuugucggcgacacgccccgcaaaaacgauucaaguagcuccucucauugcuuggacccuaauaacgaggaaggugggcacggagugaagggcugggcuuucgaugacggcaaugauguuuggauggggcgaaccauuagcgagaaaucaagacugggauaugagacauuuaaggugaucgaagguuggaguaacccaaaauccaagcuacagauuaauaggcaggucauaguggaccggggcaaccguagcggguacucuggaaucuucucaguagagggcaaaaguuguauuaaucgcugcuuuuauguugaacucaucagagguaggaaggaggaaacugaggugcuguggaccagcaacuccaucgucguguucugugggacaucuggcacuuacggaaccggcucguggcccgauggggccgacauuaaucuuaugccuauauga

SEQ ID NO: 147334 - RNA, 1410 nt, Artificial Sequence
  derived and/or modified CDS sequence (opt3) from neuraminidase__InfluenzaA__ADK99242
augaaccccaaucagaagaucauuaccauaggcagcgugucccugacaaucucuacuauuugcuucuuuaugcagaucgccauucucaucacgaccgucacacuucacuucaaacaguacgaguuuaacucaccuccaaauaaccagguuaugcugugugaaccgacuauaaucgagagaaauauuaccgaaaucguguauuugacaaacaccacuauugagaaggaaaucugccccaaauuagcugaguacaggaauuggaguaagccucagugugacauaacaggguucgcaccauuuagcaaagauaacuccauucggcugucugccggaggugacaucuggguaacccgcgagcccuaugugucgugcgauccugacaaguguuaccaauucgcgcuaggccaggggacgacucucaauaacguccauucaaauaacaccgugcgagaucguacaccauauagaacucugcuuaugaaugaacugggaguucccuuucacuugggcaccaaacaggugugcauugcuuggagcaguuccucuugucaugacgguaaggccuggcuccacgucugcaucacaggggaugacaagaacgcaaccgccagcuucaucuacaauggaaggcugguggauuccguaguuucauggaguaaagacauucugcggacgcaggagagcgaaugugugugcauaaacggcacuuguacagucgugaugaccgauggcucugcuuccgggaaggcagacacuaaaauccucuuuauugaggagggaaagaucgugcauacaucaaccuuaagcgguagugcccaacacgucgaagagugcucuugcuauccucgcuacccaggcguuagaugugugugcagggauaacuggaagggguccaaucggccgauaguagacauuaacaucaaagaccacagcaucgugucgucuuacgucuguuccggacuggugggcgauacgccccgcaagaaugacucaaguagcuccucucauugccuugauccuaacaaugaagagggugggcacggaguuaaaggcugggcuuucgacgauggcaacgacguguggauggggcgaaccauuagcgaaaagucaagauugggauaugagacauuuaaagucaucgaggguuggaguaauccaaaguccaaacugcagauuaacaggcaagugauaguagaucggggcaaucguagcggguacucuggaaucuucucaguugaaggcaagaguuguauuaaccgcugcuuuuauguggagcuaaucagagguaggaaggaagagacugaaguccucuggaccagcaauuccaucauuguguucugugggacaucuggcacuuacggaaccggcucguggcccgacggggccgauauaaaccugaugccuaucuga

SEQ ID NO: 147335 - RNA, 1410 nt, Artificial Sequence
  derived and/or modified CDS sequence (opt3) from neuraminidase__InfluenzaA__ADK99253
augaaccccaaucagaagaucauuaccauaggcagcgugucccugacaaucucuacuauuugcuucuuuaugcagaucgccauucucaucacgaccgucacacuucacuucaaacaguacgaguuuaacucaccuccaaauaaccagguuaugcugugugaaccgacuauaaucgagagaaauauuaccgaaaucguguauuugacaaacaccacuauugagaaggaaaucugccccaaauuagcugaguacaggaauuggaguaagccucagugugacauaacaggguucgcaccauuuagcaaagauaacuccauucggcugucugccggaggugacaucuggguaacccgcgagcccuaugugucgugcgauccugacaaguguuaccaauucgcgcuaggccaggggacgacucucaauaacguccauucaaauaacaccgugcgagaucguacaccauauagaacucugcuuaugaaugaacugggaguucccuuucacuugggcaccaaacaggugugcauugcuuggagcaguuccucuugucaugacgguaaggccuggcuccacgucugcaucacaggggaugacaagaacgcaaccgccagcuucaucuacaauggaaggcugguggauuccguaguuucauggaguaaagagauucugcggacgcaggaaagcgagugugugugcauaaacggcacuuguacagucgugaugaccgacggcucugcuuccgggaaggcagauacuaaaauccucuuuauugaggaaggaaagaucgugcauacaucaaccuuaagcgguagugcccaacacgucgaggaaugcucuugcuauccucgcuacccaggcguuagaugugugugcagggacaacuggaagggguccaaucggccgauaguagauauuaacaucaaagaccacagcaucgugucgucuuacgucuguuccggacuggugggcgacacgccccgcaagaaugauucaaguagcuccucucauugccuugacccuaacaaugaggaaggugggcacggaguuaaaggcugggcuuucgaugacggcaacgauguguggauggggcgaaccauuagcgagaagucaagauugggauaugagacauuuaaagucaucgaagguuggaguaaucauaaguccaaacugcagauuaacaggcaagugauaguagaccggggccaccguagcggguacucuggaaucuucucaguugagggcaagaguuguauuaaucgcugcuuuuauguggaacuaaucagagguaggaaggaggaaacugagguccucuggaccagcaacuccaucguggucuucugugggacaucuggcacuuacggaaccggcucguggccagauggggccgaccugacacuuaugcccauuuga

SEQ ID NO: 147336 - RNA, 1410 nt, Artificial Sequence
  derived and/or modified CDS sequence (opt3) from neuraminidase__InfluenzaA__ADK99264
augaaccccaaucagaagaucauuaccauaggcagcgugucccugacaaucucuacuauuugcuucuuuaugcaaaucgccauucucaucacgaccgucacacuucacuucaaacaguacgaguuuaacucaccuccaaauaaccagguuaugcugugugaaccgacuauaaucgagagaaauauuaccgaaaucguguauuugacaaacaccacuauugagaaggaaaucugccccaaauuagcugaguacaggaauuggaguaagccucagugugacauaacaggguucgcaccauuuagcaaagauaacuccauucggcugucugccggaggugacaucuggguaacccgcgagcccuaugugucgugcgauccugacaaguguuaccaauucgcgcuaggccaggggacgacucucaauaacguccauucaaauaacaccgugcgagaucguacaccauauagaacucugcuuaugaaugaacugggaguucccuuucacuugggcaccaaacaggugugcauugcuuggagcaguuccucuugucaugacgguaaggccuggcuccacgucugcaucacaggggaugacaagaacgcaaccgccagcuucaucuacaauggaaggcugguggauuccguaguuucauggaguaaagagauucugcggacgcaggaaagcgagugugugugcauaaacggcacuuguacagucgugaugaccgacggcucugcuuccgggaaggcagauacuaaaauccucuuuauugaggaaggaaagaucgugcauacaucaaccuuaagcgguagugcccaacacgucgaggaaugcucuugcuauccucgcuacccaggcguuagaugugugugcagggacaacuggaagggguccaaucggccgauaguagauauuaacaucaaagaccacagcaucgugucgucuuaccuguguuccggacuugucggcgacacgccccgcaagaaugauucaaguagcuccucucauugcuuggacccuaacaaugaggaaggugggcacggagugaaaggcugggcuuucgaugacggcaacgauguuuggauggggcgaaccauuagcgagaagucaagacugggauaugagacauuuaaagugaucgaagguuggaguaauccaaaguccaaacuacauauuaacaggcaggucauaguggaccggggcaaucguagcggguacucuggaaucuucucaguagagggcaagaguuguauuaaccgcugcuuuuauguugaacucaucagagguaggaaggaggaaacugaggugcuguggaccagcaauuccaucgucguguucugugggacaucuggcacuuacggaaccggcucguggcccgauggggccgacauuaaccuuaugccuauauga

SEQ ID NO: 147337 - RNA, 1410 nt, Artificial Sequence
  derived and/or modified CDS sequence (opt3) from neuraminidase__InfluenzaA__ADK99275
augaaccccaaucagaagaucauuaccauaggcagcgugucccugacaaucucuacuauuugcuucuuuaugcaaaucgccguccucauuacgaccguuacacuucacuucaaacaguacgaguuuaacucaccuccaaauaaccaggugaugcugugugaaccgacuaucauagagagaaauaucaccgaaauuguauauuugacaaacaccacuaucgagaaggaaauuugccccaaauuagcuggguacaggaauuggaguaagccucagugugacaucacaggauucgcaccauuuagcaaagauaacuccauacggcugucugccgguggcgacauuugggugacccgcgagcccuaugucucgugcgauccugacaaguguuaccaauucgcgcuagggcagggaacgacucucaauaacgugcauucaaaugauaccguucgagaccguacaccauauagaacucugcuuaugaacgagcugggcgugcccuuucacuuggguaccaagcaggucugcaucgcuuggagcaguuccucuugucaugaugggaaagccuggcuccacgugugcauuacaggagacgauaagaaugcaaccgccagcuucaucuacaacggcaggcugguagacuccguugugucauggaguaaagaaauccugcggacgcaggagagcgaaugugucugcauuaauggcacuuguacaguggugaugaccgaugggucugcuuccggaaaggcagacacuaaaauacucuuuaucgaggaggguaagauuguccauacaucaaccuuaagcggcagugcccaacacguugaagagugcucuugcuauccucgcuacccaggggugagauguguaugcagggauaacuggaagggauccaaccggccgaucguggacauaaauauuaaagaccacagcaucgucucgucuuacguguguuccggccugguuggugauacgccccgcaagaacgacucaaguagcuccucucauugccuugauccuaauaacgaagaagggggacacggcgugaaaggcugggcuuucgacgaugggaaugacgucuggaugggacgaaccaucaacgagacaagcagauuggguuaugagacuuuuaaggugauugagggcuggucaaauccaaaaaguaagcugcagaucaacaggcagguaauuguugaucgggggaaucguuccggauacagcggcauauucucuguggaagguaaaucauguaucaaccgcugcuuuuaugucgagcuaauuagagggaggaaggaagagaccgaagugcucuggacaaguaauagcaucgucguguucuguggcacuuccggaaccuacggcacagggucuuggcccgacggagccgaucugaaccuuaugccuaucuga

SEQ ID NO: 147338 - RNA, 1410 nt, Artificial Sequence
  derived and/or modified CDS sequence (opt3) from neuraminidase__InfluenzaA__ADK99286
augaaccccaaucagaagaucauuaccauaggcagcgugucccugacaaucucuacuauuugcuucuuuaugcaaaucgccauucucaucacgaccgucacacuucacuucaaacaguacgaguuuaacccuccaccgaauaaccagguuacucccagagaaccuaccauaaucgagaggaauauuacagaaaucguguaucugaccaacacuacaauugagaaggaaaucuguccaaaauuggcugaguaccggaauuggucaaagccccagugcgacauaaccggguucgcaccuuuuaguaaagauaacagcauucgcuuauccgccggaggugacaucuggguaacgcgagagccauaugugucuugugaucccgacaagugcuaccaauucgcgcugggccaggggacuacccuaaauaacauucauucgaauaacacaguccgugauagaacuccuuauaggacccuccugaugaaugaacuuggagugccauuucaccugggcacaaagcagguuuguaucgcuuggucaagcaguuccugccaugacgguaaagccugguugcacguguguaucaccggggaugacaagaacgcaacggccucuuucauuuacaauggacggcucgucgauagcgugguauccuggucaaaagagauacugcgcacucaggaaagugagugcguuuguaucaacggcacaugcaccguggucaugacugacggcagcgcuucugggaaggcagauacaaaaauucuguuuaucgaggaaggaaagauagugcauaccuccacgcucucagguagcgcccaacacguggaggaauguaguugcuauccgagauaccccggcgucaggugcguuugucgggacaacuggaaggggucuaaucgcccuauuguggauaucaacaucaaagaccacuccauuguaagcucguacgugugcucuggauuagucggcgacaccccacgaaagaaugauuccucaaguagcucccauugucuggaccccaacaaugaggaaggugggcacggagugaaaggcugggcuuucgaugacggcaacgauguuuggauggggagaacaaucucugaaaagagcaggcuuggauaugagacuuuuaaagugauugaggguuggucaaauccuaagaguaaauugcagauaaaccggcaggucaucguggaccguggcaaucgcuccggguacagcggaauuuucucuguagagggcaagucaugcaucaacagauguuuuuauguugaacugaucaggggucggaaggaggaaaccgaggugcuauggacaaguaauagcauugucguguucugcgggacuuccggcaccuacggaacaggcucuuggccagauggggccgacauaaaccucaugcccaucuga

SEQ ID NO: 147339 - RNA, 1410 nt, Artificial Sequence; identical to SEQ ID NO: 145640
  derived and/or modified CDS sequence (opt3) from neuraminidase__InfluenzaA__ADK99297

SEQ ID NO: 147340 - RNA, 1410 nt, Artificial Sequence
  derived and/or modified CDS sequence (opt3) from neuraminidase__InfluenzaA__ADK99308
augaaccccaaucagaagaucauuaccauaggcagcgugucccugacaaucucuacuauuugcuucuuuaugcagaucgccauucucgucacgaccguuacacuucacuucaaacaguacgaguuuaacucaccuccaaauaaccaggugaugcugugugaaccgacuaucauagagagaaauaucaccgaaauuguauauuugacaaacaccacuaucgagaaggaaauuugccccaaauuagcugaguacaggaauuggaguaagccucagugugacaucacaggguucgcaccauuuagcaaagauaacuccauacggcugucugccggaggugacauuugggugacccgcgagcccuaugucucgugcgauccugacaaguguuaccaauucgcgcuaggccaggggacgacucucaauaacgugcauucaaauaacaccguucgagaucguacaccauauagaacucugcuuaugaaugaacugggaauccccuuucacuugggcaccaaacaggugugcauugcuuggagcaguuccucuugucaugacgguaaggccuggcuccacgucugcaucacaggggaugacaagaacgcaaccgccagcuucaucuacaauggaaggcugguggauuccguaguuucauggaguaaagacauucugcggacgcaggagagcgaaugugugugcauaaacggcacuuguacagucgugaugaccgauggcucugcuuccgggaaggcagacacuaaaauccucuuuauugaggagggaaagaucgugcauacaucaaccuuaagcgguagugcccaacacgucgaagagugcucuugcuauccucgcuacccaggcguuagaugugugugcagggauaacuggaagggguccaaucggccgauaguagacauuaacaucaaagaccacagcaucgugucgucuuacgucuguuccggacuggugggcgauacgccccgcaagaaugacucaaguagcuccucucauugccuugauccuaacaaugaagagggugggcacggaguuaaaggcugggcuuucgacgauggcaacgacguguggauggggcgaaccauuagcgaaaagucaagauugggauaugagacauuuaaagucaucgaggguuggaguaauccaaaguccaaacugcagauuaacaggcaagugauaguagaucggggcaaucguagcggguacucuggaaucuucucaguugaaggcaagaguuguauuaaccgcugcuuuuauguggagcuaaucagagguaggaaggaagagacugaaguccucuggaccagcaauuccaucguggucuucugugggacaucuggcacuuacggaaccggcucguggcccgacggggccaacauuaaucugaugccuauauga

SEQ ID NO: 147341 - RNA, 1413 nt, Artificial Sequence; identical to SEQ ID NO: 145509
  derived and/or modified CDS sequence (opt3) from neuraminidase__InfluenzaA__ADL14590

SEQ ID NO: 147342 - RNA, 1410 nt, Artificial Sequence; identical to SEQ ID NO: 146532
  derived and/or modified CDS sequence (opt3) from neuraminidase__InfluenzaA__ADL27992

SEQ ID NO: 147343 - RNA, 1410 nt, Artificial Sequence; identical to SEQ ID NO: 147171
  derived and/or modified CDS sequence (opt3) from neuraminidase__InfluenzaA__ADL28003

SEQ ID NO: 147344 - RNA, 1410 nt, Artificial Sequence; identical to SEQ ID NO: 147316
  derived and/or modified CDS sequence (opt3) from neuraminidase__InfluenzaA__ADL28014

SEQ ID NO: 147345 - RNA, 1410 nt, Artificial Sequence
  derived and/or modified CDS sequence (opt3) from neuraminidase__InfluenzaA__ADL28025
augaaccccaaucagaagaucauuaccauaggcagcgugucccugacaaucucuacuauuugcuucuuuaugcaaaucgccauucucaucacgaccgucacacuucacuucaaacaguacgaguuuaacucaccuccaaauaaccagguuaugcugugugaaccgacuauaaucgagagaaauauuaccgaaaucguguauuugacaaacaccacuauugagaagaaaaucugccccaaguuagcugaauacaggaauuggaguaaaccucagugugacauaacaggguucgcaccauuuagcaaggauaacuccauucggcugucugccggaggugacaucuggguaacccgcgagcccuaugugucgugcgauccugacaaguguuaccaauucgcgcuaggccaggggacgacucucaauaacguccauucaaauaacaccgugcgagaucguacaccauauagaacucugcuuaugaaugagcugggaguucccuuucacuugggcaccaaacaggugugcauugcuuggagcaguuccucuugucaugacgguaaggccuggcuccacgucugcaucacaggggaugacaaaaacgcaaccgccagcuucaucuacaauggaaggcugguggauuccguaguuucauggaguaaggaaauucugcggacgcaggagagcgaaugugugugcauaaacggcacuuguacagucgugaugaccgacggcucugcuuccgggaaagcagauacuaagauccucuuuauugaggagggaaagaucgugcauacaucaaccuuaagcgguagugcccaacacgucgaagagugcucuugcuauccucgcuacccaggcguuagaugugugugcagggacaacuggaaaggguccaaucggccgauaguagauauuaacaucaaggaccacagcaucgugucgucuuaccuguguuccggacuugucggcgacacgccccgcaaaaaugauucaaguagcuccucucauugcuuggacccuaacaaugaagagggugggcacggagugaagggcugggcuuucgaugacggcaacgauguuuggauggggcgaaccauuagcgaaaaaucaagacugggauaugagacauuuaaggugaucgaggguuggaguaauccaaaauccaagcuacagauuaacaggcaggucauaguggaccggggcaaucguagcggguacucuggaaucuucucaguagaaggcaagaguuguauuaaccgcugcuuuuauguugagcucaucagagguaggaaagaagagacugaagugcuguggaccagcaauuccaucgucguguucugugggacaucuggcacuuacggaaccggcucguggcccgauggggccgacauuaaccuuaugccuauauga

SEQ ID NO: 147346 - RNA, 1410 nt, Artificial Sequence; identical to SEQ ID NO: 146532
  derived and/or modified CDS sequence (opt3) from neuraminidase__InfluenzaA__ADL28036

SEQ ID NO: 147347 - RNA, 1410 nt, Artificial Sequence; identical to SEQ ID NO: 144647
  derived and/or modified CDS sequence (opt3) from neuraminidase__InfluenzaA__ADL28047

SEQ ID NO: 147348 - RNA, 1410 nt, Artificial Sequence; identical to SEQ ID NO: 145953
  derived and/or modified CDS sequence (opt3) from neuraminidase__InfluenzaA__ADL28058

SEQ ID NO: 147349 - RNA, 1410 nt, Artificial Sequence; identical to SEQ ID NO: 147324
  derived and/or modified CDS sequence (opt3) from neuraminidase__InfluenzaA__ADL28069

SEQ ID NO: 147350 - RNA, 1410 nt, Artificial Sequence; identical to SEQ ID NO: 147171
  derived and/or modified CDS sequence (opt3) from neuraminidase__InfluenzaA__ADL28080

SEQ ID NO: 147351 - RNA, 1410 nt, Artificial Sequence; identical to SEQ ID NO: 146532
  derived and/or modified CDS sequence (opt3) from neuraminidase__InfluenzaA__ADL28091

SEQ ID NO: 147352 - RNA, 1410 nt, Artificial Sequence
  derived and/or modified CDS sequence (opt3) from neuraminidase__InfluenzaA__ADL28102
augaaccccaaucagaagaucauuaccauaggcagcgugucccugacaaucucuacuauuugcuucuuuaugcagaucgccauucucaucacgaccgucacacuucacuucaaacaguacgaguuuaacucaccuccaaauaaccagguuaugcugugugaaccgacuauaaucgagagaaauauuaccgaaaucguguauuugacaaacaccacuauugagaaggaaaucugccccaaauuagcugaguacaggaauuggaguaagccucagugugacauaacaggguucgcaccauuuagcaaagauaacuccauucggcugucugccggaggugacaucuggguaacccgcgagcccuaugugucgugcgauccugacaaguguuaccaauucgcgcuaggccaggggacgacucucaauaacguccauucaaauaacaccgugcgagaucguacaccauauagaacucugcuuaugaaugaacugggaguucccuuucacuugggcaccaaacaggugugcauugcuuggagcaguuccucuugucaugacgguaaggccuggcuccacgucugcaucacaggggaugacaagaacgcaaccgccagcuucaucuacaauggaaggcugguggauuccguaguuucauggaguaaagacauucugcggacgcaggagagcgaaugugugugcauaaacggcacuuguacagucgugaugaccgauggcucugcuuccgggaaggcagacacuaaaauccucuuuauugaggagggaaagaucgugcauacaucaaccuuaagcgguagugcccaacacgucgaagagugcucuugcuauccucgcuacccaggcguuagaugugugugcagggauaacuggaagggguccaaucggccgauaguagacauuaacaucaaagaccacagcaucgugucgucuuacgucuguuccggacuggugggcgauacgccccgcaagaaugacucaaguagcuccucucauugccuugauccuaacaaugaagagggugggcacggaguuaaaggcugggcuuucgacgauggcaacgacguguggauggggcgaaccauuagcgaaaagucaagauugggauaugagacauuuaaagucaucgaggguuggaguaauccaaaguccaaacugcagauuaacaggcaagugauaguagaucggggcaaucguagcggguacucuggaaucuucucaguugaaggcaagaguuguauuaaccgcugcuuuuauguggagcuaaucagagguaggaaggaagagacugaaguccucuggaccagcaauuccaucguggucuucugugggacaucuggcacuuacggaaccggcucguggcccgacggggccgauauuaaccugaugccuauauga

SEQ ID NO: 147353 - RNA, 1410 nt, Artificial Sequence; identical to SEQ ID NO: 144647
  derived and/or modified CDS sequence (opt3) from neuraminidase__InfluenzaA__ADL28113

SEQ ID NO: 147354 - RNA, 1410 nt, Artificial Sequence
  derived and/or modified CDS sequence (opt3) from neuraminidase__InfluenzaA__ADL28129
augaaccccaaucagaagaucauuaccauaggcagcgugucccugacaaucucuacuauuugcuucuuuaugcaaaucgccauucucgucacgaccguuacacuucacuucaaacaguacgaguuuaacucaccuccaaauaaccaggugaugcugugugaaccgacuaucauagagagaaauaucaccgaaauuguauauuugacaaacaccacuaucgagaaggaaauuugccccaaauuagcugaguacaggaauuggaguaagccucagugugacaucacaggguucgcaccauuuagcaaagauaacuccauacggcugucugccggaggugacauuugggugacccgcgagcccuaugucucgugcgauccugacaaguguuaccaauucgcgcuaggccaggggacgacucucaauaacgugcauucaaauaacaccguucgagaucguacaccauauagaacucugcuuaugaaugaacugggagugcccuuucacuugggcaccaagcaggucugcaucgcuuggagcaguuccucuugucaugacgguaaagccuggcuccacgugugcauuacaggggaugacaagaacgcaaccgccagcuucaucuacaauggaaggcugguagauuccguugugucauggaguaaagacauccugcggacgcaggagagcgaaugugucugcauuaacggcacuuguacaguggugaugaccgauggcucugcuuccgggaaggcagacacuaaaauacucuuuaucgaggagggaaagauuguccauacaucaaccuuaagcgguagugcccaacacguugaagagugcucuugcuauccucgcuacccaggcgugagauguguaugcagggauaacuggaagggguccaaucggccgaucguggacauaaacauuaaagaccacagcaucgucucgucuuacguguguuccggacugguuggcgauacgccccgcaagaaugacucaaguagcuccucucauugccuugauccuaacaaugaagagggugggcacggagugaaaggcugggcuuucgacgauggcaacgacgucuggauggggcgaaccaucagcgaaaagucaagauugggauaugagacauuuaaagugauugaggguuggaguaauccaaaguccaaacugcagaucaacaggcagguaauuguugaucggggcaaucguagcggguacucuggaauauucucaguggaaggcaagaguuguaucaaccgcugcuuuuaugucgagcuaauuagagguaggaaggaagagacugaaauccucuggaccagcaauuccaucguggucuucugugggacaucuggcacuuacggaaccggcucguggcccgacggggccaacauuaaucugaugccuauauga

SEQ ID NO: 147355 - RNA, 1410 nt, Artificial Sequence
  derived and/or modified CDS sequence (opt3) from neuraminidase__InfluenzaA__ADL28140
augaaccccaaucagaagaucauuaccauaggcagcgugucccugacaaucucuacuauuugcuucuuuaugcaaaucgccauucucaucacgaccgucacacuucacuucaaacaguacgaguuuaacucaccuccaaauaaccagguuaugcugugugaaccgacuauaaucgagagaaauauuaccgaaaucguguauuugacaaacaccacuauugagaaggaaaucugccccaaauuagcugaguacaggaauuggaguaagccucagugugacauaacaggguucgcaccauuuagcaaagauaacuccauucggcugucugccggaggugacaucuggguaacccgcgagcccuaugugucgugcgauccugacaaguguuaccaauucgcgcuaggccaggggacgacucucaauaacguccauucaaauaacaccgugcgagaucguacaccauauagaacucugcuuaugaaugaacugggaguucccuuucacuugggcaccaaacaggugugcauugcuuggagcaguuccucuugucaugacgguaaggccuggcuccacgucugcaucacaggggaugacaagaacgcaaccgccagcuucaucuacaauggaaaacugguggauuccguaguuucauggaguaaggagauucugaggacgcaggaaagcgagugugugugcauaaacggcacuuguacagucgugaugaccgacggcucugcuuccgggaaagcagauacuaagauccucuuuauugaggaaggaaagaucgugcauacaucaaccuuaagcgguagugcccaacacgucgaggaaugcucuugcuauccucgguacccaggcguucgcugugugugcagagacaacuggaaaggguccaauaggccgauaguagauauuaacaucaaggaccacagcaucgugucgucuuacgucuguuccggacuggugggcgacacgccccggaaaaaugauucaaguagcuccucucauugccuugacccuaacaaugaggaaggugggcacggaguuaagggcugggcuuucgaugacggcaacgauguguggauggggcgcaccauuagcgagaaaucacgauugggauaugagacauuuaaggucaucgaagguuggaguaauccaaaauccaagcugcagauuaacagacaggugauaguagacaggggcaaucggagcggguacucuggaaucuucucaguugagggcaagaguuguauuaaccguugcuuuuauguggaacuaauccgcgguagaaaagaggaaacugagguccucuggaccagcaauuccaucguggucuucugugggacaucuggcacuuacggaaccggcucguggcccgauggggccaacauuaaucugaugccuauauga

SEQ ID NO: 147356 - RNA, 1410 nt, Artificial Sequence; identical to SEQ ID NO: 146532
  derived and/or modified CDS sequence (opt3) from neuraminidase__InfluenzaA__ADL28151

SEQ ID NO: 147357 - RNA, 1410 nt, Artificial Sequence; identical to SEQ ID NO: 145953
  derived and/or modified CDS sequence (opt3) from neuraminidase__InfluenzaA__ADL28162

SEQ ID NO: 147358 - RNA, 1410 nt, Artificial Sequence; identical to SEQ ID NO: 147171
  derived and/or modified CDS sequence (opt3) from neuraminidase__InfluenzaA__ADL28173

SEQ ID NO: 147359 - RNA, 1410 nt, Artificial Sequence; identical to SEQ ID NO: 146532
  derived and/or modified CDS sequence (opt3) from neuraminidase__InfluenzaA__ADL28184

SEQ ID NO: 147360 - RNA, 1410 nt, Artificial Sequence
  derived and/or modified CDS sequence (opt3) from neuraminidase__InfluenzaA__ADL28195
augaaccccaaucagaagaucauuaccauaggcagcgugucccugacaaucucuacuauuugcuucuuuaugcaaaucgccauucucaucacgaccgucacacuucacuucaaacaguacgaguuuaacucaccuccaaauaaccagguuaugcugugugaaccgacuauaaucgagagaaauauuaccgaaaucguguauuugacaaacaccacuauugagaaggaaaucugccccaaauuagcugaguacaggaauuggaguaagccucagugugacauaacaggguucgcaccauuuagcaaagauaacuccauucggcugucugccggaggugacaucuggguaacccgcgagcccuaugugucgugcgauccugacaaguguuaccaauucgcgcuaggccaggggacgacucucaauaacguccauucaaauaacaccgugcgagaucguacaccauauagaacucugcuuaugaaugaacugggaguucccuuucacuugggcaccaaacaggugugcauugcuuggagcaguuccucuugucaugacgguaaggccuggcuccacgucugcaucacaggggaugacaagaacgcaaccgccagcuucaucuacaauggaaggcugguggauuccguaguuucauggaguaaagagauucugcggacgcaggaaagcgagugugugugcgucaacggcacuuguacaguggugaugaccgacggcucugcuuccgggaaggcagauacuaaaauacucuuuaucgaggaaggaaagauuguccauacaucaaccuuaagcgguagugcccaacacguugaggaaugcucuugcuauccucgcuacccaggcgugagauguguaugcagggacaacuggaagggguccaaucggccgaucguggauauaaacauuaaagaccacagcaucgucucgucuuacguguguuccggacugguuggcgacacgccccgcaagaaugauucaaguagcuccucucauugccuugacccuaacaaugaggaaggugggcacggagugaaaggcugggcuuucgaugacggcaacgaugucuggauggggcgaaccaucagcgagaagucaagauugggauaugagacauuuaaagugauugaagguuggaguaauccaaaguccaaacugcagaucaacaggcagguaauuguugaccggggcaaucguagcggguacucuggaauauucucaguggagggcaagaguuguaucaaccgcugcuuuuaugucgaacuaauuagagguaggaaggaggaaacugaggugcucuggaccagcaauuccaucgucguguucugugggacaucuggcacuuacggaaccggcucguggcccgauggggccgacaucaaccugaugccuauuuga

SEQ ID NO: 147361 - RNA, 1410 nt, Artificial Sequence; identical to SEQ ID NO: 147321
  derived and/or modified CDS sequence (opt3) from neuraminidase__InfluenzaA__ADL28206

SEQ ID NO: 147362 - RNA, 1410 nt, Artificial Sequence; identical to SEQ ID NO: 145640
  derived and/or modified CDS sequence (opt3) from neuraminidase__InfluenzaA__ADL28217

SEQ ID NO: 147363 - RNA, 1410 nt, Artificial Sequence; identical to SEQ ID NO: 146532
  derived and/or modified CDS sequence (opt3) from neuraminidase__InfluenzaA__ADL28228

SEQ ID NO: 147364 - RNA, 1410 nt, Artificial Sequence; identical to SEQ ID NO: 147171
  derived and/or modified CDS sequence (opt3) from neuraminidase__InfluenzaA__ADL28239

SEQ ID NO: 147365 - RNA, 1410 nt, Artificial Sequence; identical to SEQ ID NO: 145953
  derived and/or modified CDS sequence (opt3) from neuraminidase__InfluenzaA__ADL28250

SEQ ID NO: 147366 - RNA, 1410 nt, Artificial Sequence; identical to SEQ ID NO: 147171
  derived and/or modified CDS sequence (opt3) from neuraminidase__InfluenzaA__ADL28261

SEQ ID NO: 147367 - RNA, 1410 nt, Artificial Sequence; identical to SEQ ID NO: 146532
  derived and/or modified CDS sequence (opt3) from neuraminidase__InfluenzaA__ADL28373

SEQ ID NO: 147368 - RNA, 1410 nt, Artificial Sequence; identical to SEQ ID NO: 144651
  derived and/or modified CDS sequence (opt3) from neuraminidase__InfluenzaA__ADL28387

SEQ ID NO: 147369 - RNA, 1410 nt, Artificial Sequence
  derived and/or modified CDS sequence (opt3) from neuraminidase__InfluenzaA__ADL28391
augaaccccaaucagaagaucauuaccauaggcagcgugucccugacaaucucuacuauuugcuucuuuaugcagaucgccauucucaucacgaccgucacacuucacuucaaacaguacgaguuuaacucaaguccuaauaaccagguuaugcugugugaaccaacuauaaucgagagaaauauuaccgaaaucguguauuugacaaacaccacuauugagaaggaaaucugcccgaaauuagcugaguacaggaauuggagcaagccccagugugacauaacaggguucgcaccuuuuuccaaagauaacucuauucggcugucggccggaggugacaucuggguaacccgcgugccauaugucucaugcgaucccgacaaguguuaccaauucgcgcuaggccaggggacgacucucaauaacgugcauagcaauaacaccguucgagaucguacaccuuauagaacucugcuuaugaaugagcugggagugccauuucacuugggcaccaagcaggucugcauugcuuggaguuccucuagcugucaugacgguaaagccuggcuccacgugugcaucacaggggaugacaagaacgcaaccgccuccuucaucuacaauggaaggcugguagauucaauuguuaguuggagcaaagaaauacugcggacgcaggagucugaaugugugugcaucaacggcacuuguacagucgugaugaccgacggcuccgcuucagggaaggcagauacuaaaauucucuuuaucgaggagggaaagauagugcauacaagcaccuuaagugguucugcccaacacgucgaagagugcuccugcuauccccgcuacccuggcguuagaugugugugcagggacaacuggaaggggagcaaucggccaauuguagauaucaacaucaaagaccacucgauugugucuuccuacgucuguucaggacuggugggcgacacgccgcgcaagaaugauaguagcuccucuagccauugccuugaccccaacaaugaagagggugggcacggaguuaaaggcugggcuuucgaugacggcaacgauguguggauggggcgaaccaucucagaaaagaguagauugggauaugagacauuuaaagucauugaggguugguccaauccuaagagcaaacugcagauaaacaggcaagugaucguagaccggggcaaucguucuggguacucaggaauuuucaguguugaaggcaagagcuguaucaaccgcugcuuuuauguggagcuaaucagagguaggaaggaagagacugaaguccucuggaccuccaauucuauuguggucuucugugggacaucgggcacuuacggaaccggcagcuggccagauggggccgacauaaaccugaugcccaucuga

SEQ ID NO: 147370 - RNA, 1410 nt, Artificial Sequence
  derived and/or modified CDS sequence (opt3) from neuraminidase__InfluenzaA__ADL28395
augaaccccaaucagaagaucauuaccauaggcagcgugucccugacaaucgccacuauuugcuuccucaugcaaaucgcuauucuugucacgaccguuacacugcacuuuaaacaguacgaguguaacucuccuccaaauaaccaggugauguugugcgaaccggcaaucauagagagaaauaucacugaaauuguauauuuaaccaacacaaccaucgagaaggaaauuugucccaaacuggccgaguacaggaauuggucaaagccucagugcaacaucacuggguucgcgccauuuaguaaagacaauagcauacggcuauccgcuggaggugauauuugggugacacgcguccccuaugugucuugugacccugauaagugcuaccaauucgcccucggccaggggaccacgcugaacaauggacauucgaacgacacuguucacgaucgaaccccauaucguacacuucugaugaaugaguugggcgugcccuuucaucucgguacuagacaggucuguaucgcauggucaagcaguuccugccacgacgggaaggccuggcugcauguguguguaaccggagaugacgaaaacgcuacagcaucuuucauuuacaauggcaggcugguugauagcaucggcuccuggaguaaaaagauccuccggacccaggagucagaaugcguguguauuaacgggacgugcacugucgugaugacagacggaagcgccucugguaaagcugauaccaagauauuauuuaucgaggagggcaaaauugugaacaucuccacucugucagggagcgcccaacacgucgaagagugcaguuguuauccucgcuacccaggaguuagaugcguguguagggacaauuggaagggcucuaaccggccgauaguagauauuaaugugaaggacuacuccaucgucagcucguaugugugcucuggucuuguuggggacacaccccgcaaaaacgauuccuucucaaguagccacuguuuggacccuaauaacgaagagggaggccauggcgugaaggggugggcguuugaugacggaaaugaugucuggaugggucgaaccaucuccgaaaaauucagaucuggcuacgagacguuuaaggugauugagggguggagcaaaccaaacucaaagcugcagaucaauaggcagguaauuguugaacggggaaaccguaguggcuauuccgguauauucagcguggaggggaaaucuugcaucaaucgcuguuuuuacgucgaacuaauuagaggcaggaaggaggaaaccgaggugugguggacaucaaacaguaucgucguguucugcggaacuagcggcaccuaugggacaggauccuggcccgacggugcagauaucaaucucaugccuauuuga

SEQ ID NO: 147371 - RNA, 1410 nt, Artificial Sequence; identical to SEQ ID NO: 144786
  derived and/or modified CDS sequence (opt3) from neuraminidase__InfluenzaA__ADL29675

SEQ ID NO: 147372 - RNA, 1410 nt, Artificial Sequence; identical to SEQ ID NO: 144786
  derived and/or modified CDS sequence (opt3) from neuraminidase__InfluenzaA__ADL29685

SEQ ID NO: 147373 - RNA, 1410 nt, Artificial Sequence
  derived and/or modified CDS sequence (opt3) from neuraminidase__InfluenzaA__ADL29695
augaaccccaaucagaagaucauuaccauaggcagcgugugcaugacaaucgggauggccaaccugauucuccaaaucggaaauauuaucuccauauggaucucucacucaauucagcuugguaaccagaaucagaucgagacuuguaaccaaagugucauuacguacgaaaauaacaccuggguuaaucagacauaugugaacaucagcaauacuaacuucgcugcaggccaguccguagugucugucaaacuggccggaaauucgucauugugcccugugagcggaugggcgauauacaguaaggacaacuccauuagaaucggcucuaaaggugauguuuuugugauuagggagccauucaucagcuguuccccguuagaaugccggaccuuuuuccugacacagggggcucuacucaaugacaagcauucaaacggaaccaucaaagaucgcagucccuaucgaacucugaugagcuguccuauuggcgaggucccaucucccuacaacucccguuuugaaucaguggccuggagcgcaagugccugccacgacggcauaaauuggcuuacaaucgggauuucuggaccugauaacggugcuguagcaguucugaaguauaauggcaucauaaccgacacgauuaaguccuggagaaacaauaucuugaggacucaagagagcgagugugccugcgugaacgggucguguuucaccgucaugacagauggaccaucugacggccaggcuuccuacaaaaucuuucggauugaaaaggguaaaaucgugaagucaguggagaugaaugcccccaacuaucauuacgaagagugcaguuguuacccugauagcuccgagauuacuugcgucugccgcgacaauuggcacgggucuaacagaccauggguuagcuucaaucagaaccucgaauaucagauaggauacaucuguucaggcauuuuuggcgauaauccgaggcccaacgacaaaaccgggaguugcggaccuguguccagcaauggugcgaacggcguaaagggguucucuuuuaaguauggaaacggcguguggaucggucggacaaaaucaaucaguagccgcaauggguucgagaugauuugggauccaaacggcuggaccggaacggacaauaacuuuuccauaaagcaagacaucgucggcauuaaugaauggucuggguacucggggagcuucgugcagcaucccgagcugacuggucuggauuguauccgaccuugcuucuggguugaacucauuagaggcaggccaaaagagaacacaaucuggaccuccgggucaaguauaucuuuuuguggagugaauagcgacaucgucggcugguccuggcccgauggugcagaguuaccguucacuauugacaaguga

SEQ ID NO: 147374 - RNA, 1410 nt, Artificial Sequence; identical to SEQ ID NO: 144786
  derived and/or modified CDS sequence (opt3) from neuraminidase__InfluenzaA__ADL29705

SEQ ID NO: 147375 - RNA, 1410 nt, Artificial Sequence; identical to SEQ ID NO: 147373
  derived and/or modified CDS sequence (opt3) from neuraminidase__InfluenzaA__ADL29733

SEQ ID NO: 147376 - RNA, 1410 nt, Artificial Sequence; identical to SEQ ID NO: 144786
  derived and/or modified CDS sequence (opt3) from neuraminidase__InfluenzaA__ADL29743

SEQ ID NO: 147377 - RNA, 1410 nt, Artificial Sequence
  derived and/or modified CDS sequence (opt3) from neuraminidase__InfluenzaA__ADL29753
augaaccccaaucagaagaucauuaccauaggcagcgugugcauggccaucgggauggcuaaccugauucuccaaaucggaaauauuaucuccauauggaucucucacucaauucagcuugguaaccagaaucagaucgagacauguaaccaaagugucauuacuuacgaaaauaacacguggguuaaucagaccuaugugaacaucagcaauacaaacuucgcagccggccaguccguagugucugucaaacuggcgggaaauucgucauugugcccugugagcggaugggcuauauacaguaaggacaacuccauuagaaucggcucuaaaggugauguuuuugugauuagggagccauucaucagcuguuccccguuagaaugccggaccuuuuuccugacucagggggcccuacucaaugacaagcauucaaacggaacaaucaaagaucgcagucccuaucgaacccugaugagcuguccuauuggcgaggucccaucucccuacaacucccguuuugaaucaguggcauggagcgccagugcuugccacgacggcauaaauuggcuuacuaucgggauuucuggaccugauaacggugcaguagccguucugaaguauaauggcaucauaacagacaccauuaaguccuggagaaacaauaucuugaggacgcaagagagcgagugugcuugcgugaacgggucguguuucacugucaugaccgauggaccaucugacggccaggccuccuacaaaaucuuucggauugaaaaggguaaaaucgugaagucaguggagaugaaugcgcccaacuaucauuacgaagagugcaguuguuacccugauagcuccgagauuacaugcgucugccgcgacaauuggcacgggucuaacagaccauggguuagcuucaaucagaaccucgaauaucagauaggauacaucuguucaggcauuuuuggcgauaauccgaggcccaacgacaaaacugggaguugcggaccuguguccagcaauggugcaaacggcguaaagggguucucuuuuaaguauggaaacggcguguggaucggucggaccaaaucaaucaguagccgcaauggguucgagaugauuugggauccaaacggcuggacaggaaccgacaauaacuuuuccauaaagcaagacaucgucggcauuaaugaauggucuggguacucggggagcuucgugcagcaucccgagcugacgggucuggauuguauccgaccuugcuucuggguugaacucauuagaggcaggccaaaagagaacacuaucuggacauccgggucaaguauaucuuuuuguggagugaauagcgacaucgucggcugguccuggcccgauggugccgaguuaccguucaccauugacaaguga

SEQ ID NO: 147378 - RNA, 1410 nt, Artificial Sequence; identical to SEQ ID NO: 144786
  derived and/or modified CDS sequence (opt3) from neuraminidase__InfluenzaA__ADL29763

SEQ ID NO: 147379 - RNA, 1410 nt, Artificial Sequence; identical to SEQ ID NO: 147373
  derived and/or modified CDS sequence (opt3) from neuraminidase__InfluenzaA__ADL29773

SEQ ID NO: 147380 - RNA, 1410 nt, Artificial Sequence; identical to SEQ ID NO: 144786
  derived and/or modified CDS sequence (opt3) from neuraminidase__InfluenzaA__ADL29783

SEQ ID NO: 147381 - RNA, 1410 nt, Artificial Sequence; identical to SEQ ID NO: 147373
  derived and/or modified CDS sequence (opt3) from neuraminidase__InfluenzaA__ADL29882

SEQ ID NO: 147382 - RNA, 1410 nt, Artificial Sequence
  derived and/or modified CDS sequence (opt3) from neuraminidase__InfluenzaA__ADL32020
augaaccccaaucagaagaucauuaccauaggcagcgugugcaugacaaucgggauggccaaccugauucuccaaaucggaaauauuaucuccacuuggauaucucacucaauccagcuugguaaccagaaucagauugagacguguaaccaaagugucaucaccuacgaaaauaacacauggguuaaucagacuuaugugaacauuagcaauaccaacuucgcugcaggccaguccguagugucugucaaacuggccggaaauucgucauugugcccugugagcggaugggcgaucuacaguaaggacaacuccauaagaauuggcucuaaaggugauguuuuugugaucagggagccauucauuagcuguuccccguuagaaugccggacauuuuuccugacccagggggcucuacucaaugacaagcauucaaacggaacuaucaaagaucgcagucccuaucgaacacugaugagcuguccuaucggcgaggucccaucucccuacaacucccguuuugaaucaguggccuggagcgcaagugccugccacgacggcauuaauuggcuuaccauagggaucucuggaccugauaacggugcuguagcaguucugaaguauaauggcauuaucacggacacuauaaaguccuggagaaacaauauuuugaggacccaagagagcgagugugccugcgugaacgggucguguuucacagucaugacugauggaccaucugacggccaggcuuccuacaaaaucuuucggaucgaaaaggguaaaauugugaagucaguggagaugaaugcccccaacuaucauuacgaagagugcaguuguuacccugauagcuccgagauuaccugcgucugccgcgacaauuggcacgggucuaacagaccauggguuagcuucaaucagaaccucgaauaucagaucggauacauauguucaggcaucuuuggcgauaauccgaggcccaacgacaaaacagggaguugcggaccuguguccagcaauggugcgaacggcguaaagggguucucuuuuaaguauggaaacggcguguggauuggucggaccaaaucaaucaguagccgcaauggguucgagaugaucugggauccaaacggcuggacgggaacugacaauaacuuuuccauuaagcaagacauagucggcaucaaugaauggucuggguacucggggagcuucgugcagcaucccgagcugacaggucuggauuguauucgaccuugcuucuggguugaacucaucagaggcaggccaaaagagaacaccauuuggacuuccgggucaaguaucucuuuuuguggagugaauagcgacacagucggcugguccuggcccgauggugcagaguuaccguucaccauagacaaguga

SEQ ID NO: 147383 - RNA, 1410 nt, Artificial Sequence; identical to SEQ ID NO: 147373
  derived and/or modified CDS sequence (opt3) from neuraminidase__InfluenzaA__ADL32030

SEQ ID NO: 147384 - RNA, 1410 nt, Artificial Sequence; identical to SEQ ID NO: 144786
  derived and/or modified CDS sequence (opt3) from neuraminidase__InfluenzaA__ADL32040

SEQ ID NO: 147385 - RNA, 1410 nt, Artificial Sequence; identical to SEQ ID NO: 144786
  derived and/or modified CDS sequence (opt3) from neuraminidase__InfluenzaA__ADL32050

SEQ ID NO: 147386 - RNA, 1410 nt, Artificial Sequence; identical to SEQ ID NO: 144786
  derived and/or modified CDS sequence (opt3) from neuraminidase__InfluenzaA__ADL32060

SEQ ID NO: 147387 - RNA, 1410 nt, Artificial Sequence; identical to SEQ ID NO: 144786
  derived and/or modified CDS sequence (opt3) from neuraminidase__InfluenzaA__ADL32093

SEQ ID NO: 147388 - RNA, 1410 nt, Artificial Sequence; identical to SEQ ID NO: 144786
  derived and/or modified CDS sequence (opt3) from neuraminidase__InfluenzaA__ADL32117

SEQ ID NO: 147389 - RNA, 1410 nt, Artificial Sequence; identical to SEQ ID NO: 144786
  derived and/or modified CDS sequence (opt3) from neuraminidase__InfluenzaA__ADL32347

SEQ ID NO: 147390 - RNA, 1410 nt, Artificial Sequence
  derived and/or modified CDS sequence (opt3) from neuraminidase__InfluenzaA__ADL32357
augaaccccaaucagaagaucauuaccauaggcagcgugugcaugacaaucgggauggccaaccugauucuccaaaucggaaauauuaucuccauauggaucucucacucaauucagcuugguaaccagaaucagaucgagacuuguaaccaaagugucauuacguacgaaaauaacaccuggguuaaucagacauaugugaacaucagcaauacuaacuucgcugcaggccaguccguagugucugucaaacuggccggaaauucgucauugugcccugugagcggaugggcgauauacaguaaggacaacuccauuagaaucggcucuaaaggugauguuuuugugauuagggagccauucaucagcuguuccccguuagaaugccggaccuuuuuccugacacagggggcucuacucaaugacaagcauucaaacggaaccaucaaagaucgcagucccuaucgaacucugaugagcuguccuauuggcgaggucccaucucccuacaacucccguuuugaaucaguggccuggagcgcaagugccugccacgacggcauaaauuggcuuacaaucgggauuucuggaccugauaacggugcuguagcaguucugaaguauaauggcaucauaaccgacacgauuaaguccuggagaaacaauaucuugaggacucaagagagcgagugugccugcgugaacgggucguguuucaccgucaugacagauggaccaucugacggccaggcuuccuacaaaaucuuucggauugaaaaggguaaaaucgugaagucaguggagaugaaugcccccaacuaucauuacgaagagugcaguuguuacccugauagcuccgagauuacuugcgucugccgcgacaauuggcacgggucuaacagaccauggguuagcuucaaucagaaccucgaauaucagauaggauacaucuguucaggcauuuuuggcgauaauccgaggcccaacgacaaaaccgggaguugcggaccuguguccagcaauggugcgaacggcguaaagggguucucuuuuaaguauggaaacggcguguggaucggucggacaaaaucaaucaguagccgcaauggguucgagaugauuugggauccaaacggcuggaccggaacggacaauaacuuuuccauaaagcaagacaucgucggcauuaaugaauggucuggguacucggggagcuucgugcagcaucccgagcugacuggucuggauuguauccgaccuugcuucuggguugaacucauuagaggcaggccaaaagagaacacaaucuggaccuccgggucaaguauaucuuuuuguggagugaauagcgacacugucggcugguccuggcccgauggugcagaguuaccguucacaguggacaaguga

SEQ ID NO: 147391 - RNA, 1410 nt, Artificial Sequence; identical to SEQ ID NO: 144786
  derived and/or modified CDS sequence (opt3) from neuraminidase__InfluenzaA__ADL32367

SEQ ID NO: 147392 - RNA, 1410 nt, Artificial Sequence; identical to SEQ ID NO: 144786
  derived and/or modified CDS sequence (opt3) from neuraminidase__InfluenzaA__ADL32377

SEQ ID NO: 147393 - RNA, 1410 nt, Artificial Sequence; identical to SEQ ID NO: 144786
  derived and/or modified CDS sequence (opt3) from neuraminidase__InfluenzaA__ADL32387

SEQ ID NO: 147394 - RNA, 1410 nt, Artificial Sequence; identical to SEQ ID NO: 144786
  derived and/or modified CDS sequence (opt3) from neuraminidase__InfluenzaA__ADL32397

SEQ ID NO: 147395 - RNA, 1410 nt, Artificial Sequence; identical to SEQ ID NO: 144786
  derived and/or modified CDS sequence (opt3) from neuraminidase__InfluenzaA__ADL32407

SEQ ID NO: 147396 - RNA, 1410 nt, Artificial Sequence; identical to SEQ ID NO: 144786
  derived and/or modified CDS sequence (opt3) from neuraminidase__InfluenzaA__ADL32417

SEQ ID NO: 147397 - RNA, 1410 nt, Artificial Sequence
  derived and/or modified CDS sequence (opt3) from neuraminidase__InfluenzaA__ADL32427
augaaccccaaucagaagaucauuaccauaggcagcgugugcaugacaaucgggauggccaaccugauucuccaaaucggaaauauuaucuccauauggaucucucacucaauucagcuugguaaccagaaucagaucgagacuuguaaccaaagugucauuacguacgaaaauaacaccuggguuaaucagacauaugugaacaucagcaauacuaacuucgcugcaggccaguccguagugucugucaaacuggccggaaauucgucauugugcccugugagcggaugggcgauauacaguaaggacaacuccauuagaaucggcucuaaaggugauguuuuugugauuagggagccauucaucagcuguuccccguuagaaugccggaccuuuuuccugacacagggggcucuacucaaugacaagcauucaaacggaaccaucaaagaucgcagucccuaucgaacucugaugagcuguccuauuggcgaggucccaucucccuacaacucccguuuugaaucaguggccuggagcgcaagugccugccacgacggcauaaauuggcuuacaaucgggauuucuggaccugauaacggugcuguagcaguucugaaguauaauggcaucauaaccgacacgauuaaguccuggagaaacaauaucuugaggacucaagagagcgagugugccugcgugaacgggucguguuucaccgucaugacagauggaccaucugacggccaggcuuccuacaaaaucuuucggauugaaaaggguaaaaucgugaagucaguggagaugaaugcccccaacuaucauuacgaagagugcaguuguuacccugauagcuccgagauuacuugcgucugccgcgacaauuggcacgggucuaacagaccauggguuagcuucaaucagaaccucgaauaucagauaggauacaucuguucaggcauuuuuggcgauaauccgaggcccaacgacaaaaccgggaguugcggaccuguguccagcaauggugcgaacggcguaaagggguucucuuuuaaguauggaaacggcguguggaucggucggacaaaaucaaucaguagccgcaauggguucgagaugauuugggauccaaacggcuggaccggaacggacaauaacuuuuccauaaagcaagacaucgucggcauuaaugaauggucuggguacucggggagcuucgugcagcaucccgagcugacuggucuggauuguauccgaccuugcuucuggguugaacucauuagaggcaggccaaaagagaagacaaucuggaccuccgggucaauaaucaguuuuuguggagugaacucugacacugucggcuggagcuggcccgauggugcagaguuaccguucacaauugacaaauga

SEQ ID NO: 147398 - RNA, 1410 nt, Artificial Sequence; identical to SEQ ID NO: 144786
  derived and/or modified CDS sequence (opt3) from neuraminidase__InfluenzaA__ADL32447

SEQ ID NO: 147399 - RNA, 1410 nt, Artificial Sequence
  derived and/or modified CDS sequence (opt3) from neuraminidase__InfluenzaA__ADL32457
augaaccccaaucagaagaucauuaccauaggcagcgugugcaugacaaucgggauggccaaccugauucuccaaaucggaaauauuaucuccauauggaucucucacucaauucagcuugguaaccagaaucagaucgagacuuguaaccaaagugucauuacguacgaaaauaacaccuggguuaaucagacauaugugaacaucagcaauacuaacuucgcugcaggccaguccguagugucugucaaacuggccgggaauagcucauugugcccugugagcggaugggcgauauacaguaaggacaaauccauuagaaucggcucuaagggugauguuuuugugauuagggagccauucaucagcuguuccccguuagaaugccggaccuuuuuccugacacagggggcucuacucaacgacaaacauucaaauggaaccaucaaggaucgcagucccuaucgaacucugaugagcuguccuauuggcgaggucccaucucccuacaacucccguuuugaaucaguggccuggagcgcaagugccugccacgacggcauaucuuggcuuacaaucgggauuuccggaccugauaacggugcuguagcaguucugaaguauaauggcaucauaaccgacacgauuaaaagcuggagaaacaauaucuugaggacucaagagucggagugugccugcgugaacgggucuuguuucaccgucaugacagauggaccauccgacggccaggcuucauacaagaucuuucggauugaaaaagguaagaucgugaaaaguguggagaugaaugcccccaacuaucauuacgaagagugcagcuguuacccugauuccucugagauuacuugcgucugccgcgacaauuggcacgggagcaacagaccauggguuucauucaaucagaaccucgaauaucagauaggauacaucuguaguggcauuuuuggcgauaauccgaggcccaacgacaagaccggguccugcggaccugugagcucuaauggugcgaacggcguaaagggguucucauuuaaauauggaaauggcguguggaucggucggacaaagaguaucagcucccgcaacggguucgagaugauuugggauccaaacggcuggaccggaacggacaauaacuuuucuauaaaacaagacaucgucggcauuaaugaauggucgggguacagcggauccuucgugcagcaucccgagcugacuggucuggauuguauccgaccuugcuucuggguugaacucauuagaggcaggccaaaggagaacacaaucuggaccucagggaguucuauaucguuuuguggaguguccucagacacugucggcuggagcuggcccgauggugcagaguuaccguucacaaucgacaaauga

SEQ ID NO: 147400 - RNA, 1410 nt, Artificial Sequence; identical to SEQ ID NO: 145963
  derived and/or modified CDS sequence (opt3) from neuraminidase__InfluenzaA__ADL32487

SEQ ID NO: 147401 - RNA, 1410 nt, Artificial Sequence; identical to SEQ ID NO: 144786
  derived and/or modified CDS sequence (opt3) from neuraminidase__InfluenzaA__ADL32497

SEQ ID NO: 147402 - RNA, 1410 nt, Artificial Sequence; identical to SEQ ID NO: 144786
  derived and/or modified CDS sequence (opt3) from neuraminidase__InfluenzaA__ADL32507

SEQ ID NO: 147403 - RNA, 1410 nt, Artificial Sequence; identical to SEQ ID NO: 146248
  derived and/or modified CDS sequence (opt3) from neuraminidase__InfluenzaA__ADL32517

SEQ ID NO: 147404 - RNA, 1410 nt, Artificial Sequence; identical to SEQ ID NO: 145963
  derived and/or modified CDS sequence (opt3) from neuraminidase__InfluenzaA__ADL32527

SEQ ID NO: 147405 - RNA, 1410 nt, Artificial Sequence; identical to SEQ ID NO: 144786
  derived and/or modified CDS sequence (opt3) from neuraminidase__InfluenzaA__ADL32537

SEQ ID NO: 147406 - RNA, 1410 nt, Artificial Sequence; identical to SEQ ID NO: 145673
  derived and/or modified CDS sequence (opt3) from neuraminidase__InfluenzaA__ADL32547

SEQ ID NO: 147407 - RNA, 1410 nt, Artificial Sequence; identical to SEQ ID NO: 146137
  derived and/or modified CDS sequence (opt3) from neuraminidase__InfluenzaA__ADL32673

SEQ ID NO: 147408 - RNA, 1410 nt, Artificial Sequence; identical to SEQ ID NO: 144786
  derived and/or modified CDS sequence (opt3) from neuraminidase__InfluenzaA__ADL32683

SEQ ID NO: 147409 - RNA, 1410 nt, Artificial Sequence; identical to SEQ ID NO: 144776
  derived and/or modified CDS sequence (opt3) from neuraminidase__InfluenzaA__ADL32693

SEQ ID NO: 147410 - RNA, 1410 nt, Artificial Sequence; identical to SEQ ID NO: 146009
  derived and/or modified CDS sequence (opt3) from neuraminidase__InfluenzaA__ADL32703

SEQ ID NO: 147411 - RNA, 1410 nt, Artificial Sequence; identical to SEQ ID NO: 144776
  derived and/or modified CDS sequence (opt3) from neuraminidase__InfluenzaA__ADL32713

SEQ ID NO: 147412 - RNA, 1410 nt, Artificial Sequence; identical to SEQ ID NO: 144786
  derived and/or modified CDS sequence (opt3) from neuraminidase__InfluenzaA__ADL32723

SEQ ID NO: 147413 - RNA, 1410 nt, Artificial Sequence; identical to SEQ ID NO: 146467
  derived and/or modified CDS sequence (opt3) from neuraminidase__InfluenzaA__ADL32733

SEQ ID NO: 147414 - RNA, 1410 nt, Artificial Sequence; identical to SEQ ID NO: 146467
  derived and/or modified CDS sequence (opt3) from neuraminidase__InfluenzaA__ADL32743

SEQ ID NO: 147415 - RNA, 1410 nt, Artificial Sequence
  derived and/or modified CDS sequence (opt3) from neuraminidase__InfluenzaA__ADL39139
augaaccccaaucagaagaucauuaccauaggcagcgugucccugacaaucucuacuauuugcuucuuuaugcagaucgccauucucaucacgaccgucacacuucacuucaaacaguacgaguuuaacucaccuccaaauaaccagguuaugcugagugaaccgacuauaaucgagagaaauauuaccgaaaucguguauuugacaaacaccacuauugagaaggaaaucugucccaaauuagcugaguacaggaauuggagcaagccucagugcgacauaacaggguucgcaccauuuuccaaagauaacucuauucggcugucggccggaggugacaucuggguaacccgcgagcccuaugugucaugugauccugacaagugcuaccaauucgcgcuaggccaggggacgacucucaauaacguccauagcaauaacaccgugcgagaacguacaccauauagaacucugcuuaugaaugagcugggaguucccuuucacuugggcaccaaacagguguguauugcuuggaguuccucuagcugccaugaugguaaggccuggcuccacgucuguaucacaggggacgauaagaacgcaaccgccuccuucaucuacaauggaaggcugguggacucaguaguuaguuggagcaaagaaauucugcggacgcaggagucugagugcguguguauaaacggcacuugcacagucgugaugaccgauggcuccgcuucagggaaggcagacacuaaaauccucuuuauugaagagggaaagaucgugcauacaagcaccuuaagugguucugcccaacacgucgaagaguguuccugcuauccucgcuacccaggcguuagaugcguguguagggauaacuggaaggggagcaaucggccgauaguagacauuaacaucaaagaucacucgaucgugucuuccuacgucugcucaggacuggugggcgacacgccccgcaagaaugacaguagcuccucuagccauugucuugauccuaacaaugaagagggugggcacggaguuaaaggcugggcuuucgacgauggcaacgacguguggauggggcgaaccauuucagagaagaguagauugggauaugaaacauuuaaagucaucgaggguugguccaauccaaagagcaaacugcagauuaacaggcaagugauaguagaucggggcaaucguucuggguacucaggaaucuucaguguugaaggcaagagcugcauuaaccgcuguuuuuauguggagcuaaucagagguaggaaggaagagacugagguccucuggaccuccaauucuaucguggucuucugcgggacaucgggcacuuacggaaccggcagcuggcccgacggggccgauauuaaccugaugccuauauga

SEQ ID NO: 147416 - RNA, 1413 nt, Artificial Sequence
  derived and/or modified CDS sequence (opt3) from neuraminidase__InfluenzaA__ADL39150
augaaccccaaucagaagaucauuaccauaggcagcaucuccauugccaucgggauuaucucucugaugcuccaaauaggaaacaucauuucaaucugggcuagucacagcauucagacagguucccagaauaacacuggcaucugcaaucagagaauaauuacguacgagaacucuaccugggugaaucauacauaugucaacaucaauaacacuaauguuguggcaggggaagacaaaaccucgguaacacuugccggaaacucaagccuguguaguauuuccggcugggcgaucuacaccaaggauaauucuaucaggauugguagcaaaggggacguguucgucauacgggagccuuuuaucuccugcucacacuuggaaugucgcacuuucuuuuuaacacaaggagcucugcuaaacgauaagcauaguaauggcaccgugaaagaccgaagcccauaucgugcccucaugucuugcccgcugggcgaggcacccuccccuuacaacucaaaguucgaaagcguugccuggagugcuucugcaugucacgaugggaugggauggcuuacgauugguaucuccggcccagacaacggggccguggcuguccugaaguauaauggaauaauuacugagaccaucaaaagcuggaagaaacagaucuugagaacacaggagucggaaugcguguguaugaacggcucuugcuuuacuauuaugaccgauggucccuccaauaaggccgcgucauacaaaaucuucaagauugagaaggggaaaguaacaaagaguauagaacucaacgcaccuaauuuuuauuacgaggaguguagcugcuacccagacaccggaaucguuaugugugugugcagggauaacuggcauggcuccaaucggcccugggucucuuucaaccagaaucuggacuaucaaauuggcuacaucugcagcgggguguuuggagauaacccucgcccagaagacggugagggcucauguaauccggugacggucgauggggccaacggaguuaaaggcuucaguuauaaguacgguaaugggguguggaucggcagaacuaaauccaacaggcugcggaagggauuugaaaugauuugggaccccaauggcuggacaaacaccgacagcgauuucucuguaaaacaggacguggucgcuauaacugauuggucaggguauagugguagcuuugugcagcacccugagcucacaggauuagacugcauccgcccauguuucuggguugaacuggugcgaggccuucccagagagaacaccacgauuuggaccuccgggucuucgaucagcuucugcggagucaauuccgauacagccaacuggucauggccugacggcgcagaguugccauuuacuauugauaaguga

SEQ ID NO: 147417 - RNA, 1410 nt, Artificial Sequence
  derived and/or modified CDS sequence (opt3) from neuraminidase__InfluenzaA__ADL39172
augaaccccaaucagaagaucauuaccauaggcagcgugucccugacaaucucuacuauuugcuucuuuaugcagaucgccauucucaucacgaccgucacacuucacuucaaacaguacgaguuuaacucaccuccaaauaaccagguuaugcugugugaaccgacuauaaucgagagaaauauuaccgaaaucguguauuugacaaacaccacuauugagaaggaaaucugccccaaauuagcugaguacaggaauuggaguaagccucagugugacauaacaggguucgcaccauuuagcaaagauaacuccauucggcugucugccggaggugacaucuggguaacccgcgagcccuaugugucgugcgauccugacaaguguuaccaauucgcgcuaggccaggggacgacucucaauaacguccauucaaauaacaccgugcgagaucguacaccauauagaacucugcuuaugaaugaacugggaguucccuuucacuugggcaccaaacaggugugcauugcuuggagcaguuccucuugucaugacgguaaggccuggcuccacgucugcaucacaggggaugacaagaacgcaaccgccagcuucaucuacaauggaaggcugguggauuccguaguuucauggaguaaagagauucugcggacgcaggaaagcgagugugugugcauaaacggcacuuguacagucgugaugaccgacggcucugcuuccggggaggcagauacuaagauccucuuuauugaagagggaaaaaucgugcauacaucaaccuuaagcgguagugcccaacacgucgaagagugcucuugcuauccucgcuacccaggcguuagaugugugugcagggacaacuggaagggguccaaucggccgauaguagauauuaacaucaaggaccacagcaucgugucgucuuacgucuguuccggacuggugggcgacacgccccgcaaaaaugauucaaguagcuccucucauugccuugacccuaacaaugaagagggugggcacggaguuaagggcugggcuuucgaugacggcaacgauguguggauggggcgaaccauuagcgagaaaucaagauugggauaugaaacauuuaaggucaucgaggguuggaguaauccaaaauccaagcugcagauuaacaggcaagugauaguagaccggggcaaucguagcggguacucuggaaucuucucaguugaaggcaaaaguuguauuaaccgcugcuuuuauguggagcuaaucagagguaggaaggaagagacugagguccucuggaccagcaauuccaucguggucuucugugggacaucuggcacuuacggaaccggcucguggcccgauggggccgacauuaaccugaugccuauauga

SEQ ID NO: 147418 - RNA, 1410 nt, Artificial Sequence; identical to SEQ ID NO: 144647
  derived and/or modified CDS sequence (opt3) from neuraminidase__InfluenzaA__ADL39183

SEQ ID NO: 147419 - RNA, 1413 nt, Artificial Sequence; identical to SEQ ID NO: 146978
  derived and/or modified CDS sequence (opt3) from neuraminidase__InfluenzaA__ADL39194

SEQ ID NO: 147420 - RNA, 1410 nt, Artificial Sequence; identical to SEQ ID NO: 144647
  derived and/or modified CDS sequence (opt3) from neuraminidase__InfluenzaA__ADL39205

SEQ ID NO: 147421 - RNA, 1413 nt, Artificial Sequence; identical to SEQ ID NO: 145509
  derived and/or modified CDS sequence (opt3) from neuraminidase__InfluenzaA__ADL39227

SEQ ID NO: 147422 - RNA, 1413 nt, Artificial Sequence; identical to SEQ ID NO: 146978
  derived and/or modified CDS sequence (opt3) from neuraminidase__InfluenzaA__ADL39238

SEQ ID NO: 147423 - RNA, 1413 nt, Artificial Sequence; identical to SEQ ID NO: 146978
  derived and/or modified CDS sequence (opt3) from neuraminidase__InfluenzaA__ADL39249

SEQ ID NO: 147424 - RNA, 1413 nt, Artificial Sequence; identical to SEQ ID NO: 145509
  derived and/or modified CDS sequence (opt3) from neuraminidase__InfluenzaA__ADL39260

SEQ ID NO: 147425 - RNA, 1410 nt, Artificial Sequence
  derived and/or modified CDS sequence (opt3) from neuraminidase__InfluenzaA__ADL39282
augaaccccaaucagaagaucauuaccauaggcagcgugucccugacaaucucuacuauuugcuucuuuaugcaaaucgccauucucaucacgaccgucacacuucacuucaaacaguacgaguuuaacucaccuccaaauaaccagguuaugcugugugaaccgacuauaaucgagaagaauauuaccgaaaucguguauuugacaaacaccacuauugagaaagaaaucugccccagauuagcugaguacaggaauuggaguaagccucagugugacauaacaggguucgcaccauuuagcaaagauaacuccauucggcugucugccggaggugacaucuggguaacccgcgagcccuaugugucgugcgauccugacaaguguuaccaauucgcgcuaggccaggggacgacucucaauaacguccauucaaauaacaaggugcgagaucguaccccauauagaacacugcuuaugaaugaacugggaguucccuuucacuugggcacuaaacaggugugcauugcuuggagcaguuccucuugucaugacgguaaggccuggcuccacgucugcaucaccggggaugacaaaaacgcaacagccagcuucaucuacaauggaaggcugguggauuccguaguuucauggaguaaggagauucugcggacccaggaaagcgagugugugugcauaaacggcacguguacugucgugaugacagacggcucugcuuccgggaaagcagauaccaagauccucuuuauugaggaaggaaagaucgugcauacuucaacauuaagcgguagugcccaacacgucgaggaaugcucuugcuauccucgcuacccaggcguuagaugugugugcagggacaacuggaaaggguccaaucggccgauaguagauauuaacaucaaggaccacagcaucgugucgucuuacgucuguuccggacuggugggcgacacccccaggaaaaaugauucaaguagcuccucucauugccuugacccuaacaaugaggaaggugggcacggaguuaagggcugggcuuucgaugacggcaacgauguguggauggggcgaacgauuagcgagaaaucaagauugggauaugagaccuuuaaggucaucgaagguuggaguaauccaaaauccaagcugcagauuaaccgccaggugauaguagaccggggcaaucguagcggguacucuggaaucuucucaguugagggcaagaguuguauuaaccgcugcuuuuauguggaacuaaucagagguaggaaagaggaaacagagguccucuggacuagcaauuccaucguggucuucugugggaccucuggcacauacggaacuggcucguggcccgauggggccgacauuaaccugaugccuauauga

SEQ ID NO: 147426 - RNA, 1413 nt, Artificial Sequence; identical to SEQ ID NO: 145509
  derived and/or modified CDS sequence (opt3) from neuraminidase__InfluenzaA__ADL39293

SEQ ID NO: 147427 - RNA, 1410 nt, Artificial Sequence
  derived and/or modified CDS sequence (opt3) from neuraminidase__InfluenzaA__ADL39304
augaaccccaaucagaagaucauuaccauaggcagcgugucccugacaaucucuacuauuugcuucuuuaugcagaucgccauucucaucacgaccgucacacuucacuucaaacaguacgaguuuaacuucccuccaaauaaccagguuaugcugugugaaccgacuauaaucgagagaaauauuaccgaaaucguguauuugacaaacaccacuauugagaaggaaaucugccccaaauuagcugaguacaggaauuggucaaagccucagugugacauaacaggguuugcaccauucaguaaagauaacagcauucggcuguccgccggaggugacaucuggguaacccgcgagcccuaugugucuugcgauccugacaaguguuaccaauuugcgcuaggccaggggacgacucucaauaacguccauucgaauaacaccgugcgagaucguacaccauauagaacucugcuuaugaaugaacugggaguucccuuccacuugggcaccaaacaggugugcauugcuuggucaagcaguuccugucaugacgguaaggccuggcuccacgucugcaucacaggggaugacaagaacgcaaccgccucuuuuaucuacaauggaaggcugguggauagcguaguuuccuggucaaaagagauucugcggacgcaggaaagugagugugugugcauaaacggcacuuguacagucgugaugaccgacggcagcgcuucugggaaggcagauacuaaaauccucuucauugaggaaggaaagaucgugcauacauccaccuuaucagguagcgcccaacacgucgaggaaugcaguugcuauccucgcuacccaggcguuagaugugugugcagggacaacuggaaggggucuaaucggccgauaguagauauuaacaucaaagaccacuccaucgugagcucguacgucuguucuggacuggugggcgacacgccccgcaagaaugauuccucaaguagcucccauugccuugacccuaacaaugaggaaggugggcacggaguuaaaggcugggcuuuugaugacggcaacgauguguggauggggcgaaccauuucugaaaagagcagauugggauaugagacauucaaagucaucgaggguuggucaaauccaaagaguaaacugcagauuaacaggcaagugauaguagaccggggcaaucguuccggguacagcggaaucuuuucuguugagggcaagucauguauuaaccgcugcuucuauguggaacuaaucagagguaggaaggaggaaacugagguccucuggaccaguaauagcaucguggucuucugugggacauccggcacuuacggaaccggcucuuggcccgauggggccgacauuaaccugaugccuauauga

SEQ ID NO: 147428 - RNA, 1410 nt, Artificial Sequence; identical to SEQ ID NO: 144647
  derived and/or modified CDS sequence (opt3) from neuraminidase__InfluenzaA__ADL39326

SEQ ID NO: 147429 - RNA, 1413 nt, Artificial Sequence; identical to SEQ ID NO: 146978
  derived and/or modified CDS sequence (opt3) from neuraminidase__InfluenzaA__ADL39392

SEQ ID NO: 147430 - RNA, 1410 nt, Artificial Sequence
  derived and/or modified CDS sequence (opt3) from neuraminidase__InfluenzaA__ADL39403
augaaccccaaucagaagaucauuaccauaggcagcgugucccugacaaucucuacuauuugcuucuuuaugcagaucgccauucucaucacgaccgucacacuucacuucaaacaguacgaguuuaacccuccaccgaauaaccagguuaugcugugugaacccacuauaaucgagagaaauauuaccgaaaucguguauuugacaaacaccacuauugagaaggaaaucugcccuaaauuagcugaguacaggaauuggucaaagccacagugugacauaacaggguucgcacccuuuaguaaagauaacagcauucggcuguccgccggaggugacaucuggguaacccgcgagccuuaugugucuugcgauccagacaaguguuaccaauucgcgcuaggccaggggacgacucucaauaacguccauucgaauaacaccgugcgagaucguacacccuauagaacucugcuuaugaaugaacugggaguuccuuuucacuugggcaccaaacaggugugcauugcuuggucaagcaguuccugucaugacgguaaggccuggcuccacgucugcaucacaggggaugacaagaacgcaaccgccucuuucaucuacaauggaaggcugguggauagcguaguuuccuggucaaaagagauucugcggacgcaggaaagugagugugugugcauaaacggcacuuguacagucgugaugaccgacggcagcgcuucugggaaggcagauacuaaaauccucuuuauugaggaaggaaagaucgugcauacauccaccuuaucagguagcgcccaacacgucgaggaaugcaguugcuauccacgcuacccgggcguuagaugugugugcagggacaacuggaaggggucuaaucggcccauaguagauauuaacaucaaagaccacuccaucgugagcucguacgucuguucuggacuggugggcgacacgccucgcaagaaugauuccucaaguagcucccauugccuugacccaaacaaugaggaaggugggcacggaguuaaaggcugggcuuucgaugacggcaacgauguguggauggggcgaaccauuucugaaaagagcagauugggauaugagacauuuaaagucaucgaggguuggucaaaucauaagaguaaacugcagauuaacaggcaagugauaguagaccggggcaaucguuccggguacagcggaaucuucucuguugagggcaagucauguauuaaccgcugcuuuuauguggaacuaaucagagguaggaaggaggaaacugagguccucuggaccaguaauagcaucguggucuucugugggacauccggcacuuacggaaccggcucuuggcccgauggggccgaccugaaccuuaugccuauuuga

SEQ ID NO: 147431 - RNA, 1413 nt, Artificial Sequence; identical to SEQ ID NO: 145509
  derived and/or modified CDS sequence (opt3) from neuraminidase__InfluenzaA__ADL39425

SEQ ID NO: 147432 - RNA, 1413 nt, Artificial Sequence
  derived and/or modified CDS sequence (opt3) from neuraminidase__InfluenzaA__ADL39447
augaaccccaaucagaagaucauuaccauaggcagcaucuccauugccaucgggauuaucucucugaugcuccaaauaggaucaaucauuaguaucugggcuagccacuccauucagacagguucucagaacaauacuggcaucugcaaccagagaauaauuacguacgaaaauucgaccugggugaaccauacauaugucaauaucaacaauacuaacguuguggcaggggaggacaaaaccucaguaacacuuaccggaaauagcagucuguguuccauuucuggcugggccaucuacacuaaggauaacagcaucaggauugguuccaaaggggacguguucgucauacgggagccuuuuaucucaugcagucacuuggaaugucgcacauucuuuuuaacccaaggagcgcugcuaaaugauaagcauagcaacggcacggugaaagaccgaucuccauaucgugcucucauguccugcccgcugggcgaggcccccucaccuuacaauagcaaguucgaaaguguugcauggucugccuccgcuugucacgaugggaugggauggcuuacuauugguaucagcggcccagacaacggggcaguggccguccugaaguauaacggaauaauuaccggcacaaucaaaucguggaagaaacagaucuugagaacucaggagucugagugcguguguaugaaugguuccugcuuuaccauuaugacagaugggcccucaaacaaggcugccaguuacaaaaucuucaagauugaaaagggaaaaguaaccaagagcauagagcucaaugcgccuaacuuuuauuacgaagaguguuccugcuacccagacacgggcaucguuaugugugugugcagggauaauuggcauggcucuaaccggcccugggucagcuucaaucagaaccuggacuaucaaauuggguacaucugcucaggaguguuuggugauaauccucgcccagaggacggcgaagggaguuguaacccggugacugucgauggagcaaauggcguuaaagguuucuccuauaaguacgggaacggcguguggaucggaagaacaaaaagcaauaggcugcggaagggcuuugagaugauuugggaccccaacggguggaccaauacugacucugauuucucaguaaaacaggacguggucgccauaacagauuggaguggauauagcgguuccuuugugcagcacccugaacucaccggcuuagacugcauccgcccauguuucuggguugagcuggugcgagggcuucccagagaaaacacgaccauuuggacaucuggaucgagcaucuccuucugcggcgucaacucagauacugcuaauuggaguuggccugacggugccgaguugccauuuaccauugauaaguga

SEQ ID NO: 147433 - RNA, 1413 nt, Artificial Sequence; identical to SEQ ID NO: 145509
  derived and/or modified CDS sequence (opt3) from neuraminidase__InfluenzaA__ADL39458

SEQ ID NO: 147434 - RNA, 1413 nt, Artificial Sequence
  derived and/or modified CDS sequence (opt3) from neuraminidase__InfluenzaA__ADL39469
augaaccccaaucagaagaucauuaccauaggcagcaucuccauugccaucgggauuaucucucugaugcuccaaauaggaucaaucauuaguaucugggcuagccacuccauucagacagguucucagaacaauacuggcaucugcaaccagagaauaauuacguacgaaaauucgaccugggugaaccauacauaugucaauaucaacaauacuaacguuguggcaggggaggacaaaaccucaguaacacuugccggaaauagcagucuguguuccauuucuggcugggcgaucuacaccaaggauaacagcaucaggauugguuccaaaggggacguguucgucauacgggagccuuuuaucucaugcagucacuuggaaugucgcacuuucuuuuuaacacaaggagcucugcuaaaugauaagcauagcaacggcaccgugaaagaccgaucuccauaucgugcccucauguccugcccgcugggcgaggcacccucaccuuacaauagcaaguucgaaaguguugccuggucugcuuccgcaugucacgaugggaugggauggcuuacgauugguaucagcggcccagacaacggggccguggcuguccugaaguauaacggaauaauuacuggcaccaucaaaucguggaagaaacagaucuugagaacacaggagucugagugcguguguaugaaugguuccugcuuuacuauuaugaccgaugggcccucaaacaaggccgcgaguuacaaaaucuucaagauugaaaagggaaaaguaacaaagagcauagagcucgacgcaccuaauuuuuauuacgaagaguguuccugcuacccagauaccggcaucguuaugugugugugcagggacaacuggcauggcucuaaucggcccugggucagcuucaaccagaaucuggauuaucaaauuggguacaucugcucaggaguguuuggugacaacccucgcccagaggauggcgaagggaguuguaauccggugacggucgacggagccaacggcguuaaagguuucuccuauaaguacgggaauggcguguggaucggaagaacuaaaagcaacaggcugcggaagggcuuugagaugauuugggaccccaauggguggacaaacaccgauucugacuucucaguaaaacaggauguggucgcuauaacugacuggaguggauauagcgguuccuuugugcagcacccugaacucacaggcuuagauugcauccgcccauguuucuggguugagcuggugcgagggcuucccagagaaaauaccacgauuuggaccucuggaucgagcaucuccuucugcggcgucaacucagacacagccaacuggaguuggccugauggugcagaguugccauuuacuauugacaaguga

SEQ ID NO: 147435 - RNA, 1413 nt, Artificial Sequence
  derived and/or modified CDS sequence (opt3) from neuraminidase__InfluenzaA__ADL39480
augaaccccaaucagaagaucauuaccauaggcagcaucuccauugccaucgggauuaucucucugaugcuccaaauaggaucaaucauuaguaucugggcuagccacuccauucagacagguucucagaacaauacuggcaucugcaaccagagaauaauuacguacgaaaauucgaccugggugaaccauacauaugucaauaucaacaauacuaacguuguggcaggggaggacaaaaccucaguaacacuugccggaaauagcagucuguguuccauuucuggcugggcgaucuacaccaaggauaacagcaucaggauugguuccaaaggggacguguucgucauacgggagccuuuuaucucaugcagucacuuggaaugucgcacuuucuuuuuaacacaaggagcucugcuaaaugauaagcauagcaacggcaccgugaaagaccgaucuccauaucgugcccucauguccugcccgcugggcgaggcacccucaccuuacaauagcaaguucgaaaguguugccuggucugcuuccgcaugucacgaugggaugggauggcuuacgauugguaucagcggcccagacaacggggccguggcuguccugaaguauaacggaauaauuacuggcaccaucaaaucguggaagaaacagaucuugagaacacaggagucugagugcguguguaugaaugguuccugcuuuacuauuaugaccgaugggcccucaaacaaggccgcgaguuacaaaaucuucaagauugaaaagggaaaaguaacaaagagcauagagcucaaugcaccuaacuuuuauuacgaagaguguuccugcuacccagacaccggcaucguuaugugugugugcagggauaauuggcauggcucuaaccggcccugggucagcuucaaucagaaccuggacuaucaaauuggguacaucugcucaggaguguuuggugauaauccucgcccagaggacggcgaagggaguuguaacccggugacggucgauggagccaauggcguuaaagguuucuccuauaaguacgggaacggcguguggaucggaagaacuaaaagcaauaggcugcggaagggcuuugagaugguaugggaccccaacggguggacaaauaccgacucugauuucucagugaaacaggacgucguggcuauuacugauuggaguggauauagcgguuccuuuguucagcacccugaacucacaggcuuagacugcauacgcccauguuucuggguggagcugguccgagggcuucccagagaaaacaccacgaucuggaccucuggaucgagcauuuccuucugcggcgugaacucagauacagccaauuggaguuggccugacggugcagaguugccauuuacuaucgauaaguga

SEQ ID NO: 147436 - RNA, 1410 nt, Artificial Sequence
  derived and/or modified CDS sequence (opt3) from neuraminidase__InfluenzaA__ADL39491
augaaccccaaucagaagaucauuaccauaggcagcgugucccugacaaucucuacuauuugcuucuuuaugcaaaucgccauucucaucacgaccgucacacuucacuucaaacaguacgaguuuaacucaaguccuaauaaccagguuaugcugugugaaccaacuauaaucgagagaaauauuaccgaaaucguguauuugacaaacaccacuauugagaaggaaaucugcccgaaauuagcugaguacaggaauuggagcaagccccagugugacauaacaggguucgcaccuuuuuccaaagauaacucuauucggcugucggccggaggugacaucuggguaacccgcgagccauaugugucaugcgaucccgacaaguguuaccaauucgcgcuaggccaggggacgacucucaauaacguccauagcaauaacauugugcgagaucguaccccuuauagaacacugcuuaugaaugaacugggaguuccauuucacuugggcacuaaacaggugugcaucgcuuggaguuccucuagcugucaugacgguaaggccuggcuccacgucugcaucaccggggaugacaagaacgcaacagccuccuucauuuacaauggaaggcugguggauucaauaguaaguuggagcaaagagauccugcggacccaggaaucugaguguguuugcauuaacggcacguguacuguggucaugacagacggcuccgcuucagggaaggcagauaccaaaauccucuuuauagaggaaggaaagauugugcauacuagcacauuaagugguucugcccaacacguggaggaaugcuccugcuauccccgcuacccuggcgucagauguguuugcagggacaacuggaaggggagcaaucggccaaucguggauaucaacauuaaagaccacucgaucguaucuuccuacguguguucaggacuggucggcgacaccccgcgcaagaaugauaguagcuccucuagccauugccuugaccccaacaaugaggaaggugggcacggagugaaaggcugggcuuucgaugacggcaacgauguuuggauggggcgaacgauuucagagaagaguagauugggauaugagaccuuuaaagugauagaagguugguccaauccuaagagcaaacugcagaucaacaggcaggucauuguggaccggggcaaucguucuggguacucaggaaucuucaguguagagggcaagagcuguaucaaccgcugcuuuuauguugaacuaauuagagguaggaaggaggaaacagaggugcucuggacuuccucuucgauagucguguucugugggaccagcggcacauacggaacuggcuccuggccagauggggccgacaucaaucugaugcccauuuga

SEQ ID NO: 147437 - RNA, 1410 nt, Artificial Sequence; identical to SEQ ID NO: 144786
  derived and/or modified CDS sequence (opt3) from neuraminidase__InfluenzaA__ADL41165

SEQ ID NO: 147438 - RNA, 1410 nt, Artificial Sequence
  derived and/or modified CDS sequence (opt3) from neuraminidase__InfluenzaA__ADL41175
augaaccccaaucagaagaucauuaccauaggcagcgugugcaugacaaucgggauggccaaccugauucuccaaaucggaaauauuaucuccacuuggauaucucacucaauccagcuugguaaccagaaucagauugagacguguaaccaaagugucaucaccuacgaaaauaacacauggguuaaucagacuuaugugaacauuagcaauaccaacuucgcugcaggccaguccguagugucugucaaacuggccggaaauucgucauugugcccugugagcggaugggcgaucuacaguaaggacaacuccguuagaauaggcucuaaaggugauguguuugucauuagggagccauucaucagcuguuccccguuagaaugccggacauuuuuccugacccagggggcucuacucaaugacaagcauucaaacggaacuauuaaagaucgcagucccuaucgaacacugaugagcuguccuaucggcgaggugccaucucccuacaacucccguuuugaaucaguagccuggagcgcaagugccugccacgacggcaucaauuggcuuaccauugggauaucuggaccugauaacggugcuguugcagugcugaaguauaauggcaucauuacggacacuaucaaguccuggagaaacaauauauugaggacccaagagagcgagugugccugcgucaacgggucguguuucacagugaugacugauggaccaucuaauggccaggcuuccuacaaaauuuuucggaucgaaaaggguaaaaucgugaagucagucgagaugaacgcccccaauuaucauuacgaagagugcaguuguuacccugacagcuccgagauuaccugcguuugccgcgauaacuggcacgggucuaauagaccaugggugagcuucaaccagaaucucgaauaucagaucggauacauuuguucaggcauauuuggcgacaacccgaggcccaaugauaaaacagggaguugcggaccuguauccagcaacggugcgaacggcgugaagggguucucuuuuaaguauggaaauggcgucuggaucggucggaccaaaucaauuaguagccgcaacggguucgagaugaucugggacccaaauggcuggacgggaacugauaacaauuuuuccaucaagcaagacauugugggcauaaacgaauggucuggguacucggggagcuucguucagcaucccgagcugacaggucuggacuguauccgaccuugcuucuggguggaacucauuagaggcaggccaaaagagaauaccaucuggacuuccgggucaaguauuucuuuuuguggagucaacagcgauacagugggcugguccuggcccgacggugcagaguuaccguucaccaucgauaaguga

SEQ ID NO: 147439 - RNA, 1413 nt, Artificial Sequence
  derived and/or modified CDS sequence (opt3) from neuraminidase__InfluenzaA__ADL60255
augaaccccaaucagaagaucauuaccauaggcagcaucuccauugccaucgggauuaucucucugaugcuccaaauaggaaacaucauuucaaucugggcuagucacagcauucagacagguucccagaauaacacuggcaucugcaaucagagaauaauuacguacgagaacucuaccugggugaauuauacauacgucaacaucaauaacacuaauguuguggcaggggaagacaaaaccucgguaacacuugccggaaacucaagccuguguaguauuuccggcugggcgaucuauaccaaggauaauucuaucaggauugguagcaaaggggacguguucgucauacgggagccuuuuaucuccugcucacauuuggaaugucgcacuuucuuuuuaacacaaggagcucugcuaaacgauaagcacaguaauggcaccgugaaagaccgaagcccauaccgugcccucaugucuugcccgcugggcgaggcacccuccccuuauaacucaaaguucgaaagcguugccuggagugcuucugcaugucaugaugggaugggauggcuuacgauugguaucuccggcccagacaacggggccguggcuguccugaaguacaauggaauaauuacuggcaccaucaaaagcuggaagaaacagaucuugagaacacaggagucggagugcguguguaugaacgguucuugcuuuacuauuaugaccgaugggcccuccaauaaggccgcgucauauaaaaucuucaagauugaaaagggaaaaguaacaaagaguauagagcucaacgcaccuaauuuucacuacgaagaguguagcugcuacccagacaccggcaucguuaugugugugugcagggauaacuggcauggcuccaaucggcccugggucucuuucaaccagaaucuggacuaucaaauuggguacaucugcagcggaguguuuggugauaacccucgcccaaaagacggcagagggucauguaauccggugacggucgauggagccaacggcguuaaggguuucaguuauaaauacgacaaugggguguggaucggcaggacuaaguccaaccggcugcgcaaaggauuugagaugauuugggaccccaauggcuggacaaacaccgauagcgacuucucuguaaagcaggauguggucgcuauaacugacuggucaggguauagugguagcuuugugcagcacccugaacucacaggauuagauugcauccgaccauguuucuggguugagcuggugagaggccuucccagggaaaacaccacgauuuggaccuccgggucuucgaucagcuucugcggagucaauuccgacacagccaacuggucauggccugauggcgcagaguugccauuuacuauugacaaguga

SEQ ID NO: 147440 - RNA, 1413 nt, Artificial Sequence
  derived and/or modified CDS sequence (opt3) from neuraminidase__InfluenzaA__ADL60277
augaaccccaaucagagaaucauuaccauaggcagcaucuccauugccaucgggauuaucucucugaugcuccaaauaggaaacaucauuucaaucugggcuagucacagcauucagaucgguucccagaauaacacaggcauaugcaaucagaggauuaucacuuacgagaacucuacgugggugaaucauaccuaugucaacauuaauaacacaaauguuguggcaggggaagacaagacuccuguaacccuugccggaaacucgucacuguguagcaucaguggcugggcgaucuacacaaaagauaauuccauucggauagguucuaagggggacguguucgucauccgcgagccauuuauuagcugcucccacuuggaaugucgaaccuucuuuuuaacucaaggagcucugcuaaacgauaaacauucaaauggcacagccaaggaccguaguccguauagagcacucaugagcugcccccugggcgaggccccuucuccauacaacuccaaauucgaaucaguggcuuggagcgcaagugccugucacgaugggaugggauggcuuaccaucgguauaucuggccccgacaacggggcuguugccgugcugaaguauaauggaauuaucacgggcacuaucaaguccuggaaaaagcagauuuugaggacccaggagagcgagugcgucuguaugaacgguucgugcuuuacaaucaugacugaugggccuucuaauaaagcggcauccuacaagauuuucaaaauagaaaagggaaaggugaccaaaucaaucgagcucaacgccccaaauuuuuauuacgaagaguguaguugcuaccccgacacaggcauuguaauguguguuugccgggauaacuggcauggcagcaaucgcccuuggguguccuucaaccagaaucuggacuaucaaaucggguacaucugcucuggagucuuuggugauaacccaagaccggaggacggcgaagggagcuguaaucccgugaccguggauggagcuaacggcgucaaggguuucucauauaaauacgggaauggcguuuggauuggaaggacgaagaguaaccggcugcgcaaaggcuuugagaugauaugggacccuaauggguggacuaacacagacuccgauuucagcgugaagcaggacguaguggccaucaccgauuggucuggauauucagguaguuuuguccagcacccagaacucacuggcuuagacugcauucgacccuguuucuggguggagcugguuagagggcuuccuagggaaaacacaaccaucuggacgagcggauccucuauuucguucugcggcgugaauagcgauaccgcaaacugguccuggccagacggugcugaguugcccuuuacaaucgauaaauga

SEQ ID NO: 147441 - RNA, 1413 nt, Artificial Sequence
  derived and/or modified CDS sequence (opt3) from neuraminidase__InfluenzaA__ADL60288
augaaccccaaucagaagaucauuaccauaggcagcaucuccauugccaucgggauuaucucucugaugcuccaaauaggaaacaucauuucaaucugggcuagucacagcauucagacagguucccagaauaacacuggcaucugcaaucagagaauaauuacguacgagaacucuaccugggugaaucauacauaugucaacaucaauaacacuaauguuguggcaggggaagacaaaaccucgguaacacuugccggaaacucaagccuguguaguauuuccggcugggcgaucuacaccaaggauaauucuaucaggauugguagcaaaggggacguguucgucauacgggagccuuuuaucuccugcucacacuuggaaugucgcacuuucuuuuuaacacaaggagcucugcuaaacgauaagcauaguaauggcaccgugaaagaccgaagcccauaucgugcccucaugucuugcccgcugggcgaggcacccuccccuuacaacucaaaguucgaaagcguugccuggagugcuucugcaugucacgaugggaugggauggcuuacgauugguaucuccggcccagacaacggggccguggcuguccugaaguauaauggaauaauuacuggcaccaucaaaagcuggaagaaacagaucuugagaacacaggagucggagugcguguguaugaacgguucuugcuuuacuauuaugaccgaugggcccuccaauaaggccgcgucauacaaaaucuucaagauugaaaagggaaaaguaacaaagaguauagagcucaacgcaccuaauuuuuauuacgaagaguguagcugcuacccagacaccggcaucguuaugugugugugcagggauaacuggcauggcuccaaucggcccugggucucuuucaaccagaaucuggacuaucaaauuggguacaucugcagcggaguguuuggugauaacccucgcccaaaagacggcaaggggucauguaauccggugacggucgauggagccaacggcguuaaagguuucaguuauaaguacgggaauggcguguggaucggaagaacuaaauccaacaggcugcggaagggcuuugagaugauuugggaccccaauggguggacaaacaccgacagcgauuucucuguaaagcaggacguggucgcuauaacugauuggucaggauauagugguagcuuugugcagcacccugaacucacaggcuuagacugcauccgcccauguuucuggguugagcuggugcgagggcuucccagagaaaacaccacgauuuggaccuccggaucuucgaucagcuucugcggcgucaauuccgauacagccaacuggucauggccugacggugcagaguugccauuuacuauugauaaauga

SEQ ID NO: 147442 - RNA, 1413 nt, Artificial Sequence
  derived and/or modified CDS sequence (opt3) from neuraminidase__InfluenzaA__ADL60299
augaaccccaaucagaagaucauuaccauaggcagcaucuccauugccaucgggauuaucucucugaugcuccaaauaggaaacaucauuucaaucugggcuagucacagcauucagacagguucccagaauaacacuggcaucugcaaucagagaauaauuacguacgagaacucuaccugggugaaucauacauaugucucgaucaacaauacuaacguuguggcagggaaagacaagaccucaguaacacuugccggaaauagcagucuguguuccauuucuggcugggcgaucuacaccaaagauaacagcaucaggauugguuccaagggggacguguucgucauacgggaaccuuuuaucucaugcagucacuuggagugucgcacuuucuuuuuaacacaaggagcucugcuaaaugauaaacauagcaacggcaccgugaaggaccgaucuccauaucgugcccucauguccugcccgcugggcgaagcacccucaccuuacaauagcaaguucgagaguguugccuggucugcuuccgcaugucacgaugggaugggauggcuuacgauugguaucagcggcccagacaacggggccguggcuguccugaaauauaacggaauaauuacuggcaccaucaagucguggaaaaagcagaucuugagaacacaggaaucugagugcguguguaugaaugguuccugcuuuacuauuaugaccgaugggcccucaaacaaagccgcgaguuacaagaucuucaagauugagaaaggaaagguaacaaaaagcauagaacucaaugcaccuaacuuuuauuacgaggaauguuccugcuacccagacaccggcaucguuaugugugugugcagggauaauuggcauggcucuaaccggcccugggucagcuucaaucaggaccuggauuaucaaauuggguacaucugcucaggaguguuuggugacaacccucgcccaaaggauggcaaagggaguuguaauccggugacggucgacggagccaacggcguuaaggguuucuccuauaaauacgggaauggcguguggaucggaagaacuaagagcaacaggcugcggaagggcuuugagaugauuugggaccccaauggguggacaaacaccgauucugacuucucaguaaaacaggauguggucgcuauaacugacuggaguggauauagcgguuccuuugugcagcacccugagcucacaggcuuagauugcauccgcccauguuucuggguugaacuggugcgagggcuucccagagagaauaccacgauuuggaccucuggaucgagcaucuccuucugcggcgucaacucagacacagccaacuggaguuggccugauggugcagaauugccauuuacuauugacaaguga

SEQ ID NO: 147443 - RNA, 1413 nt, Artificial Sequence; identical to SEQ ID NO: 144680
  derived and/or modified CDS sequence (opt3) from neuraminidase__InfluenzaA__ADL60310

SEQ ID NO: 147444 - RNA, 1413 nt, Artificial Sequence
  derived and/or modified CDS sequence (opt3) from neuraminidase__InfluenzaA__ADL60321
augaaccccaaucagaagaucauuaccauaggcagcaucuccauugccaucgggauuaucucucugaugcuccaaauaggaaacaucauuucaaucugggcuagucacagcauucagacagguucccagaauaacacuggcaucugcaaucagagaauaauuacguacgagaacucuaccugggugaaucauacauaugucaacaucaauaacacuaauguuguggcaggggaagacaaaaccucgguaacacuugccggaaacucaagccuguguaguauuuccggcugggcgaucuacaccaaggauaauucuaucaggauugguagcaaaggggacguguucgucauacgggagccuuuuaucuccugcucacacuuggaaugucgcacuuucuuuuuaacacaaggagcucugcuaaacgauaagcauaguaauggcaccgugaaagaccgaagcccauaucgugcccucaugucuugcccgcugggcgaggcacccuccccuuacaacucaaaguucgaaagcguugccuggagugcuucugcaugucacgaugggaugggauggcuuacgauugguaucuccggcccagacaacggggccguggcuguccugaaguauaauggaauaauuacuggcaccaucaaaagcuggaagaaacagaucuugagaacacaggagucggagugcguguguaugaacgguucuugcuuuacuauuaugaccgaugggcccuccaauaaggccgcgucauacaaaaucuucaagauugaaaagggaaaaguaacaaagaguauagagcucaacgcaccuaauuuucauuaugaagaguguagcugcuacccagacaccggcaugguuaugugugugugcagggauaacuggcacggcuccaaucggcccugggucucuuucaaccagaaucuggacuaccaaaucggguauauuugcagcggaguguuuggugauaacccucgcccagaggacggcgaagggucauguaauccggugacggucgauggagccaacggcguuaaagguuucaguuacaaguaugacaaugggguguggaucggcagaacuaaauccaacaggcugcggaagggauuugagaugaucugggaccccaauggcuggacaaacaccgauagcgacuucucuguaaaacaggauguggucgcuauuacugacuggucaggguacagugguagcuuugugcagcacccugaacucacaggauuagauugcauacgcccauguuucuggguugagcuggugcgaggccuucccagagaaaacaccacgaucuggaccuccgggucuucgauuagcuucugcggagucaauuccgacacagccaacuggucauggccugauggcgcagaguugccauuuacuaucgacaaguga

SEQ ID NO: 147445 - RNA, 1413 nt, Artificial Sequence
  derived and/or modified CDS sequence (opt3) from neuraminidase__InfluenzaA__ADL60332
augaaccccaaucagaagaucauuaccauaggcagcaucuccauugccaucgggauuaucucucugaugcuccaaauaggaaacaucauuucaaucugggcuagucacagcauucagacagguucccagaauaacacuggcaucugcaaucagagaauaauuacguacgagaacucuaccugggugaaucauacauaugucaacaucaauaacacuaauguuguggcaggggaagacaaaaccucgguaacacuugccggaaacucaagccuguguaguauuuccggcugggcgaucuacaccaaggauaauucuaucaggauugguagcaaaggggacguguucgucauacgggagccuuuuaucuccugcucacacuuggaaugucgcacuuucuuuuuaacacaaggagcucugcuaaacgauaagcauaguaauggcaccgugaaagaccgaagcccauaucgugcccucaugucuugcccgcugggcgaggcacccuccccuuacaacucaaaguucgaaagcguugccuggagugcuucugcaugucacgaugggaugggauggcuuacgauugguaucuccggcccagacaacggggccguggcuguccugaaguauaauggaauaauuacuggcaccaucaaaagcuggaagaaacagaucuugagaacacaggagucggagugcguguguaugaacgguucuugcuuuacuauuaugaccgaugggcccuccaauaaggccgcgucauacaaaaucuucaagauugaaaagggaaaaguaacaaagaguauagagcucaacgcaccuaauuuucauuaugaagaguguagcugcuacccagacaccggcaucguuaugugugugugcagggauaacuggcacggcuccaaucggcccugggucucuuucaaccagaaucuggacuaccaaauuggguauaucugcagcggaguguuuggugauaacccucgcccaaaagacggcagagggucauguaauccggugacggucgauggagccaacggcguuaaggguuucaguuacaaauaugacaaugggguguggaucggcaggacuaaguccaaccggcugcgcaaaggauuugagaugauuugggaccccaauggcuggacaaacaccgauagcgacuucucuguaaagcaggauguggucgcuauaacugacuggucaggguacagugguagcuuugugcagcacccugaacucacaggauuagauugcauccgaccauguuucuggguugagcuggugagaggccuucccagggaaaacaccacgauuuggaccuccgggucuucgaucagcuucugcggagucaauuccgacacagccaacuggucauggccugauggcgcagaguugccauuuacuauugacaaguga

SEQ ID NO: 147446 - RNA, 1413 nt, Artificial Sequence; identical to SEQ ID NO: 144680
  derived and/or modified CDS sequence (opt3) from neuraminidase__InfluenzaA__ADL60343

SEQ ID NO: 147447 - RNA, 1413 nt, Artificial Sequence
  derived and/or modified CDS sequence (opt3) from neuraminidase__InfluenzaA__ADL60354
augaaccccaaucagagaaucauuaccauaggcagcaucuccauugccaucgggauuaucucucugaugcuccaaauaggaaacaucauuucaaucugggcuagucacagcauucagaucgguucccagaauaacacaggcauaugcaaucagaggauuaucacuuacgagaacucuacgugggugaaucauaccuaugugaacauuaauaacacaaauguuguggcaggggaagacaagacuucgguaacccuugccggaaacucaagccuguguaguaucuccggcugggcgaucuacacaaaagauaauucuauucggauagguagcaagggggacguguucgucauccgcgagccuuuuauuuccugcucacacuuggaaugucgaaccuucuuuuuaacucaaggagcucugcuaaacgauaaacauaguaauggcacagccaaggaccguagcccauauagagcacucaugucuugcccgcugggcgaggcccccuccccuuacaacucaaaauucgaaagcguggcuuggagugcaucugccugucacgaugggaugggauggcuuaccaucgguauauccggcccagacaacggggcuguugccgugcugaaguauaauggaauuaucacgggcacuaucaagagcuggaaaaagcagauuuugaggacccaggagucggagugcgucuguaugaacgguucuugcuuuacaaucaugacugaugggcccuccaauaaagcggcaucauacaagauuuucaaaauagaaaagggaaaggugaccaaaaguaucgagcucaacgccccuaauuuuuauuacgaagaguguagcugcuacccagacacaggcauuguaauguguguuugccgggauaacuggcauggcuccaaucgccccugggugucuuucaaccagaaucuggacuaucaaaucggguacaucugcagcggagucuuuggugauaacccuagaccaaaggacggcaaagggucauguaauccggugaccguggauggagcuaacggcgucaaggguuucaguuauaaauacgggaauggcguuuggauuggaaggacgaaguccaaccggcugcgcaaaggcuuugagaugauaugggaccccaauggguggacuaacacagacagcgauuucucugugaagcaggacguaguggccaucaccgauuggucaggauauagugguagcuuuguccagcacccugaacucacuggcuuagacugcauucgaccauguuucuggguggagcugguuagagggcuucccagggaaaacacaaccaucuggacguccggaucuucgauuagcuucugcggcgucaauuccgauaccgcaaacuggucauggccugacggugcugaguugccauuuacaaucgauaaguga

SEQ ID NO: 147448 - RNA, 1410 nt, Artificial Sequence
  derived and/or modified CDS sequence (opt3) from neuraminidase__InfluenzaA__ADL60365
augaaccccaaucagaagaucauuaccauaggcagcgugucccugacaaucucuacuauuugcuucuuuaugcaaaucgccauucucaucacgaccgucacacuucacuucaaacaguacgaguuuaacucaaguccuaauaaccagguuaugcugugugaaccaacuauaaucgagagaaauauuaccgaaaucguguauuugacaaacaccacuauugagaaggaaaucagcccgaaauuagcugaguacaggaauugguccaagccccagugcgacauaacaggguucgcaccuuuuucuaaagauaacucgauucggcugucagccggaggugacaucuggguaacccgcgagccauaugugagcugugaucccgacaagugcuaccaauucgcgcuaggccaggggacgacucucaauaacguccauaguaauaacauugugcgagaucguaccccuuauagaacacugcuuaugaaugaacugggaguuccauuucacuugggcacuaaacagguguguaucgcuugguccucuagcuccugccaugacgguaaggccuggcuccacgucuguaucaccggggaugacaagaacgcaacagccucauucauuuacaauggaaggcugguggauaguauaguaagcuggucuaaagagauccugcggacccaggaauccgagugcguuuguauuaacggcacgugcacuguggucaugacagacggcucagcuagcgggaaggcagauaccaaaauccucuuuauagaggaaggaaagauugugcauacaaguacuuuaucugguuccgcccaacacguggaggaauguagcugcuauccccgcuacccuggcgucagaugcguuuguagggacaacuggaaggggucgaaucggccaaucguggauaucaacauuaaagaccacucuaccguauccucauacgugugcaguggacuggucggcgacacgccgcgcaagaaugauagcuccucuagcucacauugucuugaccccaacaaugaggaaggugggcacggagugaaaggcugggcuuucgaugacggcaacgauguuuggauggggcgaaccaucagugagaaguccagauugggauaugagacauuuaaagugauugaagguuggagcaauccuaagucuaaacugcagauaaacaggcaggucaucguggaccggggcaaucguucaggguacaguggaauuuucagcguagagggcaaguccugcaucaaccgcuguuuuuauguugaacuaaucagagguaggaaggaggaaacugaggugcucuggaccucuaauucgauugucguguucugcgggacaagcggcacuuacggaaccggcuccuggccagauggggccgacauaaaccugaugcccaucuga

SEQ ID NO: 147449 - RNA, 1413 nt, Artificial Sequence
  derived and/or modified CDS sequence (opt3) from neuraminidase__InfluenzaA__ADL60376
augaaccccaaucagaagaucauuaccauaggcagcaucuccauugccaucgggauuaucucucugaugcuccaaauaggaaacaucauuucaaucugggcuagucacagcauucagacagguucccagaauaacacuggcaucugcaaucagagaauaauuacguacgagaacucuaccugggugaaucauacauaugugaacaucaauaacacuaauguuguggcaggggaagacaaaaccucgguaacacuugccggaaacucaagccuguguaguauuuccggcugggcgaucuacaccaaggauaauucuaucaggauugguagcaaaggggacguguucgucauacgggagccuuuuaucuccugcucacacuuggaaugucgcacuuucuuuuuaacacaaggagcucugcuaaacgauaagcauaguaauggcaccggcaaagaccgaagcccauaucgugcccucaugucuugcccgcugggggaggcacccuccccuuacaacucaaaguucgaaagcguggccuggagugcuucugcaugucacgauggaauggguuggcuuacgauuggcaucuccgggccagacaacggagccguugcugugcugaaguauaauggcauaauuacugguaccaucaaaagcuggaagaaacagaucuugagaacacaggagucggagugcgucuguaugaacgggucuugcuuuacuauuaugaccgauggacccuccaauaaggccgcgucauacaaaaucuucaagauugaaaagggcaaagugacaaagaguauagagcucaacgcaccuaauuuucauuaugaagaguguagcugcuacccagacaccggcaucguaauguguguuugcagggauaacuggcacggguccaaucggcccugggugucuuucaaccagaaucuggacuaccaaauuggauauaucugcagcggugucuuuggcgauaacccucgcccaaaagacgggaagggaucauguaauccggugacgguggauggcgccaacggugucaaaggguucaguuacaaguaugacaauggcguuuggaucggaagaacuaaauccaacaggcugcggaagggcuuugagaugauuugggaccccaauggguggacaaacaccgauagcgacuucucugugaagcaggauguaguggcuauaacugacuggucaggauacagugguagcuuuguccagcacccugaacucacaggcuuagauugcauccgcccauguuucuggguggagcugguucgagggcuucccagagaaaacaccacgauuuggaccuccggaucuucgaucagcuucugcggcgucaauuccgacacagccaacuggucauggccugauggugcagaguugccauuuacuauugacaaauga

SEQ ID NO: 147450 - RNA, 1410 nt, Artificial Sequence; identical to SEQ ID NO: 144786
  derived and/or modified CDS sequence (opt3) from neuraminidase__InfluenzaA__ADM07137

SEQ ID NO: 147451 - RNA, 1410 nt, Artificial Sequence; identical to SEQ ID NO: 144786
  derived and/or modified CDS sequence (opt3) from neuraminidase__InfluenzaA__ADM07146

SEQ ID NO: 147452 - RNA, 1410 nt, Artificial Sequence; identical to SEQ ID NO: 144786
  derived and/or modified CDS sequence (opt3) from neuraminidase__InfluenzaA__ADM07156

SEQ ID NO: 147453 - RNA, 1410 nt, Artificial Sequence; identical to SEQ ID NO: 144786
  derived and/or modified CDS sequence (opt3) from neuraminidase__InfluenzaA__ADM07165

SEQ ID NO: 147454 - RNA, 1413 nt, Artificial Sequence; identical to SEQ ID NO: 145509
  derived and/or modified CDS sequence (opt3) from neuraminidase__InfluenzaA__ADM07474

SEQ ID NO: 147455 - RNA, 1413 nt, Artificial Sequence; identical to SEQ ID NO: 145509
  derived and/or modified CDS sequence (opt3) from neuraminidase__InfluenzaA__ADM07485

SEQ ID NO: 147456 - RNA, 1410 nt, Artificial Sequence
  derived and/or modified CDS sequence (opt3) from neuraminidase__InfluenzaA__ADM07496
augaaccccaaucagaagaucauuaccauaggcagcgugucccugacaaucucuacuauuugcuucuuuaugcagaucgccauucucaucacgaccgucacacuucacuucaaacaguacgaguuuaacucaccuccaaauaaccagguuaugcugugugaaccgacuauaaucgagagaaauauuaccgaaaucguguauuugacaaacaccacuauugagaaggaaaucugccccaaauuagcugaguacaggaauuggaguaagccucagugugacauaacaggguucgcaccauuuagcaaagauaacuccauucggcugucugccggaggugacaucuggguaacccgcgagcccuaugugucgugcgauccugacaaguguuaccaauucgcgcuaggccaggggacgacucucaauaacguccauucaaauaacaccgugcgagaucguacaccauauagaacucugcuuaugaaugaacugggaguucccuuucacuugggcaccaaacaggugugcauugcuuggagcaguuccucuugucaugacgguaaggccuggcuccacgucugcaucacaggggaugacaagaacgcaaccgccagcuucaucuacaauggaaggcugguggauuccguaguuucauggaguaaagagauucugcggacgcaggaaagcgagugugugugcauaaacggcacuuguacagucgugaugaccgacggcucugcuuccgggaaggcagauacuaaaauccucuuuauugaggaaggaaagaucgugcauacaucaaccuuaagcgguagugcccaacacgucgaggaaugcucuugcuauccucgcuacccaggcguuagaugugugugcagggacaacuggaagggguccaaucggccgauaguagauauuaacaucaaagaccacagcaucgugucgucuuacgucuguuccggacuggugggcgacacgccccgcaagaaugauucaaguagcuccucucauugccuugacccuaacaaugaggaaggugggcacggaguuaaaggcugggcuuucgaugacggcaacgauguguggauggggcgaaccauuagcgagaagucaagauugggauaugagacauuuaaagucaucgaagguuggaguaauccaaaguccaaacugcagauuaacaggcaagugauaguagaccggggcaaucguagcggguacucuggaaucuucucaguugagggcaagaguuguauuaaccgcugcuuuuauguggaacuaaucagagguaggaaggaggaaacugagguccucuggaccagcaauuccaucguggucuucugugggacaucuggcacuuacggaaccggcucguggcccgauggggccgacauuaacauaaugccuaucuga

SEQ ID NO: 147457 - RNA, 1410 nt, Artificial Sequence
  derived and/or modified CDS sequence (opt3) from neuraminidase__InfluenzaA__ADM07507
augaaccccaaucagaagaucauuaccauaggcagcgugucccugacaaucucuacuauuugcuucuuuaugcagacggccauccucauuaccacagucacucuucacuucaaacaguuugaguucaacucaccuccaaauaaccagguuaugcugugugaaccggcuaucauagagagaaauaucaccgaaauuguguacuugacaaacaccacuaucgagaaggaaauuugccccaaauuagcagaguauaggaauuggaguaagccucagugugacaucacaggguuugccccauucagcaaagauaacuccauacggcugucugcgggaggugacauuuggguaacccgcgagcccuacgugucgugcgauccugacaaguguuaucaauuugcucuaggccaggggacgacucucaauaacguccauucaaauaacaccgugcgagaucguacaccauacagaacucugcuuaugaaugaacugggaguucccuuccacuugggcaccaaacaggugugcaucgccuggagcaguuccucuugucaugacgguaaggcauggcuccacgucugcauuacaggggaugacaagaacgccaccgcuagcuuuaucuauaauggaaggcugguggauuccguaguuucauggaguaaagagauccugcggacgcaggaaagcgagugugugugcauuaacggcacuuguacagucgugaugaccgacggcucugcauccgggaaggccgauacuaaaauacucuucaucgaggaaggaaagauugugcauacaucaaccuuaagcgguagugcucaacacgucgaggaaugcucuugcuacccucgcuauccaggcguuagaugugugugcagggacaacuggaagggguccaaucggccgaucguagauauaaacauuaaagaccacagcaucgugucgucuuacgucuguuccggacuggugggcgacacgccccgcaagaaugauucaaguagcuccucucauugccuugacccuaacaaugaggaaggugggcacggaguuaaaggcugggccuuugaugacggcaacgauguguggauggggcgaaccaucagcgagaagucaagauugggauacgagacauucaaagucauugaagguuggaguaauccaaaguccaaacugcagaucaacaggcaagugauuguagaccggggcaaucguagcggguauucuggaauauuuucaguugagggcaagaguuguaucaaccgcugcuucuacguggaacuaauuagagguaggaaggaggaaacugagguccucuggaccagcaauuccaucguggucuucugugggacaucuggcacuuauggaaccggcucguggcccgauggggcggacaucaaccugaugccuauuuga

SEQ ID NO: 147458 - RNA, 1410 nt, Artificial Sequence
  derived and/or modified CDS sequence (opt3) from neuraminidase__InfluenzaA__ADM12820
augaaccccaaucagaagaucauuaccauaggcagcgugucccugacaaucucuacuauuugcuucuuuaugcagaucgccauucucaucacgaccgucacacuucacuucaaacaguacaaguuuaacucaccuccaaauaaccagguuaugcugugugagccgacuauaaucgaaagaaauauuaccgagaucguguauuugacaaacaccacuauugaaaaagagaucugccccaaguuagcugaauacaggaauuggaguaaaccucagugugacauaacaggguucgcaccauuuagcaaggauaacuccauucggcugucugccggaggugacaucuggguaacccgcgagcccuaugugucgugcgauccugacaaguguuaccaauucgcgcuaggccaggggacgacucucaauaacguccauucaaauaacaccgugcgagaucguacaccauauagaacucugcuuaugaaugagcugggaguucccuuucacuugggcaccaaacaggugugcauugcuuggagcaguuccucuugucaugacgguaaggccuggcuccacgucugcaucacaggggaugacaaaaacgcaaccgccagcuucaucuacaauggaaggcugguggauuccguaguuucauggaguaaggaaauucugcggacgcaggagagcgaaugugugugcauaaacggcacuuguacagucgugaugaccgacggcucugcuuccgggaaagcagauacuaagauccucuuuauugaggagggaaagaucgugcauacaucaaccuuaagcgguagugcccaacacgucgaagagugcucuugcuauccucgcuacccaggcguuagaugugugugcagggacaacuggaaaggguccaaucggccgauaguagauauuaacaucaaggaccacagcaucgugucgucuuacgucuguuccggacuggugggcgacacgccccgcaaaaaugauucaaguagcuccucucauugccuugacccuaacaaugaagagggugggcacggaguuaagggcugggcuuucgaugacggcaacgauguguggauggggcgaaccauuaaugaaacaagcagauugggauaugagacuuuuaaagucaucgaggguuggucaaacccaaagaguaaacugcagauuaauaggcaagugauaguagaccggggcaaccguuccggguacagcggaaucuucucuguugaaggcaagucauguauuaaucgcugcuuuuauguggagcuaaucagagguaggaaggaagagaccgaaguccucuggacaaguaacagcaucguggucuucugugggacuuccggcaccuacggaacaggcucuuggcccgauggggccgaccugaaucuuaugccuauuuga

SEQ ID NO: 147459 - RNA, 1410 nt, Artificial Sequence; identical to SEQ ID NO: 147458
  derived and/or modified CDS sequence (opt3) from neuraminidase__InfluenzaA__ADM12831

SEQ ID NO: 147460 - RNA, 1410 nt, Artificial Sequence; identical to SEQ ID NO: 147458
  derived and/or modified CDS sequence (opt3) from neuraminidase__InfluenzaA__ADM12842

SEQ ID NO: 147461 - RNA, 1410 nt, Artificial Sequence; identical to SEQ ID NO: 147458
  derived and/or modified CDS sequence (opt3) from neuraminidase__InfluenzaA__ADM12853

SEQ ID NO: 147462 - RNA, 1410 nt, Artificial Sequence; identical to SEQ ID NO: 144786
  derived and/or modified CDS sequence (opt3) from neuraminidase__InfluenzaA__ADM12864

SEQ ID NO: 147463 - RNA, 1410 nt, Artificial Sequence; identical to SEQ ID NO: 144786
  derived and/or modified CDS sequence (opt3) from neuraminidase__InfluenzaA__ADM12874

SEQ ID NO: 147464 - RNA, 1410 nt, Artificial Sequence; identical to SEQ ID NO: 144786
  derived and/or modified CDS sequence (opt3) from neuraminidase__InfluenzaA__ADM12884

SEQ ID NO: 147465 - RNA, 1410 nt, Artificial Sequence
  derived and/or modified CDS sequence (opt3) from neuraminidase__InfluenzaA__ADM12894
augaaccccaaucagaagaucauuaccauaggcagcgugugcaugacaaucgggauggccaaccugauucuccaaaucggaaauauuaucuccauauggaucucucacucaauucagcuugguaaccagaaucagaucgagacuuguaaccaaagugucauuacguacgaaaauaacaccuggguuaaucagacauaugugaacaucagcaauacuaacuucgcugcaggccaguccguagugucugucaaacuggccgggaauagcucauugugcccugugagcggaugggcgauauacaguaaggacaacuccauuagaaucggcucuaaaggugauguuuuugugauuagggagccauucaucagcuguuccccguuagaaugccggaccuuuuuccugacacagggggcucuacucaaugacaagcauucaaacggaaccaucaaagaucgcagucccuaucgaacucugaugagcuguccuauuggcgaggucccaucucccuacaacucccguuuugaaucaguggccuggagcgcaagugccugccacgacggcauaaauuggcuuacaaucgggauuucuggaccugauaacggugcuguagcaguucugaaguauaauggcaucauaaccgacacgauuaaguccuggagaaacaauaucuugaggacucaagagagcgagugugccugcgugaacgggucguguuucaccgucaugacagauggaccaucugacggccaguccucauacaaaaucuuucggauugaaaaggguaaaaucgugaagaguguggagaugaaugcucccaacuaucauuacgaagagugcagcuguuacccugauuccucugagauuacuugcgucugccgcgacaauuggcacgggagcaacagaccauggguuucauucaaucagaaccucgaauaucagauaggauacaucuguaguggcauuuuuggcgauaauccgaggcccaacgacaaaaccggguccugcggaccugugagcucuaauggugccaacggcguaaagggguucucauuuaaguauggaaacggcguguggaucggucggacaaaaaguaucagcucccgcaauggguucgagaugauuugggauccaaacggcuggaccggaacggacaauaacuuuucuauaaagcaagacaucgucggcauuaaugaauggucgggguacagcggauccuucgugcagcaucccgagcugacuggucuggauuguauccgaccuugcuucuggguugaacucauuagaggcaggccaaaagagaacacaaucuggaccucagggaguucuauaucguuuuguggagucaauuccgacacugugggcuggucauggcccgauggugcggaguuaccguucacaaucgacaaguga

SEQ ID NO: 147466 - RNA, 1410 nt, Artificial Sequence; identical to SEQ ID NO: 144786
  derived and/or modified CDS sequence (opt3) from neuraminidase__InfluenzaA__ADM12904

SEQ ID NO: 147467 - RNA, 1410 nt, Artificial Sequence
  derived and/or modified CDS sequence (opt3) from neuraminidase__InfluenzaA__ADM12914
augaaccccaaucagaagaucauuaccauaggcagcgugugcaugacaaucgggauggccaaccugauucuccaaaucggaaauauuaucuccauauggaucucucacucaauucagcuugguaaccagaaucagaucgagacuuguaaccaaagugucauuacguacgaaaauaacaccuggguuaaucagacauaugugaacaucagcaauacuaacuucgcugcaggccaguccguagugucugucaaacuggccggaaauucgucauugugcccugugagcggaugggcgauauacaguaaggacaacuccauuagaaucggcucuaaaggugauguuuuugugauuagggagccauucaucagcuguuccccguuagaaugccggaccuuuuuccugacacagggggcucuacucaaugacaagcauucaaacggaaccaucaaagaucgcagucccuaucgaacucugaugagcuguccuauuggcgaggucccaucucccuacaacucccguuuugaaucaguggccuggagcgcaagugccugccacgacggcauaaauuggcuuacaaucgggauuucuggaccugauaacggugcuguagcaguucugaaguauaauggcaucauaaccgacacgauuaaguccuggagaaacaauaucuugaggacucaagagagcgagugugccugcgugaacgggucguguuucaccgucaugacagauggaccaucugacggccaggcuuccuacaaaaucuuucggauugaaaaggguaaaaucgugaagucaguggagaugaaugcccccaacuaucauuacgaagagugcaguuguuacccugauagcuccgagauuacuugcgucugccgcgacaauuggcacgggucuaacagaccauggguuagcuucaaucagaaccucgaauaucagauaggauacaucuguucaggcauuuuuggcgauaauccgaggcccaacgacaaaaccgggaguugcggaccuguguccagcuauggugcgaauggcguaaagggguucucuuuuaaguacggaaacggcguguggaucggucggacaaaaucaaucaguagccgcaacggguucgagaugauuugggauccaaauggcuggaccggaacggacaacaauuuuuccauaaagcaagacaucgucggcauuaacgaauggucuggguauucggggagcuucgugcagcaucccgagcugacuggucuggauuguauccgaccuugcuucuggguugaacucauuagaggcaggccaaaagagaauacaaucuggaccuccgggucaaguauaucuuuuuguggagugaacagcgacacugucggcugguccuggcccgauggugcagaguuaccguucacaaucgacaaguga

SEQ ID NO: 147468 - RNA, 1410 nt, Artificial Sequence; identical to SEQ ID NO: 144786
  derived and/or modified CDS sequence (opt3) from neuraminidase__InfluenzaA__ADM12924

SEQ ID NO: 147469 - RNA, 1410 nt, Artificial Sequence; identical to SEQ ID NO: 144786
  derived and/or modified CDS sequence (opt3) from neuraminidase__InfluenzaA__ADM12934

SEQ ID NO: 147470 - RNA, 1410 nt, Artificial Sequence; identical to SEQ ID NO: 144786
  derived and/or modified CDS sequence (opt3) from neuraminidase__InfluenzaA__ADM12944

SEQ ID NO: 147471 - RNA, 1410 nt, Artificial Sequence; identical to SEQ ID NO: 144786
  derived and/or modified CDS sequence (opt3) from neuraminidase__InfluenzaA__ADM12954

SEQ ID NO: 147472 - RNA, 1410 nt, Artificial Sequence; identical to SEQ ID NO: 144786
  derived and/or modified CDS sequence (opt3) from neuraminidase__InfluenzaA__ADM12964

SEQ ID NO: 147473 - RNA, 1410 nt, Artificial Sequence; identical to SEQ ID NO: 146074
  derived and/or modified CDS sequence (opt3) from neuraminidase__InfluenzaA__ADM12974

SEQ ID NO: 147474 - RNA, 1410 nt, Artificial Sequence
  derived and/or modified CDS sequence (opt3) from neuraminidase__InfluenzaA__ADM12984
augaaccccaaucagaagaucauuaccauaggcagcgugugcaugacaaucgggauggccaaccugauucuccaaaucggaaauauuaucuccauauggaucucucacucaauucagcuugguaaccagaaucagaucgagacuuguaaccaaagugucauuacguacgaaaauaacaccuggguuaaucagacauaugugaacaucagcaauacuaacuucgcugcaggccaguccguagugucugucaaacuggccggaaauucgucauugugcccugugagcggaugggcgauauacaguaaggacaacuccauuagaaucggcucuaaaggugauguuuuugugauuagggagccauucaucagcuguuccccguuagaaugccggaccuuuuuccugacacagggggcucuacucaaugacaagcauucaaacggaaccaucaaagaucgcagucccuaucgaacucugaugagcuguccuauuggcgaggucccaucucccuacaacucccguuuugaaucaguggccuggagcgcaagugccugccacgacggcauaaauuggcuuacaaucgggauuucuggaccugauaacggugcuguagcaguucugaaguauaauggcaucauaaccgacacgauuagauccuggaggaacaauaucuugcggacucaagagagcgagugugccugcgugaacgggucguguuucaccgucaugacagauggaccaucugacggccaggcuuccuacaagaucuuucgcauugaaaaagguaagaucgugaaaucaguggagaugaaugcccccaacuaucauuacgaagagugcaguuguuacccugauagcuccgagauuacuugcgucugcagagacaauuggcacgggucuaacaggccauggguuagcuucaaucagaaccucgaauaucagauaggauacaucuguucaggcauuuuuggcgauaauccgcggcccaacgacaagaccgggaguugcggaccuguguccagcaauggugcgaacggcguaaaaggguucucuuuuaaguauggaaacggcguguggaucggucgcacaaagucaaucaguagccgaaauggguucgagaugauuugggauccaaacggcuggaccggaacggacaauaacuuuuccauaaaacaagacaucgucggcauuaaugaauggucuggguacucggggagcuucgugcagcaucccgagcugacuggucuggauuguaucagaccuugcuucuggguugaacucauuaggggccggccaaaggagaacacaaucuggaccuccgggucaaguauaucuuuuuguggagugaauagcgacacugucggcugguccuggcccgauggugcagaguuaccguucacaaucgacaaauga

SEQ ID NO: 147475 - RNA, 1410 nt, Artificial Sequence; identical to SEQ ID NO: 144786
  derived and/or modified CDS sequence (opt3) from neuraminidase__InfluenzaA__ADM12994

SEQ ID NO: 147476 - RNA, 1410 nt, Artificial Sequence; identical to SEQ ID NO: 144786
  derived and/or modified CDS sequence (opt3) from neuraminidase__InfluenzaA__ADM13004

SEQ ID NO: 147477 - RNA, 1410 nt, Artificial Sequence; identical to SEQ ID NO: 144786
  derived and/or modified CDS sequence (opt3) from neuraminidase__InfluenzaA__ADM13014

SEQ ID NO: 147478 - RNA, 1410 nt, Artificial Sequence
  derived and/or modified CDS sequence (opt3) from neuraminidase__InfluenzaA__ADM13034
augaaccccaaucagaagaucauuaccauaggcagcgugugcaugacaaucgggauggccaaccugauucuccaaaucggaaauauuaucuccauauggaucucucacucaauucagcuugguaaccagaaucagaucgagacuuguaaccaaagugucauuacguacgaaaauaacaccuggguuaaucagacauaugugaacaucagcaauacuaacuucgcugcaggccaguccguagugucugucaaacuggccggaaauucgucauugugcccugugagcgggugggcgauauacaguaaggacaacuccauuagaaucggcucuaaaggugauguuuuugugauuagggagccauucaucagcuguuccccguuagaaugccggaccuuuuuccugacacagggggcucuacucaaugacaagcauucaaacggaaccaucaaagaucgcagucccuaucgaacucugaugagcuguccuauuggcgaggucccaucucccuacaacucccguuuugaaucaguggccuggagcgcaagugccugccacgacggcauaaauuggcuuacaaucgggauuucuggaccugauaacggugcuguagcaguucugaaguauaauggcaucauaaccgacacgauuaaguccuggagaaacaauaucuugaggacucaagagagcgagugugccugcgugaacgggucguguuucaccgucaugacagauggaccaucugacggccaggcuuccuacaaaaucuuucggauugaaaaggguaaaaucgugaagucaguggagaugaaugcccccaacuaucauuacgaagagugcaguuguuacccugauagcuccgagauuacuugcgucugccgcgacaauuggcacgggucuaacagaccauggguuagcuucaaucagaaccucgaauaucagauaggauacaucuguucaggcauuuuuggcgauaauccgaggcccaacgacaaaaccgggaauugcggaccugugaguuccaacggugcgaacggcguaaagggguucagcuuuaaguauggaaauggcguguggaucggucggacaaaaucuaucucaagucgcaacggguucgagaugauuugggauccaaauggcuggaccggaacggacaacaauuuuagcauaaagcaagacaucgucggcauuaacgaaugguccggguacucuggaucguucgugcagcaucccgagcugacuggucuggauuguauccgaccuugcuucuggguugaacucauuagaggcaggccaaaagagaauacaaucuggaccagcggguccucaauaaguuuuuguggagugaacucugacacugucggcuggagcuggcccgauggugcagaguuaccguucacaaucgacaaguga

SEQ ID NO: 147479 - RNA, 1410 nt, Artificial Sequence; identical to SEQ ID NO: 146699
  derived and/or modified CDS sequence (opt3) from neuraminidase__InfluenzaA__ADM13044

SEQ ID NO: 147480 - RNA, 1410 nt, Artificial Sequence; identical to SEQ ID NO: 145612
  derived and/or modified CDS sequence (opt3) from neuraminidase__InfluenzaA__ADM13054

SEQ ID NO: 147481 - RNA, 1410 nt, Artificial Sequence; identical to SEQ ID NO: 145963
  derived and/or modified CDS sequence (opt3) from neuraminidase__InfluenzaA__ADM13064

SEQ ID NO: 147482 - RNA, 1410 nt, Artificial Sequence
  derived and/or modified CDS sequence (opt3) from neuraminidase__InfluenzaA__ADM13074
augaaccccaaucagaagaucauuaccauaggcagcgugugcaugacaaucgggauggccaaccugauucuccaaaucggaaauauuaucuccauauggaucucucacucaauucagcuugguaaccagaaucagaucgagacuuguaaccaaagugucauuacguacgaaaauaacaccuggguuaaucagacauaugugaacaucagcaauacuaaccuggcugcaggccaguccguagugucugucaaauuggccggaaauucgucauuaugcccugugagcggaugggcgauauacaguaaggacaacuccauuagaaucggcucuaaaggugauguuuucgugauuagggagccauuuaucagcuguuccccgcuggaaugccggaccuucuuucuaacacagggggcucuccugaaugacaagcauucaaacggaaccaucaaagaucgcagucccuaucgaacucuuaugagcuguccuauuggcgaggucccaucucccuacaacucccguuucgaaucaguggccuggagcgcaagugccugccacgacggcauaaauuggcugacaaucgggauuucuggaccugauaacggugcuguagcaguuuugaaguauaauggcaucauaaccgacacgauuaaguccuggagaaacaauauccucaggacucaagagagcgagugugccugcgugaacgggucguguuuuaccgucaugacagauggaccaucugacggccaggcuuccuacaaaaucuuccggauugaaaaggguaaaaucgugaagucaguggagaugaaugcccccaacuaucauuacgaagagugcaguuguuacccugauagcuccgagauuacuugcgucugccgcgacaauuggcacgggucuaacagaccauggguuagcuuuaaucagaaccuggaauaucagauaggauacaucuguucaggcauuuucggcgauaauccgaggcccaacgacaaaaccgggaguugcggaccuguguccagcaauggugcgaacggcguaaagggguuuucuuucaaguauggaaacggcguguggaucggucggacaaaaucaaucaguagccgcaauggguuugagaugauuugggauccaaacggcuggaccggaacggacaauaaguucuccauaaaacaagacaucgucggcauuaacgaauggucuggguacucggggagcuuugugcagcaucccgagcugacuggucucgauuguauccgaccuugcuucuggguugaauuaauuagaggcaggccaaaggagaauacaaucuggaccuccgggucaaguauaucuuucuguggagugaacagcgacacugucggcugguccuggcccgauggugcagagcugccguuuacaaucgacaaauga

SEQ ID NO: 147483 - RNA, 1410 nt, Artificial Sequence; identical to SEQ ID NO: 145963
  derived and/or modified CDS sequence (opt3) from neuraminidase__InfluenzaA__ADM13084

SEQ ID NO: 147484 - RNA, 1410 nt, Artificial Sequence
  derived and/or modified CDS sequence (opt3) from neuraminidase__InfluenzaA__ADM13094
augaaccccaaucagaagaucauuaccauaggcagcgugugcaugacaaucgggauggccaaccugauucuccaaaucggaaauacuauuuccaucuggauaucucacucaauccagcuugguaaccagaaucagauugagacguguaaccaaagugucaucaccuacgaaaauaacacauggguuaaucagacuuaugugaacauuagcaauaccaacuucgcugcaggccaguccguagugucugccaaacuggcgggaaauucgucauugugcccugucagcggaugggcuaucuacaguaaggacaacuccauaagaauuggcucuaaaggugauguguuuguuaucagggagccauucauuagcuguuccccguuagaaugccggacauuuuuccugacccagggggcccuacucaaugacaagcauucaaacggaacuaucaaagaucgcagucccuaucgaacacugaugagcuguccuaucggcgaggugccaucucccuacaacucccguuuugaaucagucgcauggagcgccagugcuugccacgacggcauuaauuggcuuaccauagggaucucuggaccugauaacggugcaguggccguacugaaguauaauggcauuaucacggacacuauaaaguccuggagaaacaauauuuugaggacccaagagagcgagugugcuugcguuaacgggucguguuucacagugaugacugauggaccaucugacggccaggccuccuacaaaaucuuucggaucgaaaaggguaaaauugucaagucaguggagaugaaugcgcccaacuaucauuacgaagagugcaguuguuacccugauagcuccgagauuaccugcgugugccgcgacaauuggcacgggucuaacagaccaugggucagcuucaaucagaaccucgaauaucagaucggauacauauguucaggcaucuuuggcgauaauccgaggcccaacgacaaaacagggaguugcggaccuguuuccagcaauggugcaaacggcgugaagggguucucuuuuaaguauggaaacggcguauggauuggucggaccaaaucaaucaguagccgcaauggguucgagaugaucugggauccaaacggcuggacgggaacugacaauaacuuuuccauuaagcaagacauagugggcaucaaugaauggucuggguacucggggagcuucguccagcaucccgagcugacaggucuggauuguauucgaccuugcuucuggguggaacucaucagaggcaggccaaaagagaacaccauuuggacuuccgggucaaguaucucuuuuuguggaguuaauagcgacacagugggcugguccuggcccgauggugccgaguuaccguucaccauagacaaguga

SEQ ID NO: 147485 - RNA, 1410 nt, Artificial Sequence; identical to SEQ ID NO: 145963
  derived and/or modified CDS sequence (opt3) from neuraminidase__InfluenzaA__ADM13104

SEQ ID NO: 147486 - RNA, 1410 nt, Artificial Sequence; identical to SEQ ID NO: 146688
  derived and/or modified CDS sequence (opt3) from neuraminidase__InfluenzaA__ADM13124

SEQ ID NO: 147487 - RNA, 1410 nt, Artificial Sequence
  derived and/or modified CDS sequence (opt3) from neuraminidase__InfluenzaA__ADM13134
augaaccccaaucagaagaucauuaccauaggcagcgugugcaugacaaucgggauggccaaccugauucuccaaaucggaaauauuaucuccauauggaucucucacucaauucagcuugguaaccagaaucagaucgagacuuguaaccaaagugucauuacguacgaaaauaacaccuggguuaaucagacauaugugaacaucagcaauacuaacuucgcugcaggccaguccguagugucugucaaacuggccggaaauucgucauugugcccugugagcggaugggcgauauacaguaaggacaacuccauuagaaucggcucuaaaggugauguuuuugugauuagggagccauucaucagcuguuccccguuagaaugccggaccuuuuuccugacacagggggcucuacucaaugacaagcauucaaacggaaccaucaaagaucgcagucccuaucgaacucugaugagcuguccuauuggcgaggucccaucucccuacaacucccguuuugaaucaguggccuggagcgcaagugccugccacgacggcauaaauuggcuuacaaucgggauuucuggaccugauaacggugcuguagcaguucugaaguauaauggcaucauaaccgacacgauuaaguccuggagaaacaauacuuugaggacccaagagagcgagugugccugcgugaacgggucguguuucacagucaugacugauggaccaucugacggccaggcuuccuacaaaaucuuucggaucgaaaaggguaaaauugugaagucaguggagaugaaugcccccaacuaucauuacgaagagugcaguuguuacccugauagcuccgagauuaccugcgucugccgcgacaauuggcacgggucuaacagaccauggguuagcuucaaucagaaccucgaauaucagaucggauacauauguucaggcaucuuuggcgauaauccgaggcccaacgacaaaaaggggaguugcggaccuguguccagcaauggugcgaacggcguaaagggguucucuuuuaaauauggaaacggcguguggauuggucggacaaagucaaucaguagccgcaauggguucgagaugaucugggauccaaacggcuggaccggaacggacaauaacuuuuccauuaaacaagacauagucggcaucaaugaauggucuggguacucggggagcuucgugcagcaucccgagcugacuggucuggauuguauucgaccuugcuucuggguugaacucaucagaggcaggccaaaggagaacacaauuuggaccuccgggucaaguaucucuuuuuguggagugaauagcgacacugucggcugguccuggcccgauggugcagaguuaccguucacaauagacaaauga

SEQ ID NO: 147488 - RNA, 1410 nt, Artificial Sequence
  derived and/or modified CDS sequence (opt3) from neuraminidase__InfluenzaA__ADM13154
augaaccccaaucagaagaucauuaccauaggcagcgugugcaugacaaucgggauggccaaccugauucuccaaaucggaaauauuaucuccauauggaucucucacucaauucagcuugguaaccagaaacagaucgagacuuguaaucaaagugucuucacguacgaaaacaauaccuggguuaaccagacauaugugaauauuagcaacacuaauuuugcugcaggccaguccguagugucugucaagcuggccgggaacucgucauugugcccugugagcggaugggcgaucuacaguaaagacaauuccauaagaauuggcucuaagggugauguuuucgugaucagggagccauuuauuagcuguuccccguuagaaugccggaccuucuuucugacacagggggcucuacucaacgacaaacauucaaauggaaccaucaaggaucgcagucccuaucgaacucugaugagcuguccuaucggcgaggucccaucucccuacaacucccguuucgaaucaguggccuggagcgcaagugccugccacgacggcauuaacuggcuuacaauagggaucucuggaccugauaauggugcuguagcaguucugaaguauaacggcauuaucaccgacacgauaaaauccuggagaaauaacauuuugaggacucaagagagcgagugugccugcgugaaugggucguguuuuaccgucaugacagauggaccaucugacggccaggcuuccuacaagaucuucaaaaucgaaaaggguaaaauugugaagucaguggagaugaacgcccccaauuaucauuacgaagagugcaguuguuacccugauagcuccgagaucacuugcgucugccgggacaacuggcacgggucuaaucgcccauggguuagcuuuaaccagaaucucgaauaucagauuggauacauauguucaggcaucuucggcgauaacccgagacccaaugacaagaccgggaguugcggaccuguguccagcaacggugcgaauggcguaaaaggguuuucuuucaaguauggaaacggcguguggauugguaggacaaaaucaaucaguagccggaacggguuugagaugaucugggauccaaauggcuggaccggaacggacaacaauuucuccauuaagcaagacauagucggcaucaacgaauggucuggguacucggguagcuucgugcagcaucccgagcugacuggacuggauuguauucgcccuugcuuuuggguugaacucauccgaggcagaccaaaagagaauacaauuuggaccuccgggucaaguaucucuuucuguggagugaacagcgacacugucggcugguccuggcccgauggugcagaguuaccguuuacaauagacaaguga

SEQ ID NO: 147489 - RNA, 1410 nt, Artificial Sequence; identical to SEQ ID NO: 146216
  derived and/or modified CDS sequence (opt3) from neuraminidase__InfluenzaA__ADM13164

SEQ ID NO: 147490 - RNA, 1410 nt, Artificial Sequence; identical to SEQ ID NO: 144786
  derived and/or modified CDS sequence (opt3) from neuraminidase__InfluenzaA__ADM13174

SEQ ID NO: 147491 - RNA, 1410 nt, Artificial Sequence; identical to SEQ ID NO: 144786
  derived and/or modified CDS sequence (opt3) from neuraminidase__InfluenzaA__ADM13184

SEQ ID NO: 147492 - RNA, 1410 nt, Artificial Sequence; identical to SEQ ID NO: 144786
  derived and/or modified CDS sequence (opt3) from neuraminidase__InfluenzaA__ADM13194

SEQ ID NO: 147493 - RNA, 1410 nt, Artificial Sequence; identical to SEQ ID NO: 144786
  derived and/or modified CDS sequence (opt3) from neuraminidase__InfluenzaA__ADM13204

SEQ ID NO: 147494 - RNA, 1410 nt, Artificial Sequence; identical to SEQ ID NO: 145963
  derived and/or modified CDS sequence (opt3) from neuraminidase__InfluenzaA__ADM13214

SEQ ID NO: 147495 - RNA, 1410 nt, Artificial Sequence
  derived and/or modified CDS sequence (opt3) from neuraminidase__InfluenzaA__ADM13224
augaaccccaaucagaagaucauuaccauaggcagcgugugcaugacaaucgggauggccaaccugauucuccaaaucggaaauauuaucuccauauggaucucucacucaauucagcuugguaaccagaaucagaucgagacuuguaaccaaagugucauuacguacgaaaauaacaccuggguuaaucagacauaugugaacaucagcaauacuaacuucgcugcaggccaguccguagugucugucaaacuggccggaaauucgucauugugcccugugagcggaugggcgauauacaguaaggacaacuccauuagaaucggcucuaaaggugauguuuuugugauuagggagccauucaucagcuguuccccguuagaaugccggaccuuuuuccugacacagggggcucuacucaaugacaagcauucaaacggaaccaucaaagaucgcagucccuaucgaacucugaugagcuguccuauuggcgaggucccaucucccuacaacucccguuuugaaucaguggccuggagcgcaagugccugccacgacggcauaaauuggcuuacaaucgggauuucuggaccugauaacggugcuguagcaguucugaaguauaauggcaucauaaccgacacgauuagauccuggaggaacaauaucuugcggacucaagagagcgagugugccugcgugaacgggucguguuucaccgucaugacagauggaccaucugacggccaggcuuccuacaagaucuuucgcauugaaaaagguaagaucgugaaaucaguggagaugaaugcccccaacuaucauuacgaagagugcaguuguuacccugauagcuccaagauuacuugcgucugcagagacaauuggcacgggucuaacaggccauggguuagcuucaaucagaaccucgaguaucagauaggauacaucuguucaggcauuuuuggcgauaauccgcggcccaacgacaaaaccgggaguugcggaccuguguccagcaauggugcgaacggcguaaagggguucucuuuuaaguauggaaacggcguguggaucggucgcacaaaaucaaucaguagccgaaauggguucgaaaugauuugggauccaaacggcuggaccggaacggacaauaacuuuuccauaaagcaagacaucgucggcauuaaugaguggucuggguacucggggagcuucgugcagcaucccgaacugacuggucuggauuguaucagaccuugcuucuggguugagcucauuaggggccggccaaaagaaaacacaaucuggaccuccgggucaaguauaucuuuuuguggagugaauagcgacacugucggcugguccuggcccgauggugcagaguuaccguucacaaucgacaaguga

SEQ ID NO: 147496 - RNA, 1410 nt, Artificial Sequence; identical to SEQ ID NO: 144786
  derived and/or modified CDS sequence (opt3) from neuraminidase__InfluenzaA__ADM13234

SEQ ID NO: 147497 - RNA, 1410 nt, Artificial Sequence; identical to SEQ ID NO: 146074
  derived and/or modified CDS sequence (opt3) from neuraminidase__InfluenzaA__ADM13244

SEQ ID NO: 147498 - RNA, 1410 nt, Artificial Sequence; identical to SEQ ID NO: 145140
  derived and/or modified CDS sequence (opt3) from neuraminidase__InfluenzaA__ADM13254

SEQ ID NO: 147499 - RNA, 1410 nt, Artificial Sequence; identical to SEQ ID NO: 145963
  derived and/or modified CDS sequence (opt3) from neuraminidase__InfluenzaA__ADM13264

SEQ ID NO: 147500 - RNA, 1410 nt, Artificial Sequence; identical to SEQ ID NO: 144786
  derived and/or modified CDS sequence (opt3) from neuraminidase__InfluenzaA__ADM13274

SEQ ID NO: 147501 - RNA, 1410 nt, Artificial Sequence; identical to SEQ ID NO: 144786
  derived and/or modified CDS sequence (opt3) from neuraminidase__InfluenzaA__ADM13284

SEQ ID NO: 147502 - RNA, 1410 nt, Artificial Sequence
  derived and/or modified CDS sequence (opt3) from neuraminidase__InfluenzaA__ADM13294
augaaccccaaucagaagaucauuaccauaggcagcgugugcaugacaaucgggauggccaaccugauucuccaaaucggaaauauuaucuccauauggaucucucacucaauucagcuugguaaccagaaucagaucgagacuuguaaccaaagugucauuacguacgaaaauaacaccuggguuaaucagacauaugugaacaucagcaauacuaacuucgcugcaggccaguccguagugucugucaaacuggccgggaauagcucauugugcccugugagcggaugggcgauauacaguaaggacaacuccauuagaaucggcucuaaaggugauguuuuugugauuagggagccauucaucagcuguuccccguuagaaugccggaccuuuuuccugacacagggggcucuacucaaugacaagcauucaaacggaaccaucaaagaucgcagucccuaucgagcccugaugagcuguccuauuggcgaggucccaucucccuacaacucccguuuugaaucaguggcauggagcgccagugcuugccacgacggcauaaauuggcuuacuaucgggauuucuggaccugauaacggugcaguagccguucugaaguauaauggcaucauaacagacaccauuaaguccuggagaaacaauaucuugaggacgcaagagagcgagugugcuugcgugaacgggucguguuucacugucaugaccgauggaccaucugacggccaggccuccuacaaaaucuuucggauugaaaaggguaaaaucgugaagucaguggagaugaaugcgcccaacuaucauuacgaagagugcaguuguuacccugauagcuccgagauuacaugcgucugccgcgacaauuggcacgggucuaacagaccauggguuagcuucaaucagaaccucgaauaucagauaggauacaucuguucaggcauuuuuggcgauaauccgaggcccaacgacaaaacugggaguugcggaccuguguccagcaauggugcaaacggcguaaagggguucucuuuuaaguauggaaacggcguguggaucggucggaccaaaucaaucaguagccgcaauggguucgagaugauuugggauccaaacggcuggacaggaaccgacaauuccuuuucuauaaagcaagacaucgucggcauuaacgaauggucgggguacagcggauccuucgugcagcaucccgagcugacgggucuggauuguauccgaccuugcuucuggguugaacucauuagaggcaggccaaaagagaauacuaucuggacaucagggaguucuauaucguuuuguggagugaacuccgacaccgucggcuggucauggcccgauggugccgaguuaccguucacuaucgacaaguga

SEQ ID NO: 147503 - RNA, 1410 nt, Artificial Sequence; identical to SEQ ID NO: 144786
  derived and/or modified CDS sequence (opt3) from neuraminidase__InfluenzaA__ADM13304

SEQ ID NO: 147504 - RNA, 1410 nt, Artificial Sequence; identical to SEQ ID NO: 146248
  derived and/or modified CDS sequence (opt3) from neuraminidase__InfluenzaA__ADM13314

SEQ ID NO: 147505 - RNA, 1410 nt, Artificial Sequence; identical to SEQ ID NO: 144786
  derived and/or modified CDS sequence (opt3) from neuraminidase__InfluenzaA__ADM13324

SEQ ID NO: 147506 - RNA, 1410 nt, Artificial Sequence
  derived and/or modified CDS sequence (opt3) from neuraminidase__InfluenzaA__ADM13344
augaaccccaaucagaagaucauuauaaucggcagcgugugcaugaccauugggauggccaaccugauccuccaaauuggaaauaucauauccaucuggauucuucacucuauccagcuggguaaccagaaucagauugagacauguaaccaaucagucaucacuuacgaaaauaacacguggguuaaucagaccuaugugaacauaaguaauacaaacuucgcugcaggccagagcguaguguccgucaaauuggccggaaauucuucguuaugcccugugucagggugggcgauuuacagcaaggacaacaguaucagaauuggcuccaaaggugauguuuuugugaucagggagccauucaucucuuguagcccgcuggaaugccggaccuuuuuccuaacucagggggcucuccugaaugacaagcauuccaacggaacaauuaaagaucgcucacccuaucgaacccuuaugaguuguccuauaggcgaggucccaagccccuacaacucucguuuugaauccguggccuggucagcaagcgccugccacgacggcaucaauuggcugacuauugggaucaguggaccugauaacggugcuguagcaguuuugaaguauaauggcauaauuacagacaccaucaagucuuggagaaacaauauccucaggacgcaagaguccgagugugccugcgugaacgggagcuguuucacugucaugaccgauggaccaucggacggccaggcuucuuacaaaauuuuucggaucgaaaaggguaaaauugugaaguccguggagaugaaugcccccaacuaucauuacgaagagugcucauguuacccugauaguagcgagauaacaugcgucugccgcgacaauuggcacggguccaacagaccauggguuucuuucaaucagaaccuggaauaucagaucggauacauuuguagcggcaucuuuggcgauaauccgaggcccaacgacaaaacugggucaugcggaccugugaguuccaauggugcgaacggcguaaagggguucagcuuuaaguauggaaacggcguguggaucggucggaccaaaucuauuucaagucgcaauggguucgagaugauaugggauccaaacggcuggacaggaaccgacaauaacuuugcaaucaagcaagacauugucggcaucaaugaauggagcggguacuccggaucuuucgugcagcaucccgagcugacgggucucgauuguauucgaccuugcuucuggguugaauuaaucagaggcaggccaaaagagaacacuauauggacaucggggagcuccaucucauuuuguggagugaauagugacaccgucggcuggucuuggcccgauggugccgagcugccguucacuauugacaaguga

SEQ ID NO: 147507 - RNA, 1410 nt, Artificial Sequence; identical to SEQ ID NO: 146688
  derived and/or modified CDS sequence (opt3) from neuraminidase__InfluenzaA__ADM13354

SEQ ID NO: 147508 - RNA, 1410 nt, Artificial Sequence; identical to SEQ ID NO: 145963
  derived and/or modified CDS sequence (opt3) from neuraminidase__InfluenzaA__ADM13363

SEQ ID NO: 147509 - RNA, 1410 nt, Artificial Sequence
  derived and/or modified CDS sequence (opt3) from neuraminidase__InfluenzaA__ADM13464
augaaccccaaucagaagaucauuaccauaggcagcgugucccugacaaucgccacugucugcuuccucaugcaaauugcuauccuuguuacgaccgugacacugcacuuuaaacaguacgagugugacucuccugcaucaaaccagguaaugccaugcgaaccgauuaucauagagagaaauaucacugaaauuguguauuugaacaauaccacaaucgagaaggaaauuugucccaaagucguggaguacaggaacuggaguaagccucagugccaaaucaccggguucgccccauuuagcaaagauaauuccauacgguuaucugcgggaggugacauuuggguuacucgcgagcccuaugugucgugugaucauggcaagugcuaccaguucgcucuggggcagggaacaacccuagacaacaagcacucaaaugauacgauccaugaccguauuccucaccgaacucuccugaugaacgaacuuggcgucccauuucaucuggguaccagacagguguguaucgccuggagcaguuccucuugccacgaugggaaagcaugguugcacguauguaucacaggaaaugacaagaacgccacugcuagcuucauuuaugauggcaggcucguugacuccauaggcucauggagucaaaauauccugcggacccaggagagcgaaugcguguguauuaacgggacaugcaccgucgugaugacggauggaucugcauccggucgcgccgacacuagaauccuguuuauagaggagggcaaaauugugcauaucucaccccucagcgggagugcucagcacgucgaagagugcucuuguuacccuagguauccaggaguucggugcaucugucgcgauaauuggaagggcuccaaccgaccggugguagacauuaacauggaagacuacagcaucgauucgucuuacgugugcuccgguuuagucggggacacacccagaaaugaugacaggucaaguaacagcaauugucggaacccuaauaacgagcguggaaaucagggcgugaaaggcugggccuucgauaacggggacgauguuuggaugggacgcaccauuuccaaggaccugagaucugguuaugaaacuuuuaaggugauaggcggguggagcacaccaaauucaaaaagucaaaucaacaggcaggucauuguggauuccgacaaucggagcggauacucuggcaucuucucaguagaggguaagaguugcaucaaccgauguuuuuauguugagcuuauucgcgggagagaacaggagaccagggugugguggacgagcaauuccauagucguguucugcggcaccucuggaacauacggcacugggucguggcccgauggagcgaacaucaauuuuaugccuauuuga

SEQ ID NO: 147510 - RNA, 1410 nt, Artificial Sequence
  derived and/or modified CDS sequence (opt3) from neuraminidase__InfluenzaA__ADM13465
augaaccccaaucagaagaucauuaccauaggcagcgugucccugacaaucgccacugucugcuuccucaugcaaauugcuauccuuguuacgaccgugacacugcacuuuaaacaguacgagugugacucuccugcaucaaaccagguaaugccaugcgaaccgauuaucauagagagaaauaucacugaaauuguguauuugaacaauaccacaaucgagaaggaaauuugucccaaagucguggaguacaggaacuggaguaagccucagugccaaaucaccggguucgccccauuuagcaaagauaauuccauacgguuaucugcgggaggugacauuuggguuacucgcgagcccuaugugucgugugaucauggcaagugcuaccaguucgcucuggggcagggaacaacccuagacaacaagcacucaaaugauacgauccaugaccguauuccucaccgaacucuccugaugaacgaacuuggcgucccauuucaucuggguaccagacagguguguaucgccuggagcaguuccucuugccacgaugggaaagcaugguugcacguauguaucacaggagacgauaagaaugccacugcuagcuucauuuaugacggcaggcucguugauuccauaggcucauggagucaaaacauccugcggacccaggagagcgaaugcguguguauuaaugggacaugcaccgucgugaugacggacggaucugcauccggucgcgccgauacuagaauccuguuuauagaggagggcaaaauugugcauaucucaccccucagcgggagugcucagcacgucgaagagugcucuuguuacccuagguauccaggaguucggugcaucugucgcgacaacuggaagggcuccaaucgaccggugguagacauuaacauggaagauuacagcaucgacucgucuuacgugugcuccgguuuagucggggauacacccagaaacgacgauaggucaaguaauagcaacugucggaauccuaacaaugagcguggaaaccagggcgugaaaggcugggccuucgacaauggggaugacguuuggaugggacgcaccauuuccaaggaucugagaucugguuaugaaacuuuuaaggugauaggcggguggagcacaccaaacucaaaaagucaaaucaauaggcaggucauuguggacuccgauaaccggagcggauacucuggcaucuucucaguagaggguaagaguugcaucaaucgauguuuuuauguugagcuuaugcgcgggagaaaacaggaaaccagggugugguggacgagcaacuccauugucguguucugcggcaccucuggaacauacggcacugggucguggcccgacggagcgaauauaaacuuuaugccuaucuga

SEQ ID NO: 147511 - RNA, 1410 nt, Artificial Sequence; identical to SEQ ID NO: 142143
  derived and/or modified CDS sequence (opt3) from neuraminidase__InfluenzaA__ADM13466

SEQ ID NO: 147512 - RNA, 1410 nt, Artificial Sequence
  derived and/or modified CDS sequence (opt3) from neuraminidase__InfluenzaA__ADM13467
augaaccccaaucagaagaucauuaccauaggcagcgugucccugacaaucgccacugucugcuuccucaugcaaauugcuauccuuguuacgaccgugacacugcacuuuaaacaguacgagugugacucuccugcaucaaaccagguaaugccaugcgaaccgauuaucauagagagaaauaucacugaaauuguguauuugaacaauaccacaaucgagaaggaaauuugucccaaagucguggaguacaggaacuggaguaagccucagugccaaaucaccggguucgccccauuuagcaaagauaauuccauacgguuaucuucgggaggugacauuuggguuacucgcgagcccuaugugucaugugaucauggcaagugcuaccaguucgcgcuggggcagggaacaacccuagacaacaagcacagcaaugauacgauccaugaccguauuccucaccgaacucuccugaugaacgaacuuggcgucccauuucaucuggguaccagacagguguguaucgcuuggaguuccucuagcugccacgaugggaaagccugguugcacguauguaucacaggagacgauaagaaugcaacugccuccuucauuuaugacggcaggcucguugauucaauaggcaguuggagccaaaacauccugcggacccaggagucugaaugcguguguauuaaugggacaugcaccgucgugaugacggacggauccgcuucaggucgcgcagauacuagaauccuguuuauagaggagggcaaaauugugcauaucagcccccucagugggucugcccagcacgucgaagagugcuccuguuacccuagguauccaggaguucggugcaucugucgcgacaacuggaagggcagcaaucgaccggugguagacauuaacauggaagauuacucgaucgacucuuccuacgugugcucagguuuagucggggauacacccagaaacgacgauaggaguagcaauuccaacugucggaauccuaacaaugagcguggaaaccagggcgugaaaggcugggcuuucgacaauggggaugacguuuggaugggacgcaccauuucuaaggaucugagaagcgguuaugaaacuuuuaaggugauaggcggguggucaacaccaaacaguaaaucccaaaucaauaggcaggucauuguggacagcgauaaccggucuggauacucaggcaucuucaguguagaggguaagagcugcaucaaucgauguuuuuauguugagcuuauucgcgggagaaaacaggaaaccagggugugguggacguccaacucuauagucguguucugcggcaccucgggaacauacggcacugggagcuggcccgacggagccaauaucaacuuuaugccuauuuga

SEQ ID NO: 147513 - RNA, 1410 nt, Artificial Sequence; identical to SEQ ID NO: 142143
  derived and/or modified CDS sequence (opt3) from neuraminidase__InfluenzaA__ADM13468

SEQ ID NO: 147514 - RNA, 1410 nt, Artificial Sequence
  derived and/or modified CDS sequence (opt3) from neuraminidase__InfluenzaA__ADM13469
augaaccccaaucagaagaucauuaccauaggcagcgugucccugacaaucgccacugcuugcuuccucaugcaaauugcaauccuugucacgaccguuacacugcacuuuaaacaguacgagugugacucuccugccucaaaccaggugaugccaugcgaaccgauuaucauagagagaaauaucacugaaauuguauauuugaacaauaccacaaucgagaaggaaauuugucccaaaguggucgaguacaggaacuggaguaagccucagugccaaaucaccggguucgcgccauuuagcaaagauaauuccauacgguuaucugcuggaggugacauuugggugacucgcgagcccuauguuucgugugaucauggcaagugcuaccaguucgcccuggggcagggaacaacccuagacaacaagcacucaaaugauacgauccaugacaggauuccucaccguacucuccugaugaacgaacuuggcgugccauuucaucuggguaccagacaggucuguaucgcauggagcaguuccucuugccacgaugggaaagccugguugcacguguguaucacaggagacgauaagaaugcuacugccagcuucauuuaugacggcaggcucguagauuccauaggcucauggagucaaaacauccugcggacccaggagagcgaaugcguuuguauuaaugggacaugcaccguggucaugacggacggaucugcauccggucgcgcugauacuagaauccuguuuauagaggagggcaaaauugugcauaucucaccccucagcgggagugcccagcacguggaagagugcucuuguuacccuagguauccaggaguccggugcaucugucgcgacaacuggaagggcuccaaucgaccgguuguggacauuaacauggaagauuacagcaucgacucgucuuacguaugcuccgguuuagugggggauacacccagaaacgacgauaggucaaguaauagcaacugucggaauccuaacaaugagcguggaaaccagggcgucaaaggcugggcguucgacaauggggaugacguguggaugggacgcaccauuuccaaggaucugagaucugguuaugaaacuuuuaagguuauaggcggguggagcacaccaaacucaaaaagucaaaucaaucgacaggugauugucgacuccgauaaccggagcggauacucuggcaucuucucaguggaggguaagaguugcaucaaucgauguuuuuauguagagcuuauucgcgggagaaaacaggaaaccaggguuugguggacgagcaacuccauaguggucuucugcggcaccucuggaacauacggcacugggucguggcccgacggagcaaauaucaacuuuaugccuauuuga

SEQ ID NO: 147515 - RNA, 1410 nt, Artificial Sequence
  derived and/or modified CDS sequence (opt3) from neuraminidase__InfluenzaA__ADM13470
augaaccccaaucagaagaucauuaccauaggcagcgugucccugacaaucgccacugucugcuuccucaugcaaauugcuauccuuguuacgaccgugacacugcacuuuaaacaguacgagugugacucuccugcaucaaaccagguaaugccaugcgaaccgauuaucauagagagaaauaucacugaaauuguguauuugaacaauaccacaaucgagaaggaaauuugucccaaagucguggaguacaggaacuggaguaagccucagugccaaaucaccggguucgccccauuuagcaaagauaauuccauacgguuaucugcgggaggugacauuuggguuacucgcgagcccuaugugucgugugaucauggcaagugcuaccaguucgcucuggggcagggaacaacccuagacaacaagcacucaaaugauacgauccaugaccguauuccucaccgaacucuccugaugaacgaacuuggcgucccauuucaucuggguaccagacagguguguaucgccuggagcaguuccucuugccacgaugggaaagcaugguugcacguauguaucacaggagacgauaagaaugccacugcuagcuucauuuaugacggcaggcucguugauuccauaggcucauggagucaaaacauccugcggacccaggagagcgaaugcguguguauuaaugggacaugcaccgucgugaugacggacggaucugcauccggucgcgccgauacuagaauccuguuuauagaggagggcaaaauugugcauaucucaccccucagcgggagugcucagcacgucgaagagugcucuuguuacccuagguauccaggaguucggugcaucugucgcgacaacuggaagggcuccaaucgaccggugguagacauuaacauggaagauuacagcaucgacucgucuuacgugugcuccgguuuagucggggauacacccagaaacgacgauaggucaaguaauagcaacugucggaauccuaacaaugagcguggaaaccagggcgugaaaggcugggccuucgacaauggggaugacguuuggaugggacgcaccauuuccaaggaucugagaucugguuaugaaacuuuuaaggugauaggcggguggagcacaccaaacucaaaaagucaaaucaauaggcaggucauuaucgacuccgauaaccggagcggauacucuggcaucuucucaguggaggguaagaguugcauuaaucgauguuuuuauguagagcuuauacgcgggagaaaacaggaaaccaggguuugguggacgagcaacuccaucguggucuucugcggcaccucuggaacauacggcacugggucguggcccgacggagcgaauauuaacuuuaugccuaucuga

SEQ ID NO: 147516 - RNA, 1410 nt, Artificial Sequence
  derived and/or modified CDS sequence (opt3) from neuraminidase__InfluenzaA__ADM13471
augaaccccaaucagaagaucauuaccauaggcagcgugucccugacaaucgccacugucugcuuccucaugcaaauugcuauccuuguuacgaccgugacacugcacuuuaaacaguacgagugugacucuccugcaucaaaccagguaaugccaugcgaaccgauuaucauagagagaaauaucacugaaauuguguauuugaacaauaccacaaucgagaaggaaauuugucccaaagucguggaguacaggaacuggaguaagccucagugccaaaucaccggguucgccccauuuagcaaagauaauuccauacggauuucugcgggaggugacaucuggguuacucgcgagcccuaugugucgugugaucauggcaagugcuaccaguucgcuuuagggcagggaacaacccuggacaacaagcacucaaaugauacgauucaugaccgaaucccucaccguacucuacucaugaacgaacugggcgucccauuucaucuugguaccagacagguguguaucgccuggagcaguuccucuugccacgaugggaaagcauggcugcacguauguauuacaggagacgauaagaaugccacugcuagcuucauauaugacggcagguugguugauuccaucggcucauggagucaaaacauucuccggacccaggagagcgaaugcguguguaucaaugggacaugcaccgucgugaugacggacggaucugcauccggucgcgccgauacuagaauacuguuuauugaggagggcaaaaucgugcauaucucaccccugagcgggagugcucagcacgucgaagagugcucuuguuacccuagguauccaggaguucggugcauuugucgcgacaacuggaagggcuccaaucgaccggugguagacaucaacauggaagauuacagcauugacucgucuuacgugugcuccggucucgucggggauacacccagaaacgacgauaggucaaguaauagcaacugucggaauccuaacaaugagcguggaaaccagggcgugaaaggcugggccuucgacaauggggaugacguuuggaugggacgcaccauauccaaggauuuaagaucugguuaugaaacuuuuaaggugaucggcggguggagcacaccaaacucaaaaagucaaauuaauaggcaggucaucguggacuccgauaaccggagcggauacucuggcaucuucucaguagaggguaagaguugcauuaaucgauguuuuuauguugagcugauacgcgggagaaaacaggaaaccagggugugguggacgagcaacuccaucgucguguucugcggcaccucuggaacauacggcacugggucguggcccgacggagcgaauauuaacuuuaugccuaucuga

SEQ ID NO: 147517 - RNA, 1410 nt, Artificial Sequence; identical to SEQ ID NO: 144556
  derived and/or modified CDS sequence (opt3) from neuraminidase__InfluenzaA__ADM13472

SEQ ID NO: 147518 - RNA, 1410 nt, Artificial Sequence; identical to SEQ ID NO: 142143
  derived and/or modified CDS sequence (opt3) from neuraminidase__InfluenzaA__ADM13473

SEQ ID NO: 147519 - RNA, 1410 nt, Artificial Sequence; identical to SEQ ID NO: 144551
  derived and/or modified CDS sequence (opt3) from neuraminidase__InfluenzaA__ADM13474

SEQ ID NO: 147520 - RNA, 1410 nt, Artificial Sequence
  derived and/or modified CDS sequence (opt3) from neuraminidase__InfluenzaA__ADM14469
augaaccccaaucagaagaucauuaccauaggcagcgugugcaugacaaucgggauggccaaccugauucuccaaaucggaaauauuaucuccauauggaucucucacucaauucagcuugguaaccagaaucagaucgagacuuguaaccaaagugucauuacguacgaaaauaacaccuggguuaaucagacauaugugaacaucagcaauacuaacuucgcugcaggccaguccguagugucugucaaacuggccggaaauucgucauugugcccugugagcggaugggcgauauacaguaaggacaacuccaugagaauuggcucuaaaggugauguuuuugugaucagggagccauucauuagcuguuccccguuagaaugccggaccuuuuuccugacacagggggcucuacucaaugacaagcauucaaacggaaccaucaaagaucgcagucccuaucgaacucugaugagcuguccuaucggcgaggucccaucucccuacaacucccguuuugaaucaguggccuggagcgcaagugccugccacgacggcauuaauuggcuuacaauagggaucucuggaccugauaacggugcuguagcaguucugaaguauaauggcauuaucaccgacacgauaaaguccuggagaaacaauauuuugaggacucaagagagcgagugugccugcgugaacgggucguguuucaccgucaugacagauggaccaucugacggccaggcuuccuacaaaaucuuucggaucgaaaaggguaaaauugugaagucaguggagaugaaugcccccaacuaucauuacgaagagugcaguuguuacccugauagcuccgagaucacuugcgucugccgcgacaauuggcacgggucuaacagaccauggguuagcuucaaucagaaccucgaauaucagauuggauacauauguucaggcaucuuuggcgauaauccgaggcccaacgacaaaaccgggaguugcggaccuguguccagcaauggugcgaacggcguaaagggguucucuuuuaaguauggaaacggcguguggauuggucggacaaaaucaaucaguagccgcaccggguucgagaugaucugggauccaaauggcuggacgggaacugacaacaauuuuuccauuaagcaagacauagucggcaucaacgaauggucuggguacucggggagcuucgugcagcaucccgagcugacaggucuggauuguauucgaccuugcuucuggguugaacucaucagaggcaggccaaaagagaauaccauuuggacuuccgggucaaguaucucuuuuuguggagugaacagcgacacagucggcugguccuggcccgauggugcagaguuaccguucaccauagacaaguga

SEQ ID NO: 147521 - RNA, 1410 nt, Artificial Sequence; identical to SEQ ID NO: 144786
  derived and/or modified CDS sequence (opt3) from neuraminidase__InfluenzaA__ADM14479

SEQ ID NO: 147522 - RNA, 1410 nt, Artificial Sequence; identical to SEQ ID NO: 144786
  derived and/or modified CDS sequence (opt3) from neuraminidase__InfluenzaA__ADM14499

SEQ ID NO: 147523 - RNA, 1410 nt, Artificial Sequence; identical to SEQ ID NO: 146299
  derived and/or modified CDS sequence (opt3) from neuraminidase__InfluenzaA__ADM14518

SEQ ID NO: 147524 - RNA, 1410 nt, Artificial Sequence; identical to SEQ ID NO: 147124
  derived and/or modified CDS sequence (opt3) from neuraminidase__InfluenzaA__ADM14527

SEQ ID NO: 147525 - RNA, 1410 nt, Artificial Sequence; identical to SEQ ID NO: 146217
  derived and/or modified CDS sequence (opt3) from neuraminidase__InfluenzaA__ADM14537

SEQ ID NO: 147526 - RNA, 1410 nt, Artificial Sequence; identical to SEQ ID NO: 144786
  derived and/or modified CDS sequence (opt3) from neuraminidase__InfluenzaA__ADM14546

SEQ ID NO: 147527 - RNA, 1410 nt, Artificial Sequence
  derived and/or modified CDS sequence (opt3) from neuraminidase__InfluenzaA__ADM14555
augaaccccaaucagaagaucauuaccauaggcagcgugugcaugacaaucgggauggccaaccugauucuccaaaucggaaauauuaucuccauauggaucucucacucaauucagcuugguaaccagaaucagaucgagacuuguaaccaaagugucauuacguacgaaaauaacaccuggguuaaucagacauaugugaacaucagcaauacuaacuucgcugcaggccaguccguagugucugucaaacuggccggaaauucgucauugugcccugugagcggaugggcgauauacaguaaggacaacuccauuagaaucggcucuaaaggugauguuuuugugauuagggagccauucaucagcuguuccccguuagaaugccggaccuuuuuccugacacagggggcucuacucaaugacaagcauucaaacggaaccaucaaagaucgcagucccuaucgaacucugaugagcuguccuauuggcgaggucccaucucccuacaacucccguuuugaaucaguggccuggagcgcaagugccugccacgacggcauaaauuggcuuacaaucgggauuucuggaccugauaacggugcuguagcaguucugaaguauaauggcaucauaaccgacacgauuaaguccuggagaaacaauaucuugaggacucaagagagcgagugugccugcgugaacgggucguguuucaccgucaugacagauggaccaucugacggccaggcuuccuacaaaaucuuucggauugaaaaggguaaaaucgugaagucaguggagaugaaugcccccaacuaucauuacgaagagugcaguuguuacccugauagcuccgagauuacuugcgucugccgcgacaauuggcacgggucuaacagaccauggguuagcuucaaucagaaccucgaauaucagauaggauacaucuguucaggcauuuuuggcgauaauccgaggcccaacgacaaaaccgggaguugcggaccuguguccagcaauggugcgaacggcguaaagggguucucuuuucgguauggaaacggcguguggaucggucgcacaaagucaaucaguagccgaaauggguucgagaugauuugggauccaaacggcuggaccggaacggacaauaacuuuuccauaaaacaagacaucgucggcauuaaugaauggucuggguacucggggagcuucgugcagcaucccgagcugacuggucuggauuguaucagaccuugcuucuggguugaacucauuaggggccggccaaaggagaacacaaucuggaccuccgggucaaguauaucuuuuuguggagugaauagcgacacugucggcugguccuggcccgauggugcagaguuaccguucacaaucgacaaauga

SEQ ID NO: 147528 - RNA, 1410 nt, Artificial Sequence; identical to SEQ ID NO: 144786
  derived and/or modified CDS sequence (opt3) from neuraminidase__InfluenzaA__ADM14573

SEQ ID NO: 147529 - RNA, 1410 nt, Artificial Sequence; identical to SEQ ID NO: 144786
  derived and/or modified CDS sequence (opt3) from neuraminidase__InfluenzaA__ADM14582

SEQ ID NO: 147530 - RNA, 1410 nt, Artificial Sequence; identical to SEQ ID NO: 144786
  derived and/or modified CDS sequence (opt3) from neuraminidase__InfluenzaA__ADM14591

SEQ ID NO: 147531 - RNA, 1410 nt, Artificial Sequence
  derived and/or modified CDS sequence (opt3) from neuraminidase__InfluenzaA__ADM14601
augaaccccaaucagaagaucauuaccauaggcagcgugugcaugacaaucgggauggccaaccugauucuccaaaucggaaauauuaucuccauauggaucucucacucaauucagcuugguaaccagaaucagaucgagacuuguaaccaaagugucauuacguacgaaaauaacaccuggguuaaucagacauaugugaacaucagcaauacuaacuucgcugcaggccaguccguagugucugucaaacuggccggaaauucgucauugugcccugugaacgggugggcgauauacagcaaggacaauaguguuagaauuggcuccaaaggugauguguuugucaucagggagccauucauuucuuguagcccguuagaaugccggaccuuuuuccugacacagggggcucuacucaacgacaagcauuccaacggaaccaucaaagaucgcucacccuaucgaacucugaugaguuguccuaucggcgaggugccaagccccuacaauucucguuuugaauccguagccuggucagcaagcgccugccacgacggcauuaacuggcuuacaauagggaucaguggaccugauaauggugcuguugcagugcugaaguauaacggcauuaucaccgacacgauaaagucuuggagaaauaacauuuugaggacucaagaguccgagugugccugcgucaaugggagcuguuucaccgugaugacagauggaccaucggacggccaggcuucuuacaaaaucuuucggaucgaaaaggguaaaauugugaaguccgucgagaugaacgcccccaauuaucauuacgaagagugcucauguuacccugauaguagcgagaucacuugcguuugccgcgacaacuggcacggguccaauagaccaugggugucuuucaaccagaaucucgaauaucagauuggauacauauguagcggcaucuuuggcgauaacccgaggcccaaugacaaaaccgggucaugcggaccuguaaguuccaacggugcgaacggcgugaagggguucagcuuuaaguauggaaauggcgucuggauuggucggacaaaaucuaucucaagucgcaacggguucgagaugaucugggauccaaauggcuggaccggaacggacaacaauuuuagcauuaagcaagacauagugggcaucaacgaaugguccggguacucuggaucguucguucagcaucccgagcugacuggucuggauuguauucgaccuugcuucuggguggaacucaucagaggcaggccaaaagagaauacaauuuggaccagcggguccucaaucaguuuuuguggagucaacucugacacugugggcuggagcuggcccgauggugcagaguuaccguucacaauagacaaguga

SEQ ID NO: 147532 - RNA, 1410 nt, Artificial Sequence
  derived and/or modified CDS sequence (opt3) from neuraminidase__InfluenzaA__ADM14611
augaaccccaaucagaagaucauuaccauaggcagcgugugcaugacaaucgggauggccaaccugauucuccaaaucggaaauauuaucuccauauggaucucucacucaauucagcuugguaaccagaaucagaucgagacuuguaaccaaagugucauuacguacgaaaauaacaccuggguuaaucagacauaugugaacaucagcaauacuaacuucgcugcaggccaguccguagugucugucaaacugucggggaauagcagcuugugcccugugaguggaugggccauauacuccaaggacaacucuauuagaaucggcagcaaaggugauguuuuugugauuagggagccauucaucuccuguucaccguuagaaugccggaccuuuuuccugacacagggggcgcuacucaaugacaagcauaguaacggaaccaucaaagaucgcagccccuaucgaacucugaugucuuguccuauuggcgaggucccaucccccuacaacucacguuuugaaagcguggcuuggagugccucugcaugccacgacggcauaaauuggcuuacaaucgggauuuccggaccugauaacggugccguagcuguucugaaguauaauggcaucauaaccgacacgauuaagagcuggagaaacaauaucuugaggacucaagagucggagugugcaugcgugaacgggucuuguuucaccgucaugacagauggaccauccgacggccaggccucauacaaaaucuuucggauugaaaaggguaaaaucgugaagaguguggagaugaaugcucccaacuaucauuacgaagagugcagcuguuacccugauuccucugagauuacuugcgucugccgcgacaauuggcacgggagcaacagaccauggguuucauucaaucagaaccucgaauaucagauaggauacaucuguaguggcauuuuuggcgauaauccgaggcccaacgacaaaaccggguccugcggaccugugagcucuaauggugccaacggcguaaagggguucucauuuaaguauggaaacggcguguggaucggucggacaaaaaguaucagcucccgcaauggguucgagaugauuugggauccaaacggcuggaccggaacggacaauaacuuuucuauaaagcaagacaucgucggcauuaaugaauggucgggguacagcggauccuucgugcagcaucccgagcugacuggucuggauuguauccgaccuugcuucuggguugaacucauuagaggcaggccaaaagagaacacaaucuggaccucagggaguucuauaucauuuuguggagucaauuccgacacugugggcuggucauggcccgauggugcggaguuaccguucacaaucgacaaguga

SEQ ID NO: 147533 - RNA, 1410 nt, Artificial Sequence; identical to SEQ ID NO: 144786
  derived and/or modified CDS sequence (opt3) from neuraminidase__InfluenzaA__ADM14620

SEQ ID NO: 147534 - RNA, 1410 nt, Artificial Sequence; identical to SEQ ID NO: 144786
  derived and/or modified CDS sequence (opt3) from neuraminidase__InfluenzaA__ADM14629

SEQ ID NO: 147535 - RNA, 1410 nt, Artificial Sequence; identical to SEQ ID NO: 144786
  derived and/or modified CDS sequence (opt3) from neuraminidase__InfluenzaA__ADM14639

SEQ ID NO: 147536 - RNA, 1410 nt, Artificial Sequence; identical to SEQ ID NO: 144786
  derived and/or modified CDS sequence (opt3) from neuraminidase__InfluenzaA__ADM14657

SEQ ID NO: 147537 - RNA, 1410 nt, Artificial Sequence; identical to SEQ ID NO: 144786
  derived and/or modified CDS sequence (opt3) from neuraminidase__InfluenzaA__ADM14666

SEQ ID NO: 147538 - RNA, 1410 nt, Artificial Sequence; identical to SEQ ID NO: 144786
  derived and/or modified CDS sequence (opt3) from neuraminidase__InfluenzaA__ADM14684

SEQ ID NO: 147539 - RNA, 1410 nt, Artificial Sequence
  derived and/or modified CDS sequence (opt3) from neuraminidase__InfluenzaA__ADM14693
augaaccccaaucagaagaugaucaccauuggcagcgugugcaugacaauagggauggccaaccugauccuccaaauuggaaauaucauuuccaucuggauaucucacucaauccagcuugguaaccagaaucagauugagacuuguaaccaaagugucaucacguacgaaaauaacaccuggguuaaucagacauaugugaacauuagcaauacuaacuucgcugcaggccaguccguagugucugucaaacuggccggaaauucgucauugugcccugugagcggaugggcgaucuacaguaaggacaacuccauaagaauuggcucuaaaggugauguuuuugugaucagggagccauucauuagcuguuccccguuagaaugccggaccuuuuuccugacacagggggcucuacucaaugacaagcauucaaacggaaccaucaaagaucgcagucccuaucgaacucugaugagcuguccuaucggcgaggucccaucucccuacaacucccguuuugaaucaguggccuggagcgcaagugccugccacgacggcauuaauuggcuuacaauagggaucucuggaccugauaacggugcuguagcaguucugaaguauaauggcauuaucaccgacacgauaaaguccuggagaaacaauauuuugaggacucaagagagcgagugugccugcgugaacgggucguguuucaccgucaugacagauggaccaucugacggccaggcuuccuacaaaaucuuucggaucgaaaaggguaaaauugugaagucaguggagaugaaugcccccaacuaucauuacgaagagugcaguuguuacccugauagcuccgagaucacuugcgucugccgcgacaauuggcacgggucuaacagaccauggguuagcuucaaucagaaccucgaauaucagauuggauacauauguucaggcaucuuuggcgauaauccgaggcccaacgacaaaaccgggaguugcggaccuguguccagcaauggugcgaacggcguaaagggguucucuuuuaaguauggaaacggcguguggauuggucggacaaaaucaaucaguagccgcaauggguucgagaugaucugggauccaaacggcuggaccggaacggacaauaacuuuuccauuaagcaagacauagucggcaucaaugaauggucuggguacucggggagcuucgugcagcaucccgagcugacuggucuggauuguauucgaccuugcuucuggguugaacucaucagaggcaggccaaaagagaacacaauuuggaccuccgggucaaguaucucuuuuuguggagugaauagcgacacugucggcugguccuggcccgauggugcagaguuaccguucacaauagacaaguga

SEQ ID NO: 147540 - RNA, 1410 nt, Artificial Sequence
  derived and/or modified CDS sequence (opt3) from neuraminidase__InfluenzaA__ADM14702
augaaccccaaucagaagaucauuaccauaggcagcgugugcaugacaaucgggauggccaaccugauucuccaaaucggaaauauuaucuccauauggaucucucacucaauucagcuugguaaccagaaucagaucgagacuuguaaccaaagugucauuacguacgaaaauaacaccuggguuaaucagacauaugugaacaucagcaauacuaacuucgcugcaggccaguccguagugucugucaaacuggccggaaauucgucauugugcccugugagcggaugggcgauauacaguaaggacaacuccauuagaaucggcucuaaaggugauguuuuugugauuagggagccauucaucagcuguucccauuuagaaugccggaccuuuuuccugacacagggggcucuacucaaugacaagcacucaaacggaaccaucaaagaucgcaguccguaucgaacucugaugagcugucccauuggcgaggucccuucuccauacaacucccguuuugaaucaguggccuggagcgcaagugccugccaugacggcauaaauuggcuuacaaucgggauuucuggacccgauaacggugcuguagcaguucugaaguauaauggcaucauaaccgacacgauuaaguccuggagaaacaauaucuugaggacucaagagagcgagugugccugcgugaacgggucguguuucaccgucaugacagauggaccuucugacggccaggcuuccuacaaaaucuuucggauugaaaaggguaaaaucgugaagucaguggagaugaaugccccaaacuaucacuacgaagagugcaguuguuaccccgauagcuccgagauuacuugcgucugccgcgacaauuggcaugggucuaacagaccuuggguuagcuucaaucagaaccucgaauaucagauaggauacaucuguucaggcauuuuuggcgauaauccaaggccgaacgacaaaaccgggaguugcggacccguguccagcaauggugcgaacggcguaaagggguucucuuuuaaguauggaaacggcgcauggaucggucggacaaaaucaaccaguagccgcaauggguucgagaugaucugggauccuaacggcuggacgggaacugacaauaacuuuuccauuaagcaagacauagugggcaucaaugaauggucuggguacucggggagcuucguccagcacccagagcugacaggucuggauuguauucgacccugcuucuggguggaacucaucagaggcaggccuaaagagaacaccauuuggacuuccgggucaaguaucucuuuuuguggaguuaauagcgacacagugggcugguccuggccagauggugccgaguuacccuucaccauagacaaguga

SEQ ID NO: 147541 - RNA, 1410 nt, Artificial Sequence; identical to SEQ ID NO: 146688
  derived and/or modified CDS sequence (opt3) from neuraminidase__InfluenzaA__ADM14711

SEQ ID NO: 147542 - RNA, 1410 nt, Artificial Sequence
  derived and/or modified CDS sequence (opt3) from neuraminidase__InfluenzaA__ADM14720
augaaccccaaucagaagaucauuaccauaggcagcgugugcaugacaaucgggauggccaaccugauucuccaaaucggaaauauuaucuccauauggaucucucacucaauucagcuugguaaccagaaucagaucgagacuuguaaccaaagugucauuacguacgaaaauaacaccuggguuaaucagacauaugugaacaucagcaauacuaacuucgcugcaggccaguccguagugucugucaaacuggccggaaauucgucauugugcccugugagcggaugggcgauauacaguaaggacaacuccauuagaaucggcucuaaaggugauguuuuugugauuagggagccauucaucagcuguuccccguuagaaugccggaccuuuuuccugacacagggggcucuacucaaugacaagcauucaaacggaaccaucaaagaucgcagucccuaucgaacucugaugagcuguccuauuggcgaggucccaucucccuacaacucccguuuugaaucaguggccuggagcgcaagugccugccacgacggcauaaauuggcuuacaaucgggauuucuggaccugauaacggugcuguagcaguucugaaguauaauggcaucauaaccgacacgauuaaguccuggagaaacaauaucuugaggacucaagagagcgagugugccugcgugaacgggucguguuucaccgucaugacagauggaccaucugacggccaggcuuccuacaaaaucuuucggauugaaaaggguaaaaucgugaagucaguggagaugaaugcccccaacuaucauuacgaagagugcaguuguuacccugauagcuccgagauuacuugcgucugccgcgacaauuggcacgggucuaacagaccauggguuagcuucaaucagaaccucgaauaucagauaggauacaucuguucaggcguguuuggcgauaauccgaggcccaacgacaaaaccgggaguugcggaccuguauccagcaauggugcgaacggcgugaagggguucucuuuuaaguauggaaacggcgucuggauuggucggacaaaaucaaucaguagccgcaauggguucgagaugaucugggauccaaacggcuggaccggaacggacaauaacuuuuccauuaagcaagacauagugggcaucaaugaauggucuggguacucggggagcuucguucagcaucccgagcugacuggucuggauuguauucgaccuugcuucuggguggaacucaucagaggcaggccaaaagagaacacaauuuggaccuccgggucaaguaucucuuuuuguggagucaauagcgacacugugggcugguccuggcccgauggugcagaguuaccguucacaauagacaaguga

SEQ ID NO: 147543 - RNA, 1410 nt, Artificial Sequence
  derived and/or modified CDS sequence (opt3) from neuraminidase__InfluenzaA__ADM14730
augaaccccaaucagaagaucauuaccauaggcagcgugugcaugacaaucgggauggccaaccugauucuccaaaucggaaauauuaucuccauauggaucucucacucaauucagcuugguaaccagaaucagaucgagacuuguaaccaaaguauuaucacguacgaaaauaacaccugggucaaucagacauauguuaacauaagcaauacuaacuucgcugcaggccaguccgugguaucugugaaacuggccgggaauagcucauugugcccugucagcggaugggcgguguacaguaaggacaacuccauuagaaucggcucuaaaggugauguuuuagugauuagggagccauuuaucagcuguuccccgcuggaaugccggaccuucuuucuaacacagggggcucuccugaaugacaagcauucaaacggaaccaucaaagaucgcagucccuaucgaacucuuaugagcuguccuauuggcgaggucccaucucccuacaacucccguuucgaaucaguggccuggagcgcaagugccugccacgacggcauaaauuggcugacaaucgggauuucuggaccugauaacggugcuguagcaguuuugaaguauaauggcaucauaaccgacacgauuaaguccuggagaaacaauauccucaggacucaagagagcgagugugccugcgugaacgggucguguuuuaccgucaugacagauggaccaucugacggccaggcuuccuacaaaaucuuccggauugaaaaggguaaaaucgugaagucaguggagaugaaugcccccaacuaucauuacgaagagugcaguuguuacccugauagcuccgagauuacuugcgucugccgcgacaauuggcacgggucuaacagaccauggguuagcuuuaaucagaaccuggaauaucagauaggauacaucuguucaggcauuuucggcgauaauccgaggcccaacgacaaaaccgggaguugcggaccuguguccagcaauggugcgaacggcguaaagggguuuucuuucaaguauggaaacggcguguggaucggucggacaaaaucaaucaguagccgcuccggguuugagaugauuugggauccaaauggcuggaccggaacggacaacaauuucucuauaaagcaagacaucgucggcauuaacgaauggucgggguacagcggauccuuugugcagcaucccgagcugacuggucucgauuguauccgaccuugcuucuggguugaauuaauuagaggcaggccaaaagagaauacaaucuggaccucagggaguucuauaucguucuguggagugaacuccgacacugucggcuggucauggcccgauggugcagagcugccguuuacaaucgacaaguga

SEQ ID NO: 147544 - RNA, 1350 nt, Artificial Sequence
  derived and/or modified CDS sequence (opt3) from neuraminidase__InfluenzaA__ADM14748
augaaccccaaucagaagaucauuaccauaggcagcgugugcaugacaaucgggauggccaaccugauucuccaaaucggaaauauuaucuccauauggaucucucacucaauucagcuugguaaccagaaucagaucgagacuuguaaccaaagugucauuacguacgaaaauaacaccuggguuaaucagacauaugugaacaucagcaauacuaacuucgcugcaggccaguccguagugucugucaaacuggccggaaauucgucauugugcccugugagcgggugggcgauauacaguaaggacaacuccauuagaaucuguaggaccuuuuucuuaacacagggcgcucugcuaaaugauaaacauucuaacgguaccauuaaggaccggagcccauaucgcacucucauguccugcccgaucggggagguucccucaccuuacaacagucgauuugaaagcguggccuggucugcauccgccugucacgauggaaucaauuggcugacaauuggcauaucaggcccagacaacggggcugucgcagugcuuaaauauaauggaaucauuaccgauacgaucaagagcuggcguaacaauauacugagaacucaagagagugaaugcgccuguguaaacgguucuugcuucaccguuaugacagacggccccuccgaugggcaggcuagcuacaagauuuuuaggaucgagaaaggaaagaucgugaaaucggucgagaugaaugccccuaacuaucauuacgaagaguguucuugcuacccagacuccucagaaauuacuugugugugccgggauaauuggcacggcaguaaccgccccugggugagcuucaaucagaacuuggaguaucagaucgguuacauuugcuccgggauauuuggagacaauccuagaccaaacgauaagaccggcucuuguggcccggucagcucaaauggggcgaacggaguuaaagguuucaguuuuaaguauggcaacgggguguggaucggaaggacaaaguccauuagcucucggaauggcuucgagaugaucugggaccccaacgguuggaccgggacggauaauaacuuuucaaucaaacaagacauuguaggcauaaaugaauggaguggauacagcggcuccuucgugcagcauccugagcucacugggcuggacugcauccgcccauguuuuugggucgaacugauucgaggaagacccaaggagaacacaaucuggaccucugguucgagcauuuccuucugcggcguuaauucagauacugugggguggaguuggccugacggagcagaacucccauucacaaucgauaaauga

SEQ ID NO: 147545 - RNA, 1410 nt, Artificial Sequence
  derived and/or modified CDS sequence (opt3) from neuraminidase__InfluenzaA__ADM14758
augaaccccaaucagaagaucauuaccauaggcagcgugugcaugacaaucgggauggccaaccugauucuccaaaucggaaauauuaucuccauauggaucucucacucaauucagcuugguaaccagaaucagaucgagacuuguaaccaaagugucauuacguacgaaaauaacaccuggguuaaucagacauaugugaacaucagcaauacuaacuucgcugcaggccaguccguagugucugucaaacuggccggaaauucgucauugugcccugugagcggaugggcgauauacaguaaggacaacuccauuagaaucggcucuaaaggugauguuuuugugauuagggagccauucaucagcuguuccccguuagaaugccggaccuuuuuccugacacagggggcucuacucaaugacaagcauucaaacggaaccaucaaagaucgcagucccuaucgaacucugaugagcuguccuauuggcgaggucccaucucccuacaacucccguuuugaaucaguggccuggagcgcaagugccugccacgacggcauaaauuggcuuacaaucgggauuucuggaccugauaacggugcuguagcaguucugaaguauaauggcaucauaaccgacacgauuaaguccuggagaaacaauaucuugaggacucaagagagcgagugugccugcgugaacgggucguguuucaccgucaugacagauggaccaucugacggccaggcuuccuacaaaaucuuucggauugaaaaggguaaaaucgugaagucaguggagauuaaugcccccaacuaucauuacgaagagugcaguuguuacccugauagcuccgagauaacuugcgucugccgcgacaauuggcacgggucuaacagaccauggguuagcuucaaucagaaccucgaauaucagaucggauacauuuguucaggcaucuuuggcgauaauccgaggcccaacgacaaaaccgggaguugcggaccuguguccagcaauggugcgaacggcguaaagggguucucuuuuaaguauggaaacggcguguggaucggucggacaaaaucaauuaguagccgcaauggguucgagaugauaugggauccaaacggcuggaccggaacggacaauaacuuuuccaucaagcaagacauugucggcaucaaugaauggucuggguacucggggagcuucgugcagcaucccgagcugacuggucuggauuguauucgaccuugcuucuggguugaacucaucagaggcaggccaaaagagaacacaauauggaccuccgggucaaguaucucuuuuuguggagugaauagcgacacugucggcugguccuggcccgauggugcagaguuaccguucacaauugacaaguga

SEQ ID NO: 147546 - RNA, 1410 nt, Artificial Sequence; identical to SEQ ID NO: 147545
  derived and/or modified CDS sequence (opt3) from neuraminidase__InfluenzaA__ADM14767

SEQ ID NO: 147547 - RNA, 1410 nt, Artificial Sequence; identical to SEQ ID NO: 144786
  derived and/or modified CDS sequence (opt3) from neuraminidase__InfluenzaA__ADM14777

SEQ ID NO: 147548 - RNA, 1410 nt, Artificial Sequence; identical to SEQ ID NO: 144786
  derived and/or modified CDS sequence (opt3) from neuraminidase__InfluenzaA__ADM14814

SEQ ID NO: 147549 - RNA, 1410 nt, Artificial Sequence; identical to SEQ ID NO: 144786
  derived and/or modified CDS sequence (opt3) from neuraminidase__InfluenzaA__ADM14823

SEQ ID NO: 147550 - RNA, 1410 nt, Artificial Sequence; identical to SEQ ID NO: 146409
  derived and/or modified CDS sequence (opt3) from neuraminidase__InfluenzaA__ADM14841

SEQ ID NO: 147551 - RNA, 1410 nt, Artificial Sequence; identical to SEQ ID NO: 146409
  derived and/or modified CDS sequence (opt3) from neuraminidase__InfluenzaA__ADM14859

SEQ ID NO: 147552 - RNA, 1410 nt, Artificial Sequence; identical to SEQ ID NO: 145923
  derived and/or modified CDS sequence (opt3) from neuraminidase__InfluenzaA__ADM14868

SEQ ID NO: 147553 - RNA, 1410 nt, Artificial Sequence; identical to SEQ ID NO: 146409
  derived and/or modified CDS sequence (opt3) from neuraminidase__InfluenzaA__ADM14878

SEQ ID NO: 147554 - RNA, 1410 nt, Artificial Sequence; identical to SEQ ID NO: 144786
  derived and/or modified CDS sequence (opt3) from neuraminidase__InfluenzaA__ADM14887

SEQ ID NO: 147555 - RNA, 1410 nt, Artificial Sequence
  derived and/or modified CDS sequence (opt3) from neuraminidase__InfluenzaA__ADM14896
augaaccccaaucagaagaucauuaccauaggcagcgugugcaugacaaucgggauggccaaccugauucuccaaaucggaaauauuaucuccauauggaucucucacucaauucagcuugguaaccagaaucagaucgagacuuguaaccaaagugucauuacguacgaaaauaacaccuggguuaaucagacauaugugaacaucagcaauacuaacuucgcugcaggccaguccguagugucugucaaacuggccggaaauucgucauugugcccugugagcggaugggcgauauacaguaaggacaacuccauuagaaucggcucuaaaggugauguuuuagugauuagggagccauuuaucagcuguuccccgcuggaaugccggaccuucuuucuaacacagggggcucuccugaaugacaagcauucaaacggaaccaucaaagaucgcagucccuaucgaacucuuaugagcuguccuauuggcgaggucccaucucccuacaacucccguuucgaaucaguggccuggagcgcaagugccugccacgacggcauaaauuggcugacaaucgggauuucuggaccugauaacggugcuguagcaguuuugaaguauaauggcaucauaaccgacacgauuaaguccuggagaaacaauauccucaggacucaagagagcgagugugccugcgugaacgggucguguuuuaccgucaugacagauggaccaucugacggccaggcuuccuacaaaaucuuccggauugaaaaggguaaaaucgugaagucaguggagaugaaugcccccaacuaucauuacgaagagugcaguuguuacccugauagcuccgagauuacuugcgucugccgcgacaauuggcacgggucuaacagaccauggguuagcuuuaaucagaaccuggaauaucagauaggauacaucuguucaggcauuuucggcgauaauccgaggcccaacgacaaaaccgggaguugcggaccuguguccagcaauggugcgaacggcguaaagggguuuucuuucaaguauggaaacggcguguggaucggucggacaaaaucaaucaguagccgcaauggguuugagaugauuugggauccaaacggcuggaccggaacggacaauaacuucuccauaaagcaagacaucgucggcauuaaugaauggucuggguacucggggagcuuugugcagcaucccgagcugacuggucucgauuguauccgaccuugcuucuggguugaauuaauuagaggcaggccaaaagagaacacaaucuggaccuccgggucaaguauaucuuucuguggagugaauagcgacacugucggcugguccuggcccgauggugcagagcugccguuuacaaucgacaaguga

SEQ ID NO: 147556 - RNA, 1410 nt, Artificial Sequence; identical to SEQ ID NO: 144786
  derived and/or modified CDS sequence (opt3) from neuraminidase__InfluenzaA__ADM14905

SEQ ID NO: 147557 - RNA, 1410 nt, Artificial Sequence; identical to SEQ ID NO: 144786
  derived and/or modified CDS sequence (opt3) from neuraminidase__InfluenzaA__ADM14923

SEQ ID NO: 147558 - RNA, 1410 nt, Artificial Sequence; identical to SEQ ID NO: 146074
  derived and/or modified CDS sequence (opt3) from neuraminidase__InfluenzaA__ADM14932

SEQ ID NO: 147559 - RNA, 1410 nt, Artificial Sequence; identical to SEQ ID NO: 144786
  derived and/or modified CDS sequence (opt3) from neuraminidase__InfluenzaA__ADM14950

SEQ ID NO: 147560 - RNA, 1410 nt, Artificial Sequence; identical to SEQ ID NO: 145804
  derived and/or modified CDS sequence (opt3) from neuraminidase__InfluenzaA__ADM14959

SEQ ID NO: 147561 - RNA, 1410 nt, Artificial Sequence
  derived and/or modified CDS sequence (opt3) from neuraminidase__InfluenzaA__ADM14977
augaaccccaaucagaagaucauuaccauaggcagcgugugcaugacaaucgggauggccaaccugauucuccaaaucggaaauauuaucuccauauggaucucucacucaauucagcuugguaaccagaaucagaucgagacuuguaaccaaagugucauuacguacgaaaauaacaccuggguuaaucagacauaugugaacaucagcaauacuaacuucgcugcaggccaguccguagugucugucaaacuggccggaaauucgucauugugcccugugaacgggugggcgauauacagcaaggacaauaguguuagaauuggcuccaaaggugauguguuugucaucagggagccauucauuucuuguagcccguuagaaugccggaccuuuuuccugacacagggggcucuacucaacgacaagcauuccaacggaaccaucaaagaucgcucacccuaucgaacucugaugaguuguccuaucggcgaggugccaagccccuacaauucucguuuugaauccguagccuggucagcaagcgccugccacgacggcauuaacuggcuuacaauagggaucaguggaccugauaauggugcuguugcagugcugaaguauaacggcauuaucaccgacacgauaaagucuuggagaaauaacauuuugaggacucaagaguccgagugugccugcgucaaugggagcuguuucaccgugaugacagauggaccaucgaacggccaggcuucuuacaaaaucuuucggaucgaaaaggguaaaauugugaaguccgucgagaugaaugcccccaacuaucauuacgaagagugcucauguuacccugacaguagcgagaucacuugcguuugccgcgauaauuggcacggguccaacagaccaugggugucuuucaaucagaaccucgaauaucagauuggauacauauguagcggcaucuuuggcgacaauccgaggcccaacgauaaaaccgggucaugcggaccuguaaguuccaacggugcgaauggcgugaagggguucagcuuuaaguauggaaacggcgucuggauuggucggacaaaaucuaucucaagucgcaauggguucgagaugaucugggacccaaacggcuggaccggaacggauaauaacuuuagcauuaagcaagacauagugggcaucaaugaaugguccggguacucuggaucguucguucagcaucccgagcugacuggucuggacuguauucgaccuugcuucuggguggaacucaucagaggcaggccaaaagagaacacaauuuggaccagcggguccucaaucaguuuuuguggagucaauucugauacugugggcuggagcuggcccgacggugcagaguuaccguucacaauagauaaguga

SEQ ID NO: 147562 - RNA, 1410 nt, Artificial Sequence; identical to SEQ ID NO: 146409
  derived and/or modified CDS sequence (opt3) from neuraminidase__InfluenzaA__ADM14987

SEQ ID NO: 147563 - RNA, 1410 nt, Artificial Sequence; identical to SEQ ID NO: 145953
  derived and/or modified CDS sequence (opt3) from neuraminidase__InfluenzaA__ADM26787

SEQ ID NO: 147564 - RNA, 1410 nt, Artificial Sequence; identical to SEQ ID NO: 146532
  derived and/or modified CDS sequence (opt3) from neuraminidase__InfluenzaA__ADM26798

SEQ ID NO: 147565 - RNA, 1410 nt, Artificial Sequence
  derived and/or modified CDS sequence (opt3) from neuraminidase__InfluenzaA__ADM26809
augaaccccaaucagaagaucauuaccauaggcagcgugucccugacaaucucuacuauuugcuucuuuaugcaaaucgccauucucaucacgaccgucacacuucacuucaaacaguacgaguuuaacucaccuccaaauaaccagguuaugcugugugaaccgacuauaaucgagagaaauauuaccgaaaucguguauuugacaaacaccacuauugagaaggaaaucugccccaaauuagcugaguacaggaauuggaguaagccucagugugacauaacaggguucgcaccauuuagcaaagauaacuccauucggcugucugccggaggugacaucuggguaacccgcgagcccuaugugucgugcgauccugacaaguguuaccaauucgcgcuaggccaggggacgacugucaauaacgugcauucaaauaacaccguucgagaucguacaccauauagaacucuccugaugaaugaacuuggagugcccuuucaccugggcaccaagcaggucugcauugcuuggagcaguuccucuugucaugacgguaaagccugguugcacgugugcaucacaggggaugacaagaacgcaaccgccagcuucaucuacaauggaaggcucguagauuccguugugucauggaguaaagagauucugcggacgcaggaaagcgagugugucugcauaaacggcacuuguacaguggugaugaccgacggcucugcuuccgggaaggcagauacuaaaauccuguuuauugaggaaggaaagaucguccauacaucaacccucagcgguagugcccaacacguugaggaaugcucuugcuauccucgcuacccaggcgugagauguguaugcagggacaacuggaagggguccaaucggccgauaguggauauuaacaucaaagaccacagcaucgucucgucuuacguguguuccggauuaguuggcgacacgccccgcaagaaugauucaaguagcuccucucauugccuggacccuaacaaugaggaaggugggcacggagugaaaggcugggcuuucgaugacggcaacgaugucuggauggggcgaaccauuagcgagaagucaagacuuggauaugagacauuuaaagugaucgaagguuggaguaaucauaaguccaaauugcagauuaacaggcagguaauaguugaccggggcaaucguagcggguacucuggaaucuucucaguggagggcaagaguuguauuaaccgcugcuuuuaugucgaacugaucagagguaggaaggaggaaacugaggugcuauggaccagcaauuccaucgucguguucugugggacaucuggcacuuacggaaccggcucguggccagauggggccgaccucaaccugaugcccauuuga

SEQ ID NO: 147566 - RNA, 1410 nt, Artificial Sequence
  derived and/or modified CDS sequence (opt3) from neuraminidase__InfluenzaA__ADM26820
augaaccccaaucagaagaucauuaccauaggcagcgugucccugacaaucucuacuauuugcuucuuuaugcagaucgccauucucaucacgaccgucacacuucacuucaaacaguacgaguuuaacucaccuccaaauaaccagguuaugcugugugaaccgacuauaaucgagagaaauauuaccgaaaucguguauuugacaaacaccacuauugagaaggaaaucugccccaaauuagcugaguacaggaauuggaguaagccucagugugacauaacaggguucgcaccauuuagcaaagauaacuccauucggcugucugccggaggugacaucuggguaacccgcgagcccuaugugucgugcgauccugacaaguguuaccaauucgcgcuaggccaggggacgacucucaauaacguccauucaaauaacaccgugcgagaucguacaccauauagaacucugcuuaugaaugaacugggaguucccuuucacuugggcaccaaacaggugugcauugcuuggagcaguuccucuugucaugacgguaaggccuggcuccacgucugcaucacaggggaugacaagaacgcaaccgccagcuucaucuacaauggaaggcugguggauuccguaguuucauggaguaaagagauucugcggacgcaggaaagcgagugugugugcauaaacggcacuuguacagucgugaugaccgacggcucugcuuccgggaaggcagauacuaaaauccucuuuauugaggaaggaaagaucgugcauacaucaaccuuaagcgguagugcccaacacgucgaggaaugcucuugcuauccucgcuacccaggcguuagaugugugugcagggacaacuggaagggguccaaucggccgauaguagauauuaacaucaaagaccacagcaucgugucgucuuacgucuguuccggacuggugggcgacacgccccgcaagaaugauucaaguagcuccucucauugccuugacccuaacaaugaggaaggugggcacggaguuaaaggcugggcuuucgaugacggcaacgauguguggauggggcgaaccauuaaugagacaagcagauugggauaugagacuuuuaaggucaucgaagguuggucaaacccaaaaaguaagcugcagauuaauaggcaagugauaguagaccggggcaaccguuccggguacagcggaaucuucucuguugagggcaaaucauguauuaaucgcugcuuuuauguggaacuaaucagagguaggaaggaggaaaccgagguccucuggacaaguaacagcaucguggucuucugugggacuuccggcaccuacggaacaggcucuuggcccgauggggccgaccugaaucuuaugccuauuuga

SEQ ID NO: 147567 - RNA, 1350 nt, Artificial Sequence
  derived and/or modified CDS sequence (opt3) from neuraminidase__InfluenzaA__ADM31427
augaaccccaaucagaagaucauuaccauaggcagcgugugcaugaucauugggaucgucucccugaugcuccaaauuggaaacaugaucucuauauggguuucacacaguauccagacagguaaucagcaucaggccgagccuauuagaaacacuaauuuccuuacggaaaacgcuguggcaagcguaacccuggccggcaauuccucuuuguguccaaucagggggugggcggugcacucgaaagacaacucaauucggaucggaagcaagggcgaugucuuugugauacgcgagccguucauuaguugcucccauauggaaugucgaacauuuuucuuaacucaaggugcucugcuaaaugacaaacacucuaacgggaccguuaaggaucguagcccccauagaacacucauguccugcccugugggagaggccccaucacccuacaauaguagguuugaaagcgucgcauggucugccuccgcuugucacgacggcaucucauggcugaccauuggcaucagcgggccugauaacggagcaguggccguacuuaaauauaaugguaucauuacugacacaauaaagaguuggggcaacaauauccugcggacccaggagucugagugcgcuuguguuaacggguccugcuucacggugaugacugauggaccaagcaacggccaggccucguacaagauuuuuaaaaucgaaaaggguaaagucgugaagucuguggaguugaaugcgcccaacuaucacuacgaagaguguuccugcuauccugacucaggggagauaauuugugucugccgcgauaauuggcauggaaguaacagaccauggguuagcuucaaucagaaccucgaauaccaaaucggcuauaucugcuccggcguguuuggggacaauccgaggcccaacgauggaaccgguucuuguggcccuaugagcccaaauggggcauacggaauuaaaggcuucucauuuaaguacgguaacgggguauggaucggccggacaaagaguacuaauucccgcagcggauucgagaugauuugggaccccaacggcuggaccgggacagauucugaauuuucagugaaacaggacauagucgccaucaccgacuggaguggauauagcgguuccuucgugcagcacccugagcugacgggccuggauugcauucgaccauguuucuggguugaacucaucagagggaggcccaaggagucuacuaucuggacaucgggaagcuccauuucauuuugcggcgugaauagugacaccgucucuuggagcuggccggauggugcugaguuaccuuucacuauagacaaauga

SEQ ID NO: 147568 - RNA, 1410 nt, Artificial Sequence
  derived and/or modified CDS sequence (opt3) from neuraminidase__InfluenzaA__ADM31481
augaaccccaaucagaagaucauuaccauaggcagcgugugcaugacaaucgggauggccaaccugauucuccaaaucggaaauauuaucuccauauggaucucucacucaauucagcuugguaaccagaaucagaucgagacuuguaaccaaagugucauuacguacgaaaauaacaccuggguuaaucagacauaugugaacaucagcaauacuaacuucgcugcaggccaguccguagugucugucaaacuggccggaaauucgucauugugcccugugagcggaugggcgauauacaguaaggacaacuccauuagaaucggcucuaaaggugauguuuuugugauuagggagccauucaucagcuguuccccguuagaaugccggaccuuuuuccugacacagggggcucuacucaaugacaagcauucaaacggaaccaucaaagaucgcagucccuaucgaacucugaugagcuguccuauuggcgaggucccaucucccuacaacucccguuuugaaucaguggccuggagcgcaagugccugccacgacggcauaaauuggcuuacaaucgggauuucuggaccugauaagggugcuguagcaguucugaaguauaacggcaucauaaccgacacgauuaaauccuggagaaauaacaucuugaggacucaagagagcgagugugccugcgugaaugggucguguuucaccgucaugacagauggaccaucugacggccaggcuuccuacaagaucuuucggauugaaaaagguaagaucgugaaaucaguggagaugaacgcccccaauuaucauuacgaagagugcaguuguuacccugauagcuccgagauuacuugcgucugccgcgacaacuggcacgggucuaauagaccauggguuagcuucaaccagaaucucgaauaucagauaggauacaucuguucaggcauuuuuggcgauaacccgaggcccaaugacaagaccgggaguugcggaccuguguccagcaacggugcgaauggcguaaagggguucucuuuuaaauauggaaacggcguguggaucggucggacaaagucaaucaguagccgcaacggguucgagaugauuugggauccaaauggcuggaccggaacggacaacaauuuuuccauaaaacaagacaucgucggcauuaacgaauggucuggguacucggggagcuucgugcagcaucccgagcugacuggucuggauuguauccgaccuugcuucuggguugaacucauuagaggcaggccaaaggagaauacaaucuggaccuccgggucaaguauaucuuuuuguggagugaacagcgacacugucggcugguccuggcccgauggugcagaguuaccguucacaaucgacaaauga

SEQ ID NO: 147569 - RNA, 1410 nt, Artificial Sequence; identical to SEQ ID NO: 145369
  derived and/or modified CDS sequence (opt3) from neuraminidase__InfluenzaA__ADM31491

SEQ ID NO: 147570 - RNA, 1410 nt, Artificial Sequence; identical to SEQ ID NO: 146991
  derived and/or modified CDS sequence (opt3) from neuraminidase__InfluenzaA__ADM31501

SEQ ID NO: 147571 - RNA, 1410 nt, Artificial Sequence; identical to SEQ ID NO: 144786
  derived and/or modified CDS sequence (opt3) from neuraminidase__InfluenzaA__ADM31511

SEQ ID NO: 147572 - RNA, 1410 nt, Artificial Sequence; identical to SEQ ID NO: 146987
  derived and/or modified CDS sequence (opt3) from neuraminidase__InfluenzaA__ADM31521

SEQ ID NO: 147573 - RNA, 1410 nt, Artificial Sequence; identical to SEQ ID NO: 144786
  derived and/or modified CDS sequence (opt3) from neuraminidase__InfluenzaA__ADM31531

SEQ ID NO: 147574 - RNA, 1410 nt, Artificial Sequence; identical to SEQ ID NO: 146074
  derived and/or modified CDS sequence (opt3) from neuraminidase__InfluenzaA__ADM31541

SEQ ID NO: 147575 - RNA, 1410 nt, Artificial Sequence; identical to SEQ ID NO: 144786
  derived and/or modified CDS sequence (opt3) from neuraminidase__InfluenzaA__ADM31551

SEQ ID NO: 147576 - RNA, 1410 nt, Artificial Sequence; identical to SEQ ID NO: 144786
  derived and/or modified CDS sequence (opt3) from neuraminidase__InfluenzaA__ADM31561

SEQ ID NO: 147577 - RNA, 1410 nt, Artificial Sequence; identical to SEQ ID NO: 144786
  derived and/or modified CDS sequence (opt3) from neuraminidase__InfluenzaA__ADM31571

SEQ ID NO: 147578 - RNA, 1410 nt, Artificial Sequence; identical to SEQ ID NO: 145963
  derived and/or modified CDS sequence (opt3) from neuraminidase__InfluenzaA__ADM31581

SEQ ID NO: 147579 - RNA, 1410 nt, Artificial Sequence; identical to SEQ ID NO: 144786
  derived and/or modified CDS sequence (opt3) from neuraminidase__InfluenzaA__ADM31601

SEQ ID NO: 147580 - RNA, 1410 nt, Artificial Sequence; identical to SEQ ID NO: 146074
  derived and/or modified CDS sequence (opt3) from neuraminidase__InfluenzaA__ADM31611

SEQ ID NO: 147581 - RNA, 1410 nt, Artificial Sequence
  derived and/or modified CDS sequence (opt3) from neuraminidase__InfluenzaA__ADM31621
augaaccccaaucagaagaucauuaccauaggcagcgugugcaugacaaucgggauggccaaccugauucuccaaaucggaaauauuaucuccauauggaucucucacucaauucagcuugguaaccagaaucagaucgagacuuguaaccaaagugucauuacguacgaaaauaacaccuggguuaaucagacauaugugaacaucagcaauacuaacuucgcugcaggccaguccguagugucugucaaacuggccgggaauagcucauugugcccugugagcggaugggcgauauacaguaaggacaacuccauuagaaucggcucuaaaggugauguuuuugugauuagggagccauucaucagcuguuccucauuagaaugccggaccuuuuuccugacacagggggcucuacucaaugacaagcauaguaacggaaccaucaaagaucgcagcccguaucgaacucugaugucuugucccauuggcgaggucccuuccccauacaacucacguuuugaaagcguggccuggagugcaucugccugccacgacggcauaaauuggcuuacaaucgggauuuccggacccgauaacggugcuguagcaguucugaaguauaauggcaucauaaccgacacgauuaagagcuggagaaacaauaucuugaggacucaagagucggagugugccugcgugaacgggucuuguuucaccgucaugacagauggaccuuccgacggccaggcuucauacaaaaucuuucggauugaaaaggguaaaaucgugaagaguguggagaugaaugccccaaacuaucauuacgaagagugcagcuguuaccccgauuccucugagauuacuugcgucugccgcgacaauuggcacgggagcaacagaccuuggguuucauucaaucagaaccucgaauaucagauaggauacaucuguaguggcauuuuuggcgauaauccaaggccgaacgacaaaaccggguccugcggacccgugagcucuaauggugcgaacggcguaaagggguucucauuuaaguauggaaacggcguguggaucggucggacaaaaaguaucagcucccgcaauggguucgagaugauuugggauccuaacggcuggaccggaacggacaauaacuuuucuauaaagcaagacaucgucggcauuaaugaauggucgggguacagcggauccuucgugcagcauccagagcugacuggucuggauuguauccgacccugcuucuggguugaacucauuagaggcaggccuaaagagaacacaaucuggaccucagggaguucuauaucguuuuguggagucaauuccgacacugugggcuggucauggccagauggugcagaguuacccuucacaaucgacaaguga

SEQ ID NO: 147582 - RNA, 1410 nt, Artificial Sequence; identical to SEQ ID NO: 146074
  derived and/or modified CDS sequence (opt3) from neuraminidase__InfluenzaA__ADM31631

SEQ ID NO: 147583 - RNA, 1410 nt, Artificial Sequence; identical to SEQ ID NO: 145963
  derived and/or modified CDS sequence (opt3) from neuraminidase__InfluenzaA__ADM31641

SEQ ID NO: 147584 - RNA, 1410 nt, Artificial Sequence; identical to SEQ ID NO: 146248
  derived and/or modified CDS sequence (opt3) from neuraminidase__InfluenzaA__ADM31651

SEQ ID NO: 147585 - RNA, 1410 nt, Artificial Sequence; identical to SEQ ID NO: 145963
  derived and/or modified CDS sequence (opt3) from neuraminidase__InfluenzaA__ADM31661

SEQ ID NO: 147586 - RNA, 1410 nt, Artificial Sequence
  derived and/or modified CDS sequence (opt3) from neuraminidase__InfluenzaA__ADM31671
augaaccccaaucagaagaucauuaccauaggcagcgugugcaugacaaucgggauggccaaccugauucuccaaaucggaaauauuaucuccauauggaucucucacucaacucagcuugguaaccagaaucagauugagacguguaaccaaagugucaucaccuacgaaaauaacacauggguuaaucagacuuaugugaacauuagcaauaccaacuucgcugcaggccaguccguagugucugccaaacuggcgggaaauucgucauugugcccugucagcggaugggcuaucuacaguaaggacaacuccauaagaauuggcucuaaaggugauguguuuguuaucagggagccauucauuagcuguuccccguuagaaugccggacauuuuuccugacccagggggcccuacucaaugacaagcauucaaacggaacuaucaaagaucgcagucccuaucgaacacugaugagcuguccuaucggcgaggugccaucucccuacaacucccguuuugaaucagucgcauggagcgccagugcuugccacgacggcauuaauuggcuuaccauagggaucucuggaccugauaacggugcaguggccguacugaaguauaauggcauuaucacggacacuauaaaguccuggagaaacaauauuuugaggacccaagagagcgagugugcuugcguuaacgggucguguuucacagugaugacugauggaccaucugacggccaggccuccuacaaaaucuuucggaucgaaaaggguaaaauugucaagucaguggagaugaaugcgcccaacuaucauuacgaagagugcaguuguuacccugauagcuccgagauuaccugcgugugccgcgacaauuggcacgggucuaacagaccaugggucagcuucaaucagaaccucgaauaucagaucggauacauauguucaggcaucuuuggcgauaauccgaggcccaacgacaaaacagggaguugcggaccuguuuccagcaauggugcaaacggcgugaagggguucucuuuuaaguauggaaacggcguauggauuggucggaccaaaucaaucaguagccgcaauggguucgagaugaucugggauccaaacggcuggacgggaacugacaauaacuuuuccauuaagcaagacauagugggcaucaaugaauggucuggguacucggggagcuucguccagcaucccgagcugacaggucuggauuguauucgaccuugcuucuggguggaacucaucagaggcaggccaaaagagaacaccauuuggacuuccgggucaaguaucucuuuuuguggaguuaauagcgacacagugggcugguccuggcccgauggugccgaguuaccguucaccauagacaaguga

SEQ ID NO: 147587 - RNA, 1410 nt, Artificial Sequence; identical to SEQ ID NO: 146074
  derived and/or modified CDS sequence (opt3) from neuraminidase__InfluenzaA__ADM31681

SEQ ID NO: 147588 - RNA, 1410 nt, Artificial Sequence
  derived and/or modified CDS sequence (opt3) from neuraminidase__InfluenzaA__ADM31691
augaaccccaaucagaagauccugaccauuggcagcgugugcaugacaauagggauggccaaccucauccuucaaauuggaaauaucauuuccaucuggauaucucacucaauccagcuggguaaccagaaucagacugagacguguaaccaaagugucauuaccuacgaaaauaacacauggguuaaucagacuuaugugaacaucagcaauaccaacuucgcugcaggccaguccguagugucugucaaauuggccggaaauucgucauuaugcccugugagcggaugggcgauuuacaguaaggacaacuccaucagaauaggcucuaaaggugauguuuuugugauuagggagccauucaucagcuguuccccgcuggaaugccggacauuuuuccuaacccagggggcucuccugaaugacaagcauucaaacggaacuauuaaagaucgcagucccuaucgaacacuuaugagcuguccuaucggcgaggucccaucucccuacaacucccguuuugaaucaguggccuggagcgcaagugccugccacgacggcaucaauuggcugaccauugggauaucuggaccugauaacggugcuguagcaguuuugaaguauaauggcaucauuacggacacuaucaaguccuggagaaacaauauacucaggacccaagagagcgagugugccugcgugaacgggucguguuucacagucaugacugauggaccaucugacggccaggcuuccuacaaaauuuuucggaucgaaaaggguaaaaucgugaagucaguggagaugaaugcccccaacuaucauuacgaagagugcaguuguuacccugauagcuccgagauuaccugcgucugccgcgacaauuggcacgggucuaacagaccauggguuagcuucaaucagaaccuggaauaucagaucggauacauuuguucaggcauauuuggcgauaauccgaggcccaacgacaaaacagggaguugcggaccuguguccagcaauggugcgaacggcguaaagggguucucuuuuaaguauggaaacggcguguggaucggucggaccaaaucaauuaguagccgcaauggguucgagaugaucugggauccaaacggcuggacgggaacugacaauaacuuuuccaucaagcaagacauugucggcauaaaugaauggucuggguacucggggagcuucgugcagcaucccgagcugacaggucucgauuguauccgaccuugcuucuggguugaauuaauuagaggcaggccaaaagagaacaccaucuggacuuccgggucaaguauuucuuuuuguggagugaauagcgacacagucggcugguccuggcccgauggugcagagcugccguucaccaucgacaaguga

SEQ ID NO: 147589 - RNA, 1410 nt, Artificial Sequence; identical to SEQ ID NO: 144786
  derived and/or modified CDS sequence (opt3) from neuraminidase__InfluenzaA__ADM31701

SEQ ID NO: 147590 - RNA, 1410 nt, Artificial Sequence; identical to SEQ ID NO: 144786
  derived and/or modified CDS sequence (opt3) from neuraminidase__InfluenzaA__ADM31711

SEQ ID NO: 147591 - RNA, 1410 nt, Artificial Sequence; identical to SEQ ID NO: 146074
  derived and/or modified CDS sequence (opt3) from neuraminidase__InfluenzaA__ADM31721

SEQ ID NO: 147592 - RNA, 1410 nt, Artificial Sequence
  derived and/or modified CDS sequence (opt3) from neuraminidase__InfluenzaA__ADM31731
augaaccccaaucagaagaucauuauaaucggcagcgugugcaugaccauugggauggccaaccugauccuccaaauuggaaauaucauauccaucuggauuucucacucaauccagcuugguaaccagaaucagauugagacauguaaccaaagugucaucacuuacgaaaauaacacguggguuaaucagaccuaugugaacauaagcaauacaaacuucgcugcaggccaguccguagugucugucaaacuggccggaaauucgucauugugcccugugagcggaugggcgauuuacaguaaggacaacuccaucagaauuggcucuaaaggugauguuuuugugaucagggagccauucaucagcuguuccccguuagaaugccggaccuuuuuccugacucagggggcucuacucaaugacaagcauucaaacggaacaauuaaagaucgcagucccuaucgaacccugaugagcuguccuauaggcgaggucccaucucccuacaacucccguuuugaaucaguggccuggagcgcaagugccugccacgacggcaucaauuggcuuacuauugggaucucuggaccugauaacggugcuguagcaguucugaaguauaauggcauaauuacagacaccaucaaguccuggagaaacaauaucuugaggacgcaagagagcgagugugccugcgugaacgggucguguuucacugucaugaccgauggaccaucugacggccaggcuuccuacaaaauuuuucggaucgaaaagggucgcauugugaaaucaguggagaugaaugcccccaacuaucauuacgaagagugcaguuguuacccugauagcuccgagauaacaugcgucugcagagacaauuggcacgggucuaacaggccauggguuagcuucaaucagaaccucgaauaucagaucggauacauuuguucaggcaucuuuggcgauaauccgcggcccaacgacaagacugggaguugcggaccuguguccagcaauggugcgaacggcguaaaaggguucucuuuuaaguauggaaacggcguguggaucggucgcaccaagucaauuaguagccgaaauggguucgagaugauaugggauccaaacggcuggacaggaaccgacaauaacuuuuccaucaaacaagacauugucggcaucaaugaauggucuggguacucggggagcuucgugcagcaucccgagcugacgggucuggauuguauuagaccuugcuucuggguugaacucaucaggggccggccaaaggagaacacuauauggacauccgggucaaguaucucuuuuuguggagugaauagcgacaccgucggcugguccuggcccgauggugcagaguuaccguucacuauugacaaauga

SEQ ID NO: 147593 - RNA, 1410 nt, Artificial Sequence; identical to SEQ ID NO: 147161
  derived and/or modified CDS sequence (opt3) from neuraminidase__InfluenzaA__ADM31741

SEQ ID NO: 147594 - RNA, 1410 nt, Artificial Sequence; identical to SEQ ID NO: 144786
  derived and/or modified CDS sequence (opt3) from neuraminidase__InfluenzaA__ADM31751

SEQ ID NO: 147595 - RNA, 1410 nt, Artificial Sequence
  derived and/or modified CDS sequence (opt3) from neuraminidase__InfluenzaA__ADM31761
augaaccccaaucagaagaucauuaccauaggcagcgugugcaugacaaucgggauggccaaccugauucuccaaaucggaaauauuaucuccauauggaucucucacucaauucagcuugguaaccagaaucagaucgagacuuguaaccaaagugucauuacguacgaaaauaacaccuggguuaaucagacauaugugaacaucagcaauacuaacuucgcugcaggccaguccguagugucugucaaacuggccgggaauagcucauugugcccugugagcggaugggcgauauacaguaaggacaacuccauuagaaucggcucuaaaggugauguuuuugugauuagggagccauucaucagcuguuccccguuagaaugccggaccuuuuuccugacacagggggcucuacucaaugacaagcauucaaacggaaccaucaaagaucgcagucccuaucgaacucugaugagcuguccuauuggcgaggucccaucucccuacaacucccguuuugaaucaguggccuggagcgcaagugccugccacgacggcauaaauuggcuuacaaucgggauuucuggaccugauaacggugcuguagcaguucugaaguauaauggcaucauaaccgacacgauuaaguccuggagaaacaauaucuugaggacucaagagagcgagugugccugcgugaacgggucguguuucaccgucaugacagauggaccaucugacggccaggcuuccuacaaaaucuuucggauugaaaaggguaaaaucgugaagucaguggagaugaaugcccccaacuaucauuacgaagagugcaguuguuacccugauagcuccgagauuacuugcgucugccgcgacaauuggcacgggucuaacagaccauggguuagcuucaaucauaaccucgaauaucagauaggauacaucuguucaggcauuuuuggcgauaauccgaggcccaacgacaaaaccgggaguugcggaccuguguccagcaauggugcgaacggcguaaagggguucucuuuuaaguauggaaacggcguguggaucggucggacaaaaucaaucaguagccgcaauggguucgagaugauuugggauccaaacggcuggaccggaacggacaauaaguuuuccauaaaacaggacaucgucggcauuucugaauggucgggguacagcggauccuucgugcaacaccccgagcugacuggucuggauuguauccgaccuugcuucuggguugaacucauuagaggcaggccaaaggagaacacaaucuggaccucagggaguucuauaucguuuuguggagucaauuccgacacugugggcuggucauggcccgauggugcagaguuaccguucacaaucgacaaauga

SEQ ID NO: 147596 - RNA, 1410 nt, Artificial Sequence
  derived and/or modified CDS sequence (opt3) from neuraminidase__InfluenzaA__ADM31771
augaaccccaaucagaagauccugaccauuggcagcgugugcaugacaauagggauggccaaccucauccuucaaauuggaaauaucauuuccaucuggauaucucacucaauccagcuggguaaccagaaucagacugagacguguaaccaaagugucauuaucuacgaaaauaacaccuggguuaaucagacauaugugaacauuagcaauacuaacuucgcugcaggccaguccguagugucugucaaauuggccggaaauucgucauuaugcccugugagcggaugggcgaucuacaguaaggacaacuccauaagaauuggcucuaaaggugauguuuuugugaucagggagccauucauuagcuguuccccgcuggaaugccggaccuuuuuccuaacacagggggcucuccugaaugacaagcauucaaacggaaccaucaaagaucgcagucccuaucgaacucuuaugagcuguccuaucggcgaggucccaucucccuacaacucccguuuugaaucaguggccuggagcgcaagugccugccacgacggcauuaauuggcugacaauagggaucucuggaccugauaacggugcuguagcaguuuugaaguauaauggcauuaucaccgacacgauaaaguccuggagaaacaauauucucaggacucaagagagcgagugugccugcgugaacgggucguguuucaccgucaugacagauggaccaucugacggccaggcuuccuacaaaaucuuucggaucgaaaaggguaaaauugugaagucaguggagaugaaugcccccaacuaucauuacgaagagugcaguuguuacccugauagcuccgagaucacuugcgucugccgcgacaauuggcacgggucuaacagaccauggguuagcuucaaucagaaccuggaauaucagauuggauacauauguucaggcaucuuuggcgauaauccgaggcccaacgacaaaaccgggaguugcggaccuguguccagcaauggugcgaacggcguaaagggguucucuuuuaaguauggaaacggcguguggauuggucggacaaaaucaaucaguagccgcaauggguucgagaugaucugggauccaaacggcuggaccggaacggacaauaacuuuuccauuaagcaagacauagucggcaucaaugaauggucuggguacucggggagcuucgugcagcaucccgagcugacuggucucgauuguauucgaccuugcuucuggguugaauuaaucagaggcaggccaaaagagaacacaauuuggaccuccgggucaaguaucucuuuuuguggagugaauagcgacacugucggcugguccuggcccgauggugcagagcugccguucacaauagacaaguga

SEQ ID NO: 147597 - RNA, 1410 nt, Artificial Sequence
  derived and/or modified CDS sequence (opt3) from neuraminidase__InfluenzaA__ADM31801
augaaccccaaucagaagaucauuaccauaggcagcgugugcaugacaaucgggauggccaaccugauucuccaaaucggaaauauuaucuccauauggaucucucacucaauucagcuugguaaccagaaucagaucgagacuuguaaccaaagugucauuacguacgaaaauaacaccuggguuaaucagacauaugugaacaucaauaacacuaauuucgcugcaggccagagcguaguguccgucaaacuggccgggaacucuucguugugcccugugucaggaugggcgauauacagcaaggacaauaguauuagaaucggcuccaaaggugauguuuuugugauuagggagccauucaucucuuguagcccguuagaaugccggaccuuuuuccugacacagggggcucuacucaacgacaagcauuccaacggaaccaucaaagaucgcucacccuaucgaacucugaugaguuguccuauuggcgaggucccaagccccuacaauucucguuuugaauccguggccuggucagcaagcgccugccacgacggcauaaacuggcuuacaaucgggauuaguggaccugauaauggugcuguagcaguucugaaguauaacggcaucauaaccgacacgauuaagucuuggagaaauaacaucuugaggacucaagaguccgagugugccugcgugaaugggagcuguuucaccgucaugacagauggaccaucggacggccaggcuucuuacaaaaucuuucggauugaaaaggguaaaaucgugaaguccguggagaugaacgcccccaauuaucauuacgaagagugcucauguuacccugauaguagcgagauuacuugcgucugccgcgacaacuggcacggguccaauagaccauggguuucuuucaaccagaaucucgaauaucagauaggauacaucuguagcggcauuuuuggcgauaacccgaggcccaaugacaaaaccgggucaugcggaccugugaguuccaacggugcgaacggcguaaagggguucagcuuuaaguauggaaauggcguguggaucggucggacaaaaucuaucucaagucgcaacggguucgagaugauuugggauccaaauggcuggaccggaacggacaacaaguuuagcauaaaacaagacaucgucggcauuaaugaaugguccggguacucuggaucguucgugcagcaucccgagcugacuggucuggauuguauccgaccuugcuucuggguugaacucauuagaggcaggccaaaggagaacacaaucuggaccagcggguccucaauaaguuuuuguggagucaauucugacacugugggcuggagcuggcccgauggugcagaguuaccguucacaaucgacaaauga

SEQ ID NO: 147598 - RNA, 1410 nt, Artificial Sequence
  derived and/or modified CDS sequence (opt3) from neuraminidase__InfluenzaA__ADM31811
augaaccccaaucagaagaucauuaccauaggcagcgugugcaugacaaucgggauggccaaccugauucuccaaaucggaaauauuaucuccauauggaucucucacucaauucagcuugguaaccagaaucagaucgagacuuguaaccaaagugucauuacguacgaaaauaacaccuggguuaaucagacauaugugaacaucagcaauacuaacuucgcugcaggccaguccguagugucugucaaauuugccggaaauucgucacugugcccugugagcggaugggcgauauacaguaaggacaacuccauuagaaucggcucuaaaggugauguuuucgugauuagggagccauuuaucagcuguuccccguuggaaugccggaccuucuuuuuaacacagggggcucugcuaaaugacaagcauucaaacggaaccaucaaagaucgcagucccuaucgaacucucaugagcuguccuauuggcgaggucccaucucccuacaacucccguuucgaaucaguggccuggagcgcaagugccugccacgacggcauaaauuggcugacaaucgggauuucuggaccugauaacggugcuguagcaguucuuaaguauaauggcaucauaaccgacacgauuaaguccuggagaaacaauauccugaggacucaagagagcgagugugccugcgugaacgggucguguuuuaccgucaugacagauggaccaucugacggccaggcuuccuacaaaaucuuccggauugaaaaggguaaaaucgugaagucaguggagaugaaugcccccaacuaucauuacgaagagugcaguuguuacccugauagcuccgagauuacuugcgucugccgcgacaauuggcacgggucuaacagaccauggguuagcuuuaaucagaacuuggaauaucagauaggauacaucuguucaggcauuuucggcgauaauccgaggcccaacgacaaaaccgggaguugcggaccuguguccagcaauggugcgaacggcguaaagggguuuucuuucaaguauggaaacggcguguggaucggucggacaaaaucaaucaguagccgcaauggguuugagaugauuugggauccaaacggcuggaccggaacggacaauaaguucuccauaaaacaagacaucgucggcauuaacgaauggucuggguacucggggagcuucgugcagcaucccgagcucacuggucuggauuguauccgaccuugcuuuuggguugaacugauuagaggcaggccaaaggagaauacaaucuggaccuccgggucaaguauaucuuucuguggagugaacagcgacacugucggcugguccuggcccgauggugcagagcucccguuuacaaucgacaaauga

SEQ ID NO: 147599 - RNA, 1410 nt, Artificial Sequence; identical to SEQ ID NO: 145963
  derived and/or modified CDS sequence (opt3) from neuraminidase__InfluenzaA__ADM31821

SEQ ID NO: 147600 - RNA, 1410 nt, Artificial Sequence; identical to SEQ ID NO: 144786
  derived and/or modified CDS sequence (opt3) from neuraminidase__InfluenzaA__ADM31831

SEQ ID NO: 147601 - RNA, 1410 nt, Artificial Sequence; identical to SEQ ID NO: 144786
  derived and/or modified CDS sequence (opt3) from neuraminidase__InfluenzaA__ADM31841

SEQ ID NO: 147602 - RNA, 1410 nt, Artificial Sequence
  derived and/or modified CDS sequence (opt3) from neuraminidase__InfluenzaA__ADM31851
augaaccccaaucagaagauccugaccauuggcagcgugugcaugacaauagggauggccaaccucauccuucaaauuggaaauaucauuuccaucuggauaucucacucaauccagcuggguaaccagaaucagacugagacguguaaccaaagugucauuaccuacgaaaauaacacauggguuaaucagacuuaugugaacaucagcaauaccaacuucgcugcaggccaguccguagugucugucaaauuggccggaaauucgucauuaugcccugugagcggaugggcgauuuacaguaaggacaacuccaucagaauaggcucuaaaggugauguuuuugugauuagggagccauucaucagcuguuccccgcuggaaugccggacauuuuuccuaacccagggggcucuccugaaugacaagcauucaaacggaacuauuaaagaucgcagucccuaucgaacacuuaugagcuguccuaucggcgaggucccaucucccuacaacucccguuuugaaucaguggccuggagcgcaagugccugccacgacggcaucaauuggcugaccauugggauaucuggaccugauaacggugcuguagcaguuuugaaguauaauggcaucauuacggacacuaucaaguccuggagaaacaauauacucaggacccaagagagcgagugugccugcgugaacgggucguguuucacagucaugacugauggaccaucugacggccaggcuuccuacaaaauuuuucggaucgaacgcgguaagaucgugaaaucaguggagaugaaugcccccaacuaucauuacgaagagugcaguuguuacccugauagcuccgagauuaccugcgucugcagagacaauuggcacgggucuaacaggccauggguuagcuucaaucagaaccuggaauaucagaucggauacauuuguucaggcauauuuggcgauaauccgcggcccaacgacaagacagggaguugcggaccuguguccagcaauggugcgaacggcguaaaaggguucucuuuuaaguauggaaacggcguguggaucggucgcaccaagucaauuaguagccgaaauggguucgagaugaucugggauccaaacggcuggacgggaacugacaauaacuuuuccaucaaacaagacauugucggcauaaaugaauggucuggguacucggggagcuucgugcagcaucccgagcugacaggucucgauuguaucagaccuugcuucuggguugaauuaauuaggggccggccaaaggagaacaccaucuggacuuccgggucaaguauuucuuuuuguggagugaauagcgacacagucggcugguccuggcccgauggugcagagcugccguucaccaucgacaaauga

SEQ ID NO: 147603 - RNA, 1410 nt, Artificial Sequence; identical to SEQ ID NO: 144786
  derived and/or modified CDS sequence (opt3) from neuraminidase__InfluenzaA__ADM31861

SEQ ID NO: 147604 - RNA, 1410 nt, Artificial Sequence; identical to SEQ ID NO: 144786
  derived and/or modified CDS sequence (opt3) from neuraminidase__InfluenzaA__ADM31871

SEQ ID NO: 147605 - RNA, 1410 nt, Artificial Sequence
  derived and/or modified CDS sequence (opt3) from neuraminidase__InfluenzaA__ADM31881
augaaccccaaucagaagaucauuaccauaggcagcgugugcaugacaaucgggauggccaaccugauucuccaaaucggaaauacuauuuccaucuggauaucucacucaauccagcuugguaaccagaaucagauugagacguguaaccaaagugucaucaccuacgaaaauaacacauggguuaaucagacuuaugugaacauuagcaauaccaacuucgcugcaggccaguccguagugucugucaaacuggccggaaauucgucauugugcccugugagcggaugggcgaucuacaguaaggacaacuccauaagaauuggcucuaaaggugauguuuuugugaucagggagccauucauuagcuguuccccguuagaaugccggacauuuuuccugacccagggggcucuacucaaugacaagcauucaaacggaacuaucaaagaucgcagucccuaucgaacacugaugagcuguccuaucggcgaggucccaucucccuacaacucccguuuugaaucaguggccuggagcgcaagugccugccacgacggcauuaauuggcuuaccauagggaucucuggaccugauaacggugcuguagcaguucugaaguauaauggcauuaucacggacacuauaaaguccuggagaaacaauauuuugaggacccaagagagcgagugugccugcgugaacgggucguguuucacagucaugacugauggaccaucugacggccaggcuuccuacaaaaucuuucggaucgaaaaggguaaaauugugaagucaguggagaugaaugcccccaacuaucauuacgaagagugcaguuguuacccugauagcuccgagauuaccugcgucugccgcgacaauuggcacgggucuaacagaccauggguuagcuucaaucagaaccucgaauaucagaucggauacauauguucaggcaucuuuggcgauaauccgaggcccaacgacaaaacagggaguugcggaccuguguccagcaauggugcgaacggcguaaagggguucucuuuuaaguauggaaacggcguguggauuggucggaccaaaucaaucaguagccgcaauggguucgagaugaucugggauccaaacggcuggacgggaacugacaauaacuuuuccauuaagcaagacauagucggcaucaaugaauggucuggguacucggggagcuucgugcagcaucccgagcugacaggucuggauuguauucgaccuugcuucuggguugaacucaucagaggcaggccaaaagagaacaccauuuggacuuccgggucaaguaucucuuuuuguggagugaauagcgacacagucggcugguccuggcccgauggugcagaguuaccguucaccauagacaaguga

SEQ ID NO: 147606 - RNA, 1410 nt, Artificial Sequence; identical to SEQ ID NO: 144786
  derived and/or modified CDS sequence (opt3) from neuraminidase__InfluenzaA__ADM31891

SEQ ID NO: 147607 - RNA, 1410 nt, Artificial Sequence; identical to SEQ ID NO: 144776
  derived and/or modified CDS sequence (opt3) from neuraminidase__InfluenzaA__ADM31901

SEQ ID NO: 147608 - RNA, 1410 nt, Artificial Sequence; identical to SEQ ID NO: 146009
  derived and/or modified CDS sequence (opt3) from neuraminidase__InfluenzaA__ADM31911

SEQ ID NO: 147609 - RNA, 1410 nt, Artificial Sequence; identical to SEQ ID NO: 146009
  derived and/or modified CDS sequence (opt3) from neuraminidase__InfluenzaA__ADM31921

SEQ ID NO: 147610 - RNA, 1410 nt, Artificial Sequence; identical to SEQ ID NO: 146467
  derived and/or modified CDS sequence (opt3) from neuraminidase__InfluenzaA__ADM31931

SEQ ID NO: 147611 - RNA, 1410 nt, Artificial Sequence; identical to SEQ ID NO: 144776
  derived and/or modified CDS sequence (opt3) from neuraminidase__InfluenzaA__ADM31941

SEQ ID NO: 147612 - RNA, 1410 nt, Artificial Sequence; identical to SEQ ID NO: 146467
  derived and/or modified CDS sequence (opt3) from neuraminidase__InfluenzaA__ADM31951

SEQ ID NO: 147613 - RNA, 1410 nt, Artificial Sequence
  derived and/or modified CDS sequence (opt3) from neuraminidase__InfluenzaA__ADM31961
augaaccccaaucagaagaucauuaccauaggcagcgugugcauggccaucgggauggcuaaccugauucuccaaaucggaaauauuaucuccauauggaucucucacucaauucagcuugguaaccagaaucagaucgagacauguaaccaaagugucauuacuuacgaaaauaacacguggguuaaucagaccuaugugaacaucagcaauacaaacuucgcagccggccaguccguagugucugucaaacuggcgggaaauucgucauugugcccugugagcggaugggcuauauacaguaaggacaacuccauuagaaucggcucuaaaggugauguuuuugugauuagggagccauucaucagcuguuccccguuagaaugccggaccuuuuuccugacucagggggcccuacucaaugacaagcauucaaacggaacaaucaaagaucgcagucccuaucgaacccugaugagcuguccuauuggcgaggucccaucucccuacaacucccguuuugaaucaguggcauggagcgccagugcuugccacgacggcauaaauuggcuuacuaucgggauuucuggaccugauaacggugcaguagccguucugaaguauaauggcaucauaacagacaccauuaaguccuggagaaacaauaucuugaggacgcaagagagcgagugugcuugcgugaacgggucguguuucacugucaugaccgauggaccaucugacggccaggccuccuacaaaaucuuucggauugaaaaggguaaaaucgugaagucaguggagaugaaugcgcccaacuaucauuacgaagagugcaguuguuacccugauagcuccgagauuacaugcgucugccgcgacaauuggcacgggucuaacagaccauggguuagcuucaaucagaaccucgaauaucagauaggauacaucuguucaggcauuuuuggcgauaauccgaggcccaacgacaaaacugggaguugcggaccuguguccagcaauggugcaaacggcguaaagggguucucuuuuaaguauggaaacggcguguggaucggucggaccaaaucaaucaguagccgcaauggguucgagaugauuugggauccaaacggcuggacaggaaccgacaauaacuuuuccauaaagcaagacaucgucggcauuaaugaauggucuggguacucggggagcuucgugcagcaucccgagcugacgggucuggauuguauccgaccuugcuucuggguugaacucauuagaggcaggccaaaagagaacacuaucuggacauccgggucaaguauaucuuuuuguggagugaauagcgacaccgucggcugguccuggcccgauggugccgaguuaccguucacuaucgacaaguga

SEQ ID NO: 147614 - RNA, 1410 nt, Artificial Sequence
  derived and/or modified CDS sequence (opt3) from neuraminidase__InfluenzaA__ADM31971
augaaccccaaucagaagaucauuaccauaggcagcgugugcaugacaaucgggauggccaaccugauucuccaaaucggaaauauuaucuccauauggaucucucacucaauucagcuugguaaccagaaucagaucgagacuuguaaccaaagugucauuacguacgaaaauaacaccuggguuaaucagacauaugugaacaucagcaauacuaacuucgcugcaggccaguccguagugucuaugaaacuggccggaaauucgucauugugcccugucagcggaugggcgauauacaguaaggacaacuccgugagaauuggcucuaaaggugauguuuuugugaucagggagccauucauuagcuguuccccguuagaaugccggaccuuuuuccugacacagggggcucuacucaaugacaagcauucaaacggaaccaucaaagaucgcagucccuaucgaacucugaugagcuguccuaucggcgaggucccaucucccuacaacucccguuuugaaucaguggccuggagcgcaagugccugccacgacggcauuaauuggcuuacaauagggaucucuggaccugauaacggugcuguagcaguucugaaguauaauggcgugauuaccgacacgaucaaguccuggagaaacaauauauugaggacucaagagagcgagugugccugcgucaacgggucguguuucaccgugaugacagauggaccaucuaauggccaggcuuccuacaaaauuuuucggaucgaaaaggguaaaaucgugaagucagucgagaugaacgcccccaauuaucauuacgaagagugcaguuguuacccugacagcuccgagauuacuugcguuugccgcgauaacuggcacgggucuaauagaccaugggugagcuucaaccagaaucucgaauaucagaucggauacauuuguucaggcauauuuggcgacaacccgaggcccaaugauaaaaccgggaguugcggaccuguauccagcaacggugcgaacggcgugaagggguucucuuuuaaguauggaaauggcgucuggaucggucggacaaaaucaauuaguagccgcaacggguucgagaugaucugggacccaaauggcuggaccggaacggauaacaauuuuuccaucaagcaagacauugugggcauaaacgaauggucuggguacucggggagcuucguucagcaucccgagcugacuggucuggacuguauccgaccuugcuucuggguggaacucauuagaggcaggccaaaagagaauacaaucuggaccuccgggucaaguauuucuuuuuguggagucaacagcgauacugugggcugguccuggcccgacggugcagaguuaccguucacaaucgauaaguga

SEQ ID NO: 147615 - RNA, 1410 nt, Artificial Sequence; identical to SEQ ID NO: 146009
  derived and/or modified CDS sequence (opt3) from neuraminidase__InfluenzaA__ADM31981

SEQ ID NO: 147616 - RNA, 1410 nt, Artificial Sequence; identical to SEQ ID NO: 144776
  derived and/or modified CDS sequence (opt3) from neuraminidase__InfluenzaA__ADM31991

SEQ ID NO: 147617 - RNA, 1410 nt, Artificial Sequence; identical to SEQ ID NO: 144776
  derived and/or modified CDS sequence (opt3) from neuraminidase__InfluenzaA__ADM32001

SEQ ID NO: 147618 - RNA, 1410 nt, Artificial Sequence; identical to SEQ ID NO: 144776
  derived and/or modified CDS sequence (opt3) from neuraminidase__InfluenzaA__ADM32011

SEQ ID NO: 147619 - RNA, 1410 nt, Artificial Sequence; identical to SEQ ID NO: 144786
  derived and/or modified CDS sequence (opt3) from neuraminidase__InfluenzaA__ADM32021

SEQ ID NO: 147620 - RNA, 1410 nt, Artificial Sequence; identical to SEQ ID NO: 145756
  derived and/or modified CDS sequence (opt3) from neuraminidase__InfluenzaA__ADM32031

SEQ ID NO: 147621 - RNA, 1410 nt, Artificial Sequence; identical to SEQ ID NO: 146510
  derived and/or modified CDS sequence (opt3) from neuraminidase__InfluenzaA__ADM32051

SEQ ID NO: 147622 - RNA, 1410 nt, Artificial Sequence; identical to SEQ ID NO: 144786
  derived and/or modified CDS sequence (opt3) from neuraminidase__InfluenzaA__ADM32061

SEQ ID NO: 147623 - RNA, 1410 nt, Artificial Sequence; identical to SEQ ID NO: 144786
  derived and/or modified CDS sequence (opt3) from neuraminidase__InfluenzaA__ADM32071

SEQ ID NO: 147624 - RNA, 1410 nt, Artificial Sequence; identical to SEQ ID NO: 144786
  derived and/or modified CDS sequence (opt3) from neuraminidase__InfluenzaA__ADM32081

SEQ ID NO: 147625 - RNA, 1410 nt, Artificial Sequence; identical to SEQ ID NO: 146009
  derived and/or modified CDS sequence (opt3) from neuraminidase__InfluenzaA__ADM32091

SEQ ID NO: 147626 - RNA, 1410 nt, Artificial Sequence; identical to SEQ ID NO: 144786
  derived and/or modified CDS sequence (opt3) from neuraminidase__InfluenzaA__ADM32101

SEQ ID NO: 147627 - RNA, 1410 nt, Artificial Sequence; identical to SEQ ID NO: 144786
  derived and/or modified CDS sequence (opt3) from neuraminidase__InfluenzaA__ADM32111

SEQ ID NO: 147628 - RNA, 1410 nt, Artificial Sequence; identical to SEQ ID NO: 146467
  derived and/or modified CDS sequence (opt3) from neuraminidase__InfluenzaA__ADM32554

SEQ ID NO: 147629 - RNA, 1410 nt, Artificial Sequence; identical to SEQ ID NO: 144776
  derived and/or modified CDS sequence (opt3) from neuraminidase__InfluenzaA__ADM32564

SEQ ID NO: 147630 - RNA, 1410 nt, Artificial Sequence; identical to SEQ ID NO: 146009
  derived and/or modified CDS sequence (opt3) from neuraminidase__InfluenzaA__ADM32574

SEQ ID NO: 147631 - RNA, 1410 nt, Artificial Sequence; identical to SEQ ID NO: 144786
  derived and/or modified CDS sequence (opt3) from neuraminidase__InfluenzaA__ADM32584

SEQ ID NO: 147632 - RNA, 1410 nt, Artificial Sequence; identical to SEQ ID NO: 146467
  derived and/or modified CDS sequence (opt3) from neuraminidase__InfluenzaA__ADM32594

SEQ ID NO: 147633 - RNA, 1410 nt, Artificial Sequence; identical to SEQ ID NO: 144786
  derived and/or modified CDS sequence (opt3) from neuraminidase__InfluenzaA__ADM32604

SEQ ID NO: 147634 - RNA, 1410 nt, Artificial Sequence; identical to SEQ ID NO: 144786
  derived and/or modified CDS sequence (opt3) from neuraminidase__InfluenzaA__ADM32614

SEQ ID NO: 147635 - RNA, 1410 nt, Artificial Sequence; identical to SEQ ID NO: 144786
  derived and/or modified CDS sequence (opt3) from neuraminidase__InfluenzaA__ADM32624

SEQ ID NO: 147636 - RNA, 1410 nt, Artificial Sequence; identical to SEQ ID NO: 146467
  derived and/or modified CDS sequence (opt3) from neuraminidase__InfluenzaA__ADM32634

SEQ ID NO: 147637 - RNA, 1410 nt, Artificial Sequence; identical to SEQ ID NO: 144786
  derived and/or modified CDS sequence (opt3) from neuraminidase__InfluenzaA__ADM32644

SEQ ID NO: 147638 - RNA, 1410 nt, Artificial Sequence; identical to SEQ ID NO: 144786
  derived and/or modified CDS sequence (opt3) from neuraminidase__InfluenzaA__ADM32664

SEQ ID NO: 147639 - RNA, 1410 nt, Artificial Sequence; identical to SEQ ID NO: 146009
  derived and/or modified CDS sequence (opt3) from neuraminidase__InfluenzaA__ADM32674

SEQ ID NO: 147640 - RNA, 1410 nt, Artificial Sequence; identical to SEQ ID NO: 144786
  derived and/or modified CDS sequence (opt3) from neuraminidase__InfluenzaA__ADM32684

SEQ ID NO: 147641 - RNA, 1410 nt, Artificial Sequence; identical to SEQ ID NO: 144776
  derived and/or modified CDS sequence (opt3) from neuraminidase__InfluenzaA__ADM32694

SEQ ID NO: 147642 - RNA, 1410 nt, Artificial Sequence; identical to SEQ ID NO: 144786
  derived and/or modified CDS sequence (opt3) from neuraminidase__InfluenzaA__ADM32704

SEQ ID NO: 147643 - RNA, 1410 nt, Artificial Sequence; identical to SEQ ID NO: 146510
  derived and/or modified CDS sequence (opt3) from neuraminidase__InfluenzaA__ADM32714

SEQ ID NO: 147644 - RNA, 1410 nt, Artificial Sequence; identical to SEQ ID NO: 146510
  derived and/or modified CDS sequence (opt3) from neuraminidase__InfluenzaA__ADM32724

SEQ ID NO: 147645 - RNA, 1410 nt, Artificial Sequence; identical to SEQ ID NO: 144786
  derived and/or modified CDS sequence (opt3) from neuraminidase__InfluenzaA__ADM32734

SEQ ID NO: 147646 - RNA, 1410 nt, Artificial Sequence; identical to SEQ ID NO: 146009
  derived and/or modified CDS sequence (opt3) from neuraminidase__InfluenzaA__ADM32744

SEQ ID NO: 147647 - RNA, 1410 nt, Artificial Sequence; identical to SEQ ID NO: 146510
  derived and/or modified CDS sequence (opt3) from neuraminidase__InfluenzaA__ADM32754

SEQ ID NO: 147648 - RNA, 1410 nt, Artificial Sequence; identical to SEQ ID NO: 146009
  derived and/or modified CDS sequence (opt3) from neuraminidase__InfluenzaA__ADM32764

SEQ ID NO: 147649 - RNA, 1410 nt, Artificial Sequence
  derived and/or modified CDS sequence (opt3) from neuraminidase__InfluenzaA__ADM32774
augaaccccaaucagaagaucauuauaaucggcagcgugugcaugaccauugggauggccaaccugauccuccaaauuggaaauaucauauccaucuggauuucucacucaauccagcuugguaaccagaaucagauugagacauguaaccaaagugucacuacguacgaaaauaacaccuggguuaaucagacauaugugaacaucagcaauacuaacuucgcugcaggccaguccguagugucugucaaacuggccggaaauucgucauugugcccugugagcggaugggcgauauacaguaaggacaacuccauuagaaucggcucuaaaggugauguuuuugugauuagggagccauucaucagcuguuccccguuagaaugccggaccuuuuuccugacacagggggcucuacucaaugacaagcauucaaacggaaccaucaaagaucgcagucccuaucgaacucugaugagcuguccuauuggcgaggucccaucucccuacaacucccguuuugaaucaguggccuggagcgcaagugccugccacgacggcauaaauuggcuuacaaucgggauuucuggaccugauaacggugcuguagcaguucugaaguauaauggcaucauaaccgacacgauuaaguccuggagaaacaauaucuugaggacucaagagagcgagugugccugcgugaacgggucguguuucaccgucaugacagauggaccaucugacggccaggcuuccuacaaaaucuuucggauugaaaaggguaaaaucgugaagucaguggagaugaaugcccccaacuaucauuacgaagagugcaguuguuacccugauagcuccgagauuacuugcgucugccgcgacaauuggcacgggucuaacagaccauggguuagcuucaaucagaaccucgaauaucagauaggauacaucuguucaggcauuuuuggcgauaauccgaggcccaacgacaaaaccgggaguugcggaccuguguccagcaauggugcgaacggcguaaagggguucucuuuuaaguauggaaacggcguguggaucggucggacaaaaucaaucaguagccgcaauggguucgagaugauuugggauccaaacggcuggaccggaacggacaauaacuuuuccauaaagcaagacaucgucggcauuaaugaauggucuggguacucggggagcuucgugcagcaucccgagcugacuggucuggauuguauccgaccuugcuucuggguugaacucauuagaggcaggccaaaagagaacacaaucuggaccuccgggucaaguauaucuuuuuguggagugaauagcgacacugucggcugguccuggcccgauggugcagaguuaccguucacaaucgacaaguga

SEQ ID NO: 147650 - RNA, 1410 nt, Artificial Sequence; identical to SEQ ID NO: 145756
  derived and/or modified CDS sequence (opt3) from neuraminidase__InfluenzaA__ADM32784

SEQ ID NO: 147651 - RNA, 1410 nt, Artificial Sequence; identical to SEQ ID NO: 146009
  derived and/or modified CDS sequence (opt3) from neuraminidase__InfluenzaA__ADM32794

SEQ ID NO: 147652 - RNA, 1410 nt, Artificial Sequence
  derived and/or modified CDS sequence (opt3) from neuraminidase__InfluenzaA__ADM32804
augaaccccaaucagaagaucauuaccauaggcagcgugugcaugacaaucgggauggccaaccugauucuccaaaucggaaauauuaucuccauauggaucucucacucaauucagcuugguaaccagaaucagaucgagacuuguaaccaaagugucauuacguacgaaaauaacaccuggguuaaucagacauaugugaacaucagcaauacuaacuucgcugcaggccaguccguagugucugucaaacugguggggaauagcucauugugcccuguuagcggaugggccauauacaguaaggacaacuccgugagaauuggcucuaaaggugaugucuuugugaucagggagccauucauuagcuguuccccguuagaaugccggaccuuuuuccugacacagggggcgcuacucaaugacaagcauucaaacggaaccaucaaagaucgcagucccuaucgaacucugaugagcuguccuaucggcgagguaccaucucccuacaacucccguuuugaaucaguugcuuggagcgccagugcaugccacgacggcauuaauuggcuuacaauagggaucucuggaccugauaacggugccguggcuguccugaaguauaauggcauuaucaccgacacgauaaaguccuggagaaacaauauuuugaggacucaagagagcgagugugcaugcgugaacgggucguguuucaccgugaugacagauggaccaucuaauggccaggccuccuacaaaaucuuucggaucgaaaaggguaaaauugucaagucaguugagaugaacgcucccaauuaucauuacgaagagugcaguuguuacccugacagcuccgagaucacuugcgugugccgcgauaacuggcacgggucuaauagaccauggguaucguucaaccagaaucucgaauaucagauuggauacauauguucaggcaucuuuggcgacaacccgaggcccaaugauaaaaccgggaguugcggaccuguguccagcaacggugccaacggcgucaagggguucucuuuuaaguauggaaauggcguguggauuggucggacaaaaucaaucaguagccgcaacggguucgagaugaucugggacccaaauggcuggaccggaacggauaacaauuuuuccauuaagcaagacauaguugaaaucaacgaguggucuggcuacucggggagcuucgugcagcaucccgaacugacuggacuggacuguauucgaccuugcuucugggucgagcucaucagagguaggccaaaagagaauacaauuuggaccuccggcucaaguaucucuuuuuguggggugaacagcgauacuguaggaugguccuggcccgacggcgcggaauuaccguucacaauagauaaguga

SEQ ID NO: 147653 - RNA, 1410 nt, Artificial Sequence
  derived and/or modified CDS sequence (opt3) from neuraminidase__InfluenzaA__ADM32814
augaaccccaaucagaagaucauuaccauaggcagcgugugcaugacaaucgggauggccaaccugauucuccaaaucggaaauauuaucuccauauggaucucucacucaauucagcuugguaaccagaaucaggucgagacuuguaaccaaaguguuaucacguacgaaaauaacaccugggugaaucagacauauguaaacauuagcaauacuaacuucgcugcaggccaguccguggucucugugaaacuggccggaaauucgucauugugcccuguuagcggaugggcgaucuacaguaaggacaacuccauaagaauuggcucuaaaggugauguguuugucaucagggagccauucauuagcuguuccccguuagaaugccggaccuuuuuccugacacagggggcucuacucaaugacaagcauucaaacggaaccaucaaagaucgcagucccuaucgaacucugaugagcuguccuaucggcgaggugccaucucccuacaacucccguuuugaaucaguagccuggagcgcaagugccugccacgacggcauuaauuggcuuacaauagggaucucuggaccugauaacggugcuguugcagugcugaaguauaauggcauuaucaccgacacgauaaaguccuggagaaacaauauuuugaggacucaagagagcgagugugccugcgucaacgggucguguuucaccgugaugacagauggaccaucugacggccaggcuuccuacaaaaucuuucggaucgaaaaggguaaaauugugaagucagucgagaugaaugcccccaacuaucauuacgaagagugcaguuguuacccugauagcuccgagaucacuugcguuugccgcgacaauuggcacgggucuaacagaccaugggugagcuucaaucagaaccucgaauaucagauuggauacauauguucaggcaucuuuggcgauaauccgaggcccaacgacaaaaccgggaguugcggaccuguauccagcaauggugcgaacggcgugaagggguucucuuuuaaguauggaaacggcgucuggauuggucggacaaaaucaaucaguagccgcaauggguucgagaugaucugggauccaaacggcuggaccggaacggacaauaacuuuuccauuaagcaagacauagugggcaucaaugaauggucuggguacucggggagcuucguucagcaucccgagcugacuggucuggauuguauucgaccuugcuucuggguggaacucaucagaggcaggccaaaagagaacacaauuuggaccuccgggucaaguaucucuuuuuguggagucaauagcgacacugugggcugguccuggcccgauggugcagaguuaccguucacaauagacaaguga

SEQ ID NO: 147654 - RNA, 1410 nt, Artificial Sequence; identical to SEQ ID NO: 144786
  derived and/or modified CDS sequence (opt3) from neuraminidase__InfluenzaA__ADM32824

SEQ ID NO: 147655 - RNA, 1410 nt, Artificial Sequence; identical to SEQ ID NO: 146009
  derived and/or modified CDS sequence (opt3) from neuraminidase__InfluenzaA__ADM32834

SEQ ID NO: 147656 - RNA, 1410 nt, Artificial Sequence; identical to SEQ ID NO: 144776
  derived and/or modified CDS sequence (opt3) from neuraminidase__InfluenzaA__ADM32844

SEQ ID NO: 147657 - RNA, 1410 nt, Artificial Sequence
  derived and/or modified CDS sequence (opt3) from neuraminidase__InfluenzaA__ADM32854
augaaccccaaucagaagaucauuaccauaggcagcgugugcacaacuaucgggauggccaaccugauucuccaaaucggaaauauuaucuccauauggaucucucacucaauucaguucgguaaccagaaucagaucgagacguguaaccaaagugucauuaccuacgaaaauaacacauggguuaaucagacuuaugugaacaucagcaauaccaacuuugcugcaggccaguccguagugucugucaaacuugugggaaauucgucacugugcccuguuagcggaugggccauauacaguaaggacaacuccgugagaauuggcucuaaaggugaugucuucgugaucagggagccauuuauuagcuguuccccguuggaaugccggacauucuuuuuaacccagggggcgcugcuaaaugacaagcauucaaacggaacuaucaaagaucgcagucccuaucgaacacucaugagcuguccuaucggcgagguaccaucucccuacaacucccguuucgaaucaguugcuuggagcgccagugcaugccacgacggcauuaauuggcugaccauagggaucucuggaccugauaacggugccguggcuguccuuaaguauaauggcauuaucacggacacuauaaaguccuggagaaacaauauucugaggacccaagagagcgagugugcaugcgugaacgggucguguuuuacagugaugacugauggaccaucuaauggccaggccuccuacaaaaucuuccggaucgaaaaggguaaaauugucaagucaguugagaugaacgcucccaauuaucauuacgaagagugcaguuguuacccugacagcuccgagauuaccugcgugugccgcgauaacuggcacgggucuaauagaccaugggugagcuuuaaccagaauuuggaauaucagaucggauacauauguucaggcaucuucggcgacaacccgaggcccaaugauaaaacagggaguugcggaccuguauccagcaacggugccaacggcgucaagggguuuucuuucaaguauggaaauggcguguggauuggucggaccaaaucaaucaguagccgcaacggguuugagaugaucugggacccaaauggcuggacgggaacugauaacaauuucuccauuaagcaagacauaguuggcaucaacgaauggucuggguacucggggagcuucgugcagcaucccgagcucacaggucuggacuguauucgaccuugcuuuugggucgaacugaucagaggcaggccaaaagagaauaccauuuggacuuccgggucaaguaucucuuucuguggagugaacagcgauacaguaggcugguccuggcccgacggugcggagcucccguuuaccauagauaaguga

SEQ ID NO: 147658 - RNA, 1410 nt, Artificial Sequence; identical to SEQ ID NO: 144776
  derived and/or modified CDS sequence (opt3) from neuraminidase__InfluenzaA__ADM32864

SEQ ID NO: 147659 - RNA, 1410 nt, Artificial Sequence; identical to SEQ ID NO: 144786
  derived and/or modified CDS sequence (opt3) from neuraminidase__InfluenzaA__ADM32874

SEQ ID NO: 147660 - RNA, 1410 nt, Artificial Sequence
  derived and/or modified CDS sequence (opt3) from neuraminidase__InfluenzaA__ADM32884
augaaccccaaucagaagaucauuaccauaggcagcgugugcaugacaaucgggauggccaaccugauucuccaaaucggaaauauuaucuccauauggaucucucacucaauucagcuugguaaccagaaucagaucgagacuuguaaccaaagugucauuacguacgaaaauaacaccuggguuaaucagacauaugugaacaucagcaauacuaacuucgcuguaggccaguccguggucucugugaaacuggcaggaaauucgucauugugcccuguuagcggaugggccauauacaguaaggacaacuccauuagaaucggcucuaaaggugauguguuugucauuagggagccauucaucagcuguuccccguuagaaugccggaccuuuuuccugacacagggggcgcuacucaaugacaagcauucaaacggaaccaucaaagaucgcagucccuaucgaacucugaugagcuguccuauuggcgaggugccaucucccuacaacucccguuuugaaucaguagcuuggagcgccagugcaugccacgacggcauaaauuggcuuacaaucgggauuucuggaccugauaacggugccguugcugugcugaaguauaauggcaucauaaccgacacgauuaaguccuggagaaacaauaucuugaggacucaagagagcgagugugcaugcgucaacgggucguguuucaccgugaugacagauggaccaucugacggccaggccuccuacaaaaucuuucggauugaaaaggguaaaaucgugaagucagucgagaugaaugcucccaacuaucauuacgaagagugcaguuguuacccugauagcuccgagauuacuugcguuugccgcgacaauuggcacgggucuaacagaccaugggugagcuucaaucagaaccucgaauaucagauaggauacaucuguucaggcauuuuuggcgauaauccgaggcccaacgacaaaaccgggaguugcggaccuguauccagcaauggugccaacggcgugaagggguucucuuuuaaguauggaaacggcgucuggaucggucggacaaaaucaaucaguagccgcaauggguucgagaugauuugggauccaaacggcuggaccggaacggacaauaaguuuuccauaaaacaagacaucgugggcauuaacgaauggucuggguacucggggagcuucguucagcaucccgagcugacuggucuggauuguauccgaccuugcuucuggguggaacucauuagaggcaggccaaaggagaauacaaucuggaccuccgggucaaguauaucuuuuuguggagucaacagcgacacugugggcugguccuggcccgauggugcggaguuaccguucacaaucgacaaauga

SEQ ID NO: 147661 - RNA, 1410 nt, Artificial Sequence; identical to SEQ ID NO: 144786
  derived and/or modified CDS sequence (opt3) from neuraminidase__InfluenzaA__ADM32921

SEQ ID NO: 147662 - RNA, 1410 nt, Artificial Sequence; identical to SEQ ID NO: 144786
  derived and/or modified CDS sequence (opt3) from neuraminidase__InfluenzaA__ADM32931

SEQ ID NO: 147663 - RNA, 1410 nt, Artificial Sequence
  derived and/or modified CDS sequence (opt3) from neuraminidase__InfluenzaA__ADM32941
augaaccccaaucagaagaucauuauaaucggcagcgugugcaugaccauugggauggccaaccugauccuccaaauuggaaauaucauauccaucuggauuucucacucaauccagcuugguaaccagaaucagauugagacauguaaccaaagugucaucacuuacgaaaauaacacguggguuaaucagaccuaugugaacauaagcaauacaaacuucgcugcaggccaguccguagugucugucaaacuggccggaaauucgucauugugcccugugagcgggugggcgauuuacaguaaggacaacuccaucagaauuggcucuaaaggugauguuuuugugaucagggagccauucaucagcuguuccccguuagaaugccggaccuuuuuccugacucagggggcucuacucaaugacaagcauucaaacggaacaauuaaagaucgcagucccuaucgaacccugaugagcuguccuauaggcgaggucccaucucccuacaacucccguuuugaaucaguggccuggagcgcaagugccugccacgacggcaucaauuggcuuacuauugggaucucuggaccugauaacggugcuguagcaguucugaaguauaauggcauaauuacagacaccaucaaguccuggagaaacaauaucuugaggacgcaagagagcgagugugccugcgugaacgggucguguuucacugucaugaccgauggaccaucugacggccaggcuuccuacaaaauuuuucggaucgaaaaggguaaaauugugaagucaguggagaugaaugcccccaacuaucauuacgaagagugcaguuguuacccugauagcuccgagauaacaugcgucugccgcgacaauuggcacgggucuaacagaccauggguuagcuucaaucagaaccucgaauaucagaucggauacauuuguucaggcaucuuuggcgauaauccgaggcccaacgacaaaacugggaguugcggaccuguguccagcaauggugcgaacggcguaaagggguucucuuuuaaguauggaaacggcguguggaucggucggaccaaaucaauuaauagucgcaacggguucgagaugauaugggauccaaauggcuggacaggaaccgacaacaauuuuagcaucaagcaagacauugucggcaucaacgaaugguccggguacucuggaucguucgugcagcaucccgagcugacgggucuggauuguauucgaccuugcuucuggguugaacucaucagaggcaggccaaaagagaauacuauauggacaagcggguccucaaucaguuuuuguggagugaacucugacaccgucggcuggagcuggcccgauggugcagaguuaccguucacuauugacaaguga

SEQ ID NO: 147664 - RNA, 1410 nt, Artificial Sequence; identical to SEQ ID NO: 144786
  derived and/or modified CDS sequence (opt3) from neuraminidase__InfluenzaA__ADM32951

SEQ ID NO: 147665 - RNA, 1410 nt, Artificial Sequence; identical to SEQ ID NO: 145369
  derived and/or modified CDS sequence (opt3) from neuraminidase__InfluenzaA__ADM32960

SEQ ID NO: 147666 - RNA, 1410 nt, Artificial Sequence; identical to SEQ ID NO: 144786
  derived and/or modified CDS sequence (opt3) from neuraminidase__InfluenzaA__ADM32969

SEQ ID NO: 147667 - RNA, 1410 nt, Artificial Sequence; identical to SEQ ID NO: 144786
  derived and/or modified CDS sequence (opt3) from neuraminidase__InfluenzaA__ADM32979

SEQ ID NO: 147668 - RNA, 1410 nt, Artificial Sequence; identical to SEQ ID NO: 146688
  derived and/or modified CDS sequence (opt3) from neuraminidase__InfluenzaA__ADM32988

SEQ ID NO: 147669 - RNA, 1410 nt, Artificial Sequence; identical to SEQ ID NO: 146688
  derived and/or modified CDS sequence (opt3) from neuraminidase__InfluenzaA__ADM32997

SEQ ID NO: 147670 - RNA, 1410 nt, Artificial Sequence; identical to SEQ ID NO: 144786
  derived and/or modified CDS sequence (opt3) from neuraminidase__InfluenzaA__ADM33006

SEQ ID NO: 147671 - RNA, 1410 nt, Artificial Sequence; identical to SEQ ID NO: 146688
  derived and/or modified CDS sequence (opt3) from neuraminidase__InfluenzaA__ADM33015

SEQ ID NO: 147672 - RNA, 1410 nt, Artificial Sequence
  derived and/or modified CDS sequence (opt3) from neuraminidase__InfluenzaA__ADM33025
augaaccccaaucagaagaucauuaccauaggcagcgugugcaugacaaucgggauggccaaccugauucuccaaaucggaaauauuaucuccauauggaucucucacucaauucagcuugguaaccagaaucagaucgagacuuguaaccaaagugucauuacguacgaaaauaacaccuggguuaaucagacauaugugaacaucagcaauacuaacuucgcugcaggccaguccguagugucugucaaacuggccgggaauagcucauugugcccugugagcggaugggcgauauacaguaaggacaacuccauuagaaucggcucuaaaggugauguuuuugugauuagggagccauucaucagcuguuccccguuagaaugccggaccuuuuuccugacacagggggcucuacucaaugacaagcauucaaacggaaccaucaaagaucgcagucccuaucgaacucugaugagcuguccuauuggcgaggucccaucucccuacaacucccguuuugaaucaguggccuggagcgcaagugccugccacgacggcauaaauuggcuuacaaucgggauuucuggaccugauaacggugcuguagcaguucugaaguauaauggcaucauaaccgacacgauuaaguccuggagaagcaacaucuugaggacucaagagucggagugugccugcgugaaugggucuuguuucaccgucaugacagauggaccauccgacggccaggcuucauacaaaaucuuucggauugaaaaggguaaaaucgugaagaguguggagaugaacgcccccaauuaucauuacgaagagugcagcuguuacccugauuccucugagauuacuugcgucugccgcgacaacuggcacgggagcaauagaccauggguuucauucaaccagaaucucgaauaucagauaggauacaucuguaguggcauuuuuggcgauaacccgaggcccaaugacaaaaccggguccugcggaccugugagcucuaacggugcgaauggcguaaagggguucucauuuaaguauggaaacggcguguggaucggucggacaaaaaguaucagcucccgcaacggguucgagaugauuugggauccaaauggcuggaccggaacggacaacaauuuuucuauaaagcaagacaucgucggcauuaacgaauggucgggguacagcggauccuucgugcagcaucccgagcugacuggucuggauuguauccgaccuugcuucuggguugaacucauuagaggcaggccaaaagagaauacaaucuggaccucagggaguucuauaucguuuuguggagugaacuccgacacugucggcuggucauggcccgauggugcagaguuaccguucacaaucgacaaguga

SEQ ID NO: 147673 - RNA, 1410 nt, Artificial Sequence; identical to SEQ ID NO: 144786
  derived and/or modified CDS sequence (opt3) from neuraminidase__InfluenzaA__ADM33042

SEQ ID NO: 147674 - RNA, 1410 nt, Artificial Sequence; identical to SEQ ID NO: 144786
  derived and/or modified CDS sequence (opt3) from neuraminidase__InfluenzaA__ADM33062

SEQ ID NO: 147675 - RNA, 1410 nt, Artificial Sequence
  derived and/or modified CDS sequence (opt3) from neuraminidase__InfluenzaA__ADM33071
augaaccccaaucagaagaucauuaccauaggcagcgugugcaugacaaucgggauggccaaccugauucuccaaaucggaaauauuaucuccauauggaucucucacucaauucagcuugguaaccagaaucagaucgagacuuguaaccaaagugucauuacguacgaaaauaacaccuggguuaaucagacauaugugaacaucagcaauacuaacuucgcugcaggccaguccguagugucugucaaacuggccggaaauucgucauugugcccugugagcggaugggcgauauacaguaaggacaacuccauuagaaucggcucuaaaggugauguuuuugugauuagggagccauucaucagcuguuccccguuagaaugccggaccuuuuuccugacacagggggcucuacucaaugacaagcauucaaacggaaccaucaaagaucgcagucccuaucgaacucugaugagcuguccuauuggcgaggucccaucucccuacaacucccguuuugaaucaguggccuggagcgcaagugccugccacgacggcauaaauuggcuuacaaucgggauuucuggaccugauaacggugcuguagcaguucugaaguauaauggcaucauaaccgacacgauuaaguccuggagaaacaauaucuugaggacucaagagagcgagugugccugcgugaacgggucguguuucaccgucaugacagauggaccaucugacggccaggcuuccuacaaaaucuuucggauugaaaaggguaaaaucgugaagucaguggagaugaaugcccccaacuaucauuacgaagagugcaguuguuacccugauagcuccaaaauuacuugcgucugccgcgacaauuggcacgggucuaacagaccauggguuagcuucaaucagaaccucgaguaucagauaggauacaucuguucaggcauuuuuggcgauaauccgaggcccaacgacaagaccgggaguugcggaccuguguccagcaauggugcgaacggcguaaagggguucucuuuuaaauauggaaacggcguguggaucggucggacaaagucaaucaguagccgcaauggguucgaaaugauuugggauccaaacggcuggaccggaacggacaauaacuuuuccauaaaacaagacaucgucggcauuaaugaguggucuggguacucggggagcuucgugcagcaucccgaacugacuggucuggauuguauccgaccuugcuucuggguugagcucauuagaggcaggccaaaggaaaacacaaucuggaccuccgggucaaguauaucuuuuuguggagugaauggcgacacugucgguuggagcuggcccgauggggcagaguuaccguucacaaucgacaaauga

SEQ ID NO: 147676 - RNA, 1410 nt, Artificial Sequence; identical to SEQ ID NO: 144786
  derived and/or modified CDS sequence (opt3) from neuraminidase__InfluenzaA__ADM33081

SEQ ID NO: 147677 - RNA, 1410 nt, Artificial Sequence; identical to SEQ ID NO: 145859
  derived and/or modified CDS sequence (opt3) from neuraminidase__InfluenzaA__ADM33091

SEQ ID NO: 147678 - RNA, 1410 nt, Artificial Sequence; identical to SEQ ID NO: 145859
  derived and/or modified CDS sequence (opt3) from neuraminidase__InfluenzaA__ADM33101

SEQ ID NO: 147679 - RNA, 1410 nt, Artificial Sequence; identical to SEQ ID NO: 145859
  derived and/or modified CDS sequence (opt3) from neuraminidase__InfluenzaA__ADM33111

SEQ ID NO: 147680 - RNA, 1410 nt, Artificial Sequence; identical to SEQ ID NO: 144786
  derived and/or modified CDS sequence (opt3) from neuraminidase__InfluenzaA__ADM33121

SEQ ID NO: 147681 - RNA, 1410 nt, Artificial Sequence; identical to SEQ ID NO: 144786
  derived and/or modified CDS sequence (opt3) from neuraminidase__InfluenzaA__ADM33130

SEQ ID NO: 147682 - RNA, 1410 nt, Artificial Sequence; identical to SEQ ID NO: 144786
  derived and/or modified CDS sequence (opt3) from neuraminidase__InfluenzaA__ADM33139

SEQ ID NO: 147683 - RNA, 1410 nt, Artificial Sequence; identical to SEQ ID NO: 144786
  derived and/or modified CDS sequence (opt3) from neuraminidase__InfluenzaA__ADM33149

SEQ ID NO: 147684 - RNA, 1410 nt, Artificial Sequence; identical to SEQ ID NO: 144786
  derived and/or modified CDS sequence (opt3) from neuraminidase__InfluenzaA__ADM33159

SEQ ID NO: 147685 - RNA, 1410 nt, Artificial Sequence; identical to SEQ ID NO: 144786
  derived and/or modified CDS sequence (opt3) from neuraminidase__InfluenzaA__ADM33169

SEQ ID NO: 147686 - RNA, 1410 nt, Artificial Sequence; identical to SEQ ID NO: 144786
  derived and/or modified CDS sequence (opt3) from neuraminidase__InfluenzaA__ADM33179

SEQ ID NO: 147687 - RNA, 1410 nt, Artificial Sequence; identical to SEQ ID NO: 144786
  derived and/or modified CDS sequence (opt3) from neuraminidase__InfluenzaA__ADM33188

SEQ ID NO: 147688 - RNA, 1410 nt, Artificial Sequence; identical to SEQ ID NO: 144786
  derived and/or modified CDS sequence (opt3) from neuraminidase__InfluenzaA__ADM33197

SEQ ID NO: 147689 - RNA, 1410 nt, Artificial Sequence; identical to SEQ ID NO: 144786
  derived and/or modified CDS sequence (opt3) from neuraminidase__InfluenzaA__ADM33206

SEQ ID NO: 147690 - RNA, 1410 nt, Artificial Sequence; identical to SEQ ID NO: 144786
  derived and/or modified CDS sequence (opt3) from neuraminidase__InfluenzaA__ADM33215

SEQ ID NO: 147691 - RNA, 1410 nt, Artificial Sequence; identical to SEQ ID NO: 144786
  derived and/or modified CDS sequence (opt3) from neuraminidase__InfluenzaA__ADM33224

SEQ ID NO: 147692 - RNA, 1410 nt, Artificial Sequence; identical to SEQ ID NO: 144786
  derived and/or modified CDS sequence (opt3) from neuraminidase__InfluenzaA__ADM33234

SEQ ID NO: 147693 - RNA, 1410 nt, Artificial Sequence; identical to SEQ ID NO: 145210
  derived and/or modified CDS sequence (opt3) from neuraminidase__InfluenzaA__ADM33243

SEQ ID NO: 147694 - RNA, 1410 nt, Artificial Sequence; identical to SEQ ID NO: 144786
  derived and/or modified CDS sequence (opt3) from neuraminidase__InfluenzaA__ADM33253

SEQ ID NO: 147695 - RNA, 1410 nt, Artificial Sequence; identical to SEQ ID NO: 145210
  derived and/or modified CDS sequence (opt3) from neuraminidase__InfluenzaA__ADM33262

SEQ ID NO: 147696 - RNA, 1410 nt, Artificial Sequence; identical to SEQ ID NO: 144816
  derived and/or modified CDS sequence (opt3) from neuraminidase__InfluenzaA__ADM33272

SEQ ID NO: 147697 - RNA, 1410 nt, Artificial Sequence; identical to SEQ ID NO: 144816
  derived and/or modified CDS sequence (opt3) from neuraminidase__InfluenzaA__ADM33282

SEQ ID NO: 147698 - RNA, 1410 nt, Artificial Sequence; identical to SEQ ID NO: 144786
  derived and/or modified CDS sequence (opt3) from neuraminidase__InfluenzaA__ADM33292

SEQ ID NO: 147699 - RNA, 1410 nt, Artificial Sequence; identical to SEQ ID NO: 144786
  derived and/or modified CDS sequence (opt3) from neuraminidase__InfluenzaA__ADM33302

SEQ ID NO: 147700 - RNA, 1410 nt, Artificial Sequence; identical to SEQ ID NO: 144776
  derived and/or modified CDS sequence (opt3) from neuraminidase__InfluenzaA__ADM33312

SEQ ID NO: 147701 - RNA, 1410 nt, Artificial Sequence; identical to SEQ ID NO: 144816
  derived and/or modified CDS sequence (opt3) from neuraminidase__InfluenzaA__ADM33322

SEQ ID NO: 147702 - RNA, 1410 nt, Artificial Sequence; identical to SEQ ID NO: 144816
  derived and/or modified CDS sequence (opt3) from neuraminidase__InfluenzaA__ADM33332

SEQ ID NO: 147703 - RNA, 1410 nt, Artificial Sequence; identical to SEQ ID NO: 144816
  derived and/or modified CDS sequence (opt3) from neuraminidase__InfluenzaA__ADM33342

SEQ ID NO: 147704 - RNA, 1410 nt, Artificial Sequence
  derived and/or modified CDS sequence (opt3) from neuraminidase__InfluenzaA__ADM33367
augaaccccaaucagaagaucauuaccauaggcagcgugugcaugacaaucgggauggccaaccugauucuccaaaucggaaauauuaucuccauauggaucucucacucaauucagcuugguaaccagaaucagaucgagacuuguaaccaaagugucguuacguacgaaaauaacaccugggugaaucagacauauguaaacauuagcaauacuaacuucgcugcaggccaguccguggucucugugaaacuggccggaaauucgucauugugcccuguugggggcugggcgaucuacagcaaggacaacagugugagaauagguuccaaaggggaugucuuugugauuagggagccauucaucucuuguagcccguuagaaugccggaccuuuuuccugacacagggagcucuacucaaugacaagcauuccaacggcaccauuaaagaucgcucacccuaucgaacucugaugaguuguccuaucggcgagguaccaagccccuacaacucucguuuugaauccguugccuggucagcaagcgccugccacgacgggaucaauuggcuuacaauuggaauaagugguccugauaacggcgcuguggcaguccugaaguauaaugggaucauuaccgacacgaucaagucuuggagaaacaauauauugaggacucaagaguccgagugugccugcgugaacggaagcuguuucaccgugaugacagauggcccaucgaauggucaggcuucuuacaaaauuuuucggaucgaaaaggggaaaaucgucaaguccguugagaugaacgcccccaauuaucauuacgaagagugcucauguuacccugacaguagcgagauuacuugcgugugccgcgauaacuggcacggauccaauagaccauggguaucuuucaaccagaaucucgaauaucagaucggcuacauuuguagcggcauauuuggggacaacccgaggcccaaugauaaaaccggaucaugcgguccugugaguuccaacggcgcgaacggggucaagggauucagcuuuaaguauggcaaugguguguggaucgggcggacaaaaucuauuucaagucgcaacggcuucgagaugaucugggacccaaauggauggaccggcacggauaacaauuuuagcaucaagcaagacauuguugggauaaacgaaugguccggauacucugguucguucgugcagcaucccgagcugacuggccuggacuguauccgaccuugcuucugggucgaacucauuagagggaggccaaaagagaauacaaucuggaccagcggauccucaauuaguuuuuguggcgugaacucugauacuguagguuggagcuggcccgacggggcagaguuaccguucacaaucgauaaguga

SEQ ID NO: 147705 - RNA, 1410 nt, Artificial Sequence; identical to SEQ ID NO: 144816
  derived and/or modified CDS sequence (opt3) from neuraminidase__InfluenzaA__ADM33377

SEQ ID NO: 147706 - RNA, 1410 nt, Artificial Sequence; identical to SEQ ID NO: 144816
  derived and/or modified CDS sequence (opt3) from neuraminidase__InfluenzaA__ADM33387

SEQ ID NO: 147707 - RNA, 1410 nt, Artificial Sequence; identical to SEQ ID NO: 144786
  derived and/or modified CDS sequence (opt3) from neuraminidase__InfluenzaA__ADM33397

SEQ ID NO: 147708 - RNA, 1410 nt, Artificial Sequence; identical to SEQ ID NO: 144786
  derived and/or modified CDS sequence (opt3) from neuraminidase__InfluenzaA__ADM33407

SEQ ID NO: 147709 - RNA, 1410 nt, Artificial Sequence; identical to SEQ ID NO: 144816
  derived and/or modified CDS sequence (opt3) from neuraminidase__InfluenzaA__ADM33417

SEQ ID NO: 147710 - RNA, 1410 nt, Artificial Sequence; identical to SEQ ID NO: 144786
  derived and/or modified CDS sequence (opt3) from neuraminidase__InfluenzaA__ADM33427

SEQ ID NO: 147711 - RNA, 1410 nt, Artificial Sequence
  derived and/or modified CDS sequence (opt3) from neuraminidase__InfluenzaA__ADM33437
augaaccccaaucagaagaucauuaccauaggcagcgugugcaugacaaucgggauggccaaccugauucuccaaaucggaaauauuaucuccauauggaucucucacucaauucagcuugguaaccagaaucagaucgagacuuguaaccaaagugucauuacguacgaaaauaacaccuggguuaaucagacauaugugaacaucagcaauacuaacuucgcugcaggccaguccguagugucugucaaacuggccggaaauucgucauugugcccugugagcggaugggcgauauacaguaaggacaacuccauuagaaucggcucuaaaggugauguuuuugugauuagggagccauucaucagcuguuccccguuagaaugccggaccuuuuuccugacacagggggcucuacucaaugacaagcauucaaacggaaccaucaaagaucgcagucccuaucgaacucugaugagcuguccuauuggcgaggucccaucugccuacaacucccguuuugaaucaguggcauggagcgccagugcuugccacgacggcauaaauuggcuuacaaucgggauuucuggacccgauaacggugcaguagccguucugaaguauaauggcaucauaaccgacacgauuaaguccuggagaaacaauaucuugaggacucaagagagcgagugugcuugcgugaacgggucguguuucaccgucaugacagauggaccuucugacggccaggccuccuacaaaaucuuucggauugaaaaggguaaaaucgugaagucaguggagaugaaugcgccaaacuaucauuacgaagagugcaguuguuaccccgauagcuccgagauuacuugcgucugccgcgacaauuggcacgggucuaacagaccuuggguuagcuucaaucagaaccucgaauaucagauaggauacaucuguucaggcauuuuuggcgauaauccaaggccgaacgacaaaaccgggaguugcggacccguguccagcaauggugcaaacggcguaaagggguucucuuuuaaguauggaaacggcguguggaucggucggacaaaaucaaucaguagccgcaauggguucgagaugauuugggauccuaacggcuggaccggaacggacaauaacuuuuccauaaagcaagacaucgucggcauuaaugaauggucuggguacucggggagcuucgugcagcauccagagcugacuggucuggauuguauccgacccugcuucuggguugaacucauuagaggcaggccuaaagagaacacaaucuggaccuccgggucaaguauaucuuuuuguggagugaauagcgacacugucggcugguccuggccagauggugccgaguuacccuucacaaucgacaaguga

SEQ ID NO: 147712 - RNA, 1410 nt, Artificial Sequence; identical to SEQ ID NO: 145140
  derived and/or modified CDS sequence (opt3) from neuraminidase__InfluenzaA__ADM33443

SEQ ID NO: 147713 - RNA, 1410 nt, Artificial Sequence; identical to SEQ ID NO: 144786
  derived and/or modified CDS sequence (opt3) from neuraminidase__InfluenzaA__ADM52446

SEQ ID NO: 147714 - RNA, 1410 nt, Artificial Sequence; identical to SEQ ID NO: 144786
  derived and/or modified CDS sequence (opt3) from neuraminidase__InfluenzaA__ADM52456

SEQ ID NO: 147715 - RNA, 1410 nt, Artificial Sequence; identical to SEQ ID NO: 146991
  derived and/or modified CDS sequence (opt3) from neuraminidase__InfluenzaA__ADM52466

SEQ ID NO: 147716 - RNA, 1410 nt, Artificial Sequence; identical to SEQ ID NO: 144786
  derived and/or modified CDS sequence (opt3) from neuraminidase__InfluenzaA__ADM52486

SEQ ID NO: 147717 - RNA, 1410 nt, Artificial Sequence; identical to SEQ ID NO: 144776
  derived and/or modified CDS sequence (opt3) from neuraminidase__InfluenzaA__ADM52496

SEQ ID NO: 147718 - RNA, 1410 nt, Artificial Sequence; identical to SEQ ID NO: 144786
  derived and/or modified CDS sequence (opt3) from neuraminidase__InfluenzaA__ADM52506

SEQ ID NO: 147719 - RNA, 1410 nt, Artificial Sequence; identical to SEQ ID NO: 144776
  derived and/or modified CDS sequence (opt3) from neuraminidase__InfluenzaA__ADM52516

SEQ ID NO: 147720 - RNA, 1410 nt, Artificial Sequence; identical to SEQ ID NO: 144776
  derived and/or modified CDS sequence (opt3) from neuraminidase__InfluenzaA__ADM52527

SEQ ID NO: 147721 - RNA, 1410 nt, Artificial Sequence; identical to SEQ ID NO: 146009
  derived and/or modified CDS sequence (opt3) from neuraminidase__InfluenzaA__ADM52537

SEQ ID NO: 147722 - RNA, 1410 nt, Artificial Sequence; identical to SEQ ID NO: 146510
  derived and/or modified CDS sequence (opt3) from neuraminidase__InfluenzaA__ADM52547

SEQ ID NO: 147723 - RNA, 1410 nt, Artificial Sequence; identical to SEQ ID NO: 144776
  derived and/or modified CDS sequence (opt3) from neuraminidase__InfluenzaA__ADM52557

SEQ ID NO: 147724 - RNA, 1410 nt, Artificial Sequence; identical to SEQ ID NO: 144776
  derived and/or modified CDS sequence (opt3) from neuraminidase__InfluenzaA__ADM52567

SEQ ID NO: 147725 - RNA, 1410 nt, Artificial Sequence; identical to SEQ ID NO: 144776
  derived and/or modified CDS sequence (opt3) from neuraminidase__InfluenzaA__ADM52577

SEQ ID NO: 147726 - RNA, 1410 nt, Artificial Sequence; identical to SEQ ID NO: 144786
  derived and/or modified CDS sequence (opt3) from neuraminidase__InfluenzaA__ADM52587

SEQ ID NO: 147727 - RNA, 1410 nt, Artificial Sequence; identical to SEQ ID NO: 144786
  derived and/or modified CDS sequence (opt3) from neuraminidase__InfluenzaA__ADM52597

SEQ ID NO: 147728 - RNA, 1410 nt, Artificial Sequence; identical to SEQ ID NO: 144776
  derived and/or modified CDS sequence (opt3) from neuraminidase__InfluenzaA__ADM52607

SEQ ID NO: 147729 - RNA, 1410 nt, Artificial Sequence; identical to SEQ ID NO: 144776
  derived and/or modified CDS sequence (opt3) from neuraminidase__InfluenzaA__ADM52617

SEQ ID NO: 147730 - RNA, 1410 nt, Artificial Sequence; identical to SEQ ID NO: 146467
  derived and/or modified CDS sequence (opt3) from neuraminidase__InfluenzaA__ADM52627

SEQ ID NO: 147731 - RNA, 1410 nt, Artificial Sequence; identical to SEQ ID NO: 146009
  derived and/or modified CDS sequence (opt3) from neuraminidase__InfluenzaA__ADM52637

SEQ ID NO: 147732 - RNA, 1410 nt, Artificial Sequence; identical to SEQ ID NO: 146009
  derived and/or modified CDS sequence (opt3) from neuraminidase__InfluenzaA__ADM52647

SEQ ID NO: 147733 - RNA, 1410 nt, Artificial Sequence; identical to SEQ ID NO: 144776
  derived and/or modified CDS sequence (opt3) from neuraminidase__InfluenzaA__ADM52657

SEQ ID NO: 147734 - RNA, 1410 nt, Artificial Sequence; identical to SEQ ID NO: 146009
  derived and/or modified CDS sequence (opt3) from neuraminidase__InfluenzaA__ADM52667

SEQ ID NO: 147735 - RNA, 1410 nt, Artificial Sequence; identical to SEQ ID NO: 144776
  derived and/or modified CDS sequence (opt3) from neuraminidase__InfluenzaA__ADM52687

SEQ ID NO: 147736 - RNA, 1410 nt, Artificial Sequence; identical to SEQ ID NO: 144776
  derived and/or modified CDS sequence (opt3) from neuraminidase__InfluenzaA__ADM52697

SEQ ID NO: 147737 - RNA, 1410 nt, Artificial Sequence; identical to SEQ ID NO: 146467
  derived and/or modified CDS sequence (opt3) from neuraminidase__InfluenzaA__ADM52707

SEQ ID NO: 147738 - RNA, 1410 nt, Artificial Sequence
  derived and/or modified CDS sequence (opt3) from neuraminidase__InfluenzaA__ADM52717
augaaccccaaucagaagaucauuaccauaggcagcgugugcaugacaaucgggauggccaaccugauucuccaaaucggaaauauuaucuccauauggaucucucacucaauucagcuugguaaccagaaucagaucgagacuuguaaccaaagugucauuacguacgaaaauaacaccuggguuaaucagacauaugugaacaucagcaauacuaacuucgcugcaggccaguccgccguaucugugaaacuggucggaaauucgucauugugcccugugagcggaugggcgauauacaguaaggacaacuccguuagaauuggcucuaaaggugauguguuugucaucagggagccauucauuagcuguuccccguuagaaugccggaccuuuuuccugacacagggggcucuacucaaugacaagcauucaaacggaaccaucaaagaucgcagucccuaucgaacucugaugagcuguccuaucggcgaggugccaucucccuacaacucccguuuugaaucaguagccuggagcgcaagugccugccacgacggcauuaauuggcuuacaauagggaucucuggaccugauaacggugcuguugcagugcugaaguauaauggcauuaucaccgacacgauaaaguccuggagaaacaauauuuugaggacucaagagagcgagugugccugcgucaacgggucguguuucaccgugaugacagauggaccaucuaauggccaggcuuccuacaaaaucuuucggaucgaaaaggguaaaauugugaagucagucgagaugaacgcccccaauuaucauuacgaagagugcaguuguuacccugacagcuccgagaucacuugcguuugccgcgauaacuggcacgggucuaauagaccaugggugagcuucaaccagaaucucgaauaucagauuggauacauauguucaggcaucuuuggcgacaacccgaggcccaaugauaaaaccgggaguugcggaccuguauccagcaacggugcgaacggcgugaagggguucucuuuuaaguauggaaauggcgucuggauuggucggacaaaaucaaucaguagccgcaacggguucgagaugaucugggacccaaauggcuggaccggaacggauaacaauuuuuccauuaagcaagacauagugggcaucaacgaauggucuggguacucggggagcuucguucagcaucccgagcugacuggucuggacuguauucgaccuugcuucuggguggaacucaucagaggcaggccaaaagagaauacaauuuggaccuccgggucaaguaucucuuuuuguggagucaacagcgauacugugggcugguccuggcccgacggugcagaguuaccguucacaauagauaaguga

SEQ ID NO: 147739 - RNA, 1410 nt, Artificial Sequence
  derived and/or modified CDS sequence (opt3) from neuraminidase__InfluenzaA__ADM86402
augaaccccaaucagaagaucauuaccauaggcagcgugugcaugacaaucgggauggccaaccugauucuccaaaucggaaauauuaucuccauauggaucucucacucaauucagcuugguaaccagaaucagaucgagacuuguaaccaaagugucauuacguacgaaaauaacaccuggguuaaucagacauaugugaacaucagcaauacuaacuucgcugcaggccaguccguagccucugugaaacuggcgggaaauucgucauugugcccugucagcggaugggcuauauacaguaaggacaacuccgugagaauuggcucuaaaggugauguuuuugugaucagggagccauucauuagcuguuccccguuagaaugccggaccuuuuuccugacacagggggcccuacucaaugacaagcauucaaacggaaccgucaaagaucgcagucccuaucgaacucugaugagcuguccuaucggcgaggugccaucucccuacaacucccguuuugaaucaguagcauggagcgccagugcuugccacgacggcaucaauuggcuuacaauugggauaucuggaccugauaacggugcaguugccgugcugaaguauaauggcaucauuaccgacacgaucaaguccuggagaaacaauauauugaggacucaagagagcgagugugcuugcgucaacgggucguguuucaccgugaugacagauggaccaucugacggccaggccuccuacaaaauuuuucggaucgaaaaggguaaaaucgugaagucagucgagaugaaugcgcccaacuaucauuacgaagagugcaguuguuacccugauagcuccgagauuacuugcguuugccgcgacaauuggcacgggucuaacagaccaugggugagcuucaaucagaaccucgaauaucagaucggauacauuuguucaggcauauuuggcgauaauccgaggcccaacgacaaaaccgggaguugcggaccuguauccagcaauggugcaaacggcgugaagggguucucuuuuaaguauggaaacggcgucuggaucggucggacaaaaucaauuaguagccgcaauggguucgagaugaucugggauccaaacggcuggaccggaacggacaauaacuuuuccaucaagcaagacauugugggcauaaaugaauggucuggguacucggggagcuucguucagcaucccgagcugacuggucuggauuguauccgaccuugcuucuggguggaacucauuagaggcaggccaaaagagaacacaaucuggaccuccgggucaaguauuucuuuuuguggagucaauagcgacacugugggcugguccuggcccgauggugccgaguuaccguucacaaucgacaaguga

SEQ ID NO: 147740 - RNA, 1410 nt, Artificial Sequence; identical to SEQ ID NO: 144786
  derived and/or modified CDS sequence (opt3) from neuraminidase__InfluenzaA__ADM86412

SEQ ID NO: 147741 - RNA, 1410 nt, Artificial Sequence
  derived and/or modified CDS sequence (opt3) from neuraminidase__InfluenzaA__ADM86422
augaaccccaaucagaagaucauuaccauaggcagcgugugcaugacaaucgggauggccaaccugauucuccaaaucggaaauauuaucuccauauggaucucucacucaauucagcuugguaaccagaaucagaucgagacuuguaaccaaagugucauuacguacgaaaauaacaccuggguuaaucagacauaugugaacaucagcaauacuaacuucguagcuggccaguccguggucucugugaaacuggcaggaaauucgucauugugcccuguuagcggaugggccauauacaguaaggacaacuccauuagaaucggcucuaaaggugauguguuugucauuagggagccauucaucagcuguuccccguuagaaugccggaccuuuuuccugacacagggggcgcuacucaaugacaagcauucaaacggaaccaucaaagaucgcagucccuaucgaacucugaugagcuguccuauuggcgaggugccaucucccuacaacucccguuuugaaucaguagcuuggagcgccagugcaugccacgacggcauaaauuggcuuacaaucgggauuucuggaccugauaacggugccguugcugugcugaaguauaauggcaucauaaccgacacgauuaaguccuggagaaacaauaucuugaggacucaagagagcgagugugcaugcgucaacgggucguguuucaccgugaugacagauggaccaucugacggccaggccuccuacaaaaucuuucggauugaaaaggguaaaguggucaagucaguugagaugaaugcucccaacuaucauuacgaagagugcaguuguuacccugauagcuccgagaucacuugcgugugccgcgacaauuggcacgggucuaacagaccaugggugagcuucaaucagaaccucgaauaucagauuggauacauauguucaggcaucuuuggcgauaauccgaggcccaacgacaaaaccgggaguugcggaccuguauccagcaauggugccaacggcgucaagggguucucuuuuaaguauggaaacggcguguggauuggucggacaaaaucaaucaguagccgcaauggguucgagaugaucugggauccaaacggcuggaccggaacggacaauaacuuuuccauuaagcaagacauaguuggcaucaaugaauggucuggguacucggggagcuucgugcagcaucccgagcugacuggucuggauuguauucgaccuugcuucugggucgaacucaucagaggcaggccaaaagagaacacaauuuggaccuccgggucaaguaucucuuuuuguggagugaauagcgacacuguaggcugguccuggcccgauggugcggaguuaccguucacaauagacaaguga

SEQ ID NO: 147742 - RNA, 1410 nt, Artificial Sequence; identical to SEQ ID NO: 145640
  derived and/or modified CDS sequence (opt3) from neuraminidase__InfluenzaA__ADM86432

SEQ ID NO: 147743 - RNA, 1410 nt, Artificial Sequence
  derived and/or modified CDS sequence (opt3) from neuraminidase__InfluenzaA__ADM86443
augaaccccaaucagaagaucauuaccauaggcagcgugugcaugacaaucgggauggccaaccugauucuccaaaucggaaauauuaucuccauauggaucucucacucaauucagcuugguaaccagaaucagaucgagacuuguaaccaaagugucauuacguacgaaaauaacaccuggguuaaucagacauaugugaacaucagcaauacuaacuucgcugcaggccaguccguagugucugucaaacuggccggaaauucgucauugugcccugugagcggaugggcgauauacaguaaggacaacuccauuagaaucggcucuaaaggugauguuuuugugauuagggagccauucaucagcuguuccccguuagaaugccggaccuuuuuccugacacagggggcucuacucaaugacaagcauucaaacggaaccaucaaagaucgcagucccuaucgaacucugaugagcuguccuauuggcgaggucccaucucccuacaacucccguuuugaaucaguggccuggagcgcaagugccugccacgacggcauaaauuggcuuacaaucgggauuucuggaccugauaacggugcuguagcaguucugaaguauaauggcaucauaaccgacacgauuaaguccuggagaaacaauaucuugaggacucaagagagcgagugugugugcgucaacgggucguguuucaccgugaugacagauggaccaucugacggccaggccuccuacaaaaucuuucggauugaaaaggguaaaaucgugaagucagucgagaugaaugcucccaacuaucauuacgaagagugcaguuguuacccugauagcuccgagauuacuugcguuugccgcgacaauuggcacgggucuaacagaccaugggugagcuucaaucagaaccucgaauaucagauaggauacaucuguucaggcauuuuuggcgauaauccgaggcccaacgacaaaaccgggaguugcggaccuguauccagcaauggugccaacggcgugaagggguucucuuuuaaguauggaaacggcgucuggaucggucggacaaaaucaaucaguagccgcaauggguucgagaugauuugggauccaaacggcuggaccggaacggacaauaacuuuuccauaaagcaagacaucgugggcaugaaugaauggucuggguacucggggagcuucguucagcaucccgagcugacuggucuggauuguauucgaccuugcuucuggguggaacucaucagaggcaggccaaaagagaacacaauuuggaccuccgggucaaguaucucuuuuuguggagucaauagcgacacugugggcugguccuggcccgauggugcggaguuaccguucacaauagacaaguga

SEQ ID NO: 147744 - RNA, 1410 nt, Artificial Sequence; identical to SEQ ID NO: 145369
  derived and/or modified CDS sequence (opt3) from neuraminidase__InfluenzaA__ADM86453

SEQ ID NO: 147745 - RNA, 1350 nt, Artificial Sequence
  derived and/or modified CDS sequence (opt3) from neuraminidase__InfluenzaA__ADM95377
augaaccccaaucagaagaucauuaccauaggcagcaucugcauggugacagggauugucucccugaugcuccaaguuggaucuaugaucucaauuugggugagucacagcauccauacugguaaccagcaccaggccgagccuauauccaauacgaacuuccuuaccgaaaaagcuguagcaucugugaagcuggccggcaauucgucauuguguccaaucaacgggugggcggucuacagcaaagacaauaguauuagaaucggauccaagggcgauguguuuguuauuagggagccguucaucucuugcagccauuuagaaugucggacauuuuuccugacucagggugcucuacucaacgacaaacacuccaaugggaccgugaaggaucgcucaccccaucgaacacugaugaguugcccuaugggagaggccccaagccccuauaacucucguuuugaauccgucgcauggucagccagcgcuugucacgacggcaccaguuggcuuacuauaggcauuucugggccugauaauggagcaguggccguacugaaguacaacgguaucauuacagacaccaucaaauccuggagaaauaacaucuugaggacgcaagagagcgagugcgcuuguguuaauggcucgugcuucacugugaugaccgaugggccaucuaacggacaggccucccacaagauuuuuaaaauggaaaagggcaaagucauaaagucaguggagcucgacgcgcccaacuaucauuacgaagaguguaguugcuauccugaugccggugagaucacaugugugugccgggacaauuggcacgggagcaaccgcccaugggucuccuucaaucagaaccuggaauaccagauuggauauaucugcucuggcguuuuuggcgauaauccgagacccaacgacgggacuggaagcugugguccugugucaaguaauggcgcauacgggguaaagggauucuccuuuaaauacggcaacgguguguggauagggaggaccaagagcacaaauucucggucaggcuucgagaugauuugggauccaaacggauggaccgaaacggacagucgcuuuagcgucaaacaagacaucguggcuaucacugauugguccggcuauucugggucguucguucagcaucccgagcugacaggacucgacugcauucgaccuuguuucuggguggaauuaaucagagguaggccaaaggagagcaccauuuggacuuccggcucaaguauaucuuuuugcggggucaauagcgauacagugggaugguccuggcccgacggcgccgagcugccguucaccaucgauaaauga

SEQ ID NO: 147746 - RNA, 1410 nt, Artificial Sequence; identical to SEQ ID NO: 144786
  derived and/or modified CDS sequence (opt3) from neuraminidase__InfluenzaA__ADM95650

SEQ ID NO: 147747 - RNA, 1410 nt, Artificial Sequence; identical to SEQ ID NO: 144786
  derived and/or modified CDS sequence (opt3) from neuraminidase__InfluenzaA__ADM95651

SEQ ID NO: 147748 - RNA, 1410 nt, Artificial Sequence
  derived and/or modified CDS sequence (opt3) from neuraminidase__InfluenzaA__ADM95652
augaaccccaaucagaagaucauuaccauaggcagcgugugcaugacaaucgggauggccaaccugauucuccaaaucggaaauauuaucuccauauggaucucucacucaauucagcuugguaaccagaaucagaucgagacuuguaaccaaagugucauuacguacgaaaauaacaccuggguuaaucagacauaugugaacaucagcaauacuaacuucgcugcaggccaguccguagugucugucaaauuugccggaaauucgucacugugcccugugagcgggugggcgauauacaguaaggacaacuccauuagaaucggcucuaaaggugauguuuucgugauuagggagccauuuaucagcuguuccccguuggaaugccggaccuucuuuuuaacacagggggcucugcuaaaugacaagcauucaaacggaaccaucaaagaucgcagucccuaucgaacucucaugagcuguccuauuggcgaggucccaucucccuacaacucccguuucgaaucaguggccuggagcgcaagugccugccacgacggcauaaauuggcugacaaucgggauuucuggaccugauaacggugcuguagcaguucuuaaguauaauggcaucauaaccgacacgauuaaguccuggagaaacaauauccugaggacucaagagagcgagugugccugcgugaacgggucguguuuuaccgucaugacagauggaccaucugacggccaggcuuccuacaaaaucuuccggauugaaaaggguaaaaucgugaagucaguggagaugaaugcccccaacuaucauuacgaagagugcaguuguuacccugauagcuccgagauuacuugcgucugccgcgacaauuggcacgggucuaacagaccauggguuagcuuuaaucagaacuuggaauaucagauaggauacaucuguucaggcauuuucggcgauaauccgaggcccaacgacaaaaccgggaauugcggaccugugaguuccaacggugcgaacggcguaaagggguuuagcuucaaguauggaaauggcguguggaucggucggacaaaaucuaucucaagucgcaacggguuugagaugauuugggauccaaauggcuggaccggaacggacaacaauuucagcauaaagcaagacaucgucggcauuaacgaaugguccggguacucuggaucguucgugcagcaucccgagcucacuggucuggauuguauccgaccuugcuuuuggguugaacugauuagaggcaggccaaaagagaauacaaucuggaccagcggguccucaauaaguuucuguggagugaacucugacacugucggcuggagcuggcccgauggugcagagcucccguuuacaaucgacaaguga

SEQ ID NO: 147749 - RNA, 1410 nt, Artificial Sequence
  derived and/or modified CDS sequence (opt3) from neuraminidase__InfluenzaA__ADM95654
augaaccccaaucagaagaucauuaccauaggcagcgugugcaugacaaucgggauggccaaccugauucuccaaaucggaaauauuaucuccauauggaucucucacucaauucagcuugguaaccagaaucagaucgagacuuguaaccaaagugucauuacguacgaaaauaacaccuggguuaaucagacauaugugaacaucagcaauacuaacuucgcugcaggccaguccguagugucugucaaacuggccggaaauucgucauugugcccugugagcggaugggcgauauacaguaaggacaacuccauuagaaucggcucuaaaggugauguuuuugugauuagggagccauucaucagcuguuccccguuagaaugccggaccuuuuuccugacacagggggcucuacucaaugacaagcauucaaacggaaccaucaaagaucgcagucccuaucgaacucugaugagcuguccuauuggcgaggucccaucucccuacaacucccguuuugaaucaguggccuggagcgcaagugccugccacgacggcauaaauuggcuuacaaucgggauuucuggaccugauaacggugcuguagcaguucugaaguauaauggcaucauaaccgacacgauuaaguccuggagaaacaauaucuugaggacucaagagagcgagugugccugcgugaacgggucguguuucaccgucaugacagauggaccaucugacggccaggcuuccuacaaaaucuuucggauugaaaaggguaaaaucgugaagucaguggagaugaaugcccccaacuaucauuacgaagagugcaguuguuacccugauagcuccgagauuacuugcgucugccgcgacaauuggcacgggucuaacagaccauggguuagcuucaaucagaaccucgaauaucagauaggauacaucuguucaggcauuuuuggcgauaauccgaggcccaacgacaaaaccgggaguugcggaccuguguccagcaauggugcgaacggcguaaagggguucucuuuuaaguauggaaacggcguguggaucggucggacaaaaucaaucaguagccgccauggguucgagaugauuugggauccaaauggcuggaccggaacggacaacaauuuuuccauaaagcaagacaucgucggcacuaacgaauggucuggguacucggggagcuucgugcagcaccccgagcugacaggucuggauuguauucgaccuugcuucuggguugaacucaucagaggcaggccaaaagagaauaccauuuggacuuccgggucaaguaucucuuuuuguggagugaacagcgacacagucggcugguccuggcccgauggugcagaguuaccguucaccauagacaaguga

SEQ ID NO: 147750 - RNA, 1410 nt, Artificial Sequence
  derived and/or modified CDS sequence (opt3) from neuraminidase__InfluenzaA__ADM95655
augaaccccaaucagaagaucauuaccauaggcagcgugugcaugacaaucgggauggccaaccugauucuccaaaucggaaauauuaucuccauauggaucucucacucaauucagcuugguaaccagaaucagaucgagacuuguaaccaaagugucauuacguacgaaaauaacaccuggguuaaucagacauaugugaacaucagcaauacuaacuucgcugcaggccaguccguagugucugucaaacuggccgggaauagcucauugugcccugugagcggaugggcgauauacaguaaggacaacuccauuagaaucggcucuaaaggugauguuuuugugauuagggagccauucaucagcuguuccccguuagaaugccggaccuuuuuccugacacagggggcucuacucaaugacaagcauucaaacggaaccaucaaagaucgcagucccuaucgaacucugaugagcuguccuauuggcgaggucccaucucccuacaacucccguuuugaaucaguggccuggagcgcaagugccugccacgacggcauaaauuggcuuacaaucgggauuucuggaccugauaacggugcuguagcaguucugaaguauaauggcaucauaaccgacacgauuaaguccuggagaaacaauaucuugaggacucaagagagcgagugugccugcgugaacgggucguguuucaccgucaugacagauggaccaucugacggccaggcuuccuacaaaaucuuucggauugaaaaggguaaaaucgugaagucaguggagaugaaugcccccaacuaucauuacgaagagugcaguuguuacccugauagcuccgagauuacuugcgucugccgcgacaauuggcacgggucuaacagaccauggguuagcuucaaucagaaccucgaauaucagauaggauacaucuguucaggcauuuuuggcgauaauccgaggcccagugacaaaaccggguccugcggaccugugagcucuaacggugcgaauggcguaaagggguucucauuuaaguauggaaacggcguguggaucggucggacaaaaaguaucagcucccgcaacggguucgagaugauuugggauccaaauggcuggaccggaacggacaacgacuuuucuauaaagcaagauaucgucggcauuaaugaauggucgggguacagcggauccuucgugcagcaucccgagcugacuggucuggacuguauccgaccuugcuucuggguugaacucauuagaggcaggccaaaagagaacacaaucuggaccucagggaguucuauaucguuuuguggagucaauuccgauacugugggcuggucauggcccgacggugcagaguuaccguucacaaucgauaaguga

SEQ ID NO: 147751 - RNA, 1410 nt, Artificial Sequence; identical to SEQ ID NO: 146398
  derived and/or modified CDS sequence (opt3) from neuraminidase__InfluenzaA__ADM95656

SEQ ID NO: 147752 - RNA, 1410 nt, Artificial Sequence; identical to SEQ ID NO: 145963
  derived and/or modified CDS sequence (opt3) from neuraminidase__InfluenzaA__ADM95658

SEQ ID NO: 147753 - RNA, 1410 nt, Artificial Sequence
  derived and/or modified CDS sequence (opt3) from neuraminidase__InfluenzaA__ADM95659
augaaccccaaucagaagaucauuaccauaggcagcgugugcaugacaaucgggauggccaaccugauucuccaaaucggaaauauuaucuccauauggaucucucacucaauucagcuugguaaccagaaucagaucgagacuuguaaccaaagugucauuacguacgaaaauaacaccuggguuaaucagacauaugugaacaucagcaauacuaacuucgcugcaggccaguccguagugucugucaaacuggccgggaauagcucauugugcccugugagcggaugggcgauauacaguaaggacaacuccauuagaaucggcucuaaaggugauguuuuugugauuagggagccauucaucagcuguuccccguuagaaugccggaccuuuuuccugacacagggggcucuacucaaugacaagcauucaaacggaaccaucaaagaucgcagucccuaucgaacucugaugagcuguccuauuggcgaggucccaucucccuacaacucccguuuugaaucaguggccuggagcgcaagugccugccacgacggcauaaauuggcuuacaaucgggauuucuggaccugauaacggugcuguagcaguucugaaguauaauggcaucauaaccgacacgauuaaguccuggagaaacaauaucuugaggacucaagagagcgagugugccugcgugaacgggucguguuucaccgucaugacagauggaccaucugacggccaggcuuccuacaaaaucuuucggauugaaaaggguaaaaucgugaagucaguggagaugaaugcccccaacuaucauuacgaagagugcaguuguuacccugauagcuccgagauuacuugcgucugccgcgacaauuggcacgggucuaacagaccauggguuagcuucaaucagaaccucgaauaucagauaggauacaucuguucaggcauuuuuggcgauaauccgaggcccaacgacaaaaccgggaguugcggaccuguguccagcaauggugcgaacggcguaaagggguucucuuuuaaguauggaaacggcguguggaucggucggacaaaaucaaucaguagccgcuccggguucgagaugauuugggauccaaauggcuggaccggaacggacaacaauuuuucuauaaagcaagacaucauuggcacuaacgaauggucgggguacagcggauccuucguccagcaucccgagcugacaggucuggauuguauccgaccuugcuucuggguggaacucauuagaggcaggccaaaagagaauaccaucuggacuucagggaguucuauaucguuuuguggaguuaacuccgacacagugggcuggucauggcccgauggugcagaguuaccguucaccaucgacaaguga

SEQ ID NO: 147754 - RNA, 1410 nt, Artificial Sequence; identical to SEQ ID NO: 144786
  derived and/or modified CDS sequence (opt3) from neuraminidase__InfluenzaA__ADM95660

SEQ ID NO: 147755 - RNA, 1410 nt, Artificial Sequence
  derived and/or modified CDS sequence (opt3) from neuraminidase__InfluenzaA__ADM95661
augaaccccaaucagaagaucauuaccauaggcagcgugugcaugacaaucgggauggccaaccugauucuccaaaucggaaauauuaucuccauauggaucucucacucaauucagcuugguaaccagaaucagaucgagacuuguaaccaaagugucauuacguacgaaaauaacaccuggguuaaucagacauaugugaacaucagcaauacuaacuucgcugcaggccaguccguagugucugucaaacuggccggaaauucgucauugugcccugugagcggaugggcgauauacaguaaggacaacuccauuagaaucggcucuaaaggugauguuuuugugauuagggagccauucaucagcuguuccccguuagaaugccggaccuuuuuccugacacagggggcucuacucaaugacaagcauucaaacggaaccaucaaagaucgcagucccuaucgaacucugaugagcuguccuauuggcgaggucccaucucccuacaacucccguuuugaaucaguggccuggagcgcaagugccugccacgacggcauaaauuggcuuacaaucgggauuucuggaccugauaacggugcuguagcaguucugaaguauaauggcaucauaaccgacacgauuaaguccuggagaaacaauaucuugaggacucaagagagcgagugugccugcgugaacgggucguguuucaccgucaugacagauggaccaucugacggccaggcuuccuacaaaaucuuucggauugaaaaggguaaaaucgugaagucaguggagaugaaugcccccaacuaucauuacgaagagugcaguuguuacccugauagcuccgagauuacuugcgucugccgcgacaauuggcacgggucuaacagaccauggguuagcuucaaucagaaccucgaauaucagauaggauacaucuguucaggcauuuuuggcgauaauccgaggcccaacgacaaaaccgggaguugcggaccuguguccagcaauggugcgaacggcguaaagggguucucuuuuaaguauggaaacggcguguggaucggucggacaaaaucaaucaguagccgcaauggguucgagaugauuugggauccaaacggcuggaccggaacggacaauaacuuuuccauaaagcaagacaucgucggcacuaaugaauggucuggguacucggggagcuucgugcagcaucccgagcugacaggucuggauuguauucgaccuugcuucuggguugaacucaucagaggcaggccaaaagagaacaccauuuggacuuccgggucaaucauaaguuuuuguggagucaauucugacacagugggcuggagcuggcccgauggugcagaguuaccguucaccaucgacaaguga

SEQ ID NO: 147756 - RNA, 1410 nt, Artificial Sequence; identical to SEQ ID NO: 146398
  derived and/or modified CDS sequence (opt3) from neuraminidase__InfluenzaA__ADM95662

SEQ ID NO: 147757 - RNA, 1410 nt, Artificial Sequence
  derived and/or modified CDS sequence (opt3) from neuraminidase__InfluenzaA__ADM95663
augaaccccaaucagaagaucauuaccauaggcagcgugugcaugacaaucgggauggccaaccugauucuccaaaucggaaauauuaucuccauauggaucucucacucaauucagcuugguaaccagaaucagaucgagacuuguaaccaaagugucauuacguacgaaaauaacaccuggguuaaucagacauaugugaacaucagcaauacuaacuucgcugcaggccaguccguagugucugucaaacuggccggaaauucgucauugugcccugugaacgggugggcgauauacagcaaggacaauaguauuagaaucggcuccaaaggugauguuuuugugauuagggagccauucaucucuuguagcccguuagaaugccggaccuuuuuccugacacagggggcucuacucaacgacaagcauuccaacggaaccaucaaagaucgcucacccuaucgaacucugaugaguuguccuauuggcgaggucccaagccccuacaauucucguuuugaauccguggccuggucagcaagcgccugccacgacggcauaaacuggcuuacaaucgggauuaguggaccugauaauggugcuguagcaguucugaaguauaacggcaucauaaccgacacgauuaagucuuggagaaauaacaucuugaggacucaagaguccgagugugccugcgugaaugggagcuguuucaccgucaugacagauggaccaucggacggccaggcuucuuacaaaaucuuucggauugaaaaggguaaaaucgugaaguccauugagaugaacgcccccaauuaucauuacgaagagugcucauguuacccugauaguagcgagauaacuugcgugugccgcgacaacuggcacggguccaauagaccaugggucucuuucaaccagaaucucgaauaucagaucggauacauuuguagcggcaucuuuggcgauaacccgaggcccaaugacaaaaccgggucaugcggaccuguuaguuccaacggugcgaacggcgugaagggguucagcuuuaaguauggaaauggcguauggaucggucggacaaaaucuauuucaagucgcaacggguucgagaugauaugggauccaaauggcuggaccggaacggacaacaauuuuagcaucaagcaagacauugugggcacuaacgaaugguccggguacucuggaucguucguccagcaucccgagcugacaggucuggauuguauccgaccuugcuucuggguggaacucauuagaggcaggccaaaagagaauaccaucuggacuagcggguccauaaucucauuuuguggaguuaacagugacacagugggcuggucuuggcccgauggugcagaguuaccguucaccauugacaaguga

SEQ ID NO: 147758 - RNA, 1410 nt, Artificial Sequence; identical to SEQ ID NO: 146398
  derived and/or modified CDS sequence (opt3) from neuraminidase__InfluenzaA__ADM95664

SEQ ID NO: 147759 - RNA, 1410 nt, Artificial Sequence; identical to SEQ ID NO: 146398
  derived and/or modified CDS sequence (opt3) from neuraminidase__InfluenzaA__ADM95665

SEQ ID NO: 147760 - RNA, 1410 nt, Artificial Sequence
  derived and/or modified CDS sequence (opt3) from neuraminidase__InfluenzaA__ADM95666
augaaccccaaucagaagaucauuaccauaggcagcgugugcaugacaaucgggauggccaaccugauucuccaaaucggaaauauuaucuccauauggaucucucacucaauucagcuugguaaccagaaucagaucgagacuuguaaccaaagugucauuacguacgaaaauaacaccuggguuaaucagacauaugugaacaucagcaauacuaacuucgcugcaggccaguccguagugucugucaaacuggccggaaauucgucauugugcccugugaacgggugggcgauauacagcaaggacaauaguauuagaaucggcuccaaaggugauguuuuugugauuagggagccauucaucucuuguagcccguuagaaugccggaccuuuuuccugacacagggggcucuacucaacgacaagcauuccaacggaaccaucaaagaucgcucacccuaucgaacucugaugaguuguccuauuggcgaggucccaagccccuacaauucucguuuugaauccguggccuggucagcaagcgccugccacgacggcauaaacuggcuuacaaucgggauuaguggaccugauaauggugcuguagcaguucugaaguauaacggcaucauaaccgacacgauuaagucuuggagaaauaacaucuugaggacucaagaguccgagugugccugcgugaaugggagcuguuucaccgucaugacagauggaccaucggacggccaggcuucuuacaaaaucuuuaagauugaaaaagguaagaucgugaaauccguggagaugaacgcccccaauuaucauuacgaagagugcucauguuacccugauaguagcgagauuacuugcgucugccgggacaacuggcacggguccaaucgcccauggguuucuuucaaccagaaucucgaauaucagauaggauacaucuguagcggcauuuuuggcgauaacccgagacccaaugacaagaccgggucaugcggaccugugaguuucaacggugcgaacggcguaaagggguuuuccuucaaauauggaaauggcguguggaucgguaggacaaagagcaucucuucacggaacggguuugagaugauuugggauccaaauggcuggaccggaacggacaacaauuucaguauaaaacaagacaucgucggcacuaacgaauggagcggguacuccggaucuuucgugcagcaucccgagcugacaggucuggauuguauucgcccuugcuuuuggguugaacucauccgaggcagaccaaaggagaauaccauuuggacuucggggagcaucauauccuucuguggagugaacucagacacagucggcuggaguuggcccgauggugcagaguuaccguuuaccaucgacaaauga

SEQ ID NO: 147761 - RNA, 1410 nt, Artificial Sequence; identical to SEQ ID NO: 146398
  derived and/or modified CDS sequence (opt3) from neuraminidase__InfluenzaA__ADM95667

SEQ ID NO: 147762 - RNA, 1410 nt, Artificial Sequence; identical to SEQ ID NO: 146398
  derived and/or modified CDS sequence (opt3) from neuraminidase__InfluenzaA__ADM95668

SEQ ID NO: 147763 - RNA, 1410 nt, Artificial Sequence; identical to SEQ ID NO: 144786
  derived and/or modified CDS sequence (opt3) from neuraminidase__InfluenzaA__ADM95669

SEQ ID NO: 147764 - RNA, 1410 nt, Artificial Sequence; identical to SEQ ID NO: 144786
  derived and/or modified CDS sequence (opt3) from neuraminidase__InfluenzaA__ADM95670

SEQ ID NO: 147765 - RNA, 1410 nt, Artificial Sequence
  derived and/or modified CDS sequence (opt3) from neuraminidase__InfluenzaA__ADM95672
augaaccccaaucagaagaucauuaccauaggcagcgugugcaugacaaucgggauggccaaccugauucuccaaaucggaaauauuaucuccauauggaucucucacacuauucagcuugguaaccagaaucagaucgagacguguaaccaaucagucauuaccuacgaaaauaacacauggguuaaucagacuuaugugaacaucaguaauaccaacuucgcugcaggccagagcguaguguccgucaaacuggccggaaauucuucguugugcccugugucagggugggcgauauacagcaaggacaacaguauuagaaucggcuccaaaggugauguuuuugugauuagggagccauucaucucuuguagcccguuagaaugccggacauuuuuccugacccagggggcucuacucaaugacaagcauuccaacggaacuaucaaagaucgcucacccuaucgaacacugaugaguuguccuauuggcgaggucccaagccccuacaacucucguuuugaauccguggccuggucagcaagcgccugccacgacggcauaaauuggcuuaccaucgggauuaguggaccugauaacggugcuguagcaguucugaaguauaauggcaucauaacggacacuauuaagucuuggagaaacaauaucuugaggacccaagaguccgagugugccugcgugaacgggagcuguuucacagucaugacugauggaccaucggacggccaggcuucuuacaaaaucuuucggauugaaaaggguaaaaucgugaaguccguggagaugaaugcccccaacuaucauuacgaagagugcucauguuacccugauaguagcgagauuaccugcgucugccgcgacaauuggcacggguccaacagaccauggguuucuuucaaucagaaccucgaauaucagauaggauacaucuguagcggcauuuuuggcgauaauccgaggcccaacgacaaaacagggucaugcggaccugugaguuccaauggugcgaacggcguaaagggguucagcuuuaaguauggaaacggcguguggaucggucggaccaaaucuaucucaagucgcaauggguucgagaugauuugggauccaaacggcuggacgggaacugacaauaacuuuagcauaaagcaagacaucgucggcacaaaugaaugguccggguacucuggaucguucgugcagcaucccgagcugaccggucuggauuguauucgaccuugcuucuggguugaacucaucagaggcaggccaaaagagaacacuauuuggacaagcggguccucaaucaguuuuuguggagucaauucugacaccgugggcuggagcuggcccgauggugcagaguuaccguucacgauagacaaguga

SEQ ID NO: 147766 - RNA, 1410 nt, Artificial Sequence; identical to SEQ ID NO: 144786
  derived and/or modified CDS sequence (opt3) from neuraminidase__InfluenzaA__ADM95673

SEQ ID NO: 147767 - RNA, 1410 nt, Artificial Sequence; identical to SEQ ID NO: 146398
  derived and/or modified CDS sequence (opt3) from neuraminidase__InfluenzaA__ADM95674

SEQ ID NO: 147768 - RNA, 1410 nt, Artificial Sequence; identical to SEQ ID NO: 144786
  derived and/or modified CDS sequence (opt3) from neuraminidase__InfluenzaA__ADM95675

SEQ ID NO: 147769 - RNA, 1410 nt, Artificial Sequence
  derived and/or modified CDS sequence (opt3) from neuraminidase__InfluenzaA__ADM95677
augaaccccaaucagaagaucauuaccauaggcagcgugugcaugacaaucgggauggccaaccugauucuccaaaucggaaauauuaucuccauauggaucucucacucaauucagcuugguaaccagaaucagaucgagacuuguaaccaaagugucauuacguacgaaaauaacaccuggguuaaucagacauaugugaacaucagcaauacuaacuucgcugcaggccaguccguagugucugucaaacuggccggaaauucgucauugugcccugugaacgggugggcgauauacagcaaggacaauaguauuagaaucggcuccaaaggugauguuuuugugauuagggagccauucaucucuuguagcccguuagaaugccggaccuuuuuccugacacagggggcucuacucaacgacaagcauuccaacggaaccaucaaagaucgcucacccuaucgaacucugaugaguuguccuauuggcgaggucccaagccccuacaauucucguuuugaauccguggccuggucagcaagcgccugccacgacggcauaaacuggcuuacaaucgggauuaguggaccugauaauggugcuguagcaguucugaaguauaacggcaucauaaccgacacgauuaagucuuggagaaauaacaucuugaggacucaagaguccgagugugccugcgugaaugggagcuguuucaccgucaugacagauggaccaucggacggccaggcuucuuacaaaaucuuucggauugaaaaggguaaaaucgugaaguccguggagaugaacgcccccaauuaucauuacgaagagugcucauguuacccugauaguagcgagauuacuugcgucugccgcgacaacuggcacggguccaauagaccauggguuucuuucaaccagaaucucgaauaucagauaggauacaucuguagcggcauuuuuggcgauaacccgaggcccaaugacaaaaccgggucaugcggaccugugaguuccaacggugcgaacggcguaaagggguucagcuuuaaguauggaaauggcguguggaucggucggacaaaaucuaucucaagucgcaacggguucgagaugauuugggauccaaauggcuggaccggaacggacaacaauuuuagcauaaagcaagacaucgucggcacuaacgaaugguccggguacucuggaucguucgugcagcaucccgagcugacaggucuggauuguauucgaccuugcuucuggguugaacucaucagaggcaggccaaaagagaauaccauuuggacuagcggguccaucauaucauuuuguggagugaacagugacacagucggcuggucuuggcccgauggugcagaguuaccguucaccaucgacaaguga

SEQ ID NO: 147770 - RNA, 1410 nt, Artificial Sequence
  derived and/or modified CDS sequence (opt3) from neuraminidase__InfluenzaA__ADM95678
augaaccccaaucagaagaucauuaccauaggcagcgugugcaugacaaucgggauggccaaccugauucuccaaaucggaaauauuaucuccauauggaucucucacucaauucagcuugguaaccagaaucagaucgagacuuguaaccaaagugucauuacguacgaaaauaacaccuggguuaaucagacauaugugaacaucagcaauacuaacuucgcugcaggccaguccguagugucugucaaauuugccggaaauucgucacugugcccugugagcggaugggcgauauacaguaaggacaacuccauuagaaucggcucuaaaggugauguuuucgugauuagggagccauuuaucagcuguuccccguuggaaugccggaccuucuuuuuaacacagggggcucugcuaaaugacaagcauucaaacggaaccaucaaagaucgcagucccuaucgaacucucaugagcuguccuauuggcgaggucccaucucccuacaacucccguuucgaaucaguggccuggagcgcaagugccugccacgacggcauaaauuggcugacaaucgggauuucuggaccugauaacggugcuguagcaguucuuaaguauaauggcaucauaaccgacacgauuaaguccuggagaaacaauauccugaggacucaagagagcgagugugccugcgugaacgggucguguuuuaccgucaugacagauggaccaucugacggccaggcuuccuacaaaaucuuccggauugaaaaggguaaaaucgugaagucaguggagaugaaugcccccaacuaucauuacgaagagugcaguuguuacccugauagcuccgagauuacuugcgucugccgcgacaauuggcacgggucuaacagaccauggguuagcuuuaaucagaacuuggaauaucagauaggauacaucuguucaggcauuuucggcgauaauccgaggcccaacgacaaaaccgggaguugcggaccuguguccagcaauggugcgaacggcguaaagggguuuucuuucaaguauggaaacggcguguggaucggucggacaaaaucaaucaguagccgcaauggguuugagaugauuugggauccaaacggcuggaccggaacggacaauaacuucuccauaaagcaagacaucgucggcauuaaugaauggucuggguacucggggagcuucgugcagcaucccgagcucacuggucuggauuguauccgaccuugcuuuuggguugaacugauuagaggcaggccaaaagagaacacaaucuggaccuccgggucaaguauaucuuucuguggagugaauagcgacacugucggcugguccuggcccgauggugcagagcucccguuuacaaucgacaaguga

SEQ ID NO: 147771 - RNA, 1410 nt, Artificial Sequence; identical to SEQ ID NO: 147769
  derived and/or modified CDS sequence (opt3) from neuraminidase__InfluenzaA__ADM95679

SEQ ID NO: 147772 - RNA, 1410 nt, Artificial Sequence; identical to SEQ ID NO: 147769
  derived and/or modified CDS sequence (opt3) from neuraminidase__InfluenzaA__ADM95680

SEQ ID NO: 147773 - RNA, 1410 nt, Artificial Sequence; identical to SEQ ID NO: 144786
  derived and/or modified CDS sequence (opt3) from neuraminidase__InfluenzaA__ADM95681

SEQ ID NO: 147774 - RNA, 1410 nt, Artificial Sequence
  derived and/or modified CDS sequence (opt3) from neuraminidase__InfluenzaA__ADM95682
augaaccccaaucagaagaucauuaccauaggcagcgugugcaugacaaucgggauggccaaccugauucuccaaaucggaaauauuaucuccauauggaucucucacucaauucagcuugguaaccagaaucagaucgagauuuguaaccaaagugucaucacuuacgaaaauaacacguggguuaaucagaccuaugugaacauaagcaauacaaacuucgcugcaggccaguccguagugucugucaaacuggccggaaauucgucauugugcccugugagcggaugggcgauuuacaguaaggacaacuccaucagaauuggcucuaaaggugauguuuuugugaucagggagccauucaucagcuguuccccguuagaaugccggaccuuuuuccugacucagggggcucuacucaaugacaagcauucaaacggaacaauuaaagaucgcagucccuaucgaacccugaugagcuguccuauaggcgaggucccaucucccuacaacucccguuuugaaucaguggccuggagcgcaagugccugccacgacggcaucaauuggcuuacuauugggaucucuggaccugauaacggugcuguagcaguucugaaguauaauggcauaauuacagacaccaucaaguccuggagaaacaauaucuugaggacgcaagagagcgagugugccugcgugaacgggucguguuucacugucaugaccgauggaccaucugacggccaggcuuccuacaaaauuuuucggaucgaaaaggguaaaauugugaagucaguggagaugaaugcccccaacuaucauuacgaagagugcaguuguuacccugauagcuccgagauaacaugcgucugccgcgacaauuggcacgggucuaacagaccauggguuagcuucaaucagaaccucgaauaucagaucggauacauuuguucaggcaucuuuggcgauaauccgaggcccaacgacaaaacugggaguugcggaccuguguccagcaauggugcgaacggcguaaagggguucucuuuuaaguauggaaacggcguguggaucggucggaccaaaucaauuaguagccgcaauggguucgagaugauaugggauccaaacggcuggacaggaaccgacaauaacuuuuccaucaagcaagacauugucggcacgaaugaauggucuggguacucggggagcuucgugcagcaucccgagcugacuggucuggauuguauccgaccuugcuucuggguugaacucauuagaggcaggccaaaagagaacacaaucuggaccuccgggucaaguauaucuuuuuguggagugaauagcgacacugucggcugguccuggcccgauggugcagaguuaccguucacaaucgacaaguga

SEQ ID NO: 147775 - RNA, 1410 nt, Artificial Sequence
  derived and/or modified CDS sequence (opt3) from neuraminidase__InfluenzaA__ADM95683
augaaccccaaucagaagaucauuaccauaggcagcgugugcaugacaaucgggauggccaaccugauucuccaaaucggaaauauuaucuccauauggaucucucacucaauucagcuugguaaccagaaucagaucgagacuuguaaccaaagugucauuacguacgaaaauaacaccuggguuaaucagacauaugugaacaucagcaauacuaacuucgcugcaggccaguccguagugucugucaaacuggccggaaauucgucauugugcccugugagcggaugggcgauauacaguaaggacaacuccauuagaaucggcucuaaaggugauguuuuugugauuagggagccauucaucagcuguuccccguuagaaugccggaccuuuuuccugacacagggggcucuacucaaugacaagcauucaaacggaaccaucaaagaucgcagucccuaucgaacucugaugagcuguccuauuggcgaggucccaucucccuacaacucccguuuugaaucaguggccuggagcgcaagugccugccacgacggcauaaauuggcuuacaaucgggauuucuggaccugauaacggugcuguagcaguucugaaguauaauggcaucauaaccgacacgauuaaguccuggagaaacaauaucuugaggacucaagagagcgagugugccugcgugaacgggucguguuucaccgucaugacagauggaccaucugacggccaggcuuccuacaaaaucuuucggauugaaaaggguaaaaucgugaagucaguggagaugaaugcccccaacuaucauuacgaagagugcaguuguuacccugauagcuccgagauuacuugcgucugccgcgacaauuggcacgggucuaacagaccauggguuagcuucaaucagaaccucgaauaucagauaggauacaucuguucaggcauuuuuggcgauaauccgaggcccaacgacaaaaccgggaguugcggaccuguguccagcaauggugcgaacggcguaaagggguucucuuuuaaguauggaaacggcguguggaucggucggacaaaaucaaucaguagccgcaauggguucgagaugauuugggauccaaacggcuggaccggaacggacaauaacuuuuccauaaagcaagacaucgucggcauuaaugaauggucuggguacucggggagcuucgugcagcaucccgagcugacuggucuggauuguauccgaccuugcuucuggguugaacucauuagaggcaggccaaaagagaacacaaucuggaccuccgggucaaguaugucuuuuuguggagugaauagcgacacugucggcugguccuggcccgauggugcagaguuaccguucacaauagacaaguga

SEQ ID NO: 147776 - RNA, 1410 nt, Artificial Sequence; identical to SEQ ID NO: 144786
  derived and/or modified CDS sequence (opt3) from neuraminidase__InfluenzaA__ADM95684

SEQ ID NO: 147777 - RNA, 1410 nt, Artificial Sequence
  derived and/or modified CDS sequence (opt3) from neuraminidase__InfluenzaA__ADM95685
augaaccccaaucagaagaucauuaccauaggcagcgugugcaugacaaucgggauggccaaccugauucuccaaaucggaaauauuaucuccauauggaucucucacucaauucagcuugguaaccagaaucagaucgagacuuguaaccaaagugucauuacguacgaaaauaacaccuggguuaaucagacauaugugaacaucagcaauacuaacuucgcugcaggccaguccguagugucugucaaacuggccggaaauucgucauugugcccugugagcggaugggcgauauacaguaaggacaacuccauuagaaucggcucuaaaggugauguuuuugugauuagggagccauucaucagcuguuccccguuagaaugccggaccuuuuuccugacacagggggcucuacucaaugacaagcauucaaacggaaccaucaaagaucgcagucccuaucgaacucugaugagcuguccuauuggcgaggucccaucucccuacaacucccguuuugaaucaguggccuggagcgcaagugccugccacgacggcauaaauuggcuuacaaucgggauuucuggaccugauaacggugcuguagcaguucugaaguauaauggcaucauaaccgacacgauuaaguccuggagaaacaauaucuugaggacucaagagagcgagugugccugcgugaacgggucguguuucaccgucaugacagauggaccaucugacggccaggcuuccuacaaaaucuuucggauugaaaaggguaaaaucgugaagucaguggagaugaaugcccccaacuaucauuacgaagagugcaguuguuacccugauagcuccgagauuacuugcgucugccgcgacaauuggcacgggucuaacagaccauggguuagcuucaaucagaaccucgaauaucagauaggauacaucuguucaggcauuuuuggcgauaauccgaggcccaacgacaaaaccgggaguugcggaccuguguccagcaauggugcgaacggcguaaagggguucucuuuuaaguauggaaacggcguguggaucggucggacaaaaucaaucaguagccgccauggguucgagaugauuugggauccaaauggcuggaccggaacggacaacaauuuuuccauaaagcaagacaucgucggcacuaacgaauggucuggguacucggggagcuucgugcagcaccccgagcugacaggucuggauuguauucgaccuugcuucuggguugaacucaucagaggcaggccaaaagagaauaccguguggacuuccgggucaaguauuucuuuuuguggagucaacagcgacacagugggcugguccuggcccgauggugcagaguuaccguucaccaucgacaaguga

SEQ ID NO: 147778 - RNA, 1410 nt, Artificial Sequence
  derived and/or modified CDS sequence (opt3) from neuraminidase__InfluenzaA__ADM95686
augaaccccaaucagaagaucauuaccauaggcagcgugugcaugacaaucgggauggccaaccugauucuccaaaucggaaauauuaucuccauauggaucucucacucaauucagcuugguaaccagaaucagaucgagacuuguaaccaaagugucauuacguacgaaaauaacaccuggguuaaucagacauaugugaacaucagcaauacuaacuucgcugcaggccaguccguagugucugucaaacuggccggaaauucgucauugugcccugugagcggaugggcgauauacaguaaggacaacuccauuagaaucggcucuaaaggugauguuuuugugauuagggagccauucaucagcuguuccccguuagaaugccggaccuuuuuccugacacagggggcucuacucaaugacaagcauucaaacggaaccaucaaagaucgcagucccuaucgaacucugaugagcuguccuauuggcgaggucccaucucccuacaacucccguuuugaaucaguggccuggagcgcaagugccugccacgacggcauaaauuggcuuacaaucgggauuucuggaccugauaacggugcuguagcaguucugaaguauaauggcaucauaaccgacacgauuaaguccuggagaaacaauaucuugaggacucaagagagcgagugugccugcgugaacgggucguguuucaccgucaugacagauggaccaucugacggccaggcuuccuacaaaaucuuucggauugaaaaggguaaaaucgugaagucaguggagaugaaugcccccaacuaucauuacgaagagugcaguuguuacccugauagcuccgagauuacuugcgucugccgcgacaauuggcacgggucuaacagaccauggguuagcuucaaucagaaccucgaauaucagauaggauacaucuguucaggcauuuuuggcgauaauccgaggcccaacgacaaaaccgggaguugcggaccuguguccagcaauggugcgaacggcguaaagggguucucuuuuaaguauggaaacggcguguggaucggucggacaaaaucaaucaguagccgcaauggguucgagaugauuugggauccaaacggcuggaccggaacggacaaugacuuuuccauaaagcaagauaucgucggcauuaacgaauggucuggguacucggggagcuucgugcagcaucccgagcugacuggucuggacuguauccgaccuugcuucuggguugaacucauuagaggcaggccaaaagagaauacaaucuggaccuccgggucaaguauaucuuuuuguggagugaacagcgauacugucggcugguccuggcccgacggugcagaguuaccguucacaaucgauaaguga

SEQ ID NO: 147779 - RNA, 1410 nt, Artificial Sequence; identical to SEQ ID NO: 144786
  derived and/or modified CDS sequence (opt3) from neuraminidase__InfluenzaA__ADM95687

SEQ ID NO: 147780 - RNA, 1410 nt, Artificial Sequence
  derived and/or modified CDS sequence (opt3) from neuraminidase__InfluenzaA__ADM95688
augaaccccaaucagaagaucauuaccauaggcagcgugugcaugacaaucgggauggccaaccugauucuccaaaucggaaauauuaucuccauauggaucucucacucaauucagcuugguaaccagaaucagaucgagacuuguaaccaaagugucauuacguacgaaaauaacaccuggguuaaucagacauaugugaacaucagcaauacuaacuucgcugcaggccaguccguagugucugucaaacuggccggaaauucgucauugugcccugugagcggaugggcgauauacaguaaggacaacuccauuagaaucggcucuaaaggugauguuuuugugauuagggagccauucaucagcuguuccccguuagaaugccggaccuuuuuccugacacagggggcucuacucaaugacaagcauucaaacggaaccaucaaagaucgcagucccuaucgaacucugaugagcuguccuauuggcgaggucccaucucccuacaacucccguuuugaaucaguggccuggagcgcaagugccugccacgacggcauaaauuggcuuacaaucgggauuucuggaccugauaacggugcuguagcaguucugaaguauaauggcaucauaaccgacacgauuaaguccuggagaaacaauaucuugaggacucaagagagcgagugugccugcgugaacgggucguguuucaccgucaugacagauggaccaucugacggccaggcuuccuacaaaaucuuucggauugaaaaggguaaaaucgugaagucaguggagaugaaugcccccaacuaucauuacgaagagugcaguuguuacccugauagcuccgagauuacuugcgucugccgcgacaauuggcacgggucuaacagaccauggguuagcuucaaucagaaccucgaauaucagauaggauacaucuguucaggcauuuuuggcgauaauccgaggcccaacgacaaaaccgggaguugcggaccuguguccagcaauggugcgaacggcguaaagggguucucuuuuaaguauggaaacggcguguggaucggucggacaaaaucaaucaguagccgcaauggguucgagaugauuugggauccaaacggcuggaccggaacggacaauaacuuuuccauaaagcaagacaucgucggcacuaaugaauggucuggguacucggggagcuucgugcagcaucccgagcugacacgacuggauuguauuagaccuugcuucuggguugaacucaucaggggucggccaaaagagaacaccauuuggacuuccggcucaaucauaaguuuuuguggggucaauucugacacagugggauggagcuggcccgauggcgcagaguuaccguucaccaucgacaaguga

SEQ ID NO: 147781 - RNA, 1410 nt, Artificial Sequence; identical to SEQ ID NO: 147778
  derived and/or modified CDS sequence (opt3) from neuraminidase__InfluenzaA__ADM95689

SEQ ID NO: 147782 - RNA, 1410 nt, Artificial Sequence
  derived and/or modified CDS sequence (opt3) from neuraminidase__InfluenzaA__ADM95690
augaaccccaaucagaagaucauuaccauaggcagcgugugcaugacaaucgggauggccaaccugauucuccaaaucggaaauauuaucuccauauggaucucucacucaauucagcuugguaaccagaaucagaucgagacuuguaaccaaagugucauuacguacgaaaauaacaccuggguuaaucagacauaugugaacaucagcaauacuaacuucgcugcaggccaguccguagugucugucaaacuggccggaaauucgucauugugcccugugagcggaugggcgauauacaguaaggacaacuccauuagaaucggcucuaaaggugauguuuuugugauuagggagccauucaucagcuguuccccguuagaaugccggaccuuuuuccugacacagggggcucuacucaaugacaagcauucaaacggaaccaucaaagaucgcagucccuaucgaacucugaugagcuguccuauuggcgaggucccaucucccuacaacucccguuuugaaucaguggccuggagcgcaagugccugccacgacggcauaaauuggcuuacaaucgggauuucuggaccugauaacggugcuguagcaguucugaaguauaauggcaucauaaccgacacgauuaaguccuggagaaacaauaucuugaggacucaagagagcgagugugccugcgugaacgggucguguuucaccgucaugacagauggaccaucugacggccaggcuuccuacaaaaucuuucggauugaaaaggguaaaaucgugaagucaguggagaugaaugcccccaacuaucauuacgaagagugcaguuguuacccugauagcuccgagauuacuugcgucugccgcgacaauuggcacgggucuaacagaccauggguuagcuucaaucagaaccucgaauaucagauaggauacaucuguucaggcauuuuuggcgauaauccgaggcccaacgacaaaaccgggaguugcggaccuguguccagcaauggugcgaacggcguaaagggguucucuuuuaaguauggaaacggcguguggaucggucggacaaaaucaaucaguagccgcaauggguucgagaugauuugggauccaaacggcuggaccggaacggacaauaacuuuuccauaaagcaagacaucauuggcacuaaugaauggucuggguacucggggagcuucguccagcaucccgagcugacaggucuggauuguauccgaccuugcuucuggguggaacucauuagaggcaggccaaaagagaacaccaucuggacuuccgggucaaguauaucuuuuuguggaguuaauagcgacacagugggcugguccuggcccgauggugcagaguuaccguucaccaucgacaaguga

SEQ ID NO: 147783 - RNA, 1410 nt, Artificial Sequence; identical to SEQ ID NO: 144786
  derived and/or modified CDS sequence (opt3) from neuraminidase__InfluenzaA__ADM95691

SEQ ID NO: 147784 - RNA, 1410 nt, Artificial Sequence
  derived and/or modified CDS sequence (opt3) from neuraminidase__InfluenzaA__ADM95692
augaaccccaaucagaagaucauuaccauaggcagcgugugcaugacaaucgggauggccaaccugauucuccaaaucggaaauauuaucuccauauggaucucucacucaauucagcuugguaaccagaaucagaucgagacuuguaaccaaagugucauuacguacgaaaauaacaccuggguuaaucagacauaugugaacaucauaaauacuaacuucgcugcaggccagagcguaguguccgucaaacuggccggaaauucuucguugugcccugugucagggugggcgauuuacagcaaggacaacaguaucagaauuggcuccaaaggugauguuuuugugaucagggagccauucaucucuuguagcccguuagaaugccggaccuuuuuccugacacagggggcucuacucaaugacaagcauuccaacggaaccauuaaagaucgcucacccuaucgaacucugaugaguuguccuauaggcgaggucccaagccccuacaacucucguuuugaauccguggccuggucagcaagcgccugccacgacggcaucaauuggcuuacaauugggaucaguggaccugauaacggugcuguagcaguucugaaguauaauggcauaauuaccgacacgaucaagucuuggagaaacaauaucuugaggacucaagaguccgagugugccugcgugaacgggagcuguuucaccgucaugacagauggaccaucggacggccaggcuucuuacaaaauuuuucggaucgaaaaggguaaaauugugaaguccguggagaugaaugcccccaacuaucauuacgaagagugcucauguuacccugauaguagcgagauaacuugcgucugccgcgacaauuggcacggguccaacagaccauggguuucuuucaaucagaaccucgaauaucagaucggauacauuuguagcggcaucuuuggcgauaauccgaggcccaacgacaaaaccgggucaugcggaccugugaguuccaauggugcgaacggcguaaagggguucagcuuuaaguauggaaacggcguguggaucggucggacaaaaucuauuucaagucgcaauggguucgagaugauaugggauccaaacggcuggaccggaacggacaauaacuuuagcaucaagcaagacauugucggcaucaaugaaugguccggguacucuggaucguucgugcagcaucccgagcugacuggucuggauuguauucgaccuugcuucuggguugaacucaucagaggcaggccaaaagagaacacaauauggaccagcggguccucaaucaguuuuuguggagucaauucugacacugugggcuggagcuggcccgauggugcagaguuaccguucacaauugacaaguga

SEQ ID NO: 147785 - RNA, 1410 nt, Artificial Sequence; identical to SEQ ID NO: 144786
  derived and/or modified CDS sequence (opt3) from neuraminidase__InfluenzaA__ADM95693

SEQ ID NO: 147786 - RNA, 1410 nt, Artificial Sequence; identical to SEQ ID NO: 144786
  derived and/or modified CDS sequence (opt3) from neuraminidase__InfluenzaA__ADM95694

SEQ ID NO: 147787 - RNA, 1410 nt, Artificial Sequence; identical to SEQ ID NO: 144786
  derived and/or modified CDS sequence (opt3) from neuraminidase__InfluenzaA__ADM95695

SEQ ID NO: 147788 - RNA, 1410 nt, Artificial Sequence; identical to SEQ ID NO: 147778
  derived and/or modified CDS sequence (opt3) from neuraminidase__InfluenzaA__ADM95696

SEQ ID NO: 147789 - RNA, 1410 nt, Artificial Sequence; identical to SEQ ID NO: 146398
  derived and/or modified CDS sequence (opt3) from neuraminidase__InfluenzaA__ADM95697

SEQ ID NO: 147790 - RNA, 1413 nt, Artificial Sequence
  derived and/or modified CDS sequence (opt3) from neuraminidase__InfluenzaA__ADM95698
augaaccccaaucagaagaucauuaccauaggcagcaucuccauugccaucgggauuaucucucugaugcuccaaauaggaaacaucauuucaaucugggcuagucacagcauucagacagguucccagaauaacacuggcaucugcaaucagagaauaauuacguacgagaacaauaccugggugaaccauacauaugucaauaucaacaauacuaacguuguggcagaagaggacaaaaccucuguaacacuugccggaaauucgucacuguguagcauuagugggugggcgaucuacaccaaggauaacuccaucaggauuggcucuaaaggugacguguucgucauacgggaaccuuuuaucagcugcucccacuuggagugucgcacuuucuuuuuaacacaaggggcucugcuaaaugauaagcauucaaacggaaccgugaaagaccgaaguccauaucgugcccucaugagcugcccgcugggcgaagcacccucuccuuacaacuccaaguucgagucaguugccuggagcgcuagugcaugucacgauggcaugggguggcuuacgauuggaaucucugguccagacaauggcgccguggcuguccugaaguauaacgggauaauuacuggaaccaucaaauccuggaagaaacagaucuugagaacacaggagagcgaaugcguguguaugaauggcucgugcuuuacuauuaugaccgauggucccucuaacaaggccgcguccuacaaaaucuucaagauugagaaggggaaaguaacaaagucaauagaacucaaugcaccuaacuuucauuaugaggaguguaguugcuacccagacaccggaaucguuaugugugugugcagggauaauuggcacggcagcaaccggcccugggucuccuucaaucagaaccuggacuaccaaauuggcuauaucugcucugggguguuuggagauaauccucgcccagaagacggugagggcagcuguaacccggugacggucgauggggccaauggaguuaaaggcuucucauacaaguaugacaacgguguguggaucgggagaacuaaaaguaauaggcugcggaagggcuuugaaaugauuugggaccccaacggauggacaaacaccgauuccgacuucagcguaaaacaggauguggucgcuauaacugacuggucuggcuacucagggaguuuugugcagcacccugagcucacaggauuagauugcauccgcccauguuucuggguugaacuggugcgaggucagcccagagagaauaccacgauuuggaccagcggcuccucuaucucguucugcggggucaacagcgacacagccaauugguccuggccugauggagcagagcuuccauuuacuauugacaaguga

SEQ ID NO: 147791 - RNA, 1413 nt, Artificial Sequence
  derived and/or modified CDS sequence (opt3) from neuraminidase__InfluenzaA__ADM95699
augaaccccaaucagaagaucauuaccauaggcagcaucuccauugccaucgggauuaucucucugaugcuccaaauaggaaacaucauuucaaucugggcuagucacagcauucagacagguucccagaauaacacuggcaucugcaaucagagaauaauuacguacgagaacaauaccugggugaaccauacauaugucaauaucaacaauacuaacguuguggcagaagaggacaaaaccucuguaacacuugccggaaauucgucacuguguagcauuagugggugggcgaucuacaccaaggauaacuccaucaggauuggcucuaaaggugacguguucgucauacgggaaccuuuuaucagcugcucccacuuggagugucgcacuuucuuuuuaacacaaggggcucugcuaaaugauaagcauucaaacggaaccgugaaagaccgaaguccauaucgugcccucaugagcugcccgcugggcgaagcacccucuccuuacaacuccaaguucgagucaguugccuggagcgcuagugcaugucacgauggcaugggguggcuuacgauuggaaucucugguccagacaauggcgccguggcuguccugaaguauaacgggauaauuacuggaaccaucaaauccuggaagaaacagaucuugagaacacaggagagcgaaugcguguguaugaauggcucgugcuuuacuauuaugaccgauggucccucuaacaaggccgcguccuacaaaaucuucaagauugagaaggggaaaguaacaaagucaauagaacucaaugcaccuaacuuuuauuacgaggaguguaguugcuacccagacaccggaaucguuaugugugugugcagggauaauuggcauggcagcaaccggcccugggucuccuucaaucagaaccuggacuaucaaauuggcuacaucugcucugggguguuuggagauaauccucgcccagaagacggugagggcagcuguaacccggugacggucgauggggccaauggaguuaaaggcuucucauauaaguacgacaacgguguguggaucgggagaacuaaaaguaauaggcugcggaagggcuuugaaaugauuugggaccccaacggauggacaaacaccgauuccgacuucagcguaaaacaggauguggucgcuauaacugacuggucuggcuauucagggaguuuugugcagcacccugagcucacaggauuagauugcauccgcccauguuucuggguugaacuggugcgaggucuucccagagagaauaccacgauuuggaccagcggcuccucuaucucguucugcggggucaacagcgacacagccaauugguccuggccugauggagcagaguugccauuuacuauugacaaguga

SEQ ID NO: 147792 - RNA, 1413 nt, Artificial Sequence
  derived and/or modified CDS sequence (opt3) from neuraminidase__InfluenzaA__ADM95701
augaaccccaaucagaagaucauuaccauaggcagcaucuccauugccaucgggauuaucucucugaugcuccaaauaggaaacaucauuucaaucugggcuagucacagcauucagacagguucccagaauaacacuggcaucugcaaucagagaauaauuacguacgagaacaauaccugggugaaccauacauaugucaauaucaacaauacuaacguuguggcagaagaggacaaaaccucuguaacacuugccggaaauucgucacuguguagcauuagugggugggcgaucuacaccaaggauaacuccaucaggauuggcucuaaaggugacguguucgucauacgggaaccuuuuaucagcugcucccacuuggagugucgcacuuucuuuuuaacacaaggggcucugcuaaaugauaagcauucaaacggaaccgugaaagaccgaaguccauaucgugcccucaugagcugcccgcugggcgaagcacccucuccuuacaacuccaaguucgagucaguugccuggagcgcuagugcaugucacgauggcaugggguggcuuacgauuggaaucucugguccagacaauggcgccguggcuguccugaaguauaacgggauaauuacuggaaccaucaaauccuggaagaaacagaucuugagaacacaggagagcgaaugcguguguaugaauggcucgugcuuuacuauuaugaccgauggucccucuaacaaggccgcguccuacaaaaucuucaagauugagaaggggaaaguaacaaagucaauagaacucaaugcaccuaacuuucauuaugaggaguguaguugcuacccagacaccggaaucguuaugugugugugcagggauaauuggcacggcagcaaccggcccugggucuccuucaaucagaaccuggacuaccaaauuggcuauaucugcucugggguguuuggagauaauccucgcccagaagacggugagggcagcuguaacccggugacggucgauggggccaauggaguuaaaggcuucucauacaaguaugacaacgguguguggaucgggagaacuaaaaguaauaggcugcggaagggcuuugaaaugauuugggaccccaacggauggacaaacaccgauuccgacuucagcguaaaacaggauguggucgcuauaacugacuggucuggcuacucagggaguuuugugcagcacccugagcucacaggauuagauugcauccgcccauguuucuggguugaacuggugcgaggucuucccagagagaauaccacgauuuggaccagcggcuccucuaucucguucugcggggucaacagcgacacagccaauugguccuggccugauggagcagaguugccauuuacuauugacaaguga

SEQ ID NO: 147793 - RNA, 1413 nt, Artificial Sequence
  derived and/or modified CDS sequence (opt3) from neuraminidase__InfluenzaA__ADM95702
augaaccccaaucagaagaucauuaccauaggcagcaucuccauugccaucgggauuaucucucugaugcuccaaauaggaaacaucauuucaaucugggcuagucacagcauucagacagguagacagaauaacacuggcaucugcaaucagaggauaauuacguacgagaacuccaccugggugaaucauacauaugucaacaucaauaacacuaaaguuguggcaggggaagacaagaccucuguaacacuugccggaaauucgucacuguguagcauuaguggcugggcgaucuacaccaaagauaacuccauccggauugguucuaagggggacguguucgucauacgcgagccuuuuaucagcugcucccacuuggaaugucgaacuuucuuuuuaacacaaggagcucugcuaaaugauaaacauucaaacggcaccgugaaggaccguaguccauauagagcccucaugagcugcccgcugggcgaggcacccucuccuuacaauuccaaguucgaaucaguugccuggagcgcuagugcaugucacgaugggaugggauggcuuacgauugguaucucuggcccagacaacggggccguggcuguccugaaauauaacggaauaauuacuggcaccaucaaguccuggaaaaagcagaucuugaggacacaggagagcgagugcguguguaugaaugguucgugcuuuacuauuaugaccgaugggcccucuaacaaagccgcguccuacaagaucuucaagauugaaaaaggaaagguaacaaaaucaauagagcucaaugcaccuaacuuuuauuacgaagaguguaguugcuacccagacaccggcaucguuaugugugugugccgggauaauuggcauggcagcaaccgccccugggucuccuucaaucagaaccuggacuaucaaauuggguacaucugcucuggaguguuuggugauaauccuagaccagaggacggcgaagggagcuguaacccggugacggucgauggagccaauggcguuaaggguuucucauauaaauacgggaacggcguguggaucggaaggacuaagaguaaucggcugcgcaaaggcuuugagguaauuugggaccccaacggguggacaaauaccgacuccgauuucagcgugaagcaggacgucguggcuauaacugauuggucuggauauucagguaguuuuguucagcacccugaacucacaggcuuagacugcauccgaccauguuucuggguggagcuggucagagggcuucccagggaaaacaccacgauuuggaccagcggauccucuaucucguucugcggcgugaacagcgauacagccaauugguccuggccugacggugcagaguugccauuuacuauugauaaguga

SEQ ID NO: 147794 - RNA, 1413 nt, Artificial Sequence
  derived and/or modified CDS sequence (opt3) from neuraminidase__InfluenzaA__ADM95704
augaaccccaaucagaagaucauuaccauaggcagcaucuccauugccaucgggauuaucucucugaugcuccaaauaggaaacaucgugucaauuugggcuagucacagcauccagacagguucccagaauaacacuggcauuugcaaucagagaaucauaacguacgagaacaauaccugggucaaccauacauauguuaauauuaacaauacuaacgugguagcagaagaggacaaaaccucugugacacuugccggaaauucgucacuguguagcaucagugggugggcgauuuacaccaaggauaacuccaucaggaucggcucuaaaggugacgucuucgugauucgggaaccuuuuauaagcugcucccacuuggagugucgcacuuucuuuuuaacacaaggggcucugcuaaaugauaagcauucaaacggaaccguuaaagaccgaaguccauaucgugcccucaugagcugcccgcugggcgaagcacccucuccuuacaacuccaaguucgagucaguggccuggagcgcuagugcaugucacgauggcaugggguggcuuacgaucggaauuucugguccagacaauggcgccgucgcugugcugaaguauaacgggaucauaacuggaaccauuaaauccuggaagaaacagaucuugagaacacaggagagcgaaugcguauguaugaauggcucgugcuuuacuaucaugaccgauggucccucuaacagggccgcguccuacaagauuuucaaaaucgagaaggggaagguuacaaaaucaauugaacucaaugcaccuaacuuucauuaugaggaguguaguugcuacccagacaccggaauagugaugugugucugccgggauaauuggcacggcagcaaccgccccuggguguccuucaaucagaaccuggacuaccaaaucggcuauauuugcucugggguguuuggagauaauccuagaccagaagacggugagggcagcuguaacccggucacgguugauggggccaauggagugaagggcuucucauacaaauaugacaacgguguauggaucgggaggacuaagaguaaucggcugcgcaaaggcuuugaaaugaucugggaccccaacggauggacaaacaccgauuccgacuucagcgugaagcaggaugucguggcuauuacugacuggucuggcuacucagggaguuuuguucagcacccugagcucacaggauuagauugcauacgaccauguuucuggguggaacuggucagaggucuucccagggagaauaccacgaucuggaccagcggcuccucuauuucguucugcggggugaacagcgacacagccaauugguccuggccugauggagcagaguugccauuuacuaucgacaaauga

SEQ ID NO: 147795 - RNA, 1413 nt, Artificial Sequence
  derived and/or modified CDS sequence (opt3) from neuraminidase__InfluenzaA__ADM95705
augaaccccaaucagaagaucauuaccauaggcagcaucuccauugccaucgggauuaucucucugaugcuccaaauaggaaacaucauuucaaucugggcuagucacagcauucagacagguagacagaauaacacuggcaucugcaaucagaggauaauuacguacgagaacuccaccugggugaaucauacauaugucaacaucaauaacacuaaaguuguggcaggggaagacaagaccucuguaacacuugccggaaauucgucacuguguagcauuaguggcugggcgaucuacaccaaagauaacuccauccggauugguucuaagggggacguguucgucauacgcgagccuuuuaucagcugcucccacuuggaaugucgaacuuucuuuuuaacacaaggagcucugcuaaaugauaaacauucaaacggcaccgugaaggaccguaguccauauagagcccucaugagcugcccgcugggcgaggcacccucuccuuacaauuccaaguucgaaucaguugccuggagcgcuagugcaugucacgaugggaugggauggcuuacgauugguaucucuggcccagacaacggggccguggcuguccugaaauauaacggaauaauuacuggcaccaucaaguccuggaaaaagcagaucuugaggacacaggagagcgagugcguguguaugaaugguucgugcuuuacuauuaugaccgaugggcccucuaacaaagccgcguccuacaagaucuucaagauugaaaaaggaaagguaacaaaaucaauagagcucaaugcaccuaacuuuuauuacgaagaguguaguugcuacccagacaccggcaucguuaugugugugugccgggauaauuggcauggcagcaaccgccccugggucuccuucaaucagaaccuggacuaucaaauuggguacaucugcucuggaguguuuggugauaauccuagaccagaggacggcgaagggagcuguaacccggugacggucgauggagccaauggcguuaaggguuucucauauaaauacgggaacggcguguggaucggaaggacuaagaguaaucggcugcgcaaaggcuuugagaugauuugggaccccaacggguggacaaauaccgacuccgauuucagcguaaagcaggacguggucgcuauaacugauuggucuggauauucagguaguuuugugcagcacccugaacucacaggcuuagacugcauccgaccauguuucuggguugagcuggugagagggcuucccagggaaaacaccacgauuuggaccagcggauccucuaucucguucugcggcgucaacagcgauacagccaauugguccuggccugacggugcagaguugccauuuacuauugauaaguga

SEQ ID NO: 147796 - RNA, 1413 nt, Artificial Sequence; identical to SEQ ID NO: 147795
  derived and/or modified CDS sequence (opt3) from neuraminidase__InfluenzaA__ADM95706

SEQ ID NO: 147797 - RNA, 1413 nt, Artificial Sequence; identical to SEQ ID NO: 147795
  derived and/or modified CDS sequence (opt3) from neuraminidase__InfluenzaA__ADM95707

SEQ ID NO: 147798 - RNA, 1413 nt, Artificial Sequence; identical to SEQ ID NO: 145509
  derived and/or modified CDS sequence (opt3) from neuraminidase__InfluenzaA__ADM95708

SEQ ID NO: 147799 - RNA, 1410 nt, Artificial Sequence
  derived and/or modified CDS sequence (opt3) from neuraminidase__InfluenzaA__ADM95710
augaaccccaaucagaagaucauuaccauaggcagcgugucccugacaaucucuacuauuugcuucuuuaugcagaucgccauucucaucacgaccgucacacuucacuucaaacaguacgaguuuaacucaccuccaaauaaccagguuaugcugugugaaccgacuauaaucgagagaaauauuaccgaaaucguguauuugacaaacaccacuauugagaaggaaaucugccccaaauuagcugaguacaggaauuggaguaagccucagugugacauaacaggguucgcaccauuuagcaaagauaacuccauucggcugucugccggaggugacaucuggguaacccgcgagcccuaugugucgugcgauccugacaaguguuaccaauucgcgcuaggccaggggacgacucucaauaacguccauucaaauaacaccgugcgagaucguacaccauauagaacucugcuuaugaaugaacugggaguucccuuucacuugggcaccaaacaggugugcauugcuuggagcaguuccucuugucaugacgguaaggccuggcuccacgucugcaucacaggggaugacaagaacgcaaccgccagcuucaucuacaauggaaggcugguggauuccguaguuucauggaguaaagagauucugcggacgcaggaaagcgagugugugugcauaaacggcacuuguacagucgugaugaccgacggcucugcuuccgggaaggcagauacuaaaauccucuuuauugaggaaggaaagaucgugcauacaucaaccuuaagcgguagugcccaacacgucgaggaaugcucuugcuauccucgcuacccaggcguuagaugugugugcagggacaacuggaagggguccaaucggccgauaguagauauuaacaucaaagaccacaauaucgugagcucguacgucuguucuggacuggugggcgacacgccccgcaagaacgauuccucaaguagcucccauugccuugacccuaauaacgaggaaggugggcacggaguuaaaggcugggcuuucgaugacggcaaugauguguggauggggcgaaccauuucugaaaagagcagauugggauaugagacauuuaaagucaucgaggguuggucaaacccaaagaguaaacugcagauuaauaggcaagugauaguagaccggggcaaccguuccggguacagcggaaucuucucuguugagggcaagucauguauuaaucgcugcuuuuauguggaacuaaucagagguaggaaggaggaaacugauguccucuggaccaguaacagcaucguggucuucugugggacauccggcacuuacggaaccggcucuuggcccgacggggccgauauuaaucugaugccuauauga

SEQ ID NO: 147800 - RNA, 1410 nt, Artificial Sequence; identical to SEQ ID NO: 144647
  derived and/or modified CDS sequence (opt3) from neuraminidase__InfluenzaA__ADM95711

SEQ ID NO: 147801 - RNA, 1410 nt, Artificial Sequence; identical to SEQ ID NO: 144647
  derived and/or modified CDS sequence (opt3) from neuraminidase__InfluenzaA__ADM95712

SEQ ID NO: 147802 - RNA, 1410 nt, Artificial Sequence; identical to SEQ ID NO: 144647
  derived and/or modified CDS sequence (opt3) from neuraminidase__InfluenzaA__ADM95713

SEQ ID NO: 147803 - RNA, 1410 nt, Artificial Sequence
  derived and/or modified CDS sequence (opt3) from neuraminidase__InfluenzaA__ADM95714
augaaccccaaucagaagaucauuaccauaggcagcgugucccugacaaucucuacuauuugcuucuuuaugcagaucgccauucucaucacgaccgucacacuucacuucaaacaguacgaguuuaacucaccuccaaauaaccagguuaugcugugugaaccgacuauaaucgagagaaauauuaccgaaaucguguauuugacaaacaccacuauugagaaggaaaucugccccaaauuagcugaguacaggaauuggaguaagccucagugugacauaacaggguucgcaccauuuagcaaagauaacuccauucggcugucugccggaggugacaucuggguaacccgcgagcccuaugugucgugcgauccugacaaguguuaccaauucgcgcuaggccaggggacgacucucaauaacguccauucaaauaacaccgugcgagaucguacaccauauagaacucugcuuaugaaugaacugggaguucccuuucacuugggcaccaaacaggugugcauugcuuggagcaguuccucuugucaugacgguaaggccuggcuccacgucugcaucacaggggaugacaagaacgcaaccgccagcuucaucuacaauggaaggcugguggauuccguaguuucauggaguaaagagauucugcggacgcaggaaagcgagugugugugcauaaacggcacuuguacagucgugaugaccgacggcucugcuuccgggaaggcagauacuaaaauccucuuuauugaggaaggaaagaucgugcauacaucaaccuuaagcgguagugcccaacacgucgaggaaugcucuugcuauccucgcuacccaggcguuagaugugugugcagggacaacuggaagggguccaaucggccgauaguagauauuaacaucaaagaccacagcaucgugucgucuuacgucuguuccggacuggugggcgacacgccccgcaagaaugauucaaguagcuccucucauugccuugacccuaacaaugaggaaggugggcacggaguuaaaggcugggcuuucgaugacggcaacgauguguggauggggcgaaccauuagcgagaagucaagauugggauaugagacauuuaaagucaucgaagguuggaguaauccaaaguccaaacugcagauuaacaggcaagugauaguagaccggggcaaucguagcggguacucuggaaucuucucaguugagggcaagaguuguauuaaccgcugcuuuuauguggaacuaaucagagguaggaaggaggaaacugauguccucuggaccagcaauuccaucguggucuucugugggacaucuggcacuuacggaaccggcucguggcccgacggggccgauauuaaccugaugccuauauga

SEQ ID NO: 147804 - RNA, 1410 nt, Artificial Sequence; identical to SEQ ID NO: 144647
  derived and/or modified CDS sequence (opt3) from neuraminidase__InfluenzaA__ADM95715

SEQ ID NO: 147805 - RNA, 1410 nt, Artificial Sequence; identical to SEQ ID NO: 147803
  derived and/or modified CDS sequence (opt3) from neuraminidase__InfluenzaA__ADM95716

SEQ ID NO: 147806 - RNA, 1410 nt, Artificial Sequence; identical to SEQ ID NO: 147803
  derived and/or modified CDS sequence (opt3) from neuraminidase__InfluenzaA__ADM95717

SEQ ID NO: 147807 - RNA, 1410 nt, Artificial Sequence; identical to SEQ ID NO: 144647
  derived and/or modified CDS sequence (opt3) from neuraminidase__InfluenzaA__ADM95718

SEQ ID NO: 147808 - RNA, 1410 nt, Artificial Sequence
  derived and/or modified CDS sequence (opt3) from neuraminidase__InfluenzaA__ADM95719
augaaccccaaucagaagaucauuaccauaggcagcgugucccugacaaucucuacuauuugcuucuuuaugcagaucgccauucucaucacgaccgucacacuucacuucaaacaguacgaguuuaacucaccuccaaauaaccagguuaugcugugugaaccgacuauaaucgagagaaauauuaccgaaaucguguauuugacaaacaccacuauugagaaggaaaucugccccaaauuagcugaguacaggaauuggaguaagccucagugugacauaacaggguucgcaccauuuagcaaagauaacuccauucggcugucugccggaggugacaucuggguaacccgcgagcccuaugugucgugcgauccugacaaguguuaccaauucgcgcuaggccaggggacgacucucaauaacguccauucaaauaacaccgugcgagaucguacaccauauagaacucugcuuaugaaugaacugggaguucccuuucacuugggcaccaaacaggugugcauugcuuggagcaguuccucuugucaugacgguaaggccuggcuccacgucugcaucacaggggaugacaagaacgcaaccgccagcuucaucuacaauggaaggcugguggauuccguaguuucauggaguaaagagauucugcggacgcaggaaagcgagugugugugcauaaacggcacuuguacagucgugaugaccgacggcucugcuuccgggaaggcagauacuaaaauccucuuuauugaggaaggaaagaucgugcauacaucaaccuuaagcgguagugcccaacacgucgaggaaugcucuugcuauccucgcuacccaggcguuagaugugugugcagggacaacuggaagggguccaaucggccgauaguagauauuaacaucaaagaccacagcaucgugucgucuuacgucuguuccggacuggugggcgacacgccccgcaagaaugauucaaguagcuccucucauugccuugacccuaacaaugaggaaggugggcacggaguuaaaggcugggcuuucgaugacggcaacgauguguggauggggcgaaccauuagcgagaagucaagaaguggauaugagacauuuaaagucaucgaagguugguccaauccaaagagcaaauugcagauuaacaggcaagugauaguagaccggggcaaucguucuggguacucaggaaucuucaguguugagggcaagagcuguauuaaccgcugcuuuuauguggaacugaucagagguaggaaggaggaaacugagguccuauggaccuccaauucuaucguggucuucugugggacaucgggcacuuacggaaccggcagcuggcccgauggggccgacauuaaccucaugccuauauga

SEQ ID NO: 147809 - RNA, 1410 nt, Artificial Sequence; identical to SEQ ID NO: 144647
  derived and/or modified CDS sequence (opt3) from neuraminidase__InfluenzaA__ADM95720

SEQ ID NO: 147810 - RNA, 1410 nt, Artificial Sequence; identical to SEQ ID NO: 144647
  derived and/or modified CDS sequence (opt3) from neuraminidase__InfluenzaA__ADM95721

SEQ ID NO: 147811 - RNA, 1410 nt, Artificial Sequence; identical to SEQ ID NO: 144647
  derived and/or modified CDS sequence (opt3) from neuraminidase__InfluenzaA__ADM95723

SEQ ID NO: 147812 - RNA, 1410 nt, Artificial Sequence
  derived and/or modified CDS sequence (opt3) from neuraminidase__InfluenzaA__ADM95724
augaaccccaaucagaagaucauuaccauaggcagcgugucccugacaaucucuacuauuugcuucuuuaugcagaucgccauucucaucacgaccgucacacuucacuucaaacaguacgaguuuaacucaccuccaaauaaccagguuaugcugugugaaccgacuauaaucgagagaaauauuaccgaaaucguguauuugacaaacaccacuauugagaaggaaaucugccccaaauuagcugaguacaggaauuggaguaagccucagugugacauaacaggguucgcaccauuuagcaaagauaacuccauucggcugucugccggaggugacaucuggguaacccgcgagcccuaugugucgugcgauccugacaaguguuaccaauucgcgcuaggccaggggacgacucucaauaacguccauucaaauaacaccgugcgagaucguacaccauauagaacucugcuuaugaaugaacugggaguucccuuucacuugggcaccaaacaggugugcauugcuuggagcaguuccucuugucaugacgguaaggccuggcuccacgucugcaucacaggggaugacaagaacgcaaccgccagcuucaucuacaauggaaggcugguggauuccguaguuucauggaguaaagagauucugcggacgcaggaaagcgagugugugugcauaaacggcacuuguacagucgugaugaccgacggcucugcuuccgggaaggcagauacuaaaauccucuuuauugaggaaggaaagaucgugcauacaucaaccuuaagcgguagugcccaacacgucgaggaaugcucuugcuauccucgcuacccaggcguuagaugugugugcagggacaacuggaagggguccaaucggccgauaguagauauuaacaucaaagaccacagcaucgugucgucuuacgucuguuccggacuggugggcgacacgccccgcaagaaugauucaaguagcuccucucauugccuugacccuaacaaugaggaaggugggcacggaguuaaaggcugggcuuucgaugacggcaacgauguguggauggggcgaaccauuagcgagaagucaagauugggauaugagacauuuaaagucaucgaagguuggaguaauccaaacuccaagcugcagauuaauaggcaagugauaguagaccggggcaaccguagcggguacucuggaaucuucucaguugagggcaaaaguuguauuaaucgcugcuuuuauguggaacuaaucagagguaggaaggaggaaacugagguccucuggaccagcaacuccaucguggucuucugugggacaucuggcacuuacggaaccggcucguggcccgauggggccgacauuaaucugaugccuauauga

SEQ ID NO: 147813 - RNA, 1410 nt, Artificial Sequence
  derived and/or modified CDS sequence (opt3) from neuraminidase__InfluenzaA__ADM95725
augaaccccaaucagaagaucauuaccauaggcagcgugucccugacaaucucuacuauuugcuucuuuaugcaaaucgccauucucaucacgaccgucacacuucacuucaaacaguacgaguuuaacccuccaccgaauaaccagguuaugcugugugaacccacuauaaucgagagaaauauuaccgaaaucguguauuugacaaacaccacuauugagaaggaaguaugcccuaaauuagcugaguacaggaauuggucaaagccacagugugacaucacaggguucgcacccuuuaguaaagauaacagcauacggcuguccgccggaggugacauuugggugacccgcgagccuuaugucucuugcgauccagacaaguguuaccaauucgcgcuaggccaggggacgacucucaauaacgugcauucgaauaacaccguucgagaucguacacccuauagaacucugcuuaugaaugaacugggagugccuuuucacuugggcaccaagcaggucugcaucgcuuggucaagcaguuccugucaugacgguaaagccuggcuccacgugugcauuacaggggaugacaagaacgcaaccgccucuuucaucuacaauggaaggcugguagauagcguuguguccuggucaaaagagauccugcggacgcaggaaagugagugugucugcauuaacggcacuuguacaguggugauaaccgacggcagcgcuucugggaaggcagauacuaaaauccucuuuauugaggaaggaaagaucguccauacauccaccuuaucagguagcgcccaacacguugaggaaugcaguugcuauccacgcuacccgggcgugagauguguaugcagggacaacuggaaggggucuaaucggcccauaguggauauuaacaucaaagaccacuccaucgucagcucguacguguguucuggacugguuggcgacacgccucgcaagaaugauuccucaaguagcucccauugccuugacccaaacaaugaggaaggugggcacggagugaaaggcugggcuuucgaugacggcaacgaugucuggauggggcgaaccauuucugaaaagagcagauugggauaugagacauuuaaagugaucgaggguuggucaaaucccaagaguaaacugcagauuaacaggcagguaauaguugaccggggcaaucguuccggguacagcggaaucuucucuguggagggcaagucauguauuaaccgcugcuuuuaugucgaacuaaucagagguaggaaggaggaaacugaugugcucuggaccaguaauagcaucgucguguucugugggacauccggcacuuacggaaccggcucuuggccugacggggccgauauuaaccugaugccaauauga

SEQ ID NO: 147814 - RNA, 1410 nt, Artificial Sequence
  derived and/or modified CDS sequence (opt3) from neuraminidase__InfluenzaA__ADM95726
augaaccccaaucagaagaucauuaccauaggcagcgugucccugacaaucucuacuauuugcuucuuuaugcaaaucgccauucucaucacggcugucacccuucacuucaaacaguacgaguuuaacucaccuccaaauaaccagguuaugcugugugaaccgacaauaaucgagagaaauauuacugaaaucguguauuugaccaacacaaccauugagaaggaaaucugccccaaauuagcagaguacaggaauuggaguaagccucagugugacauaacuggguucgccccauuuagcaaagauaacuccauucggcugucugcgggaggugacaucuggguaacacgcgagcccuaugugucgugcgauccugacaaguguuaccaauucgcucuaggccaggggaccacgcucaauaacguccauucaaauaacacugugcgagaucguaccccauauagaacacugcuuaugaaugaacugggaguucccuuucacuugggcacuaaacaggugugcauugccuggagcaguuccucuugucaugacgguaaggcauggcuccacgucugcaucaccggggaugacaagaacgccacagcuagcuucaucuacaauggaaggcugguggauuccguaguuucauggaguaaagagauucugcggacccaggaaagcgagugugugugcauaaacggcacguguacugucgugaugacagacggcucugcauccgggaaggccgauaccaaaauccucuuuauugaggaaggaaagaucgugcauacuucaacauuaagcgguagugcucaacacgucgaggaaugcucuugcuauccucgcuacccaggcguuagaugugugugcagggacaacuggaagggguccaaucggccgauaguagauauuaacaucaaagaccacagcaucgugucgucuuacgucuguuccggacuggugggcgacacccccaggaagaaugauucaaguagcuccucucauugccuugacccuaacaaugaggaaggugggcacggaguuaaaggcugggccuucgaugacggcaacgauguguggauggggcgaacgauuagcgagaagucaagauugggauaugagaccuuuaaagucaucgaagguuggaguaauccaaaguccaaacugcagauuaaccgccaggugauaguagaccggggcaaucguagcggguacucuggaaucuucucaguugagggcaagaguuguauuaaccgcugcuuuuauguggaacuaaucagagguaggaaggaggaaacagauguccucuggacuagcaauuccaucguggucuucugugggaccucuggcacauacggaacuggcucguggcccgacggggcggauauuaaccugaugccuauauga

SEQ ID NO: 147815 - RNA, 1410 nt, Artificial Sequence; identical to SEQ ID NO: 144647
  derived and/or modified CDS sequence (opt3) from neuraminidase__InfluenzaA__ADM95727

SEQ ID NO: 147816 - RNA, 1410 nt, Artificial Sequence
  derived and/or modified CDS sequence (opt3) from neuraminidase__InfluenzaA__ADM95728
augaaccccaaucagaagaucauuaccauaggcagcgugucccugacaaucucuacuauuugcuucuuuaugcagaucgccauucucaucacgaccgucacacuucacuucaaacaguacgaguuuaacucaccuccaaauaaccagguuaugcugugugaaccgacuauaaucgagagaaauauuaccgaaaucguguauuugacaaacaccacuauugagaaggaaaucugccccgaguuagcugaguacaggaauuggaguaaaccucagugugacauaacaggguucgcaccauuuagcaaggauaacuccauucggcugucugccggaggugacaucuggguaacccgcgaacccuaugugucgugcgauccugacaaauguuaccaauucgcgcuaggccaggggacgacucucaauaacguccauucaaauaacaccgugcgagaucguacaccauauagaacucugcuuaugaaugagcugggaguucccuuucacuugggcaccaaacaggugugcauugcuuggagcaguuccucuugucaugacgguaaggccuggcuccacgucugcaucacaggggaugacaagaacgcaaccgccagcuucaucuacaauggaaggcugguggauuccguaguuucauggaguaaggaaauucugcggacgcaggagagcgagugugugugcauaaacggcacuuguacagucgugaugaccgacggcucugcuuccgggaaagcagauacuaagauccucuuuauugaagagggaaaaaucgugcauacaucaaccuuaagcgguagugcccaacacgucgaagagugcucuugcuauccucgcuacccaggcguuagaugugugugcagggacaacuggaagggguccaaucggccgauaguagauauuaacaucaaggaccacagcaucgugucgucuuacgucuguuccggacuggugggcgacacgccccgcaaaaaugauucaaguagcuccucucauugccuugacccuaacaaugaagagggugggcacggaguuaagggcugggcuuucgaugacggcaacgauguguggauggggcgaaccauuagcgagaaaucaagauugggauaugaaacauuuaaggucaucgaggguuggaguaauccaaaauccaagcugcagauuaacaggcaagugauaguagaccggggcaaucguagcggguacucuggaaucuucucaguugaaggcaaaaguuguauuaaccgcugcuuuuauguggagcuaaucagagguaggaaggaagagacugagguccucuggaccagcaauuccaucguggucuucugugggacaucuggcacuuacggaaccggcucguggcccgauggggccgacauuaaccugaugccuauauga

SEQ ID NO: 147817 - RNA, 1410 nt, Artificial Sequence
  derived and/or modified CDS sequence (opt3) from neuraminidase__InfluenzaA__ADM95729
augaaccccaaucagaagaucauuaccauaggcagcgugucccugacaaucucuacuauuugcuucuuuaugcaaaucgccauucucaucacgaccgucacacuucacuucaaacaguacgaguuuaacucaccuccaaauaaccagguuaugcugugugaaccgacuauaaucgagagaaauauuaccgaaaucguguauuugacaaacaccacuauugagaaggaaaucugccccaaauuagcugaguacaggaauuggaguaagccucagugugacauaacaggguucgcaccauuuagcaaagauaacuccauucggcugucugccggaggugacaucuggguaacccgcgagcccuaugugucgugcgauccugacaaguguuaccaauucgcgcuaggccaggggacgacucucaauaacguccauucaaauaacaccgugcgagaucguacaccauauagaacucugcuuaugaaugaacugggaguucccuuucacuugggcaccaaacaggugugcauugcuuggagcaguuccucuugucaugacgguaaggccuggcuccacgucugcaucacaggggaugacaagaacgcaaccgccagcuucaucuacaauggaaggcugguggauuccguaguuucauggaguaaagagauucugcggacgcaggaaagcgagugugugugcauaaacggcacuuguacagucgugaugaccgacggcucugcuuccgggaaggcagauacuaaaauccucuuuauugaggaaggaaagaucgugcauacaucaaccuuaagcgguagugcccaacacgucgaggaaugcucuugcuauccucgcuacccaggcguuagaugugugugcagggacaacuggaagggguccaaucggccgauaguagauauuaacaucaaagaccacagcaucgugucgucuuacgucuguuccggacuggugggcgacacgccccgcaagaaugauucaaguagccgaucccauugccuugacccuaacaaugaggaaggugggcacggaguuaaaggcugggcuuucgaugacggcaacgauguguggauggggagaaccauuucugaaaagagcagguugggauaugagacauuuaaagucaucgaggguuggucaaauccaaagaguaaacugcagauuaaccgucaggugauaguagaccggggcaaucgcuccggguacagcggaaucuucucuguugagggcaagucauguauuaacagaugcuuuuauguggaacuaaucaggggucggaaggaggaaacugagguccucuggaccaguaauagcaucguggucuucugugggacauccggcacuuacggaaccggcucuuggcccgauggggccgacauuaaccugaugccuauauga

SEQ ID NO: 147818 - RNA, 1410 nt, Artificial Sequence
  derived and/or modified CDS sequence (opt3) from neuraminidase__InfluenzaA__ADM95730
augaaccccaaucagaagaucauuaccauaggcagcgugucccugacaaucucuacuauuugcuucuuuaugcagaucgccauucucaucacgaccgucacacuucacuucaaacaguacgaguuuaacucaccuccaaguaaucagguuaugcugugugaaccgacuauaaucgagagaaacauuaccgaaaucguguauuugacaaauaccacuauugagaaggaaaucugccccaaauuagcugaguacaggaacuggagcaagccucagugugacauaacaggguucgcaccauuuuccaaagauaauucuauucggcugucggccggaggugacaucuggguaacccgcgagcccuaugugucaugcgauccugacaaguguuaccaauucgcgcuaggccaggggacgacucucaacaauguccauagcaacaauaccgugcgagaucguacaccauauagaacucugcuuaugaacgaacugggaguucccuuucacuugggcaccaaacaggugugcauugcuuggaguuccucuagcugucaugacgguaaggccuggcuccacgucugcaucacaggggaugacaagaaugcaaccgccuccuucaucuacaacggaaggcugguggauucaguaguuaguuggagcaaagagauucugcggacgcaggaaucugagugugugugcauaaauggcacuuguacagucgugaugaccgacggcuccgcuucagggaaggcagauacuaaaauccucuuuauugaggaaggaaagaucgugcauacaagcaccuuaagugguucugcccaacacgucgaggaaugcuccugcuauccucgcuacccaggcguuagaugugugugcagggacaacuggaaggggagcaaccggccgauaguagauauuaauaucaaagaccacucgaucgugucuuccuacgucuguucaggacuggugggcgacacgccccgcaagaacgauaguagcuccucuagccauugccuugacccuaauaacgaggaaggugggcacggaguuaaaggcugggcuuucgaugacggcaaugauguguggauggggcgaaccauuucagagaagaguagauugggauaugagacauuuaaagucaucgaagguugguccaacccaaagagcaaacugcagauuaauaggcaagugauaguagaccggggcaaccguucuggguacucaggaaucuucaguguugagggcaagagcuguauuaaucgcugcuuuuauguggaacuaaucagagguaggaaggaggaaacugagguccucuggaccuccaacucuaucguggucuucugugggacaucgggcacuuacggaaccggcagcuggcccgauggggccgacauuaaucugaugccuauauga

SEQ ID NO: 147819 - RNA, 1410 nt, Artificial Sequence
  derived and/or modified CDS sequence (opt3) from neuraminidase__InfluenzaA__ADM95732
augaaccccaaucagaagaucauuaccauaggcagcgugucccugacaaucucuacuauuugcuucuuuaugcaaaucgccauucucaucacgaccgucacacuucacuucaaacaguacgaguuuaacucaccuccaaauaaccagguuaugcugugugaaccgacuauaaucgagagaaauauuaccgaaaucguguauuugacaaacaccacuauugagaaggaaaucugccccaaauuagcugaguacaggaauuggaguaagccucagugugacauaacaggguucgcaccauuuagcaaagauaacuccauucggcugucugccggaggugacaucuggguaacccgcgagcccuaugugucgugcgauccugacaaguguuaccaauucgcgcuaggccaggggacgacucucaauaacguccauucaaaugauaccgugcgagaccguacaccauauagaacucugcuuaugaacgaacugggaguucccuuucacuugggcaccaaacaggugugcauugcuuggagcaguuccucuugucaugaugguaaggccuggcuccacgucugcaucacaggggacgauaagaaugcaaccgccagcuucaucuacaacggaaggcugguggacuccauuguaucauggaguaaagagauacugcggacgcaggaaagcgaguguguuugcaucaauggcacuuguacaguggucaugaccgauggcucugcuuccgggaaggcagacacuaaaauucucuuuaucgaggaaggaaagauagugcauacaucaaccuuaagcgguagugcccaacacguggaggaaugcucuugcuauccucgcuacccaggcgucagauguguuugcagggauaacuggaagggguccaaccggccgauuguggacaucaauaucaaagaccgcagcauuguaucgucuuacguguguuccggacuggucggcgauacgccccgaaagaacgacucaaguagcuccucucacugccuugauccuaauaacgaggaaggugggcauggagugaaaggcugggcuuucgacgauggcaaugacguuuggauggggagaaccaucagcgagaagucaagguugggauaugagacauuuaaagugauugaagguuggaguaaccacaaguccaaacugcagauaaaucggcaggucaucguggaucguggcaaccgcagcggguacucuggaauuuucucaguagagggcaagaguuguaucaauagaugcuuuuauguugaacuaaucaggggucggaaggaggaaacugaggugcucuggaccagcaacuccauugucguguucugugggacaucuggcacuuacggaaccggcucguggccagacggggccgauauaaaucugaugcccaucuga

SEQ ID NO: 147820 - RNA, 1410 nt, Artificial Sequence; identical to SEQ ID NO: 144647
  derived and/or modified CDS sequence (opt3) from neuraminidase__InfluenzaA__ADM95733

SEQ ID NO: 147821 - RNA, 1410 nt, Artificial Sequence; identical to SEQ ID NO: 144647
  derived and/or modified CDS sequence (opt3) from neuraminidase__InfluenzaA__ADM95734

SEQ ID NO: 147822 - RNA, 1410 nt, Artificial Sequence; identical to SEQ ID NO: 144647
  derived and/or modified CDS sequence (opt3) from neuraminidase__InfluenzaA__ADM95735

SEQ ID NO: 147823 - RNA, 1410 nt, Artificial Sequence; identical to SEQ ID NO: 144647
  derived and/or modified CDS sequence (opt3) from neuraminidase__InfluenzaA__ADM95736

SEQ ID NO: 147824 - RNA, 1410 nt, Artificial Sequence
  derived and/or modified CDS sequence (opt3) from neuraminidase__InfluenzaA__ADM95737
augaaccccaaucagaagaucauuaccauaggcagcgugucccugacaaucucuacuauuugcuucuuuaugcaaaucgccauucucaucacgaccgucacacuucacuucaaacaguacgaguuuaacucaccuccaaauaaccagguuaugcugugugaaccgacuauaaucgagagaaauauuaccgaaaucguguauuugacaaacaccacuauugagaaggaaaucugccccaaauuagcugaguacaggaauuggaguaagccucagugugacauaacaggguucgcaccauuuagcaaagauaacuccauucggcugucugccggaggugacaucuggguaacccgcgagcccuaugugucgugcgauccugacaaguguuaccaauucgcgcuaggccaggggacgacucucaauaacguccauucaaauaacaccgugcgagaucguacaccauauagaacucugcuuaugaaugaacugggaguucccuuucacuugggcaccaaacaggugugcauugcuuggagcaguuccucuugucaugacgguaaggccuggcuccacgucugcaucacaggggaugacaagaacgcaaccgccagcuucaucuacaauggaaggcugguggauuccguaguuucauggaguaaagagauucugcggacgcaggaaagcgagugugugugcauaaacggcacuuguacagucgugaugaccgacggcucugcuuccgggcgcgcagauacuaagauccucuuuauugaggaaggaaaaaucgugcauacaucaaccuuaagcgguagugcccaacacgucgaggaaugcucuugcuauccuagauacccaggcguuaggugugugugccgggacaacuggaagggguccaaucgcccgauaguagauauuaacaucaaggaccacagcaucgugucgucuuacgucuguuccggacuggugggcgacacgccccggaaaaaugauucaaguagcuccucucauugccuugacccuaacaaugaggaaggugggcacggaguuaagggcugggcuuucgaugacggcaacgauguguggauggggagaaccauuagcgagaaaucaagguugggauaugagacauuuaaggucaucgaagguuggaguaauccaaaauccaagcugcagauuaaccgacaggugauaguagaccguggcaaucgcagcggguacucuggaaucuucucaguugagggcaaaaguuguauuaacagaugcuuuuauguggaacuaaucaggggucggaaggaggaaacugauguccucuggaccagcaauuccaucguggucuucugugggacaucuggcacuuacggaaccggcucguggcccgacggggccgauauuaaccugaugccuauauga

SEQ ID NO: 147825 - RNA, 1410 nt, Artificial Sequence; identical to SEQ ID NO: 144647
  derived and/or modified CDS sequence (opt3) from neuraminidase__InfluenzaA__ADM95738

SEQ ID NO: 147826 - RNA, 1410 nt, Artificial Sequence; identical to SEQ ID NO: 144647
  derived and/or modified CDS sequence (opt3) from neuraminidase__InfluenzaA__ADM95739

SEQ ID NO: 147827 - RNA, 1410 nt, Artificial Sequence
  derived and/or modified CDS sequence (opt3) from neuraminidase__InfluenzaA__ADM95740
augaaccccaaucagaagaucauuaccauaggcagcgugucccugacaaucucuacuauuugcuucuuuaugcagaucgccauucucaucacgaccgucacacuucacuucaaacaguacgaguuuaacucaccuccaaauaaccagguuaugcugugugaaccgacuauaaucgagagaaauauuaccgaaaucguguauuugacaaacaccacuauugagaaggaaaucugccccaaauuagcugaguacaggaauuggaguaagccucagugugacauaacaggguucgcaccauuuagcaaagauaacuccauucggcugucugccggaggugacaucuggguaacccgcgagcccuaugugucgugcgauccugacaaguguuaccaauucgcgcuaggccaggggacgacucucaauaacguccauucaaauaacaccgugcgagaucguacaccauauagaacucugcuuaugaaugaacugggaguucccuuucacuugggcaccaaacaggugugcauugcuuggagcaguuccucuugucaugacgguaaggccuggcuccacgucugcaucacaggggaugacaagaacgcaaccgccagcuucaucuacaauggaaggcugguggauuccguaguuucauggaguaaagagauucugcggacgcaggaaagcgagugugugugcauaaacggcacuuguacagucgugaugaccgacggcucugcuuccgggaaggcagauacuaaaauccucuuuauugaggaaggaaagaucgugcauacaucaaccuuaagcgguagugcccaacacgucgaggaaugcucuugcuauccucgcuacccaggcguuagaugugugugcagggacaacuggaagggguccaaucggccgauaguagauauuaacaucaaagaccacagcaucgugucgucuuacgucuguuccggacuggugggcgacacgccccgcaagaaugauucaaguagcuccucucauugccuugacccuaacgaugaggaaggugggcacggaguuaaaggcugggcuuucgacgauggcaaugacguguggauggggcgaaccauuagcgagaagucaagauugggauaugagacauuuaaagucaucgaagguuggaguaacccaaaguccaaacugcagauuaauaggcaagugauaguagaucggggcaaccguagcggguacucuggaaucuucucaguugagggcaagaguuguauuaaucgcugcuuuuauguggaacuaaucagagguaggaaggaggaaacuaaaguccucuggaccagcaacuccaucguggucuucugugggacaucuggcacuuacggaaccggcucguggcccgacggggccgauauuaaucugaugccuauauga

SEQ ID NO: 147828 - RNA, 1410 nt, Artificial Sequence; identical to SEQ ID NO: 147803
  derived and/or modified CDS sequence (opt3) from neuraminidase__InfluenzaA__ADM95741

SEQ ID NO: 147829 - RNA, 1410 nt, Artificial Sequence; identical to SEQ ID NO: 144647
  derived and/or modified CDS sequence (opt3) from neuraminidase__InfluenzaA__ADM95742

SEQ ID NO: 147830 - RNA, 1410 nt, Artificial Sequence
  derived and/or modified CDS sequence (opt3) from neuraminidase__InfluenzaA__ADM95743
augaaccccaaucagaagaucauuaccauaggcagcgugucccugacaaucucuacuauuugcuucuuuaugcagaucgccauucucaucacgaccgucacacuucacuucaaacaguacgaguuuaacucaaguccuaauaaccagguuaugcugugugaaccaacuauaaucgagagaaauauuaccgaaaucguguauuugacaaacaccacuauugagaaggaaaucugcccgaaauuagcugaguacaggaauuggagcaagccccagugugacauaacaggguucgcaccuuuuuccaaagauaacucuauucggcugucggccggaggugacaucuggguaacccgcgagccauaugugucaugcgaucccgacaaguguuaccaauucgcgcuaggccaggggacgacucucaauaacguccauagcaauaacaccgugcgagaucguacaccuuauagaacucugcuuaugaaugaacugggaguuccauuucacuugggcaccaaacaggugugcauugcuuggaguuccucuagcugucaugacgguaaggccuggcuccacgucugcaucacaggggaugacaagaacgcaaccgccuccuucaucuacaauggaaggcugguggauucaguaguuaguuggagcaaagagauucugcggacgcaggaaucugagugugugugcauaaacggcacuuguacagucgugaugaccgacggcuccgcuucagggaaggcagauacuaaaauccucuuuauugaggaaggaaagaucgugcauacaagcaccuuaagugguucugcccaacacgucgaggaaugcuccugcuauccccgcuacccuggcguuagaugugugugcagggacaacuggaaggggagcaaucggccaauaguagauauuaacaucaaagaccacucgaucgugucuuccuacgucuguucaggacuggugggcgacacgccgcgcaagaaugauaguagcuccucuagccauugccuugaccccaacaaugaggaaggugggcacggaguuaaaggcugggcuuucgaugacggcaacgauguguggauggggcgaaccauuucagagaagaguagauugggauaugagacauuuaaagucaucgaagguugguccaauccuaagagcaaacugcagauuaacaggcaagugauaguagaccggggcaaucguucuggguacucaggaaucuucaguguugagggcaagagcuguauuaaccgcugcuuuuauguggaacuaaucagagguaggaaggaggaaacugagguccucuggaccuccaauucuaucguggucuucugugggacaucgggcacuuacggaaccggcagcuggccagauggggccgacauuaaccugaugcccauauga

SEQ ID NO: 147831 - RNA, 1410 nt, Artificial Sequence; identical to SEQ ID NO: 144647
  derived and/or modified CDS sequence (opt3) from neuraminidase__InfluenzaA__ADM95744

SEQ ID NO: 147832 - RNA, 1410 nt, Artificial Sequence; identical to SEQ ID NO: 144786
  derived and/or modified CDS sequence (opt3) from neuraminidase__InfluenzaA__ADN05229

SEQ ID NO: 147833 - RNA, 1413 nt, Artificial Sequence; identical to SEQ ID NO: 145509
  derived and/or modified CDS sequence (opt3) from neuraminidase__InfluenzaA__ADN06292

SEQ ID NO: 147834 - RNA, 1413 nt, Artificial Sequence; identical to SEQ ID NO: 146978
  derived and/or modified CDS sequence (opt3) from neuraminidase__InfluenzaA__ADN06303

SEQ ID NO: 147835 - RNA, 1413 nt, Artificial Sequence
  derived and/or modified CDS sequence (opt3) from neuraminidase__InfluenzaA__ADN06314
augaaccccaaucagaagaucauuaccauaggcagcaucuccauugccaucgggauuaucucucugaugcuccaaauaggaaacaucauuucaaucugggcuagucacagcauucagacagguucccagaauaacacuggcaucugcaaucagagaauaauuacguacgagaacucuaccugggugaaucauacauaugucaacaucaauaacacuaauguuguggcaggggaagacaaaaccucgguaacacuugccggaaacucaagccuguguaguauuuccggcugggcgaucuacaccaaggauaauucuaucaggauugguagcaaaggggagguguucgucauacgggaaccuuuuaucuccugcucacacuuggagugucgcacuuucuuuuuaacacaaggagcucugcuaaacgacaagcauaguaauggcaccgugaaagaucgaagcccauaucgugcccucaugucuugcccgcugggcgaagcacccuccccuuacaacucaaaguucgagagcguugccuggagugcuucugcaugucacgacgggaugggauggcuuacgauugguaucuccggcccagauaacggggccguggcuguccugaaguauaauggaauaauuacuggcaccaucaaaagcuggaagaaacagaucuugagaacacaggagucggaaugcguguguaugaacgguucuugcuuuacuauuaugaccgacgggcccuccaauaaggccgcgucauacaaaaucuucaagauugagaagggaaaaguaacaaagaguauagaacucaacgcaccuaauuuuuauuacgaggaguguagcugcuacccagauaccggcaucguuaugugugugugcagggacaacuggcauggcuccaaucggcccugggucucuuucaaccagaaucuggauuaucaaauuggguacaucugcagcggaguguuuggugacaacccucgcccagaagauggcgaggggucauguaauccggugacggucgacggagccaacggcguuaaagguuucaguuauaaguacgggaauggcguguggaucggaagaacuaaauccaacaggcugcggaagggcuuugaaaugauuugggaucccaauggguggacaaacaccgacagcgacuucucuguaaaacaggauguggucgcuauaacugacuggucaggauauagugguagcuuugugcagcacccugagcucacaggcuuagauugcauccgcccauguuucuggguugaacuggugcgagggcuucccagagagaacaccacgauuuggaccuccggaucuucgaucagcuucugcggcgucaauggugacacagccaacugguccuggccugauggggcagaguugccauuuacuauugacaaguga

SEQ ID NO: 147836 - RNA, 1413 nt, Artificial Sequence; identical to SEQ ID NO: 146978
  derived and/or modified CDS sequence (opt3) from neuraminidase__InfluenzaA__ADN06325

SEQ ID NO: 147837 - RNA, 1413 nt, Artificial Sequence
  derived and/or modified CDS sequence (opt3) from neuraminidase__InfluenzaA__ADN06347
augaaccccaaucagaagaucauuaccauaggcagcaucuccauugccaucgggauuaucucucugaugcuccaaauaggaaacaucauuucaaucugggcuagucacagcauucagacagagucccagaauaacacugguaucugcaaucagagaauaauuacguacgaaaacucuaccugggugaaucauacauaugucaacaucaauaacacuaauguuguggcaggcgaggacaaaaccucgguaacacuugccgggaacucaagccuguguaguauuuccggaugggcgaucuacaccaaggauaauucuaucaggauuggcagcaaaggugacguguucgucauacgggaaccuuuuaucuccugcucacacuuggagugucgcacuuucuuuuuaacacaaggggcucugcuaaacgauaagcauaguaauggaaccgugaaagaccgaagcccauaucgugcccucaugucuugcccgcugggcgaagcacccuccccuuacaacucaaaguucgagagcguugccuggagugcuucugcaugucacgauggcaugggguggcuuacgauuggaaucuccgguccagacaacggcgccguggcuguccugaaguauaaugggauaauuacuggaaccaucaaaagcuggaagaaacagaucuugagaacacaggagucggaaugcguguguaugaacggcucuugcuuuacuauuaugaccgauggucccuccaauaaggccgcgucauacaaaaucuucaagauugagaaggggaaaguaacaaagaguauagaacucaacgcaccuaauuuuuauuacgaggaguguagcugcuacccagacaccggaaucguuaugugugugugcagggauaacuggcauggcuccaaucggcccugggucucuuucaaccagaaucuggacuaucaaaugggcuacauuugcagcgggguguuuggagauaacccucgcccagaagacggugagggcucauguaauccggugaacgucgauggggccaauggaguuaaaggcuucaguuauaaguacgguaacgggguguggaucggcagaacgaaauccaauaggcugcggaagggauuugaaaugaucugggaccccaacggcuggacuaacacagacagcgauuucucuguaaaacaggacguggucgcuauuaccgauuggucaggguauagugguagcuuugugcagcacccugagcucacuggauuagacugcauacgcccauguuucuggguugaacuggugcgaggccuucccagagagaauacaaccaucuggacguccgggucuucgauuagcuucugcggagucaacuccgauaccgccaauuggucauggccugacggcgcagaguugccauuuacaaucgauaaguga

SEQ ID NO: 147838 - RNA, 1410 nt, Artificial Sequence; identical to SEQ ID NO: 147458
  derived and/or modified CDS sequence (opt3) from neuraminidase__InfluenzaA__ADN06369

SEQ ID NO: 147839 - RNA, 1410 nt, Artificial Sequence; identical to SEQ ID NO: 144786
  derived and/or modified CDS sequence (opt3) from neuraminidase__InfluenzaA__ADN26031

SEQ ID NO: 147840 - RNA, 1410 nt, Artificial Sequence; identical to SEQ ID NO: 144786
  derived and/or modified CDS sequence (opt3) from neuraminidase__InfluenzaA__ADN26032

SEQ ID NO: 147841 - RNA, 1410 nt, Artificial Sequence; identical to SEQ ID NO: 144786
  derived and/or modified CDS sequence (opt3) from neuraminidase__InfluenzaA__ADN26033

SEQ ID NO: 147842 - RNA, 1410 nt, Artificial Sequence; identical to SEQ ID NO: 144786
  derived and/or modified CDS sequence (opt3) from neuraminidase__InfluenzaA__ADN26034

SEQ ID NO: 147843 - RNA, 1410 nt, Artificial Sequence; identical to SEQ ID NO: 144786
  derived and/or modified CDS sequence (opt3) from neuraminidase__InfluenzaA__ADN26035

SEQ ID NO: 147844 - RNA, 1410 nt, Artificial Sequence; identical to SEQ ID NO: 144786
  derived and/or modified CDS sequence (opt3) from neuraminidase__InfluenzaA__ADN26036

SEQ ID NO: 147845 - RNA, 1410 nt, Artificial Sequence
  derived and/or modified CDS sequence (opt3) from neuraminidase__InfluenzaA__ADN26037
augaaccccaaucagaagaucauuaccauaggcagcgugugcaugacaaucgggauggccaaccugauucuccaaaucggaaauauuaucuccauauggaucucucacucaauucagcuugguaaccagaaucagaucgagacuuguaaccaaagugucauuacguacgaaaauaacaccuggguuaaucagacauaugugaacaucagcaauacuaacuucgcugcaggccaguccguagugucugucaaacuggccggaaauucgucauugugcccugugagcggaugggcgauauacaguaaggacaacuccguuagaauuggcucuaaaggugauguguuugucaucagggagccauucauuagcuguuccccguuagaaugccggaccuuuuuccugacacagggggcucuacucaaugacaagcauucaaacggaaccaucaaagaucgcagucccuaucgaacucugaugagcuguccuaucggcgaggugccaucucccuacaacucccguuuugaaucaguagccuggagcgcaagugccugccacgacggcauuaauuggcuuacaauagggaucucuggaccugauaacggugcuguugcagugcugaaguauaauggcauuaucaccgacacgauaaaguccuggagaaacaauauuuugaggacucaagagagcgagugugccugcgucaacgggucguguuucaccgugaugacagauggaccaucuaauggccaggcuuccuacaaaaucuuucggaucgaaaaggguaaaauugugaagucagucgagaugaacgcccccaauuaucauuacgaagagugcaguuguuacccugacagcuccgagaucacuugcguuugccgcgauaacuggcacgggucuaauagaccaugggugagcuucaaccagaaucucgaauaucagauuggauacauauguucaggcaucuuuggcgacaacccgaggcccauugauaaaaccgggaguugcggaccuguauccagcaauggugcgaacggcgugaagggguucucuuuuaaguauggaaacggcgucuggaucggucggacaaaaucaaucaguagccgcaauggguucgagaugauuugggacccaaacggcuggaccggaacggauaauaacuuuuccauaaagcaagacaucgugggcauuaaugaauggucuggguacucggggagcuucguucagcaucccgagcugacuggucuggacuguauccgaccuugcuucuggguggaacucauuagaggcaggccaaaagagaacacaaucuggaccuccgggucaaguauaucuuuuuguggagucaauagcgauacugugggcugguccuggcccgacggugcagaguuaccguucacaaucgauaaguga

SEQ ID NO: 147846 - RNA, 1410 nt, Artificial Sequence; identical to SEQ ID NO: 144786
  derived and/or modified CDS sequence (opt3) from neuraminidase__InfluenzaA__ADN26038

SEQ ID NO: 147847 - RNA, 1410 nt, Artificial Sequence; identical to SEQ ID NO: 144786
  derived and/or modified CDS sequence (opt3) from neuraminidase__InfluenzaA__ADN26041

SEQ ID NO: 147848 - RNA, 1410 nt, Artificial Sequence; identical to SEQ ID NO: 144786
  derived and/or modified CDS sequence (opt3) from neuraminidase__InfluenzaA__ADN26042

SEQ ID NO: 147849 - RNA, 1410 nt, Artificial Sequence
  derived and/or modified CDS sequence (opt3) from neuraminidase__InfluenzaA__ADN26043
augaaccccaaucagaagaucauuaccauaggcagcgugugcaugacaaucgggauggccaaccugauucuccaaaucggaaauauuaucuccauauggaucucucacucaauucagcuugguaaccagaaucagaucgagacuuguaaccaaagugucauuacguacgaaaauaacaccuggguuaaucagacauaugugaacaucagcaauacuaacuucgcugcaggccaguccguagugucugucaaacuggccggaaauucgucauugugcccugugagcggaugggcgauauacaguaaggacaacuccauuagaaucggcucuaaaggugauguuuuugugauuagggagccauucaucagcuguuccccguuagaaugccggaccuuuuuccugacacagggggcucuacucaaugacaagcauucaaacggaaccaucaaagaucgcagucccuaucgaacucugaugagcuguccuauuggcgaggucccaucucccuacaacucccguuuugaaucaguggccuggagcgcaagugccugccacgacggcauaaauuggcuuacaaucgggauuucuggaccugauaacggugcuguagcaguucugaaguauaauggcaucauaaccgacacgauuaaguccuggagaaacaauaucuugaggacucaagagagcgagugugccugcgugaacgggucguguuucaccgucaugacagauggaccaucugacggccaggcuuccuacaaaaucuuucggauugaaaaggguaaaaucgugaagucaguggagaugaaugcccccaacuaucauuacgaagagugcaguuguuacccugauagcuccgagauuacuugcgucugccgcgacaauuggcacgggucuaacagaccauggguuagcuucaaucagaaccucgaauaucaggugggauacauauguucaggcaucuuuggcgauaauccgaggcccaacgacaaaaccgggaguugcggaccuguauccagcaauggugcgaacggcgugaagggguucucuuuuaaguauggaaacggcgucuggauuggucggacaaaaucaaucaguagccgcaauggguucgagaugaucugggauccaaacggcuggaccggaacggacaauaacuuuuccauuaagcaagacauagugggcaucaaugaauggucuggguacucggggagcuucguucagcaucccgagcugacuggucuggauuguauucgaccuugcuucuggguggaacucaucagaggcaggccaaaagagaacacaauuuggaccuccgggucaaguaucucuuuuuguggagucaauagcgacacugugggcugguccuggcccgauggugcagaguuaccguucacaauagacaaguga

SEQ ID NO: 147850 - RNA, 1410 nt, Artificial Sequence; identical to SEQ ID NO: 144786
  derived and/or modified CDS sequence (opt3) from neuraminidase__InfluenzaA__ADN26044

SEQ ID NO: 147851 - RNA, 1410 nt, Artificial Sequence; identical to SEQ ID NO: 144786
  derived and/or modified CDS sequence (opt3) from neuraminidase__InfluenzaA__ADN26045

SEQ ID NO: 147852 - RNA, 1410 nt, Artificial Sequence
  derived and/or modified CDS sequence (opt3) from neuraminidase__InfluenzaA__ADN26047
augaaccccaaucagaagaucauuaccauaggcagcgugugcaugacaaucgggauggccaaccugauucuccaaaucggaaauauuaucuccauauggaucucucacucaauucagcuugguaaccagaaucagaucgagacuuguaaccaaagugucauuacguacgaaaauaacaccuggguuaaucagacauaugugaacaucagcaauacuaacuucgcugcaggccaguccaugguaucugugaaacugaccggaaauucgucauugugcccugucagcggaugggccauauacaguaaggacaacuccgugagaauuggcucuaaaggugauguuuuugugaucagggagccauucauuagcuguuccccguuagaaugccggacauuuuuccugacccagggggcgcuacucaaugacaagcauucaaacggaacuaucaaagaucgcagucccuaucgaacacugaugagcuguccuaucggcgaggucccaucucccuacaacucccguuuugaaucaguggcuuggagcgccagugcaugccacgacggcauuaauuggcuuaccauagggaucucuggaccugauaacggugccguagcuguucugaaguauaauggcauuaucacggacacuauaaaguccuggagaaacaauauuuugaggacccaagagagcgagugugcaugcgugaacgggucguguuucacagucaugacugauggaccaucuaauggccaggccuccuacaaaaucuuucggaucgaaaaggguaaaauugugaagucaguggagaugaacgcucccaauuaucauuacgaagagugcaguuguuacccugacagcuccgagauuaccugcgucugccgcgauaacuggcacgggucuaauagaccauggguuagcuucaaccagaaucucgaauaucagaucggauacauauguucaggcaucuuuggcgacaacccgaggcccaaugauaaaacagggaguugcggaccuguguccagcaacggugccaacggcguaaagggguucucuuuuaaguauggaaauggcguguggauuggucggaccaaaucaaucaguagccgcaacggguucgagaugaucugggacccaaauggcuggacgggaacugauaacaauuuuuccauuaagcaagacauagucggcaucaacgaauggucuggguacucggggagcuucgugcagcaucccgagcugacaggucuggacuguauucgaccuugcuucuggguugaacucaucagaggcaggccaaaagagaauaccauuuggacuuccgggucaaguaucucuuuuuguggagugaacagcgauacagucggcugguccuggcccgacggugcggaguuaccguucaccauagauaaguga

SEQ ID NO: 147853 - RNA, 1410 nt, Artificial Sequence; identical to SEQ ID NO: 144786
  derived and/or modified CDS sequence (opt3) from neuraminidase__InfluenzaA__ADN26048

SEQ ID NO: 147854 - RNA, 1410 nt, Artificial Sequence; identical to SEQ ID NO: 144786
  derived and/or modified CDS sequence (opt3) from neuraminidase__InfluenzaA__ADN26049

SEQ ID NO: 147855 - RNA, 1410 nt, Artificial Sequence; identical to SEQ ID NO: 144786
  derived and/or modified CDS sequence (opt3) from neuraminidase__InfluenzaA__ADN26050

SEQ ID NO: 147856 - RNA, 1410 nt, Artificial Sequence; identical to SEQ ID NO: 144786
  derived and/or modified CDS sequence (opt3) from neuraminidase__InfluenzaA__ADN26051

SEQ ID NO: 147857 - RNA, 1410 nt, Artificial Sequence; identical to SEQ ID NO: 144786
  derived and/or modified CDS sequence (opt3) from neuraminidase__InfluenzaA__ADN26052

SEQ ID NO: 147858 - RNA, 1410 nt, Artificial Sequence; identical to SEQ ID NO: 144776
  derived and/or modified CDS sequence (opt3) from neuraminidase__InfluenzaA__ADN26053

SEQ ID NO: 147859 - RNA, 1410 nt, Artificial Sequence; identical to SEQ ID NO: 144786
  derived and/or modified CDS sequence (opt3) from neuraminidase__InfluenzaA__ADN26054

SEQ ID NO: 147860 - RNA, 1410 nt, Artificial Sequence; identical to SEQ ID NO: 144786
  derived and/or modified CDS sequence (opt3) from neuraminidase__InfluenzaA__ADN26057

SEQ ID NO: 147861 - RNA, 1410 nt, Artificial Sequence; identical to SEQ ID NO: 144786
  derived and/or modified CDS sequence (opt3) from neuraminidase__InfluenzaA__ADN26058

SEQ ID NO: 147862 - RNA, 1410 nt, Artificial Sequence; identical to SEQ ID NO: 144786
  derived and/or modified CDS sequence (opt3) from neuraminidase__InfluenzaA__ADN26059

SEQ ID NO: 147863 - RNA, 1410 nt, Artificial Sequence; identical to SEQ ID NO: 145153
  derived and/or modified CDS sequence (opt3) from neuraminidase__InfluenzaA__ADN26060

SEQ ID NO: 147864 - RNA, 1410 nt, Artificial Sequence; identical to SEQ ID NO: 144786
  derived and/or modified CDS sequence (opt3) from neuraminidase__InfluenzaA__ADN26061

SEQ ID NO: 147865 - RNA, 1410 nt, Artificial Sequence; identical to SEQ ID NO: 144786
  derived and/or modified CDS sequence (opt3) from neuraminidase__InfluenzaA__ADN26063

SEQ ID NO: 147866 - RNA, 1410 nt, Artificial Sequence; identical to SEQ ID NO: 144786
  derived and/or modified CDS sequence (opt3) from neuraminidase__InfluenzaA__ADN26064

SEQ ID NO: 147867 - RNA, 1410 nt, Artificial Sequence; identical to SEQ ID NO: 145859
  derived and/or modified CDS sequence (opt3) from neuraminidase__InfluenzaA__ADN26065

SEQ ID NO: 147868 - RNA, 1410 nt, Artificial Sequence; identical to SEQ ID NO: 144786
  derived and/or modified CDS sequence (opt3) from neuraminidase__InfluenzaA__ADN26066

SEQ ID NO: 147869 - RNA, 1410 nt, Artificial Sequence; identical to SEQ ID NO: 144786
  derived and/or modified CDS sequence (opt3) from neuraminidase__InfluenzaA__ADN26067

SEQ ID NO: 147870 - RNA, 1410 nt, Artificial Sequence; identical to SEQ ID NO: 144786
  derived and/or modified CDS sequence (opt3) from neuraminidase__InfluenzaA__ADN26069

SEQ ID NO: 147871 - RNA, 1410 nt, Artificial Sequence; identical to SEQ ID NO: 144786
  derived and/or modified CDS sequence (opt3) from neuraminidase__InfluenzaA__ADN26070

SEQ ID NO: 147872 - RNA, 1410 nt, Artificial Sequence; identical to SEQ ID NO: 144786
  derived and/or modified CDS sequence (opt3) from neuraminidase__InfluenzaA__ADN26072

SEQ ID NO: 147873 - RNA, 1410 nt, Artificial Sequence; identical to SEQ ID NO: 144786
  derived and/or modified CDS sequence (opt3) from neuraminidase__InfluenzaA__ADN26073

SEQ ID NO: 147874 - RNA, 1410 nt, Artificial Sequence; identical to SEQ ID NO: 144786
  derived and/or modified CDS sequence (opt3) from neuraminidase__InfluenzaA__ADN26075

SEQ ID NO: 147875 - RNA, 1410 nt, Artificial Sequence; identical to SEQ ID NO: 144786
  derived and/or modified CDS sequence (opt3) from neuraminidase__InfluenzaA__ADN26076

SEQ ID NO: 147876 - RNA, 1410 nt, Artificial Sequence; identical to SEQ ID NO: 144786
  derived and/or modified CDS sequence (opt3) from neuraminidase__InfluenzaA__ADN26077

SEQ ID NO: 147877 - RNA, 1410 nt, Artificial Sequence; identical to SEQ ID NO: 144786
  derived and/or modified CDS sequence (opt3) from neuraminidase__InfluenzaA__ADN26078

SEQ ID NO: 147878 - RNA, 1410 nt, Artificial Sequence; identical to SEQ ID NO: 144786
  derived and/or modified CDS sequence (opt3) from neuraminidase__InfluenzaA__ADN26079

SEQ ID NO: 147879 - RNA, 1410 nt, Artificial Sequence; identical to SEQ ID NO: 144786
  derived and/or modified CDS sequence (opt3) from neuraminidase__InfluenzaA__ADN26080

SEQ ID NO: 147880 - RNA, 1410 nt, Artificial Sequence; identical to SEQ ID NO: 144786
  derived and/or modified CDS sequence (opt3) from neuraminidase__InfluenzaA__ADN26081

SEQ ID NO: 147881 - RNA, 1410 nt, Artificial Sequence; identical to SEQ ID NO: 144786
  derived and/or modified CDS sequence (opt3) from neuraminidase__InfluenzaA__ADN26082

SEQ ID NO: 147882 - RNA, 1410 nt, Artificial Sequence; identical to SEQ ID NO: 144786
  derived and/or modified CDS sequence (opt3) from neuraminidase__InfluenzaA__ADN26083

SEQ ID NO: 147883 - RNA, 1410 nt, Artificial Sequence; identical to SEQ ID NO: 146688
  derived and/or modified CDS sequence (opt3) from neuraminidase__InfluenzaA__ADN26084

SEQ ID NO: 147884 - RNA, 1410 nt, Artificial Sequence; identical to SEQ ID NO: 144786
  derived and/or modified CDS sequence (opt3) from neuraminidase__InfluenzaA__ADN26085

SEQ ID NO: 147885 - RNA, 1410 nt, Artificial Sequence; identical to SEQ ID NO: 144786
  derived and/or modified CDS sequence (opt3) from neuraminidase__InfluenzaA__ADN26086

SEQ ID NO: 147886 - RNA, 1410 nt, Artificial Sequence; identical to SEQ ID NO: 144786
  derived and/or modified CDS sequence (opt3) from neuraminidase__InfluenzaA__ADN26087

SEQ ID NO: 147887 - RNA, 1410 nt, Artificial Sequence; identical to SEQ ID NO: 144786
  derived and/or modified CDS sequence (opt3) from neuraminidase__InfluenzaA__ADN26088

SEQ ID NO: 147888 - RNA, 1410 nt, Artificial Sequence; identical to SEQ ID NO: 144786
  derived and/or modified CDS sequence (opt3) from neuraminidase__InfluenzaA__ADN26090

SEQ ID NO: 147889 - RNA, 1410 nt, Artificial Sequence; identical to SEQ ID NO: 144786
  derived and/or modified CDS sequence (opt3) from neuraminidase__InfluenzaA__ADN26091

SEQ ID NO: 147890 - RNA, 1410 nt, Artificial Sequence; identical to SEQ ID NO: 144786
  derived and/or modified CDS sequence (opt3) from neuraminidase__InfluenzaA__ADN26092

SEQ ID NO: 147891 - RNA, 1410 nt, Artificial Sequence; identical to SEQ ID NO: 144786
  derived and/or modified CDS sequence (opt3) from neuraminidase__InfluenzaA__ADN26093

SEQ ID NO: 147892 - RNA, 1410 nt, Artificial Sequence
  derived and/or modified CDS sequence (opt3) from neuraminidase__InfluenzaA__ADN26094
augaaccccaaucagaagaucauuaccauaggcagcgugugcaugacaaucgggauggccaaccugauucuccaaaucggaaauauuaucuccauauggaucucucacucaauucagcuugguaaccagaaucagaucgagacuuguaaccaaagugucauuacguacgaaaauaacaccuggguuaaucagacauaugugaacaucagcaauacuaacuucgcugcaggccaguccguagugucugucaaacuggccggaaauucgucauugugcccugugagcggaugggcgauauacaguaaggacaacuccauuagaaucggcucuaaaggugauguuuuugugauuagggagccauucaucagcuguuccccguuagaaugccggaccuuuuuccugacacagggggcucuacucaaugacaagcauucaaacggaaccaucaaagaucgcagucccuaucgaacucugaugagcuguccuauuggcgaggucccaucucccuacaacucccguuuugaaucaguggccuggagcgcaagugccugccacgacggcauaaauuggcuuacaaucgggauuucuggaccugauaacggugcuguagcaguucugaaguauaauggcaucauaaccgacacgauuaaguccuggagaaacaauaucuugaggacucaagagagcgagugugccugcgugaacgggucguguuucaccgucaugacagauggaccaucugacggccaggcuuccuacaaaaucuuucggauugaaaaggguaaaaucgugaagucaguggagaugaaugcccccaacuaucauuacgaagagugcaguuguuacccugauagcuccgagauuacuugcgucugccgcgacaauuggcacgggucuaacagaccauggguuagcuucaaucagaaccucgaauaucagauaggauacaucuguucaggcauuuuuggcgauaauccgaggcccaacgacaaaaccgggaguugcggaccuguguccagcaauggugcgaacggcguaaagggguucucuuuuaaguauggaaacggcguguggaucggucggacaaaaucaaucaguagccgcaauggguucgagaugauuugggauccaaacggcuggaccggaaaggacaauaacuuuuccauaaaacaagacaucgucggcauuaaugaauggucuggguacucggggagcuucgugcagcaucccgagcugacgggucuggauuguauccgaccuugcuucuggguugaacucauuagaggcaggccaaaggagaacacuaucuggacauccgggucaaguauaucuuuuuguggagugaauagcgacaccgucggcugguccuggcccgauggugcagaguuaccguucacuaucgacaaauga

SEQ ID NO: 147893 - RNA, 1410 nt, Artificial Sequence; identical to SEQ ID NO: 146688
  derived and/or modified CDS sequence (opt3) from neuraminidase__InfluenzaA__ADN26095

SEQ ID NO: 147894 - RNA, 1410 nt, Artificial Sequence
  derived and/or modified CDS sequence (opt3) from neuraminidase__InfluenzaA__ADN26096
augaaccccaaucagaagaucauuaccauaggcagcgugugcaugacaaucgggauggccaaccugauucuccaaaucggaaauauuaucuccauauggaucucucacucaauucagcuugguaaccagaaucagaucgagacuuguaaccaaagugucauuacguacgaaaauaacaccuggguuaaucagacauaugugaacaucagcaauacuaacuucgcugcaggccaguccguagugucugucaaacuggccggaaauucgucauugugcccugugaacgggugggcgauauacagcaaggacaauaguauuagaaucggcuccaaaggugauguuuuugugauuagggagccauucaucucuuguagcccguuagaaugccggaccuuuuuccugacacagggggcucuacucaacgacaagcauuccaacggaaccaucaaagaucgcucacccuaucgaacucugaugaguuguccuauuggcgaggucccaagccccuacaauucucguuuugaauccguggccuggucagcaagcgccugccacgacggcauaaacuggcuuacaaucgggauuaguggaccugauaauggugcuguagcaguucugaaguauaacggcaucauaaccgacacgauuaagucuuggagaaauaacaucuugaggacucaagaguccgagugugccugcgugaaugggagcuguuucaccgucaugacagauggaccaucggacggccaggcuucuuacaaaaucuuucggauugaaaaggguaaaaucgugaaguccguggagaugaacgcccccaauuaucauuacgaagagugcucauguuacccugauaguagcgagauuacuugcgucugccgcgacaacuggcacggguccaauagaccauggguuucuuucaaccagaaucucgaauaucagauaggauacaucuguagcggcauuuuuggcgauaacccgaggcccaaugacaaaaccgggucaugcggaccugugaguuccaacggugcgaacggcguaaagggguucagcuuuaaguauggaaauggcguguggaucggucggaccaaaaacaucucuucacgcaauggguucgagaugauuugggauccaaacggcuggacaggaacggacaauaacuuuaguauaaagcaagacaucgucggcauuaaugaauggagcggguacuccggaucuuucgugcagcaucccgagcugacuggucuggauuguauccgaccuugcuucuggguugaacucauuagaggcaggccaaaagagaacacaaucuggaccucggggagcuccauaucauuuuguggagugaauagugacacugucggcuggucuuggcccgauggugcagaguuaccguucacaaucgacaaguga

SEQ ID NO: 147895 - RNA, 1410 nt, Artificial Sequence; identical to SEQ ID NO: 144786
  derived and/or modified CDS sequence (opt3) from neuraminidase__InfluenzaA__ADN26097

SEQ ID NO: 147896 - RNA, 1410 nt, Artificial Sequence; identical to SEQ ID NO: 144786
  derived and/or modified CDS sequence (opt3) from neuraminidase__InfluenzaA__ADN26098

SEQ ID NO: 147897 - RNA, 1410 nt, Artificial Sequence; identical to SEQ ID NO: 144786
  derived and/or modified CDS sequence (opt3) from neuraminidase__InfluenzaA__ADN26099

SEQ ID NO: 147898 - RNA, 1410 nt, Artificial Sequence; identical to SEQ ID NO: 144786
  derived and/or modified CDS sequence (opt3) from neuraminidase__InfluenzaA__ADN26100

SEQ ID NO: 147899 - RNA, 1410 nt, Artificial Sequence; identical to SEQ ID NO: 144786
  derived and/or modified CDS sequence (opt3) from neuraminidase__InfluenzaA__ADN26101

SEQ ID NO: 147900 - RNA, 1410 nt, Artificial Sequence
  derived and/or modified CDS sequence (opt3) from neuraminidase__InfluenzaA__ADN26102
augaaccccaaucagaagaucauuaccauaggcagcgugugcaugacaaucgggauggccaaccugauucuccaaaucggaaauauuaucuccauauggaucucucaccuuauucagcuggguaaccagaaucagaucgagacuuguaaccaaucagucauuacguacgaaaauaacaccuggguuaaucagacauaugugaacaucaguaauacuaacuucgcugcaggccagagcguaguguccgucaaauuggccggaaauucuucguuaugcccugugucagggugggcgauauacagcaaggacaacaguauuagaaucggcuccaaaggugauguuuuugugauuagggagccauucaucucuuguagcccgcuggaaugccggaccuuuuuccuaacacagggggcucuccugaaugacaagcauuccaacggaaccaucaaagaucgcucacccuaucgaacucuuaugaguuguccuauuggcgaggucccaagccccuacaacucucguuuugaauccguggccuggucagcaagcgccugccacgacggcauaaauuggcugacaaucgggauuaguggaccugauaacggugcuguagcaguuuugaaguauaauggcaucauaaccgacacgauuaagucuuggagaaacaauauccucaggacucaagaguccgagugugccugcgugaacgggagcuguuucaccgucaugacagauggaccaucggacggccaggcuucuuacaaaaucuuuaagauugaaaaagguaagaucgugaaauccguggagaugaaugcccccaacuaucauuacgaagagugcucauguuacccugauaguagcgagauuacuugcgucugccgggacaauuggcacggguccaaccgcccauggguuucuuucaaucagaaccuggaauaucagauaggauacaucuguagcggcauuuuuggcgauaauccgagacccaacgacaagaccgggucaugcggaccugugaguuccaauggugcgaacggcguaaagggguucagcuuuaaauauggaaacggcguguggaucgguaggacaaagucuaucucaagucggaauggguucgagaugauuugggauccaaacggcuggaccggaacggacaauaacuuuagcauaaaacaagacaucgucggcauuaaugaaugguccggguacucuggaucguucgugcagcaucccgagcugacuggucucgauuguauccgcccuugcuucuggguugaauuaauucgaggcagaccaaaggagaacagcaucuggacauccgggucaaguauaucuuuuuguggagugaauagcgacaccgucggcugguccuggcccgauggugcagagcugccguucacuaucgacaaauga

SEQ ID NO: 147901 - RNA, 1410 nt, Artificial Sequence; identical to SEQ ID NO: 144786
  derived and/or modified CDS sequence (opt3) from neuraminidase__InfluenzaA__ADN26103

SEQ ID NO: 147902 - RNA, 1410 nt, Artificial Sequence; identical to SEQ ID NO: 144786
  derived and/or modified CDS sequence (opt3) from neuraminidase__InfluenzaA__ADN26104

SEQ ID NO: 147903 - RNA, 1410 nt, Artificial Sequence; identical to SEQ ID NO: 144786
  derived and/or modified CDS sequence (opt3) from neuraminidase__InfluenzaA__ADN26105

SEQ ID NO: 147904 - RNA, 1410 nt, Artificial Sequence; identical to SEQ ID NO: 144786
  derived and/or modified CDS sequence (opt3) from neuraminidase__InfluenzaA__ADN26106

SEQ ID NO: 147905 - RNA, 1410 nt, Artificial Sequence; identical to SEQ ID NO: 146688
  derived and/or modified CDS sequence (opt3) from neuraminidase__InfluenzaA__ADN26107

SEQ ID NO: 147906 - RNA, 1410 nt, Artificial Sequence; identical to SEQ ID NO: 146688
  derived and/or modified CDS sequence (opt3) from neuraminidase__InfluenzaA__ADN26108

SEQ ID NO: 147907 - RNA, 1410 nt, Artificial Sequence; identical to SEQ ID NO: 144786
  derived and/or modified CDS sequence (opt3) from neuraminidase__InfluenzaA__ADN26109

SEQ ID NO: 147908 - RNA, 1410 nt, Artificial Sequence; identical to SEQ ID NO: 145760
  derived and/or modified CDS sequence (opt3) from neuraminidase__InfluenzaA__ADN26110

SEQ ID NO: 147909 - RNA, 1410 nt, Artificial Sequence; identical to SEQ ID NO: 146688
  derived and/or modified CDS sequence (opt3) from neuraminidase__InfluenzaA__ADN26111

SEQ ID NO: 147910 - RNA, 1410 nt, Artificial Sequence; identical to SEQ ID NO: 145760
  derived and/or modified CDS sequence (opt3) from neuraminidase__InfluenzaA__ADN26112

SEQ ID NO: 147911 - RNA, 1410 nt, Artificial Sequence; identical to SEQ ID NO: 146688
  derived and/or modified CDS sequence (opt3) from neuraminidase__InfluenzaA__ADN26113

SEQ ID NO: 147912 - RNA, 1410 nt, Artificial Sequence
  derived and/or modified CDS sequence (opt3) from neuraminidase__InfluenzaA__ADN26114
augaaccccaaucagaagaucauuaccauaggcagcgugugcaugacaaucgggauggccaaccugauucuccaaaucggaaauauuaucuccauauggaucucucacucaauucagcuugguaaccagaaucagaucgagacuuguaaccaaagugucauuacguacgaaaauaacaccuggguuaaucagacauaugugaacaucaauaacacuaauuucgcugcaggccagagcguaguguccgucaaacuggccgggaacucuucguugugcccugugucaggaugggcgauauacagcaaggacaauaguauuagaaucggcuccaaaggugauguuuuugugauuagggagccauucaucucuuguagcccguuagaaugccggaccuuuuuccugacacagggggcucuacucaacgacaagcauuccaacggaaccaucaaagaucgcucacccuaucgaacucugaugaguuguccuauuggcgaggucccaagccccuacaauucucguuuugaauccguggccuggucagcaagcgccugccacgacggcauaaacuggcuuacaaucgggauuaguggaccugauaauggugcuguagcaguucugaaguauaacggcaucauaaccgacacgauuaagucuuggagaaauaacaucuugaggacucaagaguccgagugugccugcgugaaugggagcuguuucaccgucaugacagauggaccaucggacggccaggcuucuuacaaaaucuuucggauugaaaaggguaaaaucgugaaguccguggagaugaacgcccccaauuaucauuacgaagagugcucauguuacccugauaguagcgagauuacuugcgucugccgcgacaacuggcacggguccaauagaccauggguuucuuucaaccagaaucucgaauaucagauaggauacaucuguagcggcauuuuuggcgauaacccgaggcccaaugacaaaaccgggucaugcggaccugugaguuccaacggugcgaacggcguaaagggguucagcuuuaaguauggaaauggcguguggaucggucggacaaaaucuaucucaagucgcaacggguucgagaugauuugggauccaaauggcuggaccggaacggacaacaauuuuagcauaaagcaagacaucgucggcauuaacgaaugguccggguacucuggaucguucgugcagcaucccgagcugacuggucuggauuguauccgaccuugcuucuggguugaacucauuagaggcaggccaaaagagaauacaaucuggaccagcggguccucaauaaguuuuuguggagugaacucugacacugucggcuggagcuggcccgauggugcagaguuaccguucacaaucgacaaguga

SEQ ID NO: 147913 - RNA, 1410 nt, Artificial Sequence; identical to SEQ ID NO: 144786
  derived and/or modified CDS sequence (opt3) from neuraminidase__InfluenzaA__ADN26115

SEQ ID NO: 147914 - RNA, 1410 nt, Artificial Sequence
  derived and/or modified CDS sequence (opt3) from neuraminidase__InfluenzaA__ADN26116
augaaccccaaucagaagaucauuaccauaggcagcgugugcaugacaaucgggauggccaaccugauucuccaaaucggaaauauuaucuccauauggaucucucacucaauucagcuugguaaccagaaucagaucgagacuuguaaccaaagugucauuacguacgaaaauaacaccuggguuaaucagacauaugugaacaucagcaauacuaacuucgcugcaggccaguccguagugucugucaaacuggccggaaauucgucauugugcccugugaacgggugggcgauauacagcaaggacaauaguauuagaaucggcuccaaaggugauguuuuugugauuagggagccauucaucucuuguagcccguuagaaugccggaccuuuuuccugacacagggggcucuacucaacgacaagcauuccaacggaaccaucaaagaucgcucacccuaucgaacucugaugaguuguccuauuggcgaggucccaagccccuacaauucucguuuugaauccguggccuggucagcaagcgccugccacgacggcauaaacuggcuuacaaucgggauuaguggaccugauaauggugcuguagcaguucugaaguauaacggcaucauaaccgacacgauuaagucuuggagaaauaacaucuugaggacucaagaguccgagugugccugcgugaaugggagcuguuucaccgucaugacagauggaccaucggacggccaggcuucuuacaaaaucuuucggauugaaaaggguaaaaucgugaaguccguggagaugaacgcccccaauuaucauuacgaagagugcucauguuacccugauaguagcgagauuacuugcgucugccgcgacaacuggcacggguccaauagaccauggguuucuuucaaccagaaucucgaauaucagauaggauacaucuguagcggcauuuuuggcgauaacccgaggcccaaugacaaaaccgggucaugcggaccugugaguuccaacggugcgaacggcguaaagggguucagcuuuaaguauggaaauggcguguggaucggucggacaaaaucuaucucaagucgcaacggguucgagaugauuugggauccaaauggcuggaccggaacggacaacaauuuuagcauaaagcaagacaucgucggcauuaacgaaugguccggguacucuggaucguucgugcagcaucccgagcugacucgacuggauuguaucagaccuugcuucuggguugaacucauuaggggucggccaaaagagaauacaaucuggaccagcggcuccucaauaaguuuuuguggggugaacucugacacugucggauggagcuggcccgauggcgcagaguuaccguucacaaucgacaaguga

SEQ ID NO: 147915 - RNA, 1410 nt, Artificial Sequence; identical to SEQ ID NO: 146688
  derived and/or modified CDS sequence (opt3) from neuraminidase__InfluenzaA__ADN26117

SEQ ID NO: 147916 - RNA, 1410 nt, Artificial Sequence; identical to SEQ ID NO: 146688
  derived and/or modified CDS sequence (opt3) from neuraminidase__InfluenzaA__ADN26118

SEQ ID NO: 147917 - RNA, 1410 nt, Artificial Sequence; identical to SEQ ID NO: 144786
  derived and/or modified CDS sequence (opt3) from neuraminidase__InfluenzaA__ADN26119

SEQ ID NO: 147918 - RNA, 1410 nt, Artificial Sequence; identical to SEQ ID NO: 145760
  derived and/or modified CDS sequence (opt3) from neuraminidase__InfluenzaA__ADN26120

SEQ ID NO: 147919 - RNA, 1410 nt, Artificial Sequence; identical to SEQ ID NO: 146688
  derived and/or modified CDS sequence (opt3) from neuraminidase__InfluenzaA__ADN26121

SEQ ID NO: 147920 - RNA, 1410 nt, Artificial Sequence; identical to SEQ ID NO: 144786
  derived and/or modified CDS sequence (opt3) from neuraminidase__InfluenzaA__ADN26122

SEQ ID NO: 147921 - RNA, 1410 nt, Artificial Sequence; identical to SEQ ID NO: 144786
  derived and/or modified CDS sequence (opt3) from neuraminidase__InfluenzaA__ADN26123

SEQ ID NO: 147922 - RNA, 1410 nt, Artificial Sequence; identical to SEQ ID NO: 144786
  derived and/or modified CDS sequence (opt3) from neuraminidase__InfluenzaA__ADN26124

SEQ ID NO: 147923 - RNA, 1410 nt, Artificial Sequence; identical to SEQ ID NO: 145760
  derived and/or modified CDS sequence (opt3) from neuraminidase__InfluenzaA__ADN26125

SEQ ID NO: 147924 - RNA, 1410 nt, Artificial Sequence; identical to SEQ ID NO: 145760
  derived and/or modified CDS sequence (opt3) from neuraminidase__InfluenzaA__ADN26126

SEQ ID NO: 147925 - RNA, 1410 nt, Artificial Sequence; identical to SEQ ID NO: 145551
  derived and/or modified CDS sequence (opt3) from neuraminidase__InfluenzaA__ADN26127

SEQ ID NO: 147926 - RNA, 1410 nt, Artificial Sequence; identical to SEQ ID NO: 144786
  derived and/or modified CDS sequence (opt3) from neuraminidase__InfluenzaA__ADN26128

SEQ ID NO: 147927 - RNA, 1410 nt, Artificial Sequence; identical to SEQ ID NO: 145760
  derived and/or modified CDS sequence (opt3) from neuraminidase__InfluenzaA__ADN26129

SEQ ID NO: 147928 - RNA, 1410 nt, Artificial Sequence; identical to SEQ ID NO: 146688
  derived and/or modified CDS sequence (opt3) from neuraminidase__InfluenzaA__ADN26130

SEQ ID NO: 147929 - RNA, 1410 nt, Artificial Sequence
  derived and/or modified CDS sequence (opt3) from neuraminidase__InfluenzaA__ADN26131
augaaccccaaucagaagaucauuaccauaggcagcgugugcaugacaaucgggauggccaaccugauucuccaaaucggaaauauuaucuccauauggaucucucacucaauucagcuugguaaccagaaucagaucgagacuuguaaccaaagugucauuacguacgaaaauaacaccuggguuaaucagacauaugugaacaucagcaauacuaacuucgcugcaggccaguccguagugucugucaaacuggccggaaauucgucauugugcccugugagcggaugggcgauauacaguaaggacaacuccauuagaaucggcucuaaaggugauguuuuugugauuagggagccauucaucagcuguuccccguuagaaugccggaccuuuuuccugacacagggggcucuacucaaugacaagcauucaaacggaaccaucaaagaucgcagucccuaucgaacucugaugagcuguccuauuggcgaggucccaucucccuacaacucccguuuugaaucaguggccuggagcgcaagugccugccacgacggcauaaauuggcuuacaaucgggauuucuggaccugauaacggugcuguagcaguucugaaguauaauggcaucauaaccgacacgauuaaguccuggagaaacaauaucuugaggacucaagagagcgagugugccugcgugaacgggucguguuucaccgucaugacagauggaccaucugacggccaggcuuccuacaaaaucuuucggauugaaaaggguaaaaucgugaagucaguggagaugaaugcccccaacuaucauuacgaagagugcaguuguuacccugauagcuccgagauuacuugcgucugccgcgacaauuggcacgggucuaacagaccauggguuagcuucaaucagaaccucgaauaucagauaggauacaucuguucaggcauuuuuggcgauaauccgaggcccaacgacaaaaaggggaguugcggaccuguguccagcaauggugcgaacggcguaaagggguucucuuuuaaauauggaaacggcguguggaucggucggaccaagucaaucaguagccgcaauggguucgagaugauuugggauccaaacggcuggacaggaaccgacaauaacuuuuccauaaaacaagacaucgucggcauuaaugaauggucuggguacucggggagcuucgugcagcaucccgagcugacgggucuggauuguauccgaccuugcuucuggguugaacucauuagaggcaggccaaaggagaacacuaucuggacauccgggucaaguauaucuuuauguggagugaauagcgacaccgucggcugguccuggcccgauggugcagagcugccguuuacuaucgacaaauga

SEQ ID NO: 147930 - RNA, 1410 nt, Artificial Sequence; identical to SEQ ID NO: 146688
  derived and/or modified CDS sequence (opt3) from neuraminidase__InfluenzaA__ADN26132

SEQ ID NO: 147931 - RNA, 1410 nt, Artificial Sequence; identical to SEQ ID NO: 145760
  derived and/or modified CDS sequence (opt3) from neuraminidase__InfluenzaA__ADN26134

SEQ ID NO: 147932 - RNA, 1410 nt, Artificial Sequence; identical to SEQ ID NO: 144786
  derived and/or modified CDS sequence (opt3) from neuraminidase__InfluenzaA__ADN26135

SEQ ID NO: 147933 - RNA, 1410 nt, Artificial Sequence; identical to SEQ ID NO: 144786
  derived and/or modified CDS sequence (opt3) from neuraminidase__InfluenzaA__ADN26136

SEQ ID NO: 147934 - RNA, 1410 nt, Artificial Sequence; identical to SEQ ID NO: 144786
  derived and/or modified CDS sequence (opt3) from neuraminidase__InfluenzaA__ADN26137

SEQ ID NO: 147935 - RNA, 1410 nt, Artificial Sequence; identical to SEQ ID NO: 146688
  derived and/or modified CDS sequence (opt3) from neuraminidase__InfluenzaA__ADN26138

SEQ ID NO: 147936 - RNA, 1410 nt, Artificial Sequence; identical to SEQ ID NO: 145760
  derived and/or modified CDS sequence (opt3) from neuraminidase__InfluenzaA__ADN26140

SEQ ID NO: 147937 - RNA, 1410 nt, Artificial Sequence
  derived and/or modified CDS sequence (opt3) from neuraminidase__InfluenzaA__ADN26141
augaaccccaaucagaagaucauuaccauaggcagcgugugcaugacaaucgggauggccaaccugauucuccaaaucggaaauauuaucuccauauggaucucucacucaauucagcuugguaaccagaauagaaucgagacuuguaaccagagugucauuacguacgaaaauaacaccuggguuaaucaaacauaugugaacaucagcaauacuaacuucgcugcaggccaguccguagugucugucaaacuggccggaaauucgucauugugcccugugagcggaugggcgauauacaguaaggacaacuccauuaggaucggcucuaaaggugauguuuuugugauucgggagccauucaucagcuguuccccguuagaaugccgcaccuuuuuccugacacagggggcucuacucaaugacaagcauucaaacggaaccaucaaagaucgaagucccuaucguacucugaugagcuguccuauuggcgaggucccaucucccuacaacuccagauuugaaucaguggccuggagcgcaagugccugccacgacggcauaaauuggcuuacaaucgggauuucuggaccugauaacggugcuguagcaguucugaaguauaauggcaucauaaccgacacgauuaaguccuggaggaacaauaucuugcggacucaggagagcgagugugccugcgugaacgggucguguuucaccgucaugacagauggaccaucugacggccaggcuuccuacaaaaucuuucgcauugaaaaggguaaaaucgugaagucaguggagaugaaugcccccaacuaucauuacgaagagugcaguuguuacccugauagcuccgagauuacuugcgucugcagagacaauuggcacgggucuaacaggccauggguuagcuucaaucaaaaccucgaauaucagauaggauacaucuguucaggcauuuuuggcgauaauccgcggcccaacgacaaaaccgggaguugcggaccuguguccagcaauggugcgaacggcguaaagggguucucuuuuaaguauggaaacggcguguggaucggucgcacaaaaucaaucaguagccgaaauggguucgagaugauuugggauccaaacggcuggaccggaacggacaauaacuuuuccauaaagcaggacaucgucggcauuaaugaauggucuggguacucggggagcuucgugcaacaucccgagcugacuggucuggauuguaucagaccuugcuucuggguugaacucauuaggggccggccaaaagagaacacaaucuggaccuccgggucaaguauaucuuuuuguggagugaauagcgacacugucggcugguccuggcccgauggugcagaguuaccguucacaaucgacaaguga

SEQ ID NO: 147938 - RNA, 1410 nt, Artificial Sequence
  derived and/or modified CDS sequence (opt3) from neuraminidase__InfluenzaA__ADN26142
augaaccccaaucagaagaucauuaccauaggcagcgugugcaugacaaucgggauggccaaccugauucuccaaaucggaaauauuaucuccauauggaucucucacucaauucagcuugguaaccagaaucagaucgagacuuguaaccaaagugucauuacguacgaaaauaacaccuggguuaaucagacauaugugaacaucagcaauaacaauuucgcugcaggccaguccguagugucugucaaacuggccgggaacucgucauugugcccugugaauggaugggcgauauacagcaaggacaacaguauuagaaucggcuccaaaggugauguuuuugugauuagggagccauucaucucuuguagcccguuagaaugccggaccuuuuuccugacucagggggcucuacucaacgacaagcauuccaauggaacaaucaaagaucgcucacccuaucgaacccugaugaguuguccuauuggcgaggucccaagccccuacaacucucguuuugaauccguggccuggucagcaagcgccugccacgacggcauaaauuggcuuacuaucgggauuaguggaccugauaacggugcuguagcaguucugaaguauaauggcaucauaacagacaccauuaagucuuggagaaacaauaucuugaggacgcaagaguccgagugugccugcgugaacgggagcuguuucacugucaugaccgauggaccaucggacggccaggcuucuuacaaaaucuuucggauugaaaaggguaaaaucgugaaguccguggagaugaaugcccccaacuaucauuacgaagagugcucauguuacccugauaguagcgagauuacaugcgucugccgcgacaauuggcacggguccaacagaccauggguuucuuucaaucagaaccucgaauaucagauaggauacaucuguagcggcauuuuuggcgauaauccgaggcccaacgacaaaacugggucaugcggaccugugaguuccaacggugcgaauggcguaaagggguucagcuuuaaguauggaaacggcguguggaucggucggaccaaaucuaucucaagucgcaauggguucgagaugauuugggauccaaacggcuggacaggaaccgacaauaacuuuagcauaaagcaagacaucgucggcauuaaugaaugguccggguacucuggaucguucgugcagcaucccgagcugacgggucuggauuguauccgaccuugcuucuggguugaacucauuagaggcaggccaaaagagaacacuaucuggacaagcggguccucaauaaguuuuuguggagucaauucugacaccgugggcuggagcuggcccgauggugcagaguuaccguucacuaucgacaaguga

SEQ ID NO: 147939 - RNA, 1410 nt, Artificial Sequence; identical to SEQ ID NO: 144786
  derived and/or modified CDS sequence (opt3) from neuraminidase__InfluenzaA__ADN26143

SEQ ID NO: 147940 - RNA, 1410 nt, Artificial Sequence; identical to SEQ ID NO: 146688
  derived and/or modified CDS sequence (opt3) from neuraminidase__InfluenzaA__ADN26144

SEQ ID NO: 147941 - RNA, 1410 nt, Artificial Sequence; identical to SEQ ID NO: 146688
  derived and/or modified CDS sequence (opt3) from neuraminidase__InfluenzaA__ADN26145

SEQ ID NO: 147942 - RNA, 1410 nt, Artificial Sequence; identical to SEQ ID NO: 144786
  derived and/or modified CDS sequence (opt3) from neuraminidase__InfluenzaA__ADN26146

SEQ ID NO: 147943 - RNA, 1410 nt, Artificial Sequence; identical to SEQ ID NO: 146688
  derived and/or modified CDS sequence (opt3) from neuraminidase__InfluenzaA__ADN26147

SEQ ID NO: 147944 - RNA, 1410 nt, Artificial Sequence; identical to SEQ ID NO: 144786
  derived and/or modified CDS sequence (opt3) from neuraminidase__InfluenzaA__ADN26148

SEQ ID NO: 147945 - RNA, 1410 nt, Artificial Sequence; identical to SEQ ID NO: 146688
  derived and/or modified CDS sequence (opt3) from neuraminidase__InfluenzaA__ADN26149

SEQ ID NO: 147946 - RNA, 1410 nt, Artificial Sequence
  derived and/or modified CDS sequence (opt3) from neuraminidase__InfluenzaA__ADN26150
augaaccccaaucagaagaucauuaccauaggcagcgugugcaugacaaucgggauggccucccugauucuccaaaucggaaacauuaucucuauauggaucucacacaguauucagcuugguaaucagaaccagaucgagacuuguaaucaaagcgucauuacguacgaaaacaauaccuggguuaaccagacauaugugaauaucuccaacacuaauuucgcugcaggccagucuguagugucggucaaacuggccgggaacagcagcuugugcccugugaguggaugggcgauauacuccaaggacaauucuauuagaaucggcagcaaaggugauguuuuugugauuagggagccauucaucuccuguucaccguuagaaugccggaccuuuuuccugacacagggggcucuacucaacgacaagcauaguaauggaaccaucaaagaucgcagccccuaucgaacucugaugucuuguccuauuggcgaggucccaucccccuacaacucacguuuugaaagcguggccuggagugcaucugccugccacgacggcauaaacuggcuuacaaucgggauuuccggaccugauaauggugcuguagcaguucugaaguauaacggcaucauaaccgacacgauuaagagcuggagaaauaacaucuugaggacucaagagucggagugugccugcgugaaugggucuuguuucaccgucaugacagauggaccauccgacggccaggcuucauacaaaaucuuucggauugaaaaggguaaaaucgugaagaguguggagaugaacgcccccaauuaucauuacgaagagugcagcuguuacccugauuccucugagauuacuugcgucugccgcgacaacuggcacgggagcaauagaccauggguuucauucaaccagaaucucgaauaucagauaggauacaucuguaguggcauuuuuggcgauaacccgaggcccaaugacaaaaccggguccugcggaccugugagcucuaacggugcgaauggcguaaagggguucucauuuaaguauggaaacggcguguggaucggucggacaaaaaguaucagcucccgcaacggguucgagaugauuugggauccaaauggcuggaccggaacggacaacaauuuuucuauaaagcaagacaucgucggcauuaacgaauggucgggguacagcggauccuucgugcagcaucccgagcugacuggucuggauuguauccgaccuugcuucuggguugaacucauuagaggcaggccaaaagagaauacaaucuggaccucagggaguucuauaucauuuuguggagugaacuccgacacugucggcuggucauggcccgauggugcagaguuaccguucacaaucgacaaguga

SEQ ID NO: 147947 - RNA, 1410 nt, Artificial Sequence; identical to SEQ ID NO: 145760
  derived and/or modified CDS sequence (opt3) from neuraminidase__InfluenzaA__ADN26151

SEQ ID NO: 147948 - RNA, 1410 nt, Artificial Sequence
  derived and/or modified CDS sequence (opt3) from neuraminidase__InfluenzaA__ADN26152
augaaccccaaucagaagaucauuaccauaggcagcgugugcaugacaaucgggauggccaaccugauucuccaaaucggaaauauuaucuccauauggaucucucacucaauucagcuugguaaccagaaucagaucgagacuuguaaccaaagugucauuacguacgaaaauaacaccuggguuaaucagacauaugugaacaucagcaauacuaacuucgcugcaggccaguccguagugucuaugaaacuggccggaaauucgucauugugcccugucaacgggugggcgauauacagcaaggacaauaguauuagaaucggcuccaaaggugauguguuuguuauuagggagccauucaucucuuguagcccguuagaaugccggaccuuuuuccugacacagggggcucuacucaacgacaagcauuccaacggaaccaucaaagaucgcucacccuaucgaacucugaugaguuguccuauuggcgaggugccaagccccuacaauucucguuuugaauccgucgccuggucagcaagcgccugccacgacggcauaaacuggcuuacaaucgggauuaguggaccugauaauggugcuguggcaguacugaaguauaacggcaucauaaccgacacgauuaagucuuggagaaauaacaucuugaggacucaagaguccgagugugccugcguuaaugggagcuguuucaccgugaugacagauggaccaucggacggccaggcuucuuacaaaaucuuucggauugaaaaggguaaaaucgucaaguccguggagaugaacgcccccaauuaucauuacgaagagugcucauguuacccugauaguagcgagauuacuugcgugugccgcgacaacuggcacggguccaauagaccaugggucucuuucaaccagaaucucgaauaucagauaggauacaucuguagcggcauuuuuggcgauaacccgaggcccaaugacaaaaccgggucaugcggaccuguuaguuccaacggugcgaacggcgugaagggguucagcuuuaaguauggaaauggcguauggaucggucggacaaaaucuaucucaagucgcaacggguucgagaugauuugggauccaaauggcuggacccgaacggacaacaauuuuagcauaaagcaagacaucgugggaauuaacgaaugguccggcuacucugggucguucguccagcaucccgagcugacuggacuggauuguaucagaccuugcuucuggguggaacucauuaggggucggccaaaagagaauacaaucuggaccagcggcuccucaauaaguuuuugugggguuaacucugacacugugggauggagcuggcccgauggcgcagaguuaccguucacaaucgacaaguga

SEQ ID NO: 147949 - RNA, 1410 nt, Artificial Sequence; identical to SEQ ID NO: 146688
  derived and/or modified CDS sequence (opt3) from neuraminidase__InfluenzaA__ADN26153

SEQ ID NO: 147950 - RNA, 1410 nt, Artificial Sequence; identical to SEQ ID NO: 145369
  derived and/or modified CDS sequence (opt3) from neuraminidase__InfluenzaA__ADN26154

SEQ ID NO: 147951 - RNA, 1410 nt, Artificial Sequence; identical to SEQ ID NO: 144786
  derived and/or modified CDS sequence (opt3) from neuraminidase__InfluenzaA__ADN26155

SEQ ID NO: 147952 - RNA, 1410 nt, Artificial Sequence; identical to SEQ ID NO: 145760
  derived and/or modified CDS sequence (opt3) from neuraminidase__InfluenzaA__ADN26157

SEQ ID NO: 147953 - RNA, 1410 nt, Artificial Sequence; identical to SEQ ID NO: 144786
  derived and/or modified CDS sequence (opt3) from neuraminidase__InfluenzaA__ADN26159

SEQ ID NO: 147954 - RNA, 1410 nt, Artificial Sequence; identical to SEQ ID NO: 144786
  derived and/or modified CDS sequence (opt3) from neuraminidase__InfluenzaA__ADN26161

SEQ ID NO: 147955 - RNA, 1410 nt, Artificial Sequence
  derived and/or modified CDS sequence (opt3) from neuraminidase__InfluenzaA__ADN26162
augaaccccaaucagaagaucauuaccauaagcuccgugugcaugacagucggcauggccaaccugauccuccaaauugggaauaucauuucuaucuggauaucacacaguauccagcuuggaaaccagaaucagauugagacuuguaaccaaagcguuaucacguacgaaaauaacaccugggugaaucagacauauguaaacauuuccaauacuaacuucgcugcaggucagucuguggucucggugaaacuggccggcaauagcucauugugcccuguuagugggugggcgaucuacuccaaggacaacucuauaagaauuggaagcaaaggcgauguguuugucaucagggagccauucauuuccuguucaccguuagaaugccggaccuuuuuccugacacagggugcucuacucaaugacaagcauaguaacgggaccaucaaagaucgcagccccuaucgaacucugaugucuuguccuaucggagaggugccaucccccuacaacucacguuuugaaagcguagccuggagugcaucugccugccacgacggcauuaauuggcuuacaauaggcaucuccgggccugauaacggagcuguugcagugcugaaguauaaugguauuaucaccgacacgauaaagagcuggagaaacaauauuuugaggacucaagagucggagugugccugcgucaacggcucuuguuucaccgugaugacagaugggccauccgacggacaggcuucauacaaaaucuuucggaucgaaaagggcaaaauugugaagagugucgagaugaaugcccccaacuaucauuacgaagagugcagcuguuacccugauuccucugagaucacuugcguuugccgcgacaauuggcacgguagcaacagaccaugggugucauucaaucagaaccucgaauaucagauuggguacauauguaguggaaucuuuggcgauaauccgaggcccaacgacaaaaccggcuccugcgggccuguaagcucuaauggagcgaacggugugaagggcuucucauuuaaguaugggaacggagucuggauuggccggacaaaaaguaucagcucccgcaaugguuucgagaugaucugggauccaaacggguggaccggcacggacaauaacuuuucuauuaagcaagacauagugggaaucaaugaauggucgggcuacagcggguccuucguucagcaucccgagcugacuggacuggauuguauucgaccuugcuucuggguggaacucaucagagguaggccaaaagagaacacaauuuggaccucaggcaguucuaucagcuuuuguggggucaauuccgacacugugggauggucauggcccgauggcgcagaguuaccguucacaauagacaaguga

SEQ ID NO: 147956 - RNA, 1410 nt, Artificial Sequence
  derived and/or modified CDS sequence (opt3) from neuraminidase__InfluenzaA__ADN26163
augaaccccaaucagaagaucauuaccauaggcagcgugugcaugacaaucgggauggccaaccugauucuccaaaucggaaauauuaucuccauauggaucucucacucaauucagcuugguaaccagaaucagaucgagacuuguaaccaaagugucauuacguacgaaaauaacaccuggguuaaucagacauaugugaacaucagcaauacuaacuucgcugcaggccaguccguagugucugucaaacuggccggaaauucgucauugugcccugugagcggaugggcgauauacaguaaggacaacuccauuagaaucggcucuaaaggugauguuuuugugauuagggagccauucaucagcuguuccccguuagaaugccggaccuuuuuccugacacagggggcucuacucaaugacaagcauucaaacggaaccaucaaagaucgcagucccuaucgaacucugaugagcuguccuauuggcgaggucccaucucccuacaacucccguuuugaaucaguggccuggagcgcaagugccugccacgacggcauaaauuggcuuacaaucgggauuucuggaccugauaacggugcuguagcaguucugaaguauaauggcaucauaaccgacacgauuaaguccuggagaaacaauaucuugaggacucaagagagcgagugugccugcgugaacgggucguguuucaccgucaugacagauggaccaucugacggccaggcuuccuacaaaaucuuucggauugaaaaggguaaaaucgugaagucaguggagaugaaugcccccaacuaucauuacgaagagugcaguuguuacccugauagcuccgagauuacuugcgucugccgcgacaauuggcacgggucuaacagaccauggguuagcuucaaucagaaccucgaauaucagauaggauacaucuguucaggcauuuuuggcgauaauccgaggcccaacgacaaaaccgggaguugcggaccuguguccagcaauggugcgaacggcguaaagggguucucuuuuaaguauggaaacggcguguggaucggucggacaaaaucaaucaguagccgcaauggguucgagaugauuugggauccaaacggcuggaccggaacggacaauaacuuuuccauaaagcaagacaucauuggcaucaaugaauggucuggguacucggggagcuucguccagcaucccgagcugacuggucuggauuguauucgaccuugcuucuggguggaacucaucagaggcaggccaaaagagaacacaauauggaccuccgggucaaguaucucuuuuuguggaguuaauagcgacacugugggcugguccuggcccgauggugcagaguuaccguucauuaucgacaaguga

SEQ ID NO: 147957 - RNA, 1410 nt, Artificial Sequence
  derived and/or modified CDS sequence (opt3) from neuraminidase__InfluenzaA__ADN26164
augaaccccaaucagaagaucauuaccauaggcagcgugugcaugacaaucgggauggccaaccugauucuccaaaucggaaauauuaucuccauauggaucucucacucaauucagcuugguaaccagaaucagaucgagacuuguaaccaaagugucauuacguacgaaaauaacaccuggguuaaucagacauaugugaacaucagcaauacuaacuucgcugcaggccaguccguagugucugucaaacuggccggaaauucgucauugugcccugugagcggaugggcgauauacaguaaggacaacuccauuagaaucggcucuaaaggugauguuuuugugauuagggagccauucaucagcuguuccccguuagaaugccggaccuuuuuccugacacagggggcucuacucaaugacaagcauucaaacggaaccaucaaagaucgcagucccuaucgaacucugaugagcuguccuauuggcgaggucccaucucccuacaacucccguuuugaaucaguggccuggagcgcaagugccugccacgacggcauaaauuggcuuacaaucgggauuucuggaccugauaacggugcuguagcaguucugaaguauaauggcaucauaaccgacacgauuaaguccuggagaaacaauaucuugaggacucaagagagcgagugugccugccucaacgggucguguuucaccgugaugacagauggaccaucugacggccaggcuuccuacaaaaucuuucggauugaaaaggguaaaaucgucaagucaguggagaugaaugcccccaacuaucauuacgaagagugcaguuguuacccugauagcuccgagauuacuugcgugugccgcgacaauuggcacgggucuaacagaccaugggucagcuucaaucagaaccuggaauaucagauaggauacaucuguucaggcauuuuuggcgauaauccgaggcccaacgacaaaaccgggaguugcggaccuguuuccagcaauggugcgaacggcgugaagggguucucuuuuaaguauggaaacggcguauggaucggucggacaaaaucaaucaguagccgcaauggguucgagaugauuugggauccaaacggcuggaccggaacggacaaugacuuuuccauaaagcaagauaucgugggcauuaacgaauggucuggguacucggggagcuucguccagcaucccgagcugacuggucucgacuguauccgaccuugcuucuggguggaauuaauuagaggcaggccaaaagagaauacaaucuggaccuccgggucaaguauaucuuuuuguggaguuaacagcgauacugugggcugguccuggcccgacggugcagagcugccguucacaaucgauaaguga

SEQ ID NO: 147958 - RNA, 1410 nt, Artificial Sequence; identical to SEQ ID NO: 146743
  derived and/or modified CDS sequence (opt3) from neuraminidase__InfluenzaA__ADN26168

SEQ ID NO: 147959 - RNA, 1410 nt, Artificial Sequence; identical to SEQ ID NO: 146009
  derived and/or modified CDS sequence (opt3) from neuraminidase__InfluenzaA__ADN26178

SEQ ID NO: 147960 - RNA, 1410 nt, Artificial Sequence; identical to SEQ ID NO: 144786
  derived and/or modified CDS sequence (opt3) from neuraminidase__InfluenzaA__ADN26868

SEQ ID NO: 147961 - RNA, 1410 nt, Artificial Sequence; identical to SEQ ID NO: 144786
  derived and/or modified CDS sequence (opt3) from neuraminidase__InfluenzaA__ADN26869

SEQ ID NO: 147962 - RNA, 1410 nt, Artificial Sequence; identical to SEQ ID NO: 144786
  derived and/or modified CDS sequence (opt3) from neuraminidase__InfluenzaA__ADN26870

SEQ ID NO: 147963 - RNA, 1410 nt, Artificial Sequence
  derived and/or modified CDS sequence (opt3) from neuraminidase__InfluenzaA__ADN26871
augaaccccaaucagaagaucauuaccauaggcagcgugugcaugacaaucgggauggccaaccugauucuccaaaucggaaauauuaucuccauauggaucucucacucaauucagcuugguaaccagaaucagaucgagacuuacaaccaaagugucauuacguaugaaaauaacaccuggguuaaucagacauacgugaacaucagcaauacuaacuucgcugcaggccaguccguagugucugucaaacuggccggaaauucgucauuguguccugugagcggaugggcgauauauaguaaggacaacuccauuagaaucggcucuaaaggugauguuuuugugauuagggagccauucaucagcugcuccccguuagaaugucggaccuuuuuccugacacagggggcucuacucaaugacaagcauucaaacggaaccaucaaagaucgcagucccuaccgaacucugaugagcugcccuauuggcgaggucccaucucccuauaacucccguuuugaaucaguggccuggagcgcaagugccugucacgacggcauaaauuggcuuacaaucgggauuucuggaccugauaacggugcuguagcaguucugaaguacaauggcaucauaaccgacacgauuaaguccuggagaaacaauaucuugaggacucaagagagcgagugcgccugugugaacgggucgugcuucaccgucaugacagauggaccaucugacggccaggcuuccuauaaaaucuuucggauugaaaaggguaaaaucgugaagucaguggagaugaaugcccccaacuaccauuacgaagaguguaguugcuauccugauagcuccgagauuacuugugucugccgcgacaauuggcacgggucuaacagaccauggguuagcuucaaucagaaccucgaauaccagauaggauauaucugcucaggcauuuuuggcgauaauccgaggcccaacgacaaaaccgggaguuguggaccuguguccagcaauggugcgaacggcguaaagggguucucuuuuaaguacggaaacggcguguggaucggucggacaaaaucaaucaguagccgcaauggguucgagaugauuugggauccaaacggcuggaccggaacggacaauaacuuuuccauaaagcaagacaucgucggcauuaaugaauggucuggguauucggggagcuucgugcagcaucccgagcugacuggucuggauugcauccgaccuuguuucuggguugaacucauuagaggcaggccaaaagagaacacaaucuggaccuccgggucaaguauaucuuuuugcggagugaauagcgacacugucggcugguccuggcccgauggugcagaguuaccguucacaaucgacaaguga

SEQ ID NO: 147964 - RNA, 1410 nt, Artificial Sequence
  derived and/or modified CDS sequence (opt3) from neuraminidase__InfluenzaA__ADN26872
augaaccccaaucagaagaucauuaccauaggcagcgugugcaugacaaucgggauggccaaccugauucuccaaaucggaaauauuaucuccauauggaucucucacucaauucagcuugguaaccagaaucagaucgagacuuguaaccaaagugucauuacguacgaaaauaacaccuggguuaaucagacauaugugaacaucagcaauacuaacuucgcugcaggccuguccguagugucugucaaauuggccggaaauucgucauuaugcccugugagcgggugggcgauauacaguaaggacaacuccauuagaaucggcucuaaaggugauguuuuugugauuagggagccauucaucagcuguuccccgcuggaaugccggaccuuuuuccuaacacagggggcucuccugaaugacaagcauucaaacggaaccaucaaagaucgcagucccuaucgaacucuuaugagcuguccuauuggcgaggucccaucucccuacaacucccguuuugaaucaguggccuggagcgcaagugccugccacgacggcauaucuuggcugacaaucgggauuuccggaccugauaauggugcuguagcaguuuugaaguauaacggcaucauaaccgacacgauuaagagcuggagaaauaacauccucaggacucaggagucggagugugccugcgugaaugggucuuguuucaccgucaugacagauggaccauccgacggccaagcuagcuacaaaaucuuucggauugaaaaggguaaaaucgugaagaguguggagaugaacgcccccaauuaucauuacgaagagugcagcuguuacccugauuccucugagauuacuugcgucugccgcgacaacuggcacgggagcaauagaccauggguuucauucaaccagaaucuggaauaucagauaggauacaucuguaguggcauuuuuggcgauaacccgaggcccaaugacaaaaccggguccugcggaccugugagcucuaacggugcgaauggcguaaagggguucucauuuaaguauggaaacggcguguggaucggucggacaaaaaguaucagcucccgcaacggguucgagaugauuugggauccaaauggcuggaccggaacggacaacaauuuuucuauaaagcaggacaucgucggcauuaacgaauggucgggguacagcggauccuucgugcaacaucccgagcugacuggucucgauuguauccgaccuugcuucuggguugaauuaauuagaggcaggccaaaagagaauacaaucuggaccucagggaguucuauaucauuuuguggagugaacuccgacacugucggcuggucauggcccgauggugcagagcugccguucacaaucgacaaguga

SEQ ID NO: 147965 - RNA, 1410 nt, Artificial Sequence; identical to SEQ ID NO: 144786
  derived and/or modified CDS sequence (opt3) from neuraminidase__InfluenzaA__ADN26873

SEQ ID NO: 147966 - RNA, 1410 nt, Artificial Sequence; identical to SEQ ID NO: 144786
  derived and/or modified CDS sequence (opt3) from neuraminidase__InfluenzaA__ADN26874

SEQ ID NO: 147967 - RNA, 1410 nt, Artificial Sequence; identical to SEQ ID NO: 144786
  derived and/or modified CDS sequence (opt3) from neuraminidase__InfluenzaA__ADN26875

SEQ ID NO: 147968 - RNA, 1410 nt, Artificial Sequence; identical to SEQ ID NO: 144786
  derived and/or modified CDS sequence (opt3) from neuraminidase__InfluenzaA__ADN26876

SEQ ID NO: 147969 - RNA, 1410 nt, Artificial Sequence; identical to SEQ ID NO: 144786
  derived and/or modified CDS sequence (opt3) from neuraminidase__InfluenzaA__ADN26877

SEQ ID NO: 147970 - RNA, 1410 nt, Artificial Sequence; identical to SEQ ID NO: 144786
  derived and/or modified CDS sequence (opt3) from neuraminidase__InfluenzaA__ADN26878

SEQ ID NO: 147971 - RNA, 1410 nt, Artificial Sequence; identical to SEQ ID NO: 145923
  derived and/or modified CDS sequence (opt3) from neuraminidase__InfluenzaA__ADN26879

SEQ ID NO: 147972 - RNA, 1410 nt, Artificial Sequence; identical to SEQ ID NO: 144786
  derived and/or modified CDS sequence (opt3) from neuraminidase__InfluenzaA__ADN26880

SEQ ID NO: 147973 - RNA, 1410 nt, Artificial Sequence; identical to SEQ ID NO: 144786
  derived and/or modified CDS sequence (opt3) from neuraminidase__InfluenzaA__ADN26881

SEQ ID NO: 147974 - RNA, 1410 nt, Artificial Sequence; identical to SEQ ID NO: 144786
  derived and/or modified CDS sequence (opt3) from neuraminidase__InfluenzaA__ADN26882

SEQ ID NO: 147975 - RNA, 1410 nt, Artificial Sequence; identical to SEQ ID NO: 144786
  derived and/or modified CDS sequence (opt3) from neuraminidase__InfluenzaA__ADN26883

SEQ ID NO: 147976 - RNA, 1413 nt, Artificial Sequence
  derived and/or modified CDS sequence (opt3) from neuraminidase__InfluenzaA__ADN89064
augaaccccaaucagaagaucauuaccauaggcagcaucuccauugccaucgggauuaucucucugaugcuccaaauaggaaacaucauuucaaucugggcuagucacagcauucagacagguucccagaauaacacuggcaucugcaaucagagaauaauuacguacgagaacucuaccugggugaaucauacauaugucaacaucaauaacacuaauguuguggcaggggaagacaaaaccucgguaacacuugccggaaacucaagccuguguaguauuuccggcugggcgaucuacaccaaggauaauucuaucaggauugguagcaaaggggacguguucgucauacgggagccuuuuaucuccugcucacacuuggaaugucgcacuuucuuuuuaacacaaggagcucugcuaaacgauaagcauaguaauggcaccgugaaagaccgaagcccauaucgugcccucaugucuugcccgcugggcgaggcacccuccccuuacaacucaaaguucgaaagcguugccuggagugcuucugcaugucacgaugggaugggauggcuuacgauugguaucuccggcccagacaacggggccguggcuguccugaaguauaauggaauaauuacuggcaccaucaaaagcuggaagaaacagaucuugagaacacaggagucggagugcguguguaugaacgguucuugcuuuacuauuaugaccgaugggcccuccaauaaggccgcgucauacaaaaucuucaagauugaaaagggaaaaguaacaaagaguauagagcucaacgcaccuaauuuuuauuacgaagaguguagcugcuacccagacaccggcaucguuaugugugugugcagggauaacuggcauggcuccaaucggcccugggucucuuucaaccagaaucuggacuaucaaauuggguacaucugcagcggaguguuuggugauaacccucgcccagaggacggcgaagggucauguaauccggugacggucgauggagccaacggcguuaaagguuucaguuauaaguacgggaauggcguguggaucggaagaacuaaauccaacaggcugcggcgcggcuuugagaugauuugggaccccaauggguggacaaacaccgacagcgauuucucuguaaagcaggacguggucgcuauaacugauuggucaggauauagugguagcuuugugcagcacccugaacucacaggcuuagacugcauccgaccauguuucuggguugagcuggugagagggcuucccagggaaaacaccacgauuuggaccuccggaucuucgaucagcuucugcggcgucaauuccgauacagccaacuggucauggccugacggugcagaguugccauuuacuauugauaaauga

SEQ ID NO: 147977 - RNA, 1413 nt, Artificial Sequence; identical to SEQ ID NO: 145509
  derived and/or modified CDS sequence (opt3) from neuraminidase__InfluenzaA__ADN89075

SEQ ID NO: 147978 - RNA, 1413 nt, Artificial Sequence
  derived and/or modified CDS sequence (opt3) from neuraminidase__InfluenzaA__ADN89086
augaaccccaaucagaagaucauuaccauaggcagcaucuccauugccaucgggauuaucucucugaugcuccaaauaggaaacaucauuucaaucugggcuagucacagcauucagacagguucccagaauaacacuggcaucugcaaucagagaauaauuacguacgagaacucuaccugggugaaucauacauaugucaacaucaauaacacuaauguuguggcaggggaagacaaaaccucgguaacacuugccggaaacucaagccuguguaguauuuccggcugggcgaucuacaccaaggauaauucuaucaggauugguagcaaaggggacguguucgucauacgggagccuuuuaucuccugcucacacuuggaaugucgcacuuucuuuuuaacacaaggagcucugcuaaacgauaagcauaguaauggcaccgugaaagaccgaagcccauaucgugcccucaugucuugcccgcugggcgaggcacccuccccuuacaacucaaaguucgaaagcguugccuggagugcuucugcaugucacgaugggaugggauggcuuacgauugguaucuccggcccagacaacggggccguggcuguccugaaguauaauggaauaauuacuggcaccaucaaaagcuggaagaaacagaucuugagaacacaggagucggagugcguguguaugaacgguucuugcuuuacuauuaugaccgaugggcccuccaauaagacagccucauacaaaaucuucaagauugaaaagggaaaaguaaccaagaguauagagcucaacgcgccuaauuuuuauuacgaagaguguagcugcuacccagacacgggcaucguuaugugugugugcagggauaacuggcauggcuccaaucggcccugggucucuuucaaccagaaucuggacuaucaaauuggguacaucugcagcggaguguuuggugauaacccucgcccagaggacggcgaagggucauguaauccggugacugucgauggagcaaacggcguuaaagguuucaguuauaaguacgggaauggcguguggaucggaagaacaaaauccaacaggcugcggaagggcuuugagaugauuugggaccccaauggguggaccaacacugacagcgauuucucuguaaaacaggacguggucgccauaacagauuggucaggauauagugguagcuuugugcagcacccugaacucaccggcuuagacugcauccgcccauguuucuggguugagcuggugcgagggcuucccagagaaaacacgaccauuuggacauccggaucuucgaucagcuucugcggcgucaauuccgauacugcuaacuggucauggccugacggugccgaguugccauuuaccauugauaaguga

SEQ ID NO: 147979 - RNA, 1413 nt, Artificial Sequence; identical to SEQ ID NO: 145509
  derived and/or modified CDS sequence (opt3) from neuraminidase__InfluenzaA__ADN89097

SEQ ID NO: 147980 - RNA, 1413 nt, Artificial Sequence
  derived and/or modified CDS sequence (opt3) from neuraminidase__InfluenzaA__ADN89108
augaaccccaaucagaagaucauuaccauaggcagcaucuccauugccaucgggauuaucucucugaugcuccaaauaggaaacaucauuucaaucugggcuagucacagcauucagacagguucccagaauaacacuggcaucugcaaucagagaauaauuacguacgagaacucuaccugggugaaucauacauaugucaacaucaauaacacuaauguuguggcaggggaagacaaaaccucgguaacacuugccggaaacucaagccuguguaguauuuccggcugggcgaucuacaccaaggauaauucuaucaggauugguagcaaaggggacguguucgucauacgggagccuuuuaucuccugcucacacuuggaaugucgcacuuucuuuuuaacacaaggagcucugcuaaacgauaagcauaguaauggcaccgugaaagaccgaagcccauaucgugcccucaugucuugcccgcugggcgaggcacccuccccuuacaacucaaaguucgaaagcguugccuggagugcuucugcaugucacgaugggaugggauggcuuacgauugguaucuccggcccagacaacggggccguggcuguccugaaguauaauggaauaauuacuggcaccaucaaaagcuggaagaaacagaucuugagaacacaggagucggagugcguguguaugaacgguucuugcuuuacuauuaugaccgaugggcccuccaauaaggccgcgucauacaaaaucuucaagauugaaaagggaaaaguaacaaagaguauagagcucaacgcaccuaauuuuuauuacgaagaguguagcugcuacccagacaccggcaucguuaugugugugugcagggauaacuggcauggcuccaaucggcccugggucucuuucaaccagaaucuggacuaucaaauuggguacaucugcagcggaguguuuggugauaacccucgcccagaggacggcgaagggucauguaauccggugacggucgauggagccaacggcguuaaagguuucaguuauaaguacgggaauggcguguggaucggaagaacuaaauccaacaggcugcggaagggcuuugagaugauuugggaccccaauggguggacaaacaccgacagcgauuucucuguaaaacaggacguggucucaauaacugauuggaguggauauagcgguuccuuugugcagcacccugaacucacaggcuuagacugcauccgcccauguuucuggguugagcuggugcgagggcuucccagagaaaacaccacgauuuggaccucuggaucgagcaucuccuucugcggcgucaauucagauacagcuaacuggaguuggccugacggugccgaguugccauuuacuauugauaaguga

SEQ ID NO: 147981 - RNA, 1413 nt, Artificial Sequence
  derived and/or modified CDS sequence (opt3) from neuraminidase__InfluenzaA__ADN89119
augaaccccaaucagaagaucauuaccauaggcagcaucuccauugccaucgggauuaucucucugaugcuccaaauaggaaacaucauuucaaucugggcuagucacagcauucagacagguucccagaauaacacuggcaucugcaaucagagaauaauuacguacgagaacucuaccugggugaaucauacauaugucaacaucaauaacacuaauguuguggcaggggaagacaaaaccucgguaacacuugccggaaacucaagccuguguaguauuuccggcugggcgaucuacaccaaggauaauucuaucaggauugguagcaaaggggacguguucgucauacgggagccuuuuaucuccugcucacacuuggaaugucgcacuuucuuuuuaacacaaggagcucugcuaaacgauaagcauaguaauggcaccgugaaagaccgaagcccauaucgugcccucaugucuugcccgcugggcgaggcacccuccccuuacaacucaaaguucgaaagcguugccuggagugcuucugcaugucacgaugggaugggauggcuuacgauugguaucuccggcccagacaacggggccguggcuguccugaaguauaauggaauaauuacuggcaccaucaaaagcuggaagaaacagaucuugagaacacaggagucggagugcguguguaugaacgguucuugcuuuacuauuaugaccgaugggcccuccaauaaggccgcgucauacaaaaucuucaagauugaaaagggaaaaguaacaaagaguauagagcucaacgcaccuaauuuuuauuacgaagaguguagcugcuacccagacaccggcaucguuaugugugugugcagggauaacuggcauggcuccaaucggcccugggucucuuucaaccagaaucuggacuaucaaauuggguacaucugcagcggaguguuuggugauaacccucgcccagaggacggcgaagggucauguaauccggugacggucaacggagccgauggcguuaaagguuucaguuauaaguacgggaauggcguguggaucggaagaacuaaauccaacaggcugcggaagggcuuugagaugauuugggaccccaauggguggacaaacaccgacagcgauuucucuguaaaacaggacguggucgcuauaacugauuggucaggauauagugguagcuuugugcagcacccugaacucacaggcuuagacugcacccgcccauguuucuggguugagcuggugcgagggcuucccagagaaaacacgaccaucuggacauccggaucuucgauuagcuucugcggcgucaauuccgauacugccaacuggucauggccugacggugcagaguugccauuuaccaucgauaaguga

SEQ ID NO: 147982 - RNA, 1413 nt, Artificial Sequence
  derived and/or modified CDS sequence (opt3) from neuraminidase__InfluenzaA__ADN89130
augaaccccaaucagaagaucauuaccauaggcagcaucuccauugccaucgggauuaucucucugaugcuccaaauaggaaacaucauuucaaucugggcuagucacagcauucagacagguucccagaauaacacuggcaucugcaaucagagaauaauuacguacgagaacucuaccugggugaaucauacauaugucaacaucaauaacacuaauguuguggcaggggaagacaaaaccucgguaacacuugccggaaacucaagccuguguaguauuuccggcugggcgaucuacaccaaggauaauucuaucaggauugguagcaaaggggacguguucgucauacgggagccuuuuaucuccugcucacacuuggaaugucgcacuuucuuuuuaacacaaggagcucugcuaaacgauaagcauaguaauggcaccgugaaagaccgaagcccauaucgugcccucaugucuugcccgcugggcgaggcacccuccccuuacaacucaaacuucgaaagcguugccuggagugcuucugcaugucacgaugggaugggauggcuuacgauugguaucuccggcccagacaauggggccguggcuguccugaaguauaacggaauaauuacuggcaccaucaagagcuggaaaaagcagaucuugagaacacaggagucggagugcguguguaugaaugguucuugcuuuacuauuaugaccgaugggcccuccaacaaagccgcgucauacaagaucuucaaaauugaaaagggaaagguaacaaaaaguauagagcucaaugcaccuaacuuuuauuacgaagaguguagcugcuacccagacaccggcaucguuaugugugugugcagggauaauuggcauggcuccaaccggcccugggucucuuucaaucagaaccuggacuaucaaauuggguacaucugcagcggaguguuuggugauaauccucgcccagaggacggcgaagggucauguaacccggugacggucgauggagccaauggcguuaaggguuucaguuauaaauacgggaacggcguguggaucggaagaacuaaguccaauaggcugcggaaaggcuuugagaugauuugggaccccaacggguggacaaacaccgacagcgauuucucuguaaagcaggacguggucgcuauaacugauuggucaggauauagugguagcuuugugcagcacccugaacucacaggcuuagacugcauccgcccauguuucuggguugagcuggugcgagggcuucccagagaaaauaccacgauuuggaccuccggaucuucgaucagcuucugcggcgucaacggugauacagccaauugguccuggccugacggggcagaguugccauuuacuauugauaaauga

SEQ ID NO: 147983 - RNA, 1413 nt, Artificial Sequence; identical to SEQ ID NO: 147980
  derived and/or modified CDS sequence (opt3) from neuraminidase__InfluenzaA__ADN89141

SEQ ID NO: 147984 - RNA, 1413 nt, Artificial Sequence
  derived and/or modified CDS sequence (opt3) from neuraminidase__InfluenzaA__ADN89152
augaaccccaaucagaagaucauuaccauaggcagcaucuccauugccaucgggauuaucucucugaugcuccaaauaggaaacaucauuucaaucugggcuagucacagcauucagacagguucccagaauaacacuggcaucugcaaucagagaauaauuacguacgagaacucuaccugggugaaucauacauaugugaacaucaauaacacuaauguuguggcaggggaagacaaaaccucgguaacacuugccggaaacucaagccuguguaguauuuccggcugggcgaucuacaccaaggauaauucuaucaggauugguagcaaaggggacguguucgucauacgggagccuuuuaucuccugcucacacuuggaaugucgcacuuucuuuuuaacacaaggagcucugcuaaacgauaagcauaguaauggcaccgugaaagaccgaagcccauaucgugcccucaugucuugcccgcugggcgaggcacccuccccuuacaacucaaaguucgaaagcguugccuggagugcuucugcaugucacgaugggaugggauggcuuacgauugguaucuccggcccagacaacggggccguggcuguccugaaguauaauggaauaauuacuggcaccaucaaaagcuggaagaaacagaucuugagaacacaggagucggagugcguguguaugaacgguucuugcuuuacuauuaugaccgaugggcccuccaauaaggccgcgucauacaaaaucuucaagauugaaaagggaaaaguaacaaagaguauagagcucaacgcaccuaauuuuuauuacgaagaguguagcugcuacccagacaccggcaucguuaugugugugugcagggauaacuggcauggcuccaaucggcccugggucucuuucaaccagaaucuggacuaucaaauuggguacaucugcagcggaguguuuggugauaacccucgcccagaggacggcgaagggucauguaauccggugacgaucgauggagccaacggcgucaaagguuucaguuauaaguacgggaauggcguuuggauuggaagaacuaaauccaacaggcugcggaagggcuuugagaugauaugggaccccaauggguggacaaacaccgacagcgauuucucugugaaacaggacguaguggcuaucacugauuggucaggauauagugguagcuuuguccagcacccugaacucacaggcuuagacugcauucgcccauguuucuggguggagcugguucgagggcuucccagagaaaacaccacgaucuggaccuccggaucuucgauuagcuucugcggcgucaauuccgauacagccaacuggucauggccugacggugcagaguugccauuuacuaucgauaaguga

SEQ ID NO: 147985 - RNA, 1413 nt, Artificial Sequence
  derived and/or modified CDS sequence (opt3) from neuraminidase__InfluenzaA__ADN89163
augaaccccaaucagagaaucauuaccauaggcagcaucuccauugccaucgggauuaucucucugaugcuccaaauaggaaacaucauuucaaucugggcuagucacagcauucagacagguucccagaauaacacuggcaucugcaaucagaggauaauuacguacgagaacucuaccugggugaaucauacauaugugaacaucaauaacacuaauguuguggcaggggaagacaagaccucgguaacacuugccggaaacucaagccuguguaguauuuccggcugggcgaucuacaccaaagauaauucuauccggauugguagcaagggggacguguucgucauacgcgagccuuuuaucuccugcucacacuuggaaugucgaacuuucuuuuuaacacaaggagcucugcuaaacgauaaacauaguaauggcaccgccaaggaccguagcccauauagagcacucaugucuugcccgcugggcgaggcccccuccccuuacaacucaaaauucgaaagcguggcuuggagugcaucugccugucacgaugggaugggauggcuuacgauugguaucuccggcccagacaacggggcuguugccgugcugaaguauaauggaauaauuacuggcaccaucaagagcuggaaaaagcagaucuugaggacacaggagucggagugcgucuguaugaacgguucuugcuuuacuauuaugaccgaugggcccuccaauaaagcggcaucauacaagaucuucaaaauugaaaagggaaaggugacaaaaaguauagagcucaacgccccuaauuuuuauuacgaagaguguagcugcuacccagacaccggcaucguaauguguguuugccgggauaacuggcauggcuccaaucgccccugggugucuuucaaccagaaucuggacuaucaaauuggguacaucugcagcggagucuuuggugauaacccuagaccagaggacggcgaagggucauguaauccggugacgguggauggagcuaacggcgucaaggguuucaguuauaaauacgggaauggcguuuggaucggaaggacuaaguccaaccggcugcgcaaaggcuuugagaugauuugggaccccaauggguggacaaacaccgacagcgauuucucugugaagcaggacguaguggccauaacugauuggucaggauauagugguagcuuuguccagcacccugaacucacaggcuuagacugcauccgaccauguuucuggguggagcugguuagagggcuucccagggaaaacaccacgauuuggaccuccggaucuucgaucagcuucugcggcgucaauuccgauacagcaaacuggucauggccugacggugcugaguugccauuuacuauugauaaauga

SEQ ID NO: 147986 - RNA, 1413 nt, Artificial Sequence; identical to SEQ ID NO: 146978
  derived and/or modified CDS sequence (opt3) from neuraminidase__InfluenzaA__ADN89174

SEQ ID NO: 147987 - RNA, 1413 nt, Artificial Sequence; identical to SEQ ID NO: 147980
  derived and/or modified CDS sequence (opt3) from neuraminidase__InfluenzaA__ADN89185

SEQ ID NO: 147988 - RNA, 1413 nt, Artificial Sequence
  derived and/or modified CDS sequence (opt3) from neuraminidase__InfluenzaA__ADN89196
augaaccccaaucagaagaucauuaccauaggcagcaucuccauugccaucgggauuaucucucugaugcuccaaauaggaucaaucauuaguaucugggcuagccacuccauucagacagguucucagaacaauacuggcaucugcaaccagagaauaauuacguacgaaaauucgaccugggugaaccauacauaugucaauaucaacaauacuaacguuguggcaggggaggacaaaaccucaguaacacuugccggaaauagcagucuguguuccauuucuggcugggcgaucuacaccaaggauaacagcaucaggauugguuccaaaggggacguguucgucauacgggagccuuuuaucucaugcagucacuuggaaugucgcacuuucuuuuuaacacaaggagcucugcuaaaugauaagcauagcaacggcaccgugaaagaccgaucuccauaucgugcccucauguccugcccgcugggcgaggcacccucaccuuacaauagcaaguucgaaaguguugccuggucugcuuccgcaugucacgaugggaugggauggcuuacgauugguaucagcggcccagacaacggggccguggcuguccugaaguauaacggaauaauuacuggcaccaucaaaucguggaagaaacagaucuugagaacacaggagucugagugcguguguaugaaugguuccugcuuuacuauuaugaccgaugggcccucaaacaaggccgcgaguuacaaaaucuucaagauugaaaagggaaaaguaacaaagagcauagagcucaaugcaccuaacuuuuauuacgaagaguguuccugcuacccagacaccggcaucguuaugugugugugcagggauaauuggcauggcucuaaccggcccugggucagcuucaaucagaaccuggacuaucaaaugggguacauuugcucaggaguguuuggugauaauccucgcccagaggacggcgaagggaguuguaacccggugacggucgauggagccaauggcguuaaagguuucuccuauaaguacgggaacggcguguggaucggaagaacuaaaagcaauaggcugcggaagggcuuugagaugaucugggaccccaacggguggacaaauaccgacucugauuucucacucaaacaggacguaguggcuauuacugauuggaguggauauagcgguuccuuuguccagcacccugaauuaacaggccuggacugcauacgcccauguuucuggguggagcuuguucgaggguugcccagagaaaacaccacgaucuggaccucuggaucgagcauuuccuucugcggcgugaacucagauacagccaauuggaguuggccugacggugcagagcugccauuuacuaucgauaaguga

SEQ ID NO: 147989 - RNA, 1413 nt, Artificial Sequence; identical to SEQ ID NO: 147988
  derived and/or modified CDS sequence (opt3) from neuraminidase__InfluenzaA__ADN89207

SEQ ID NO: 147990 - RNA, 1413 nt, Artificial Sequence
  derived and/or modified CDS sequence (opt3) from neuraminidase__InfluenzaA__ADN89218
augaaccccaaucagaagaucauuaccauaggcagcaucuccauugccaucgggauuaucucucugaugcuccaaauaggaaacaucauuucaaucugggcuagucacagcauucagccugguucccagaauaacacaggcaucugcaaucagagaauaauuacuuacgagaacucuacgugggugaaucauaccuaugucaacaucaauaacacaaauguuguggcaggggaagacaaaacuucgguaacccuugccggaaacucaagccuguguaguauuuccggcugggcgaucuacacaaaggauaauucuaucaggauugguagcaaaggggacguguucgucauacgggagccauuuaucuccugcucacacuuggaaugucgcaccuucuuuuuaacucaaggagcucugcuaaacgauaagcauaguaauggcacagugaaagaccgaagcccguaucgugcccucaugucuugcccccugggcgaggcaccuuccccauacaacucaaaguucgaaagcguugccuggagugcuucugcaugucacgaugggaugggauggcuuaccauugguaucuccggccccgacaacggggccguggcuguccugaaguauaauggaauaauuacgggcacuaucaaaagcuggaagaaacagaucuugagaacccaggagucggagugcguguguaugaacgguucuugcuuuacaauuaugacugaugggccuuccaauaaggccgcgucauacaaaaucuucaagauugaaaagggaaaaguaaccaagaguauagagcucaacgcaccaaauuuuuauuacgaagaguguagcugcuaccccgacacaggcaucguuaugugugugugcagggauaacuggcauggcuccaaucggccuugggucucuuucaaccagaaucuggacuaucaaauuggguacaucugcagcggaguguuuggugauaacccacgcccggaggacggcgaagggucauguaaucccgugaccgucgauggagccaacggcguuaaagguuucaguuauaaguacgggaauggcguguggaucggaagaacgaaauccaacaggcugcggaagggcuuugagaugauuugggacccuaauggguggacuaacacagacagcgauuucucuguaaaacaggacguggucgcuauaaccgauuggucaggauauagugguagcuuugugcagcacccagaacucacuggcuuagacugcauccgccccuguuucuggguugagcuggugcgagggcuuccuagagaaaacacaaccauuuggacguccggaucuucgaucagcuucugcggcgucaauggugauaccgccaacugguccuggccagacggggcagaguugcccuuuacaauugauaaguga

SEQ ID NO: 147991 - RNA, 1413 nt, Artificial Sequence
  derived and/or modified CDS sequence (opt3) from neuraminidase__InfluenzaA__ADN89229
augaaccccaaucagaagaucauuaccauaggcagcaucuccauugccaucgggauuaucucucugaugcuccaaauaggaaacaucauuucaaucugggcuagucacagcauucagacagguucccagaauaacacuggcaucugcaaucagagaauaauuacguacgagaacucuaccugggugaaucauacauaugucaacaucaauaacacuaauguuguggcaggggaagacaaaaccucgguaacacuugccggaaacucaagccuguguaguauuuccggcugggcgaucuacaccaaggauaauucuaucaggauugguagcaaaggggacguguucgucauacgggagccuuuuaucuccugcucacacuuggaaugucgcacuuucuuuuuaacacaaggagcucugcuaaacgauaagcauaguaauggcaccgugaaagaccgaagcccauaucgugcccucaugucuugcccgcugggcgaggcacccuccccuuacaacucaaaguucgaaagcguugccuggagugcuucugcaugucacgaugggaugggauggcuuacgauugguaucuccggcccagacaacggggccguggcuguccugaaguauaauggaauaauuacuggcaccaucaaaagcuggaagaaacagaucuugagaacacaggagucggagugcguguguaugaacgguucuugcuuuacuauuaugaccgaugggcccuccaauaaggccgcgucauacaaaaucuucaagauugaaaagggaaaaguaacaaagaguauagagcucaacgcaccuaauuuuuauuacgaagaguguagcugcuacccagacaccggcaucguuaugugugugugcagggauaacuggcauggcuccaaucggcccugggucucuuucaaccagaaucuggacuaucaaauuggguacaucugcagcggaguguuuggugauaacccucgcccagaggacggcgaagggucauguaauccggugacggucgauggagccaacggcguuaaagguuucaguuauaaguacgggaauggcguguggaucggaagaacuaaauccaacaggcugcggaagggcuuugagaugauuugggaccccaauggguggacaaacaccgacagcgauuucucuguaaaacaggacguggucgcuacuacagauuggucaggauauagugguagcuuugugcagcacccugaacucaccggcuuagacugcauacgcccauguuucuggguugagcuggugcgagggcuucccagagaaaacacgaccaucuggacauccggaucuucgauuagcuucugcggcgucaauuccgauacugccaacuggucauggccugacggugcagaguugccauuuaccaucgauaaguga

SEQ ID NO: 147992 - RNA, 1413 nt, Artificial Sequence
  derived and/or modified CDS sequence (opt3) from neuraminidase__InfluenzaA__ADN89240
augaaccccaaucagaagaucauuaccauaggcagcaucuccauugccaucgggauuaucucucugaugcuccaaauaggaaacaucauuucaaucugggcuagucacagcauucagacagguucccagaauaacacuggcaucugcaaucagagaauaauuacguacgagaacucuaccugggugaaucauacauaugucaacaucaauaacacuaauguuguggcaggggaagacaaaaccucgguaacacuugccggaaacucaagccuguguaguauuuccggcugggcgaucuacaccaaggauaauucuaucaggauugguagcaaaggggacguguucgucauacgggagccuuuuaucuccugcucacacuuggaaugucgcacuuucuuuuuaacacaaggagcucugcuaaacgauaagcauaguaauggcaccgugaaagaccgaagcccauaucgugcccucaugucuugcccgcugggcgaggcacccuccccuuacaacucaaaguucgaaagcguugccuggagugcuucugcaugucacgaugggaugggauggcuuacgauugguaucuccggcccagacaacggggccguggcuguccugaaguauaauggaauaauuacuggcaccaucaaaagcuggaagaaacagaucuugagaacacaggagucggagugcguguguaugaacgguucuugcuuuacuauuaugaccgaugggcccuccaauaaggccgcgucauacaaaaucuucaagauugaaaagggaaaaguaacaaagaguauagagcucaacgcaccuaauuuuuauuacgaagaguguagcugcuacccagacaccggcaucguuaugugugugugcagggauaacuggcauggcuccaaucggcccugggucucuuucaaccagaaucuggacuaucaaauuggguacaucugcagcggaguguuuggugauaacccucgcccagaggacggcgaagggucauguaauccggugacggucgauggagccaacggcguuaaagguuucaguuauaaguacgggaauggcguguggaucggaagaacuaaauccaacaggcugcggaagggcuuugagaugauuugggaccccaauggguggacaaacaccgacagcgauuucucuguaaaacaggacguggucgcuauaacugauuggucaggauauagugguagcuuugugcagcacccugaacucacaggcuuagacugcauccgcccauguuucuggguugagcuggugcgagggcuucccagagaaaacaccacgauuuggaccuccggaucuucgaucagcuucugcggcgucaauggugauacagccaacugguccuggccugacggggcagaguugccauuuacuauugauaaguga

SEQ ID NO: 147993 - RNA, 1413 nt, Artificial Sequence; identical to SEQ ID NO: 145509
  derived and/or modified CDS sequence (opt3) from neuraminidase__InfluenzaA__ADN89251

SEQ ID NO: 147994 - RNA, 1413 nt, Artificial Sequence; identical to SEQ ID NO: 145509
  derived and/or modified CDS sequence (opt3) from neuraminidase__InfluenzaA__ADN89262

SEQ ID NO: 147995 - RNA, 1413 nt, Artificial Sequence; identical to SEQ ID NO: 145509
  derived and/or modified CDS sequence (opt3) from neuraminidase__InfluenzaA__ADN89273

SEQ ID NO: 147996 - RNA, 1413 nt, Artificial Sequence; identical to SEQ ID NO: 145509
  derived and/or modified CDS sequence (opt3) from neuraminidase__InfluenzaA__ADN89284

SEQ ID NO: 147997 - RNA, 1413 nt, Artificial Sequence; identical to SEQ ID NO: 145509
  derived and/or modified CDS sequence (opt3) from neuraminidase__InfluenzaA__ADN89295

SEQ ID NO: 147998 - RNA, 1413 nt, Artificial Sequence; identical to SEQ ID NO: 145509
  derived and/or modified CDS sequence (opt3) from neuraminidase__InfluenzaA__ADN89306

SEQ ID NO: 147999 - RNA, 1413 nt, Artificial Sequence
  derived and/or modified CDS sequence (opt3) from neuraminidase__InfluenzaA__ADN89317
augaaccccaaucagagaaucauuaccauaggcagcaucuccauugccaucgggauuaucucucugaugcuccaaauaggaaacaucauuucaaucugggcuagucacagcauucagacagguucccagaauaacacuggcaucugcaaucagaggauaauuacguacgagaacucuaccugggugaaucauacauaugucaacaucaauucgacuaacguuguggcaggggaagacaagaccucaguaacacuugccggaaauagcagucuguguuccauuucuggcugggcgaucuacaccaaagauaacagcauccggauugguuccaagggggacguguucgucauacgcgagccuuuuaucucaugcagucacuuggaaugucgaacuuucuuuuuaacacaaggagcucugcuaaaugauaaacauagcaacggcaccgugaaggaccguucuccauauagagcccucauguccugcccgcugggcgaggcacccucaccuuacaauagcaaauucgaaaguguugccuggucugcuuccgcaugucacgaugggaugggauggcuuacgauugguaucagcggcccagacaacggggccguggcuguccugaaguauaacggaauaauuacuggcaccaucaagucguggaaaaagcagaucuugaggacacaggagucugagugcguguguaugaaugguuccugcuuuacuauuaugaccgaugggcccucaaacaaagccgcgaguuacaagaucuucaaaauugaaaagggaaagguaacaaaaagcauagagcucaaugcaccuaacuuuuauuacgaagaguguuccugcuacccagacaccggcaucguuaugugugugugccgggauaauuggcauggcucuaaccgccccugggucagcuucaaucagaaccuggacuaucaaauuggguacaucugcucaggaguguuuggugauaauccuagaccagaggacggcgaagggaguuguaacccggugacggucgauggagccaauggcguuaaggguuucuccuauaaauacgggaacggcguguggaucggaaggacuaagagcaaucggcugcgcaaaggcuuugagaugauuugggaccccaacggguggacaaauaccgacucugauuucucaguaaagcaggacguggucgcuauaacugauuggaguggauauagcgguuccuuugugcagcacccugaacucacaggcuuagacugcauccgaccauguuucuggguugagcuggugagagggcuucccagggaaaacaccacgauuuggaccucuggaucgagcaucuccuucugcggcgucaacggugauacagccaauuggucauggccugacggggcagaguugccauuuacuauugauaaauga

SEQ ID NO: 148000 - RNA, 1413 nt, Artificial Sequence
  derived and/or modified CDS sequence (opt3) from neuraminidase__InfluenzaA__ADN89328
augaaccccaaucagaagaucauuaccauaggcagcaucuccauugccaucgggauuaucucucugaugcuccaaauaggaucaaucauuaguaucugggcuagccacuccauucagacagguucucagaacaauacuggcaucugcaaccagagaauaauuacguacgaaaauucgaccugggugaaccauacauaugucaauaucaacaauacuaacguuguggcaggggaggacaaaaccucaguaacacuugccggaaauagcagucuguguuccauuucuggcugggcgaucuacaccaaggauaacagcaucaggauugguuccaaaggggacguguucgucauacgggagccuuuuaucucaugcagucacuuggaaugucgcacuuucuuuuuaacacaaggagcucugcuaaaugauaagcauagcaacggcaccgugaaagaccgaucuccauaucgugcccucauguccugcccgcugggcgaggcacccucaccuuacaauagcaaguucgaaaguguugccuggucugcuuccgcaugucacgaugggaugggauggcuuacgauugguaucagcggcccagacaacggggccguggcuguccugaaguauaacggaauaauuacuggcaccaucaaaucguggaagaaacagaucuugagaacacaggagucugagugcguguguaugaaugguuccugcuuuacuauuaugaccgaugggcccucaaacaaggccgcgaguuacaaaaucuucaagauugaaaagggaaaaguaacaaagagcauagagcucaaugcaccuaacuuuuauuacgaagaguguuccugcuacccagacaccggcaucguuaugugugugugcagggauaauuggcauggcucuaaccggcccugggucagcuucaaucagaaccuggacuaucaaauuggguacaucugcucaggaguguuuggugauaauccucgcccagaggacggcgaagggaguuguaacccggugacggucgauggagccaauggcguuaaagguuucuccuauaaguacgggaacggcguguggaucggaagaacuaaaagcaauaggcugcggaagggcuuugagaugauuugggaccccaacggguggacaaauaccgacucugauuucucaguaaaacaggacguggucgcuauaacugauuggaguggauauagcgguuccuuugugcagcacccugaacucacaggcuuagacugcauccgcccauguuucuggguugagcuggugcgagggcuucccagagaaaacaccacgauuugggccucuggaucgagcaucuccuucugcggcgucaacucagauaccgcaaauuggaguuggccugacggugcugaguugccauuuacaauugauaaguga

SEQ ID NO: 148001 - RNA, 1413 nt, Artificial Sequence; identical to SEQ ID NO: 147985
  derived and/or modified CDS sequence (opt3) from neuraminidase__InfluenzaA__ADN89339

SEQ ID NO: 148002 - RNA, 1413 nt, Artificial Sequence; identical to SEQ ID NO: 147991
  derived and/or modified CDS sequence (opt3) from neuraminidase__InfluenzaA__ADN89350

SEQ ID NO: 148003 - RNA, 1413 nt, Artificial Sequence
  derived and/or modified CDS sequence (opt3) from neuraminidase__InfluenzaA__ADN89361
augaaccccaaucagaagaucauuaccauaggcagcaucuccauugccaucgggauuaucucucugaugcuccaaauaggaucaaucauuaguaucugggcuagccacuccauucagacagguucucagaacaauacuggcaucugcaaccagagaauaauuacguacgaaaauucgaccugggugaaccauacauaugucaauaucaacaauacuaacguuguggcaggggaggacaaaaccucaguaacacuugccggaaauagcagucuguguuccauuucuggcugggcgaucuacaccaaggauaacagcaucaggauugguuccaaaggggacguguucauaauccgggagccuuuuauuucaugcagucacuuggaaugucgcacuuucuuuuuaacacaaggagcucugcuaaaugauaagcauagcaacggcaccgucaaagaccgaucuccauaucgugcccucauguccugcccgcugggcgaggcacccucaccuuacaauagcaaguucgaaaguguggccuggucugcuuccgcaugucacgaugggaugggauggcuuacgaucgguauaagcggcccagacaacggggccguugcugugcugaaguauaacggaauuaucacuggcaccaucaaaucguggaagaaacagauuuugagaacacaggagucugagugcgucuguaugaaugguuccugcuuuacuaucaugaccgaugggcccucaaacaaggccgcgaguuacaaaauuuucaagauagaaaagggaaaagugacaaagagcaucgagcucaaugcaccuaacuuuuauuacgaagaguguuccugcuacccagacaccggcauuguaauguguguuugcagggauaauuggcauggcucuaaccggcccugggugagcuucaaucagaaccuggacuaucaaaucggguacaucugcucaggagucuuuggugauaauccucgcccagaggacggcgaagggaguuguaacccggugacgguggauggagccaauggcgucaaagguuucuccuauaaguacgggaacggcguuuggauuggaagaacuaaaagcaauaggcugcggaagggcuuugagaugauaugggaccccaacggguggacaaauaccgacucugauuucucagugaaacaggacguaguggcuaucacugauuggaguggauauagcgguuccuuuguccagcacccugaacucacaggcuuagacugcauucgcccauguuucuggguggagcugguucgagggcuucccagagaaaacaccacgaucuggaccucuggaucgagcauuuccuucugcggcgugaacucagauacagccaauuggaguuggccugacggugcagaguugccauuuacuaucgauaaguga

SEQ ID NO: 148004 - RNA, 1413 nt, Artificial Sequence
  derived and/or modified CDS sequence (opt3) from neuraminidase__InfluenzaA__ADN89372
augaaccccaaucagaagaucauuaccauaggcagcaucuccauugccaucgggauuaucucucugaugcuccaaauaggaaacaucauuucaaucugggcuagucacagcauucagacagguucccagaauaacacuggcaucugcaaucagagaauaauuacguacgagaacucuaccugggugaaucauacauaugugaacaucaauaacacuaauauuguugcaggggaagacaaaaccucggugacacuugccggaaacucaagccuguguaguaucuccggcugggcgaucuacaccaaggauaauucuauuaggauagguagcaaaggggacguauucgugauccgggagccuuuuauuuccugcucacacuuggaaugucgcacuuucuuuuuaacacaaggagcucugcuaaacgauaagcauaguaauggcaccgucaaagaccgaagcccauaucgugcccucaugucuugcccgcugggcgaggcacccuccccuuacaacucaaaguucgaaagcguggccuggagugcuucugcaugucacgaugggaugggauggcuuacgaucgguauauccggcccagacaacggggccguugcugugcugaaguauaauggaauuaucacuggcaccaucaaaagcuggaagaaacagauuuugagaacacaggagucggagugcgucuguaugaacgguucuugcuuuacuaucaugaccgaugggcccuccaauaaggccgcgucauacaaaauuuucaagauagaaaagggaaaagugacaaagaguaucgagcucaacgcaccuaauuuuuauuacgaagaguguagcugcuacccagacaccggcauuguaauguguguuugcagggauaacuggcauggcuccaaucggcccugggugucuuucaaccagaaucuggacuaucaaaucggguacaucugcagcggagucuuuggugauaacccucgcccagaggacggcgaagggucauguaauccggugacggugaacggagccgauggcgucaaagguuucaguuauaaguacgggaauggcguuuggauuggaagaacuaaauccaacaggcugcggaagggcuuugagaugauaugggaccccaauggguggacaaacaccgacagcgauuucucugugaaacaggacguaguggcuaucacugauuggucaggauauagugguagcuuuguccagcacccugaacucacaggcuuagacugcauucgcccauguuucuggguggagcugguucgagggcuucccagagaaaacaccacgaucuggaccuccggaucuucgauuagcuucugcggcgucaauuccgauacagccaacuggucauggccugacggugcagaguugccauuuacuaucgauaaguga

SEQ ID NO: 148005 - RNA, 1413 nt, Artificial Sequence; identical to SEQ ID NO: 147980
  derived and/or modified CDS sequence (opt3) from neuraminidase__InfluenzaA__ADN89383

SEQ ID NO: 148006 - RNA, 1413 nt, Artificial Sequence
  derived and/or modified CDS sequence (opt3) from neuraminidase__InfluenzaA__ADN89405
augaaccccaaucagaagaucauuaccauaggcagcaucuccauugccaucgggauuaucucucugaugcuccaaauaggaucaaucauuaguaucugggcuagccacuccauucagacagguucucagaacaauacuggcaucugcaaccagagaauaauuacguacgaaaauucgaccugggugaaccauacauaugucaauaucaacaauacuaacguuguggcaggggaggacaaaaccucaguaacacuugccggaaauagcagucuguguuccaccucuggcugggcgauuuacacuaaggauaacagcaucaggaucgguuccaaaggggacguguucgucauucgggagccuuuuauaucaugcagucacuuggaaugucgcacauucuuuuuaacccaaggagcucugcuaaaugauaagcauagcaacggcacggugaaagaccgaucuccauaucgugcccucauguccugcccgcugggcgaggcacccucaccuuacaauagcaaguucgaaaguguugccuggucugcuuccgcaugucacgaugggaugggauggcuuacuaucgguauuagcggcccagacaacggggccguggcuguccugaaguauaacggaaucauaaccggcacaauuaaaucguggaagaaacagaucuugagaacucaggagucugagugcguguguaugaaugguuccugcuuuaccaucaugacagaugggcccucaaacaaggccgcgaguuacaaaauuuucaagaucgaaaagggaaaaguaaccaagagcauugagcucaaugcaccuaacuuuuauuacgaagaguguuccugcuacccagacacgggcauaguuaugugugugugcagggauaauuggcauggcucuaaccggcccugggucagcuucaaucagaaccuggacuaucaaaucggguacauuugcucaggaguguuuggugauaauccucgcccagaggacggcgaagggaguuguaacccggugacugucgauggagccaauggcguuaaagguuucuccuauaaguacgggaacggcguguggaucggaagaacaaaaagcaauaggcugcggaagggcuuugagaugaucugggaccccaacggguggaccaauacugacucugauuucucaguaaaacaggacguggucgcuauuacagauuggaguggauauagcgguuccuuugugcagcacccugaacucaccggcuuagacugcauacgcccauguuucuggguugagcuggugcgagggcuucccagagaaaacacgaccaucuggacaucuggaucgagcauuuccuucugcggcgucaacucagauacugccaauuggaguuggccugacggugcagaguugccauuuaccaucgauaaguga

SEQ ID NO: 148007 - RNA, 1413 nt, Artificial Sequence
  derived and/or modified CDS sequence (opt3) from neuraminidase__InfluenzaA__ADN89416
augaaccccaaucagaagaucauuaccauaggcagcaucuccauugccaucgggauuaucucucugaugcuccaaauaggaaacaucauuucaaucugggcuagucacagcauucagacagguucccagaauaacacuggcaucugcaaucagagaauaauuacguacgagaacucuaccugggugaaucauacauaugucaacaucaauaacacuaauguuguggcaggggaagacaaaaccucgguaacacuugccggaaacucaagccuguguaguauuuccggcugggcgaucuacaccaaggauaauucuaucaggauugguagcaaaggggacguguucgucauacgggagccuuuuaucuccugcucacacuuggaaugucgcacuuucuuuuuaacacaaggagcucugcuaaacgauaagcauaguaauggcaccgugaaagaccgaagcccauaucgugcccucaugucuugcccgcugggcgaggcacccuccccuuacaacucaaaguucgaaagcguugccuggagugcuucugcaugucacgaugggaugggauggcuuacgauugguaucuccggcccagacaacggggccguggcuguccugaaguauaauggaauaauuacuggcaccaucaaaagcuggaagaaacagaucuugagaacacaggagucggagugcguguguaugaacgguucuugcuuuacuauuaugaccgaugggcccuccaauaaggccgcgucauacaaaaucuucaagauugaaaagggaaaaguaacaaagaguauagagcucaacgcaccuaauuuuuauuacgaagaguguagcugcuacccagacaccggcaucguuaugugugugugcagggauaacuggcauggcuccaaucggcccugggucucuuucaaccagaaucuggacuaucaaauuggguacaucugcagcggagugcugggugauaacccucgcccagaggacggcgaagggucauguaauccggugacggucgauggagccaacggcguuaaagguuuuaguuauaaguacgggaauggcguguggaucggaagaacuaaauccaacaggcuccggaagggcuucgagaugauuugggaccccaauggguggacaaacaccgacagcgauuuuucuguaaaacaggacguggucgcuauaacugauuggucaggauauagugguagcuucgugcagcacccugaauuaacaggccuggacugcauccgcccauguuuuuggguugagcuugugcgaggguugcccagagaaaacaccacgauuuggaccuccggaucuucgaucagcuucugcggcgucaauggugauacagccaacugguccuggccugacggggcagagcugccauucacuauugauaaguga

SEQ ID NO: 148008 - RNA, 1413 nt, Artificial Sequence
  derived and/or modified CDS sequence (opt3) from neuraminidase__InfluenzaA__ADN89427
augaaccccaaucagaagaucauuaccauaggcagcaucuccauugccaucgggauuaucucucugaugcuccaaauaggaucaaucauuaguaucugggcuagccacuccauucagacagguucucagaacaauacuggcaucugcaaccagagaauaauuacguacgaaaauucgaccugggugaaccauacauaugucaauaucaacaauacuaacguuguggcaggggaggacaaaaccucaguaacacuugccggaaauagcagucuguguuccauuucuggcugggcgaucuacaccaaggauaacagcaucaggauugguuccaaaggggacguguucgucauacgggagccuuuuaucucaugcagucacuuggaaugucgcacuuucuuuuuaacacaaggagcucugcuaaaugauaagcauagcaacggcaccgugaaagaccgaucuccauaucgugcccucauguccugcccgcugggcgaggcacccucaccuuacaauagcaaguucgaaaguguugccuggucugcuuccgcaugucacgaugggaugggauggcuuacgauugguaucagcggcccagacaacggggccguggcuguccugaaguauaacggaauaauuacuggcaccaucaaaucguggaagaaacagaucuugagaacacaggagucugagugcguguguaugaaugguuccugcuuuacuauuaugaccgaugggcccucaaacaaggccgcgaguuacaaaaucuucaagauugaaaagggaaaaguaacaaagagcauagagcucaaugcaccuaacuuuuauuacgaagaguguuccugcuacccagacaccggcaucguuaugugugugugcagggauaauuggcauggcucuaaccggcccugggucagcuucaaucagaaccuggacuaucaaauuggguacaucugcucaggaguguuuggugauaauccucgcccagaggacggcgaagggaguuguaacccggugacggucgauggagccaauggcguuaaagguuucuccuauaaguacgggaacggcguguggaucggaagaacuaaaagcaauaggcugcggaagggcuuugagaugauuugggaccccaacggguggacaaauaccgacucugauuucucaguaaaacaggacguggucgcuauaacugauuggaguggauauagcgguuccuuugugcagcacccugaacucacaggcuuagacugcauccgcccauguuucuggguugagcuggugcgagggcuucccagagaaaacaccacgauuuggaccucuggaucgagcaucuccuucugcggcgucgauucagacgccgcagauuggaguuggccugacggugcugaguugccauuuacaauugauaaguga

SEQ ID NO: 148009 - RNA, 1413 nt, Artificial Sequence; identical to SEQ ID NO: 145509
  derived and/or modified CDS sequence (opt3) from neuraminidase__InfluenzaA__ADN89438

SEQ ID NO: 148010 - RNA, 1413 nt, Artificial Sequence
  derived and/or modified CDS sequence (opt3) from neuraminidase__InfluenzaA__ADN89449
augaaccccaaucagaagaucauuaccauaggcagcaucuccauugccaucgggauuaucucucugaugcuccaaauaggaaacaucauuucaaucugggcuagucacagcauucagacagguucccagaauaacacuggcaucugcaaucagagaauaauuacguacgagaacucuaccugggugaaucauacauaugucaacaucaauaacacuaauguuguggcaggggaagacaaaccuucgguaacccuugccggaaacucaagccuguguaguauuuccggcugggcgaucuacacaaaggauaauucuaucaggauugguagcaaaggggacguguucgucauacgggagccauuuaucuccugcucacacuuggaaugucgcaccuucuuuuuaacucaaggagcucugcuaaacgauaagcauaguaauggcacagugaaagaccgaagcccguaucgugcccucaugucuugcccccugggcgaggcaccuuccccauacaacucaaaguucgaaagcguugccuggagugcuucugcaugucacgaugggaugggauggcuuaccauugguaucuccggccccgacaacggggccguggcuguccugaaguauaauggaauaauuacgggcacuaucaaaagcuggaagaaacagaucuugagaacccaggagucggagugcguguguaugaacgguucuugcuuuacaauuaugacugaugggccuuccaauaaggccgcgucauacaaaaucuucaagauugaaaagggaaaaguaaccaagaguauagagcucaacgcaccaaauuuuuauuacgaagaguguagcugcuaccccgacacaggcaucguuaugugugugugcagggauaacuggcauggcuccaaucggccuugggucucuuucaaccagaaucuggacuaucaaauuggguacaucugcagcggaguguuuggugauaacccacgcccggaggacggcgaagggucauguaaucccgugaccgucgauggagccaacggcguuaaagguuucaguuauaaguacgggaauggcguguggaucggaagaacgaaauccaacaggcugcggaagggcuuugagaugauuugggacccuaauggguggacuaacacagacagcgauuucucuguaaaacaggacguggucgcuauaaccgauuggucaggauauagugguagcuuugugcagcacccagaacucacuggcuuagacugcauccgccccuguuucuggguugagcuggugcgagggcuuccuagagaaaacacaaccauuuggacguccggaucuucgaucagcuucugcggcgucaauuccgauaccgccaacuggucauggccagacggugcagaguugcccuuuacaauugauaaguga

SEQ ID NO: 148011 - RNA, 1413 nt, Artificial Sequence; identical to SEQ ID NO: 146978
  derived and/or modified CDS sequence (opt3) from neuraminidase__InfluenzaA__ADN89460

SEQ ID NO: 148012 - RNA, 1413 nt, Artificial Sequence; identical to SEQ ID NO: 145509
  derived and/or modified CDS sequence (opt3) from neuraminidase__InfluenzaA__ADN89482

SEQ ID NO: 148013 - RNA, 1413 nt, Artificial Sequence
  derived and/or modified CDS sequence (opt3) from neuraminidase__InfluenzaA__ADN89493
augaaccccaaucagaagaucauuaccauaggcagcaucuccauugccaucgggauuaucucucugaugcuccaaauaggaaacaucauuucaaucugggcuagucacagcauucagacagagucccagaauaacacugguaucugcaaucagagaauaauuacguacgaaaacucuaccugggugaaucauacauaugucaacaucaauaacacuaauguuguggcaggcgaggacaaaaccucgguaacacuugccgggaacucaagccuguguaguauuuccggaugggcgaucuacaccaaggauaauucuaucaggauuggcagcaaaggugacguguucgucauacgggaaccuuuuaucuccugcucacacuuggagugucgcacuuucuuuuuaacacaaggggcucugcuaaacgauaagcauaguaauggaaccgugaaagaccgaagcccauaucgugcccucaugucuugcccgcugggcgaagcacccuccccuuacaacucaaaguucgagagcguugccuggagugcuucugcaugucacgauggcaugggguggcuuacgauuggaaucuccgguccagacaacggcgccguggcuguccugaaguauaaugggauaauuacuggaaccaucaaaagcuggaagaaacagaucuugagaacacaggagucggaaugcguguguaugaacggcucuugcuuuacuauuaugaccgauggucccuccaauaaggccgcgucauacaaaaucuucaagauugagaaggggaaaguaacaaagaguauagaacucaacgcaccuaauuuuuauuacgaggaguguagcugcuacccagacaccggaaucguuaugugugugugcagggauaacuggcauggcuccaaucggcccugggucucuuucaaccagaaucuggacuaucaaaugggcuacauuugcagcgggguguuuggagauaacccucgcccagaagacggugagggcucauguaauccggugacggucgauggggccaacggaguuaaaggcuucaguuauaaguacgguaaugggguguggaucggcagaacuaaauccaacaggcugcggaagggauuugaaaugaucugggaccccaauggcuggacaaacaccgacagcgauuucucuguaaaacaggacguggucgcuauuacugauuggucaggguauagugguagcuuugugcagcacccugagcucacaggauuagacugcauacgcccauguuucuggguugaacuggugcgaggccuucccagagagaacaccacgaucuggaccuccgggucuucgauuagcuucugcggagucaauuccgauacagccaacuggucauggccugacggcgcagaguugccauuuacuaucgauaaguga

SEQ ID NO: 148014 - RNA, 1413 nt, Artificial Sequence; identical to SEQ ID NO: 145509
  derived and/or modified CDS sequence (opt3) from neuraminidase__InfluenzaA__ADN89504

SEQ ID NO: 148015 - RNA, 1413 nt, Artificial Sequence
  derived and/or modified CDS sequence (opt3) from neuraminidase__InfluenzaA__ADN89515
augaaccccaaucagaagaucauuaccauaggcagcaucuccauugccaucgggauuaucucucugaugcuccaaauaggaaacaucauuucaaucugggcuagucacagcauucagacagguucccagaauaacacuggcaucugcaaucagagaauaauuacguacgagaacucuaccugggugaaucauacauaugucaacaucaauaacacuaauguuguggcaggggaagacaaaaccucgguaacacuugccggaaacucaagccuguguaguauuuccggcugggcgaucuacaccaaggauaauucuaucaggauugguagcaaaggggacguguucgucauacgggagccuuuuaucuccugcucacacuuggaaugucgcacuuucuuuuuaacacaaggagcucugcuaaacgauaagcauaguaauggcaccgugaaagaccgaagcccauaucgugcccucaugucuugcccgcugggcgaggcacccuccccuuacaacucaaaguucgaaagcguugccuggagugcuucugcaugucacgaugggaugggauggcuuacgauugguaucuccggcccagacaacggggccguggcuguccugaaguauaauggaauaauuacuggcaccaucaaaagcuggaagaaacagaucuugagaacacaggagucggagugcguguguaugaacgguucuugcuuuacuauuaugaccgaugggcccuccaauaaggccgcgucauacaaaaucuucaagauugaaaagggaaaaguaacaaagaguauagagcucaacgcaccuaauuuuuauuacgaagaguguagcugcuacccagacaccggcaucguuaugugugugugcagggauaacuggcauggcuccaaucggcccugggucucuuucaaccagaaucuggacuaucaaauuggguacaucugcagcggaguguuuggugauaacccucgcccagaggacggcgaagggucauguaauccggugacggucgauggagccaacggcguuaaagguuucaguuauaaguacgggaauggcguguggaucggaagaacuaaauccaacaggcugcggaagggcuuugagaugauuugggaccccaauggguggacaaacaccgacagcgauuucacuguaaaacaggacguggucgcuauaacagauuggucuggauauucagguaguuuugugcagcacccugaacucaccggcuuagacugcauccgcccauguuucuggguugagcuggugcgagggcuucccagagaaaacacgaccauuuggacaagcggauccucuaucucguucugcggcgucaauagcgauacugccaacugguccuggccugacggugcagaguugccauuuaccauugauaaguga

SEQ ID NO: 148016 - RNA, 1413 nt, Artificial Sequence; identical to SEQ ID NO: 145509
  derived and/or modified CDS sequence (opt3) from neuraminidase__InfluenzaA__ADN89526

SEQ ID NO: 148017 - RNA, 1413 nt, Artificial Sequence; identical to SEQ ID NO: 147980
  derived and/or modified CDS sequence (opt3) from neuraminidase__InfluenzaA__ADN89537

SEQ ID NO: 148018 - RNA, 1413 nt, Artificial Sequence; identical to SEQ ID NO: 145509
  derived and/or modified CDS sequence (opt3) from neuraminidase__InfluenzaA__ADN89548

SEQ ID NO: 148019 - RNA, 1413 nt, Artificial Sequence; identical to SEQ ID NO: 145509
  derived and/or modified CDS sequence (opt3) from neuraminidase__InfluenzaA__ADN89570

SEQ ID NO: 148020 - RNA, 1413 nt, Artificial Sequence
  derived and/or modified CDS sequence (opt3) from neuraminidase__InfluenzaA__ADN89581
augaaccccaaucagaagaucauuaccauaggcagcaucuccauugccaucgggauuaucucucugaugcuccaaauaggaaacaucauuucaaucugggcuagucacagcauucagacagguucccagaauaacacuggcaucugcaaucagagaauaauuacguacgagaacucuaccugggugaaucauacauaugucaacaucaauaacacuaauguuguggcaggggaagacaaaaccucgguaacacuugccggaaacucaagccuguguaguauuuccggcugggcgaucuacaccaaggauaauucuaucaggauugguagcaaaggggacguguucgucauacgggagccuuuuaucuccugcucacacuuggaaugucgcacuuucuuuuuaacacaaggagcucugcuaaacgauaagcauaguaauggcaccgugaaagaccgaagcccauaucgugcccucaugucuugcccgcugggcgaggcacccuccccuuacaacucaaaguucgaaagcguugccuggagugcuucugcaugucacgaugggaugggauggcuuacgauugguaucuccggcccagacaacggggccguggcuguccugaaguauaauggaauaauuacuggcaccaucaaaagcuggaagaaacagaucuugagaacacaggagucggagugcguguguaugaacgguucuugcuuuacuauuaugaccgaugggcccuccaauaagacagccucauacaaaaucuucaagauugaaaagggaaaaguaaccaagaguauagagcucaacgcgccuaauuuuuauuacgaagaguguagcugcuacccagacacgggcaucguuaugugugugugcagggauaacuggcauggcuccaaucggcccugggucucuuucaaccagaaucuggacuaucaaauuggguacaucugcagcggaguguuuggugauaacccucgcccagaggacggcgaagggucauguaauccggugacugucgauggagcaaacggcguuaaagguuucaguuauaaguacgggaauggcguguggaucggaagaacaaaauccaacaggcugcggaagggcuuugagaugauuugggaccccaauggguggaccaacacugacagcgauuucucuguaaaacaggacguggucgccauaacagauuggucaggauauagugguagcuuugugcagcacccugaacucaccggcuuagacugcauccgcccauguuucuggguugagcuggugcgagggcuucccagagaaaacacgaccauuuggacauccggaucuucgaucagcuucugcggcgucaauggugauacugcuaacugguccuggccugacggggccgaguugccauuuaccauugauaaguga

SEQ ID NO: 148021 - RNA, 1413 nt, Artificial Sequence; identical to SEQ ID NO: 146978
  derived and/or modified CDS sequence (opt3) from neuraminidase__InfluenzaA__ADN89592

SEQ ID NO: 148022 - RNA, 1413 nt, Artificial Sequence; identical to SEQ ID NO: 146978
  derived and/or modified CDS sequence (opt3) from neuraminidase__InfluenzaA__ADN89603

SEQ ID NO: 148023 - RNA, 1413 nt, Artificial Sequence; identical to SEQ ID NO: 147988
  derived and/or modified CDS sequence (opt3) from neuraminidase__InfluenzaA__ADN89614

SEQ ID NO: 148024 - RNA, 1413 nt, Artificial Sequence; identical to SEQ ID NO: 148007
  derived and/or modified CDS sequence (opt3) from neuraminidase__InfluenzaA__ADN89625

SEQ ID NO: 148025 - RNA, 1413 nt, Artificial Sequence; identical to SEQ ID NO: 145509
  derived and/or modified CDS sequence (opt3) from neuraminidase__InfluenzaA__ADN89636

SEQ ID NO: 148026 - RNA, 1413 nt, Artificial Sequence; identical to SEQ ID NO: 145509
  derived and/or modified CDS sequence (opt3) from neuraminidase__InfluenzaA__ADN89647

SEQ ID NO: 148027 - RNA, 1413 nt, Artificial Sequence; identical to SEQ ID NO: 145509
  derived and/or modified CDS sequence (opt3) from neuraminidase__InfluenzaA__ADN89658

SEQ ID NO: 148028 - RNA, 1413 nt, Artificial Sequence; identical to SEQ ID NO: 146978
  derived and/or modified CDS sequence (opt3) from neuraminidase__InfluenzaA__ADN89669

SEQ ID NO: 148029 - RNA, 1413 nt, Artificial Sequence; identical to SEQ ID NO: 145509
  derived and/or modified CDS sequence (opt3) from neuraminidase__InfluenzaA__ADN89680

SEQ ID NO: 148030 - RNA, 1413 nt, Artificial Sequence; identical to SEQ ID NO: 145509
  derived and/or modified CDS sequence (opt3) from neuraminidase__InfluenzaA__ADN89691

SEQ ID NO: 148031 - RNA, 1413 nt, Artificial Sequence; identical to SEQ ID NO: 148007
  derived and/or modified CDS sequence (opt3) from neuraminidase__InfluenzaA__ADN89702

SEQ ID NO: 148032 - RNA, 1413 nt, Artificial Sequence; identical to SEQ ID NO: 145509
  derived and/or modified CDS sequence (opt3) from neuraminidase__InfluenzaA__ADN89713

SEQ ID NO: 148033 - RNA, 1413 nt, Artificial Sequence; identical to SEQ ID NO: 145509
  derived and/or modified CDS sequence (opt3) from neuraminidase__InfluenzaA__ADN89724

SEQ ID NO: 148034 - RNA, 1413 nt, Artificial Sequence; identical to SEQ ID NO: 145509
  derived and/or modified CDS sequence (opt3) from neuraminidase__InfluenzaA__ADN89735

SEQ ID NO: 148035 - RNA, 1413 nt, Artificial Sequence; identical to SEQ ID NO: 145509
  derived and/or modified CDS sequence (opt3) from neuraminidase__InfluenzaA__ADN89746

SEQ ID NO: 148036 - RNA, 1413 nt, Artificial Sequence; identical to SEQ ID NO: 145509
  derived and/or modified CDS sequence (opt3) from neuraminidase__InfluenzaA__ADN89757

SEQ ID NO: 148037 - RNA, 1413 nt, Artificial Sequence; identical to SEQ ID NO: 145509
  derived and/or modified CDS sequence (opt3) from neuraminidase__InfluenzaA__ADN89768

SEQ ID NO: 148038 - RNA, 1413 nt, Artificial Sequence; identical to SEQ ID NO: 147984
  derived and/or modified CDS sequence (opt3) from neuraminidase__InfluenzaA__ADN89779

SEQ ID NO: 148039 - RNA, 1413 nt, Artificial Sequence; identical to SEQ ID NO: 145509
  derived and/or modified CDS sequence (opt3) from neuraminidase__InfluenzaA__ADN89790

SEQ ID NO: 148040 - RNA, 1413 nt, Artificial Sequence
  derived and/or modified CDS sequence (opt3) from neuraminidase__InfluenzaA__ADN89801
augaaccccaaucagaagaucauuaccauaggcagcaucuccauugccaucgggacaauuucucugaugcuccaaaucggaaacauaaucucaauuugggcuagucacagcauccagacugguucccagaauaacacgggcauuugcaaucagagaaucauaaccuacaaaaacucuacaugggugaaucauacuuaugucaacauuaauaacaccaauguuguggcaggggaggacaagacaucgguaacccuugccggaaacucaagccuguguaguaucuccggcugggcgauuuacacuaaagauaauucuaucaggaucgguagcaagggggacguguucgucauucgggaaccuuuuauauccugcucacacuuggagugucgcacauucuuuuuaacccaaggagcucugcuaaacgauaaacauaguaauggcacggugaaggaccgaagcccauaucgugcccucaugucuugcccgcugggcgaagcacccuccccuuacaacucaaaguucgagagcguugccuggagugcuucugcaugucacgaugggaugggauggcuuacuaucgguauuuccggcccagacaacggggccguggcuguccugaaauauaauggaaucauaaccggcacaauuaagagcuggaaaaagcagaucuugagaacucaggaaucggagugcguguguaugaacgguucuugcuuuaccaucaugacagaugggcccuccaauaaagccgcgucauacaagauuuucaagaucgagaaaggaaagguaaccaaaaguauugaacucaacgcaccuaauuuuuauuacgaggaauguagcugcuacccagacacgggcauaguuaugugugugugcagggauaacuggcauggcuccaaucggcccugggucucuuucaaccagaaucuggacuaucaaaucggguacauuugcagcggaguguuuggugauaacccucgcccagaggacggcgaggggucauguaauccggugacugucgauggagccaacggcguuaaggguuucaguuauaaauacgggaauggcguguggaucggaagaacaaaguccaacaggcugcggaaaggcuuugaaaugaucugggaccccaauggguggaccaacacugacagcgauuucucuguaaagcaggacguggucgcuauuacagauuggucaggauauagugguagcuuugugcagcacccugagcucaccggcuuagacugcauacgcccauguuucuggguugaacuggugcgagggcuucccagagagaacacgaccaucuggacauccggaucuucgauuagcuucugcggcgucaauuccgauacugccaacuggucauggccugacggugcagaauugccauuuaccaucgauaaguga

SEQ ID NO: 148041 - RNA, 1413 nt, Artificial Sequence
  derived and/or modified CDS sequence (opt3) from neuraminidase__InfluenzaA__ADN89823
augaaccccaaucagaagaucauuaccauaggcagcaucuccauugccaucgggauuaucucucugaugcuccaaauaggaucaaucauuaguaucugggcuagccacuccauucauacagguucucagaacaauacuggcaucugcaaccagagaauaauuacguacgaaaauucgaccugggugaaccacacauaugucaauaucaacaauacuaacguuguggcaggggaggacaaaaccucaguaacacuugccggaaauagcagucuguguuccauuucuggcugggcgaucuacaccaaggauaacagcaucaggauugguuccaaaggggacguguucgucauacgggagccuuuuaucucaugcagucauuuggaaugucgcacuuucuuuuuaacacagggagcucugcuaaaugauaagcacagcaacggcaccgugaaagaccgaucuccauaucgugcccucauguccugcccgcugggcgaggcacccucaccuuacaauagcaaguucgaaaguguugccuggucugcuuccgcaugucaugaugggaugggauggcuuacgauugguaucagcggcccagacaacggggccguggcuguccugaaguauaacggaauaauuacuggcaccaucaaaucguggaagaaacaaaucuugagaacacaggagucugagugcguguguaugaaugguuccugcuuuacuauuaugaccgaugggcccucaaacaaggccgcgaguuacaaaaucuucaagauugaaaagggaaaaguaacaaagagcauagagcucaaugcaccuaacuuuuauuacgaagaguguuccugcuacccagacaccggcaucguuaugugugugugcagggauaauuggcacggcucuaaccggcccugggucagcuucaaucagaaccuggacuaucagauuggguacaucugcucaggaguguuuggugauaauccucgcccagaggacggcgaagggaguuguaacccggugacggucgauggagccaauggcguuaaagguuucuccuauaaguacgggaacggcguguggaucggaagaacuaaaagcaauaggcugcggaagggcuuugagaugauuugggaccccaacggguggacaaauaccgacucugauuucucaguaaaacaagacguggucgcuauaacugauuggaguggauauagcgguuccuuugugcagcacccugaacucacaggcuuagacugcauccgcccauguuucuggguugagcuggugcgagggcuucccagagaaaacaccacgauuuggaccucuggaucgagcaucuccuucugcggcgucaacucagauacagccaauuggaguuggccugacggugcagaguugccauuuacuauugauaaguga

SEQ ID NO: 148042 - RNA, 1413 nt, Artificial Sequence; identical to SEQ ID NO: 146978
  derived and/or modified CDS sequence (opt3) from neuraminidase__InfluenzaA__ADN89834

SEQ ID NO: 148043 - RNA, 1413 nt, Artificial Sequence; identical to SEQ ID NO: 147980
  derived and/or modified CDS sequence (opt3) from neuraminidase__InfluenzaA__ADN89845

SEQ ID NO: 148044 - RNA, 1413 nt, Artificial Sequence; identical to SEQ ID NO: 145509
  derived and/or modified CDS sequence (opt3) from neuraminidase__InfluenzaA__ADN89856

SEQ ID NO: 148045 - RNA, 1410 nt, Artificial Sequence; identical to SEQ ID NO: 147458
  derived and/or modified CDS sequence (opt3) from neuraminidase__InfluenzaA__ADN89867

SEQ ID NO: 148046 - RNA, 1410 nt, Artificial Sequence; identical to SEQ ID NO: 147458
  derived and/or modified CDS sequence (opt3) from neuraminidase__InfluenzaA__ADN89878

SEQ ID NO: 148047 - RNA, 1410 nt, Artificial Sequence; identical to SEQ ID NO: 147458
  derived and/or modified CDS sequence (opt3) from neuraminidase__InfluenzaA__ADN89889

SEQ ID NO: 148048 - RNA, 1410 nt, Artificial Sequence; identical to SEQ ID NO: 147458
  derived and/or modified CDS sequence (opt3) from neuraminidase__InfluenzaA__ADN89900

SEQ ID NO: 148049 - RNA, 1410 nt, Artificial Sequence; identical to SEQ ID NO: 147458
  derived and/or modified CDS sequence (opt3) from neuraminidase__InfluenzaA__ADN89911

SEQ ID NO: 148050 - RNA, 1410 nt, Artificial Sequence
  derived and/or modified CDS sequence (opt3) from neuraminidase__InfluenzaA__ADN89922
augaaccccaaucagaagaucauuaccauaggcagcgugucccugacaaucucuacuauuugcuucuuuaugcagaucgccauucucaucacgaccgucacacuucacuucaaacaguacaaguuuaacucaccuccaaauaaccagguuaugcugugugagccgacuauaaucgaaagaaauauuaccgagaucguguauuugacaaacaccacuauugaaaaagagaucugccccaaguuagcugaauacaggaauuggaguaaaccucagugugacauaacaggguucgcaccauuuagcaaggauaacuccauucggcugucugccggaggugacaucuggguaacccgcgagcccuaugugucgugcgauccugacaaguguuaccaauucgcgcuaggccaggggacgacucucaauaacguccauucaaauaacaccgugcgagaucguacaccauauagaacucugcuuaugaaugagcugggaguucccuuucacuugggcaccaaacaggugugcauugcuuggagcaguuccucuugucaugacgguaaggccuggcuccacgucugcaucacaggggaugacaaaaacgcaaccgccagcuucaucuacaauggaaggcugguggauuccguaguuucauggaguaaggaaauucugcggacgcaggagagcgaaugugugugcauaaacggcacuuguacagucgugaugaccgacggcucugcuuccgggaaagcagauacuaagauccucuuuauugaggagggaaagaucgugcauacaucaaccuuaagcgguagugcccaacacgucgaagagugcucuugcuauccucgcuacccaggcguuagaugugugugcagggacaacuggaaaggguccaaucggccgauaguagauauuaacaucaaggaccacagcaucgugucgucuuacgucuguuccggacuggugggcgacacgccccgcaaaaaugauucaaguagcuccucucauugccuugacccuaacaaugaagagggugggcacggaguuaagggcugggcuuucgaugacggcaacgauguguggauggggcgaaccauuaaugaaacaagcagauugggauaugagacuuuuaaagucaucgaggguuggucaaacccaaagaguaaacugcagauuaauaggcaagugauaguagaccggggcaaccguuccggguacagcggaaucuucucuguugaaggcaagucauguauuaaucgcugcuuuuauguggagcuaaucagagguaggaaggaagagaccgaaguccucuggacaaguaacagcaucguggucuucugugggacuuccggcaccuacggaacaggcucuuggcccgauggggccgaccugaauauuaugccuauauga

SEQ ID NO: 148051 - RNA, 1410 nt, Artificial Sequence; identical to SEQ ID NO: 147458
  derived and/or modified CDS sequence (opt3) from neuraminidase__InfluenzaA__ADN89933

SEQ ID NO: 148052 - RNA, 1410 nt, Artificial Sequence; identical to SEQ ID NO: 147458
  derived and/or modified CDS sequence (opt3) from neuraminidase__InfluenzaA__ADN89955

SEQ ID NO: 148053 - RNA, 1410 nt, Artificial Sequence; identical to SEQ ID NO: 147458
  derived and/or modified CDS sequence (opt3) from neuraminidase__InfluenzaA__ADN89966

SEQ ID NO: 148054 - RNA, 1410 nt, Artificial Sequence; identical to SEQ ID NO: 147458
  derived and/or modified CDS sequence (opt3) from neuraminidase__InfluenzaA__ADN89977

SEQ ID NO: 148055 - RNA, 1410 nt, Artificial Sequence; identical to SEQ ID NO: 147458
  derived and/or modified CDS sequence (opt3) from neuraminidase__InfluenzaA__ADN89988

SEQ ID NO: 148056 - RNA, 1410 nt, Artificial Sequence; identical to SEQ ID NO: 147458
  derived and/or modified CDS sequence (opt3) from neuraminidase__InfluenzaA__ADN89999

SEQ ID NO: 148057 - RNA, 1410 nt, Artificial Sequence; identical to SEQ ID NO: 147458
  derived and/or modified CDS sequence (opt3) from neuraminidase__InfluenzaA__ADN90010

SEQ ID NO: 148058 - RNA, 1410 nt, Artificial Sequence; identical to SEQ ID NO: 147458
  derived and/or modified CDS sequence (opt3) from neuraminidase__InfluenzaA__ADN90021

SEQ ID NO: 148059 - RNA, 1410 nt, Artificial Sequence; identical to SEQ ID NO: 147458
  derived and/or modified CDS sequence (opt3) from neuraminidase__InfluenzaA__ADN90032

SEQ ID NO: 148060 - RNA, 1410 nt, Artificial Sequence; identical to SEQ ID NO: 147458
  derived and/or modified CDS sequence (opt3) from neuraminidase__InfluenzaA__ADN90043

SEQ ID NO: 148061 - RNA, 1410 nt, Artificial Sequence; identical to SEQ ID NO: 147458
  derived and/or modified CDS sequence (opt3) from neuraminidase__InfluenzaA__ADN90054

SEQ ID NO: 148062 - RNA, 1410 nt, Artificial Sequence; identical to SEQ ID NO: 147458
  derived and/or modified CDS sequence (opt3) from neuraminidase__InfluenzaA__ADN90065

SEQ ID NO: 148063 - RNA, 1410 nt, Artificial Sequence; identical to SEQ ID NO: 147458
  derived and/or modified CDS sequence (opt3) from neuraminidase__InfluenzaA__ADN90076

SEQ ID NO: 148064 - RNA, 1410 nt, Artificial Sequence; identical to SEQ ID NO: 147458
  derived and/or modified CDS sequence (opt3) from neuraminidase__InfluenzaA__ADN90087

SEQ ID NO: 148065 - RNA, 1410 nt, Artificial Sequence; identical to SEQ ID NO: 147458
  derived and/or modified CDS sequence (opt3) from neuraminidase__InfluenzaA__ADN90098

SEQ ID NO: 148066 - RNA, 1410 nt, Artificial Sequence; identical to SEQ ID NO: 147458
  derived and/or modified CDS sequence (opt3) from neuraminidase__InfluenzaA__ADN90109

SEQ ID NO: 148067 - RNA, 1410 nt, Artificial Sequence; identical to SEQ ID NO: 147458
  derived and/or modified CDS sequence (opt3) from neuraminidase__InfluenzaA__ADN90120

SEQ ID NO: 148068 - RNA, 1410 nt, Artificial Sequence; identical to SEQ ID NO: 147458
  derived and/or modified CDS sequence (opt3) from neuraminidase__InfluenzaA__ADN90131

SEQ ID NO: 148069 - RNA, 1410 nt, Artificial Sequence; identical to SEQ ID NO: 147458
  derived and/or modified CDS sequence (opt3) from neuraminidase__InfluenzaA__ADN90142

SEQ ID NO: 148070 - RNA, 1410 nt, Artificial Sequence; identical to SEQ ID NO: 147458
  derived and/or modified CDS sequence (opt3) from neuraminidase__InfluenzaA__ADN90153

SEQ ID NO: 148071 - RNA, 1410 nt, Artificial Sequence; identical to SEQ ID NO: 147458
  derived and/or modified CDS sequence (opt3) from neuraminidase__InfluenzaA__ADN90164

SEQ ID NO: 148072 - RNA, 1410 nt, Artificial Sequence; identical to SEQ ID NO: 147458
  derived and/or modified CDS sequence (opt3) from neuraminidase__InfluenzaA__ADN90186

SEQ ID NO: 148073 - RNA, 1410 nt, Artificial Sequence; identical to SEQ ID NO: 147458
  derived and/or modified CDS sequence (opt3) from neuraminidase__InfluenzaA__ADN90197

SEQ ID NO: 148074 - RNA, 1410 nt, Artificial Sequence
  derived and/or modified CDS sequence (opt3) from neuraminidase__InfluenzaA__ADN90208
augaaccccaaucagaagaucauuaccauaggcagcgugucccugacaaucucuacuauuugcuucuuuaugcagaucgccauucucaucacgaccgucacacuucacuucaaacaguacaaguuuaacucaccuccaaauaaccagguuaugcugugugagccgacuauaaucgaaagaaauauuaccgagaucguguauuugacaaacaccacuauugaaaaagagaucugccccaaguuagcugaauacaggaauuggaguaaaccucagugugacauaacaggguucgcaccauuuagcaaggauaacuccauucggcugucugccggaggugacaucuggguaacccgcgagcccuaugugucgugcgauccugacaaguguuaccaauucgcgcuaggccaggggacgacucucaauaacguccauucaaauaacaccgugcgagaucguacaccauauagaacucugcuuaugaaugagcugggaguucccuuucacuugggcaccaaacaggugugcauugcuuggagcaguuccucuugucaugacgguaaggccuggcuccacgucugcaucacaggggaugacaaaaacgcaaccgccagcuucaucuacaauggaaggcugguggauuccguaguuucauggaguaaggaaauucugcggacgcaggagagcgaaugugugugcauaaacggcacuuguacagucgugaugaccgacggcucugcuuccgggaaagcagauacuaagauccucuuuauugaggagggaaagaucgugcauacaucaaccuuaagcgguagugcccaacacgucgaagagugcucuugcuauccucgcuacccaggcguuagaugugugugcagggacaacuggaaaggguccaaucggccgauaguagauauuaacaucaaggaccacagcaucgugucgucuuacgucuguuccggacuggugggcgacacgccccgcaaaaaugauucaaguagcuccucucauugccuugacccuaacaaugaagagggugggcacggaguuaagggcugggcuuucgaugacggcaacgauguguggauggggcgaaccauuaaugaaacaagcagauugggauaugagacuuuuaaagucaucgaggguuggucaaacccaaagaguaaacugcagauuaauaggcaagugauaguagaccgguccaaccguagcggcuacucugggaucuucucaguugaaggaaagaguuguauuaaucgcugcuuuuauguggagcuaaucagaggcaggaaggaagagaccgaaguccucuggacaagcaacuccaucguggucuucugugguacuucugggaccuacggcacaggaucguggcccgauggcgccgaccugaaucuuaugccuauuuga

SEQ ID NO: 148075 - RNA, 1410 nt, Artificial Sequence; identical to SEQ ID NO: 147458
  derived and/or modified CDS sequence (opt3) from neuraminidase__InfluenzaA__ADN90219

SEQ ID NO: 148076 - RNA, 1410 nt, Artificial Sequence
  derived and/or modified CDS sequence (opt3) from neuraminidase__InfluenzaA__ADN92469
augaaccccaaucagaagaucauuaccauaggcagcgugucccugacaaucucuacuauuugcuucuuuaugcagaucgccauucucaucacgaccgucacacuucacuucaaacaguacgaguuuaacucaccuccaaauaaccagguuaugcugugugaaccgacuauaaucgagagaaauauuaccgaaaucguguauuugacaaacaccacuauugagaaggaaaucugccccaaauuagcugaguacaggaauuggaguaagccucagugugacauaacaggguucgcaccauuuagcaaagauaacuccauucggcugucugccggaggugacaucuggguaacccgcgagcccuaugugucgugcgauccugacaaguguuaccaauucgcgcuaggccaggggacgacucucaauaacguccauucaaauaacaccgugcgagaucguacaccauauagaacucugcuuaugaaugaacugggaguucccuuucacuugggcaccaaacaggugugcauugcuuggagcaguuccucuugucaugacgguaaggccuggcuccacgucugcaucacaggggaugacaagaacgcaaccgccagcuucaucuacaauggaaggcugguggauuccguaguuucauggaguaaagagauucugcggacgcaggaaagcgagugugugugcauaaacggcacuuguacagucgugaugaccgacggcucugcuuccgagaaggcagauacuaaaauccucuuuauugaagaggggaagaucgugcauacaucaaccuuaagcggaagugcccaacacgucgaagagugcucuugcuauccucgcuacccagguguuagaugugugugcagggacaacuggaagggcuccaaucggccgauaguagauauuaacaucaaagaccacagcaucgugucgucuuacgucuguuccgggcuggugggagacacgccccgcaagaaugauucaaguagcuccucucauugccuugacccuaacaaugaagagggcggucacgggguuaaaggaugggcuuucgaugacggcaacgauguguggaugggccgaaccauuagcgagaagucaagauugggguaugaaacauuuaaagucaucgagggauggaguaauccaaaguccaaacugcagauuaacaggcaagugauaguagaccgggguaaucguagcggcuacucugggaucuucucaguugaaggaaagaguuguauuaaccgcugcuuuuauguggagcuaaucagaggcaggaaggaagagacugagguccucuggaccagcaauuccaucguggucuucugugguacaucugggacuuacggcaccggaucguggcccgauggcgccgacauuaaccugaugccuauauga

SEQ ID NO: 148077 - RNA, 1410 nt, Artificial Sequence; identical to SEQ ID NO: 147303
  derived and/or modified CDS sequence (opt3) from neuraminidase__InfluenzaA__ADN92480

SEQ ID NO: 148078 - RNA, 1410 nt, Artificial Sequence; identical to SEQ ID NO: 147303
  derived and/or modified CDS sequence (opt3) from neuraminidase__InfluenzaA__ADN92491

SEQ ID NO: 148079 - RNA, 1410 nt, Artificial Sequence
  derived and/or modified CDS sequence (opt3) from neuraminidase__InfluenzaA__ADN92502
augaaccccaaucagaagaucauuaccauaggcagcgugucccugacaaucucuacuauuugcuucuuuaugcagaucgccauucucaucacgaccgucacacuucacuucaaacaguacgaguuuaacucaccuccaaauaaccagguuaugcugugugaaccgacuauaaucgagagaaauauuaccgaaaucguguauuugacaaacaccacuauugagaaggaaaucugccccaaauuagcugaguacaggaauuggaguaagccucagugugacauaacaggguucgcaccauuuagcaaagauaacuccauucggcugucugccggaggugacaucuggguaacccgcgagcccuaugugucgugcgauccugacaaguguuaccaauucgcgcuaggccaggggacgacucucaauaacguccauucaaauaacaccgugcgagaucguacaccauauagaacucugcuuaugaaugaacugggaguucccuuucacuugggcaccaaacaggugugcauugcuuggagcaguuccucuugucaugacgguaaggccuggcuccacgucugcaucacaggggaugacaagaacgcaaccgccagcuucaucuacaauggaaggcugguggauuccguaguuucauggaguaaagagauucugcggacgcaggaaagcgagugugugugcauaaacggcacuuguacagucgugaugaccgacggcucugcuuccgggaaggcagauacuaaaauccucuuuauugaggaaggaaagaucgugcauacaucaaccuuaagcgguagugcccaacacgucgaggaaugcucuugcuauccucgcuacccaggcguuagaugugugugcagggacaacuggaagggguccaaucggccgauaguagauauuaacaucaaagaccacagcaucgugucgucuuacgucuguuccggacuggugggcgacacgccccgcaagaaugauucaaguagcuccucucauugccuugacccuaacaaugaggaaggugggaacggaguuaaaggcugggcuuucgaugacggcaaugauguguggauggggcgaaccauuagcgagaagucaagauugggauaugagacauuuaaagucaucgaagguuggaguaacccaaaguccaaacugcagauuaauaggcaagugauaguagaccggggcaaccguagcggguacucuggaaucuucucaguugagggcaagaguuguauuaaucgcugcuuuuauguggaacuaaucagagguaggaaggaggaaaacgagguccucuggacuagcaauuccaucguggucuucugugggaccucuggcacauacggaacuggcucguggcccgauggggccgacauuaaccugaugccuauauga

SEQ ID NO: 148080 - RNA, 1410 nt, Artificial Sequence; identical to SEQ ID NO: 144786
  derived and/or modified CDS sequence (opt3) from neuraminidase__InfluenzaA__ADN92512

SEQ ID NO: 148081 - RNA, 1410 nt, Artificial Sequence; identical to SEQ ID NO: 144786
  derived and/or modified CDS sequence (opt3) from neuraminidase__InfluenzaA__ADN92522

SEQ ID NO: 148082 - RNA, 1410 nt, Artificial Sequence; identical to SEQ ID NO: 144786
  derived and/or modified CDS sequence (opt3) from neuraminidase__InfluenzaA__ADN92532

SEQ ID NO: 148083 - RNA, 1410 nt, Artificial Sequence; identical to SEQ ID NO: 144786
  derived and/or modified CDS sequence (opt3) from neuraminidase__InfluenzaA__ADN92542

SEQ ID NO: 148084 - RNA, 1410 nt, Artificial Sequence; identical to SEQ ID NO: 144786
  derived and/or modified CDS sequence (opt3) from neuraminidase__InfluenzaA__ADN92552

SEQ ID NO: 148085 - RNA, 1410 nt, Artificial Sequence; identical to SEQ ID NO: 144786
  derived and/or modified CDS sequence (opt3) from neuraminidase__InfluenzaA__ADO00733

SEQ ID NO: 148086 - RNA, 1410 nt, Artificial Sequence
  derived and/or modified CDS sequence (opt3) from neuraminidase__InfluenzaA__ADO00743
augaaccccaaucagaagaucauuaccauaggcagcgugugcaugacaaucgggauggccaaccugauucuccaaaucggaaauauuaucuccauauggaucucucacucaauucagcuugguaaccagaaucagaucgagacuuguaaccaaagugucauuacguacgaaaauaacaccuggguuaaucagacauaugugaacaucagcaauacuaacuucgcugcaggccaguccguagugucugccaaacuggcgggaaauucgucauugugcccugucagcggaugggcuauauacaguaaggacaacuccauuagaaucggcucuaaaggugauguguuuguuauuagggagccauucaucagcuguuccccguuagaaugccggaccuuuuuccugacacagggggcccuacucaaugacaagcauucaaacggaaccaucaaagaucgcagucccuaucgaacucugaugagcuguccuauuggcgaggugccaucucccuacaacucccguuuugaaucagucgcauggagcgccagugcuugccacgacggcauaaauuggcuuacaaucgggauuucuggaccugauaacggugcaguggccguacugaaguauaauggcaucauaaccgacacgauuaaguccuggagaaacaauaucuugaggacucaagagagcgagugugcuugcguuaacgggucguguuucaccgugaugacagauggaccaucugacggccaggccuccuacaaaaucuuucggauugaaaaggguaaaaucgucaagucaguggagaugaaugcgcccaacuaucauuacgaagagugcaguuguuacccugauagcuccgagauuacuugcgugugccgcgacaauuggcacgggucuaacagaccaugggucagcuucaaucagaaccucgaauaucagauaggauacaucuguucaggcauuuuuggcgauaauccgaggcccaacgacaaaaccgggaguugcggaccuguuuccagcaauggugcaaacggcgugaagggguucucuuuuaaguauggaaacggcguauggaucggucggacaaaaucaaucaguagccgcaauggguucgagaugauuugggauccaaacggcuggaccggaacggacaauaacuuuuccauacgacaagacaucgugggcauuaaugaauggucuggguacucggggagcuucguccagcaucccgagcugacuggucuggauuguaucagaccuugcuucuggguggaacucauuaggggccggccaaaggagaacacaaucuggaccuccgggucaaguauaucuuuuuguggaguuaauagcgacacugugggcugguccuggcccgauggugccgaguuaccguucacaaucgacaaauga

SEQ ID NO: 148087 - RNA, 1410 nt, Artificial Sequence; identical to SEQ ID NO: 145963
  derived and/or modified CDS sequence (opt3) from neuraminidase__InfluenzaA__ADO00753

SEQ ID NO: 148088 - RNA, 1410 nt, Artificial Sequence; identical to SEQ ID NO: 144786
  derived and/or modified CDS sequence (opt3) from neuraminidase__InfluenzaA__ADO12146

SEQ ID NO: 148089 - RNA, 1410 nt, Artificial Sequence; identical to SEQ ID NO: 144786
  derived and/or modified CDS sequence (opt3) from neuraminidase__InfluenzaA__ADO12156

SEQ ID NO: 148090 - RNA, 1410 nt, Artificial Sequence; identical to SEQ ID NO: 144786
  derived and/or modified CDS sequence (opt3) from neuraminidase__InfluenzaA__ADO12166

SEQ ID NO: 148091 - RNA, 1410 nt, Artificial Sequence; identical to SEQ ID NO: 144786
  derived and/or modified CDS sequence (opt3) from neuraminidase__InfluenzaA__ADO12176

SEQ ID NO: 148092 - RNA, 1410 nt, Artificial Sequence; identical to SEQ ID NO: 144786
  derived and/or modified CDS sequence (opt3) from neuraminidase__InfluenzaA__ADO12186

SEQ ID NO: 148093 - RNA, 1410 nt, Artificial Sequence; identical to SEQ ID NO: 144786
  derived and/or modified CDS sequence (opt3) from neuraminidase__InfluenzaA__ADO12196

SEQ ID NO: 148094 - RNA, 1410 nt, Artificial Sequence; identical to SEQ ID NO: 144786
  derived and/or modified CDS sequence (opt3) from neuraminidase__InfluenzaA__ADO12206

SEQ ID NO: 148095 - RNA, 1410 nt, Artificial Sequence; identical to SEQ ID NO: 144786
  derived and/or modified CDS sequence (opt3) from neuraminidase__InfluenzaA__ADO12216

SEQ ID NO: 148096 - RNA, 1410 nt, Artificial Sequence; identical to SEQ ID NO: 144786
  derived and/or modified CDS sequence (opt3) from neuraminidase__InfluenzaA__ADO12226

SEQ ID NO: 148097 - RNA, 1410 nt, Artificial Sequence; identical to SEQ ID NO: 144786
  derived and/or modified CDS sequence (opt3) from neuraminidase__InfluenzaA__ADO12246

SEQ ID NO: 148098 - RNA, 1410 nt, Artificial Sequence; identical to SEQ ID NO: 144786
  derived and/or modified CDS sequence (opt3) from neuraminidase__InfluenzaA__ADO12266

SEQ ID NO: 148099 - RNA, 1410 nt, Artificial Sequence
  derived and/or modified CDS sequence (opt3) from neuraminidase__InfluenzaA__ADO12276
augaaccccaaucagaagaucauuaccauaggcagcgugugcaugacaaucgggauggccaaccugauucuccaaaucggaaauauuaucuccauauggaucucucacucaauucagcuugguaaccagaaucagaucgagacuuguaaccaaagugucauuacguacgaaaauaacaccuggguuaaucagacauaugugaacaucagcaauacuaacuucgcugcaggccaguccguagugucugucaaacuggccgggaauagcucauugugcccugugagcggaugggcgauauacaguaaggacaacuccauuagaaucggcucuaaaggugauguuuuugugauuagggagccauucaucagcuguuccccguuagaaugccggaccuuuuuccugacacagggggcucuacucaaugacaagcauucaaacggaaccaucaaagaucgcagucccuaucgaacucugaugagcuguccuauuggcgaggucccaucucccuacaacucccguuuugaaucaguggccuggagcgcaagugccugccacgacggcauaaauuggcuuacaaucgggauuucuggaccugauaacggugcuguagcaguucugaaguauaauggcaucauaaccgacacgauuaaguccuggagaaacaauaucuugaggacucaagagagcgagugugccugcgugaacgggucguguuucaccgucaugacagauggaccaucugacggccaggcuuccuacaaaaucuuucggauugaaaaggguaaaaucgugaagucaguggagaugaaugcccccaacuaucauuacgaagagugcaguuguuacccugauagcuccgagauuacuugcgucugccgcgacaauuggcacgggucuaacagaccauggguuagcuucaaucagaaccucgaauaucagauaggauacaucuguucaggcauuuuuggcgauaauccgaggcccaacgacaaaaguggguccugcggaccugugagcucuaauggugcgaacggcguaaagggguucucauuuaaguauggaaacggcguguggaucggucggaccaaaaguaucagcucccgcaauggguucgagaugauuugggauccaaacggcuggacaggaaccgacaauaacuuuucuauaaagcaagacaucgucggcauuaaugaauggucgggguacagcggauccuucgugcagcaucccgagcugacgggucuggauuguauccgaccuugcuucuggguugaacucauuagaggcaggccaaaagagaacacuaucuggacaucagggaguucuauaucguuuuguggagucaauuccgacaccgugggcuggucauggcccgauggugcagaguuaccguucacuaucgacaaguga

SEQ ID NO: 148100 - RNA, 1410 nt, Artificial Sequence; identical to SEQ ID NO: 144786
  derived and/or modified CDS sequence (opt3) from neuraminidase__InfluenzaA__ADO12286

SEQ ID NO: 148101 - RNA, 1410 nt, Artificial Sequence; identical to SEQ ID NO: 144786
  derived and/or modified CDS sequence (opt3) from neuraminidase__InfluenzaA__ADO12296

SEQ ID NO: 148102 - RNA, 1410 nt, Artificial Sequence; identical to SEQ ID NO: 144786
  derived and/or modified CDS sequence (opt3) from neuraminidase__InfluenzaA__ADO12306

SEQ ID NO: 148103 - RNA, 1410 nt, Artificial Sequence
  derived and/or modified CDS sequence (opt3) from neuraminidase__InfluenzaA__ADO12316
augaaccccaaucagaagaucauuaccauaggcagcgugugcaugacaaucgggauggccaaccugauucuccaaaucggaaauauuaucuccauauggaucucucacucaauucagcuugguaaccagaaucagaucgagacuuguaaccaaagugucauuacguacgaaaauaacaccuggguuaaucagacauaugugaacaucagcaauacuaacuucgcugcaggccaguccguagugucugucaaacuggccggaaauucgucauugugcccugugagcggaugggcgauauacaguaaggacaacuccauuagaaucggcucuaaaggugauguuuuugugauuagggagccauucaucagcuguuccccguuagaaugccggaccuuuuuccugacacagggggcucuacucaaugacaagcauucaaacggaaccaucaaagaucgcagucccuaucgaacucugaugagcuguccuauuggcgaggucccaucucccuacaacucccguuuugaaucaguggccuggagcgcaagugccugccacgacggcauaaauuggcuuacaaucgggauuucuggaccugauaacggugcuguagcaguucugaaguauaauggcaucauaaccgacacgauuaaguccuggagaaacaauaucuugaggacucaagagagcgagugugccugcgugaacgggucguguuucaccgucaugacagauggaccaucugacggccaggcuuccuacaaaaucuuucggauugaaaaggguaaaaucgugaagucaguggagaugaaugcccccaacuaucauuacgaagagugcaguuguuacccugauagcuccgagauuacuugcgucugccgcgacaauuggcacgggucuaacagaccauggguuagcuucaaucagaaccucgaauaucagauaggauacaucuguucaggcauuuuuggcgauaauccgaggcccaacgacaaaaccgggaguugcggaccuguguccagcaauggugcgaacggcguaaagggguucucuuuuaaguauggagauggcguguggaucggucggacaaaaucaaucaguagccgcaacggguucgagaugauuugggacccaaauggcuggaccggaacggacaacaauuuuuccauaaagcaagauaucgucggcauuaacgaauggucuggguacucggggagcuucgugcagcaucccgagcugacuggucuggacuguauccgaccuugcuucuggguugaacucauuagaggcaggccaaaagagaauacaaucuggaccuccgggucaaguauaucuuuuuguggagugaacagcgauacugucggcugguccuggcccgacggugcagaguuaccguucacaaucgauaaguga

SEQ ID NO: 148104 - RNA, 1410 nt, Artificial Sequence; identical to SEQ ID NO: 144786
  derived and/or modified CDS sequence (opt3) from neuraminidase__InfluenzaA__ADO12326

SEQ ID NO: 148105 - RNA, 1410 nt, Artificial Sequence; identical to SEQ ID NO: 144786
  derived and/or modified CDS sequence (opt3) from neuraminidase__InfluenzaA__ADO12336

SEQ ID NO: 148106 - RNA, 1410 nt, Artificial Sequence; identical to SEQ ID NO: 144786
  derived and/or modified CDS sequence (opt3) from neuraminidase__InfluenzaA__ADO12346

SEQ ID NO: 148107 - RNA, 1410 nt, Artificial Sequence; identical to SEQ ID NO: 144786
  derived and/or modified CDS sequence (opt3) from neuraminidase__InfluenzaA__ADO12356

SEQ ID NO: 148108 - RNA, 1410 nt, Artificial Sequence; identical to SEQ ID NO: 144786
  derived and/or modified CDS sequence (opt3) from neuraminidase__InfluenzaA__ADO12366

SEQ ID NO: 148109 - RNA, 1410 nt, Artificial Sequence; identical to SEQ ID NO: 144786
  derived and/or modified CDS sequence (opt3) from neuraminidase__InfluenzaA__ADO12376

SEQ ID NO: 148110 - RNA, 1410 nt, Artificial Sequence; identical to SEQ ID NO: 144786
  derived and/or modified CDS sequence (opt3) from neuraminidase__InfluenzaA__ADO12386

SEQ ID NO: 148111 - RNA, 1410 nt, Artificial Sequence; identical to SEQ ID NO: 144786
  derived and/or modified CDS sequence (opt3) from neuraminidase__InfluenzaA__ADO12396

SEQ ID NO: 148112 - RNA, 1410 nt, Artificial Sequence; identical to SEQ ID NO: 144786
  derived and/or modified CDS sequence (opt3) from neuraminidase__InfluenzaA__ADO12406

SEQ ID NO: 148113 - RNA, 1410 nt, Artificial Sequence; identical to SEQ ID NO: 145553
  derived and/or modified CDS sequence (opt3) from neuraminidase__InfluenzaA__ADO12416

SEQ ID NO: 148114 - RNA, 1410 nt, Artificial Sequence; identical to SEQ ID NO: 144786
  derived and/or modified CDS sequence (opt3) from neuraminidase__InfluenzaA__ADO12426

SEQ ID NO: 148115 - RNA, 1410 nt, Artificial Sequence; identical to SEQ ID NO: 144786
  derived and/or modified CDS sequence (opt3) from neuraminidase__InfluenzaA__ADO12436

SEQ ID NO: 148116 - RNA, 1410 nt, Artificial Sequence; identical to SEQ ID NO: 144786
  derived and/or modified CDS sequence (opt3) from neuraminidase__InfluenzaA__ADO12446

SEQ ID NO: 148117 - RNA, 1410 nt, Artificial Sequence; identical to SEQ ID NO: 144786
  derived and/or modified CDS sequence (opt3) from neuraminidase__InfluenzaA__ADO12456

SEQ ID NO: 148118 - RNA, 1410 nt, Artificial Sequence; identical to SEQ ID NO: 144786
  derived and/or modified CDS sequence (opt3) from neuraminidase__InfluenzaA__ADO12466

SEQ ID NO: 148119 - RNA, 1410 nt, Artificial Sequence; identical to SEQ ID NO: 144786
  derived and/or modified CDS sequence (opt3) from neuraminidase__InfluenzaA__ADO12476

SEQ ID NO: 148120 - RNA, 1410 nt, Artificial Sequence; identical to SEQ ID NO: 144786
  derived and/or modified CDS sequence (opt3) from neuraminidase__InfluenzaA__ADO12486

SEQ ID NO: 148121 - RNA, 1410 nt, Artificial Sequence; identical to SEQ ID NO: 144786
  derived and/or modified CDS sequence (opt3) from neuraminidase__InfluenzaA__ADO12496

SEQ ID NO: 148122 - RNA, 1410 nt, Artificial Sequence; identical to SEQ ID NO: 144786
  derived and/or modified CDS sequence (opt3) from neuraminidase__InfluenzaA__ADO12506

SEQ ID NO: 148123 - RNA, 1410 nt, Artificial Sequence; identical to SEQ ID NO: 144786
  derived and/or modified CDS sequence (opt3) from neuraminidase__InfluenzaA__ADO12516

SEQ ID NO: 148124 - RNA, 1410 nt, Artificial Sequence; identical to SEQ ID NO: 144786
  derived and/or modified CDS sequence (opt3) from neuraminidase__InfluenzaA__ADO12526

SEQ ID NO: 148125 - RNA, 1410 nt, Artificial Sequence; identical to SEQ ID NO: 144786
  derived and/or modified CDS sequence (opt3) from neuraminidase__InfluenzaA__ADO12536

SEQ ID NO: 148126 - RNA, 1410 nt, Artificial Sequence; identical to SEQ ID NO: 144786
  derived and/or modified CDS sequence (opt3) from neuraminidase__InfluenzaA__ADO12546

SEQ ID NO: 148127 - RNA, 1410 nt, Artificial Sequence; identical to SEQ ID NO: 144786
  derived and/or modified CDS sequence (opt3) from neuraminidase__InfluenzaA__ADO12556

SEQ ID NO: 148128 - RNA, 1410 nt, Artificial Sequence; identical to SEQ ID NO: 144786
  derived and/or modified CDS sequence (opt3) from neuraminidase__InfluenzaA__ADO12566

SEQ ID NO: 148129 - RNA, 1410 nt, Artificial Sequence; identical to SEQ ID NO: 144786
  derived and/or modified CDS sequence (opt3) from neuraminidase__InfluenzaA__ADO12576

SEQ ID NO: 148130 - RNA, 1410 nt, Artificial Sequence
  derived and/or modified CDS sequence (opt3) from neuraminidase__InfluenzaA__ADO12586
augaaccccaaucagaagaucauuaccauaggcagcgugugcaugacaaucgggauggccaaccugauucuccaaaucggaaauauuaucuccauauggaucucucacucaauucagcuugguaaccagaaucagaucgagacuuguaaccaaagugucauuacguacgaaaauaacaccuggguuaaucagacauaugugaacaucagcaauacuaacuucgcugcaggccaguccguagugucugucaaacuggccgggaauagcucauugugcccugugagcggaugggcgauauacaguaaggacaacuccauuagaaucggcucuaaaggugauguuuuugugauuagggagccauucaucagcuguuccccguuagaaugccggaccuuuuuccugacacagggggcucuacucaaugacaagcauucaaacggaaccaucaaagaucgcagucccuaucgaacucugaugagcuguccuauuggcgaggucccaucucccuacaacucccguuuugaaucaguggccuggagcgcaagugccugccacgacggcauaaauuggcuuacaaucgggauuucuggaccugauuccggugcuguagcaguucugaaguauaacggcaucauaaccgacacgauuaagagcuggagaaauaacaucuugaggacucaagagucggagugugccugcgugaaugggucuuguuucaccgucaugacagauggaccauccgacggccaggcuucauacaaaaucuuucggauugaaaaggguaaaaucgugaagaguguggagaugaacgcccccaauuaucauuacgaagagugcagcuguuacccugauuccucugagauuacuugcgucugccgcgacaacuggcacgggagcaauagaccauggguuucauucaaccagaaucucgaauaucagauaggauacaucuguaguggcauuuuuggcgauaacccgaggcccaaugacaaaaccggguccugcggaccugugagcucuaacggugcgaauggcguaaagggguucucauuuaaguauggaaacggcguguggaucggucggacaaaaaguaucagcucccgcaacggguucgagaugauuugggauccaaauggcuggaccggaacggacaacaauuuuucuauaaagcaagacaucgucggcauuaacgaauggucgggguacagcggauccuucgugcagcaucccgagcugacuggucuggauuguauccgaccuugcuucuggguugaacucauuagaggcaggccaaaagagaauacaaucuggaccucagggaguucuauaucguuuuguggagugaacuccgacacugucggcuggucauggcccgauggugcagaguuaccguucacaaucgacaaguga

SEQ ID NO: 148131 - RNA, 1410 nt, Artificial Sequence; identical to SEQ ID NO: 148130
  derived and/or modified CDS sequence (opt3) from neuraminidase__InfluenzaA__ADO12596

SEQ ID NO: 148132 - RNA, 1410 nt, Artificial Sequence; identical to SEQ ID NO: 144786
  derived and/or modified CDS sequence (opt3) from neuraminidase__InfluenzaA__ADO12606

SEQ ID NO: 148133 - RNA, 1410 nt, Artificial Sequence; identical to SEQ ID NO: 144786
  derived and/or modified CDS sequence (opt3) from neuraminidase__InfluenzaA__ADO12616

SEQ ID NO: 148134 - RNA, 1410 nt, Artificial Sequence; identical to SEQ ID NO: 144786
  derived and/or modified CDS sequence (opt3) from neuraminidase__InfluenzaA__ADO12626

SEQ ID NO: 148135 - RNA, 1410 nt, Artificial Sequence; identical to SEQ ID NO: 144786
  derived and/or modified CDS sequence (opt3) from neuraminidase__InfluenzaA__ADO14355

SEQ ID NO: 148136 - RNA, 1401 nt, Artificial Sequence
  derived and/or modified CDS sequence (opt3) from neuraminidase__InfluenzaA__ADO21028
augaaccccaaucagaagaucauugccauaggcagcgugucccugaccaucgcuacaauuugcuuccucaugcaaaucgcaauucuugccacuacgaugacccugcacuuuaaacagaacgaguguucuaauccuucaaacaaucaggucguuccaugcgaaccgacaaucauagagagaaacaucgugcauuugaauaguacuaccauugaaaaggagaucugucccaaaguagcggaauacaagaacuggagcaaaccucagugccaaauuacaggguccgcuccauucucuaagggaaauucgaucagguuaucagccgguggcgacauaugggugacccgggagcccuaugucagcuguagucuggggaagugcuaccaguuugcacuaggacagggcacuacacucaaaaacaagcacuccaaugguaccacgcaugaucgcgugccucaccgaacucugcuuaugucugagcuggggguuccauuccauuugggaaccaaacagguguguauugccuggagcuccucaaguugccacgacggcaaggcuuggcuccacgucugugugacaggcgaugacaaaaacgcaacugccagcaucauuuaugaugggaugcugguagacucuaucggauccuggucaaagaauauccugcguacccaagaaagcgagugcguuuguauuaacgguacaugcaccguggucaugacggauggcagugcuucugggaaggccgacacuagaauacucuuuaucagggaaggaaaaauugugcauaucucccccuuaagcggcucggcgcagcacguggaggagugcucuuguuacccucgguauccagaaguccgcugcguuuguagagauaauuggaaggguuccaacaggccggugcuguacauaaacauggcagacuauucaauugagaguagcuacguaugcuccgggcuugugggagauacaccccggaaugacgauucuuacagcucaaguaacugucgcgacccuaauaacgaacgaggcgccccaggcgucaaagggugggcuuucgacaauggaaacgauaucuggauggguagaaccaucaaggaggacuccaggagcggcuaugaaacuuuucgggugguugggggauggacaaccgccaauucuaaaucacagauuaaccgucaggugaucgucgauagugacaauuggagcggcuacuccgguauuuucucuguggaggggaagaacugcauaaaucgcuguuuuuauguagaguugaucagaggcaggccccaagaaacgcggguuugguggaccucgaacagcauuaucguguucugcggaacauccggcacuuacgggaccggaucauggccugauggugcaaauaucaacuuuaugccaauuuga

SEQ ID NO: 148137 - RNA, 1401 nt, Artificial Sequence
  derived and/or modified CDS sequence (opt3) from neuraminidase__InfluenzaA__ADO21039
augaaccccaaucagaagaucauugccauaggcagcgugucccugaccaucgcuacaauuugcuuccucaugcaaaucgcaauucuugccacuacgaugacccugcacuuuaaacagaacgaguguucuaauccuucaaacaaucaggucguuccaugcgaaccgacaaucauagagagaaacaucgugcauuugaauaguacuaccauugaaaaggagaucugucccaaaguagcggaauacaagaacuggagcaaaccucagugccaaauuacaggguccgcuccauucucuaagggaaauucgaucagguuaucagccgguggcgacauaugggugacccgggagcccuaugucagcuguagucuggggaagugcuaccaguuugcacuaggacagggcacuacacucaaaaacaagcacuccaaugguaccacgcaugaucgcgacccucaccgaacucugcuuaugucugagcugggggugccauuccauuugggaaccaaacagguuuguauugccuggagcuccucaaguugccacgauggcaaggcuuggcuccacgugugugucacaggcgacgauaaaaacgcaacugccagcaucauuuaugacgggaugcugguggauucuaucggauccuggucaaagaauauccugcguacccaagaaagcgagugcguauguauuaacgguacaugcaccguugugaugacggacggcagugcuucugggaaggccgauacuagaauacucuuuaucagggaaggaaaaauuguccauaucucccccuuaagcggcucggcgcagcacguggaggagugcucuuguuacccucgguauccagaagugcgcugcgucuguagagacaauuggaaggguuccaacaggccgguucuguacauaaacauggcagauuauacaauugagucaaguuacgugugcagcgggcuuguaggagacacuccccggaaugaugacuccuacucuagcucaaacugucgcgacccuaauaacgaacgaggcgccccaggcgugaaagggugggcuuucgauaauggaaacgacaucuggauggguagaaccaucaaggaggauaguagguccggcuaugaaacauuucgggucguugggggauggaccacggccaauagcaaaucucagauuaaccgucaggugaucguggacucagauaauuggaguggcuacagcgguauuuucuccgucgaggggaagaacugcauaaaucgcuguuuuuauguggaguugaucagaggcaggccccaagaaacccggguaugguggacaucuaacucgauuaucguuuucugcggaacuagcggcaccuacgggacaggauccuggccugacggugcaaauaucaacuuuaugccaauuuga

SEQ ID NO: 148138 - RNA, 1401 nt, Artificial Sequence
  derived and/or modified CDS sequence (opt3) from neuraminidase__InfluenzaA__ADO21050
augaaccccaaucagaagaucauugccauaggcagcgugucccugaccaucgcuacaauuugcuuccucaugcaaaucgcaauucuugccacuacgaugacccugcacuuuaaacagaacgaguguucuaauccuucaaacaaucaggucguuccaugcgaaccgacaaucauagagagaaacaucgugcauuugaauaguacuaccauugaaaaggagaucugucccaaaguagcggaauacaagaacuggagcaaaccucagugccaaauuacaggguccgcuccauucucuaagggaaauucgaucagguuaucagccgguggcgacauaugggugacccgggagcccuaugucagcuguagucuggggaagugcuaccaguuugcacuaggacagggcacuacacucaaaaacaagcacuccaaugguaccacgcaugaucgcgggccucaccgaacucugcuuaugucugagcugggagugccauuccauuugggcaccaaacagguuuguauugccuggagcuccucaaguugccacgacggcaaggcuuggcuccacgugugugucacaggggaugacaaaaacgcaacugccagcaucauuuaugauggaaugcugguggacucuaucgguuccuggucaaagaauauccugcguacccaagaaagcgagugcguauguauuaacggcacaugcaccguugugaugacggaugggagugcuucuggaaaggccgacacuagaauacucuuuaucagggaaggcaaaauuguccauaucucccccuuaagcgguucggcgcagcacguggaggagugcucuuguuacccucgguauccagaagugcgcugcgucuguagagauaauuggaagggguccaacaggccgguucuguacauaaacauggcagacuauucaauugagaguagcuacgugugcuccggacuuguaggcgauacaccccggaaugacgauucuuacagcucaaguaacugucgcgacccuaauaacgaauccggcgccccaggggugaaaggaugggcuuucgacaaugguaacgauaucuggaugggccgaaccaucaaggaggacagcagaucuggguaugaaacuuuuagggucgugggaggcuggacaaccgccaauucaaaaagucagauuaaccggcagguuaucguggauagcgacaauugguccgguuacucugggauuuucucggucgagggcaagaacugcauaaaucguuguuuuuauguggaguugauccgcggaagaccccaagaaacgaggguaugguggaccagcaacuccauuaucguuuucugcggcacaucagggacuuacggaaccgguaguuggccugauggcgcaaauaucaacuuuaugccaauuuga

SEQ ID NO: 148139 - RNA, 1410 nt, Artificial Sequence
  derived and/or modified CDS sequence (opt3) from neuraminidase__InfluenzaA__ADO25095
augaaccccaaucagaagaucauuaccauaggcagcgugugcaugacaaucgggauggccaaccugauucuccaaaucggaaauauuaucuccauauggaucucucacucaauucagcuugguaaccagaaucagaucgagacuuguaaccaaaguauuaucacguacgaaaauaacaccugggucaaucagacauauguuaacauaagcaauacuaacuucgcugcaggccaguccgugguaucugugaaacuggccggaaauucgucauugugcccugucagcgggugggcgauuuacaguaaggacaacuccaucagaauuggcucuaaaggugauguguuuguuaucagggagccauucaucagcuguuccccguuagaaugccggaccuuuuuccugacacagggggcucuacucaaugacaagcauucaaacggaaccauuaaagaucgcagucccuaucgaacucugaugagcuguccuauaggcgaggugccaucucccuacaacucccguuuugaaucagucgccuggagcgcaagugccugccacgacggcaucaauuggcuuacaauugggaucucuggaccugauaacggugcuguggcaguacugaaguauaauggcauaauuaccgacacgaucaaguccuggagaaacaauaucuugaggacucaagagagcgagugugccugcguuaacgggucguguuucaccgugaugacagauggaccaucugacggccaggcuuccuacaaaauuuuucggaucgaaaaggguaaaauugucaagucaguggagaugaaugcccccaacuaucauuacgaagagugcaguuguuacccugauagcuccgagauaacuugcgugugccgcgacaauuggcacgggucuaacagaccaugggucagcuucaaucagaaccucgaauaucagaucggauacauuuguucaggcaucuuuggcgauaauccgaggcccaacgacaaaaccgggaguugcggaccuguuuccagcaauggugcgaacggcgugaagggguucucuuuuaaguauggaaacggcguauggaucggucggacaaaaucaauuaguagccgcuccggguucgagaugauaugggauccaaauggcuggaccggaacggacaacaauuuuucuaucaagcaagacauugugggcaucaacgaauggucgggguacagcggauccuucguccagcaucccgagcugacuggucuggauuguauucgaccuugcuucuggguggaacucaucagaggcaggccaaaagagaauacaauauggaccucagggaguucuaucagcuuuuguggaguuaacuccgacacugugggcuggucauggcccgauggugcagaguuaccguucacaauugacaaguga

SEQ ID NO: 148140 - RNA, 1410 nt, Artificial Sequence
  derived and/or modified CDS sequence (opt3) from neuraminidase__InfluenzaA__ADO25105
augaaccccaaucagaagaucauuaccauaggcagcgugugcaugacaaucgggauggccaaccugauucuccaaaucggaaauauuaucuccauauggaucucucacucaauucagcuugguaaccagaaucagaucggcacuuguaaccaaagugucauuacguacgagaccaauacauggguuaaccagacuuaugugaauaucagcaacaccaauuucgcugcagggcaguccguagugucugucaaacuggccggaaacucgucauugugcccugugagcggcugggcgauauacaguaaggacaauuccauuagaaucgguucuaaaggggauguuuuugugauuagggaaccauucaucagcuguuccccguuagagugccggacauuuuuccugacccagggagcucuacucaacgacaagcauucaaauggcacuaucaaagaucgcagucccuaucgaacacugaugagcuguccuauuggcgaagucccaucucccuacaacucccguuuugagucaguggccuggagcgcaagugccugccacgacgggauaaacuggcuuaccaucggaauuucugguccugauaauggcgcuguagcaguucugaaguauaacgggaucauaacggacacuauuaaguccuggagaaauaacaucuugaggacccaagaaagcgagugugccugcgugaauggaucguguuucacagucaugacugauggcccaucugaccggcaggcuuccuacaaaaucuuucgcauugagaaggguaaaaucgugaagucaguggaaaugaacgcccccaauuaucauuacgaggaaugcaguuguuacccugauagcuccgagauuaccugcgucugcagagacaacuggcacgggucuaauaggccauggguuagcuucaaccagaaucucgaguaucagauaggauacaucuguucaggcauuuuuggcgauaacccgcggcccaaugacaaaacagggaguugcggaccuguguccagcaacggugcgaauggcguaaagggguucucuuuuaaguauggaaacggcguguggaucggucgcaccaaaucaaucaguagccgaaacggguucgaaaugauuugggauccaaauggcuggacgggaacugacaacaauuuuuccauaaagcaagacaucgucggcauuaacgaguggucuggguacucggguagcuucgugcagcaucccgaacugacaggacuggauuguaucagaccuugcuucuggguugagcucauuaggggccggccaaaagaaaauaccaucuggacuuccgggucaaguauaucuuuuuguggagugaacagcgacacagucggcugguccuggcccgauggugcagaguuaccguucaccaucgacaaguga

SEQ ID NO: 148141 - RNA, 1410 nt, Artificial Sequence; identical to SEQ ID NO: 146567
  derived and/or modified CDS sequence (opt3) from neuraminidase__InfluenzaA__ADO25115

SEQ ID NO: 148142 - RNA, 1410 nt, Artificial Sequence; identical to SEQ ID NO: 146567
  derived and/or modified CDS sequence (opt3) from neuraminidase__InfluenzaA__ADO25125

SEQ ID NO: 148143 - RNA, 1410 nt, Artificial Sequence
  derived and/or modified CDS sequence (opt3) from neuraminidase__InfluenzaA__ADO25135
augaaccccaaucagaagaucauuaccauaggcagcgugugcaugacaaucgggauggccaaccugguccuccaaauuggaaauaucauuuccaucuggauaucucacucaauccagcuugguaaccagaaucagauugagacuuguaaccaaaguguuaucacguacgaaaauaacaccugggugaaucagacauauguaaacauuagcaauacuaacuucgcugcaggccaguccguggucucugugaaacuggccggaaauucgucauugugcccuguuagcggaugggcgaucuacaguaaggacaacuccauaagaauuggcucuaaaggugauguguuugucaucagggagccauucauuagcuguuccccguuagaaugccggaccuuuuuccugacacagggggcucuacucaaugacaagcauucaaacggaaccaucaaagaucgcagucccuaucgaacucugaugagcuguccuaucggcgaggugccaucucccuacaacucccguuuugaaucaguagccuggagcgcaagugccugccacgacggcauuaauuggcuuacaauagggaucucuggaccugauaacggugcuguugcagugcugaaguauaauggcauuaucaccgacacgauaaaguccuggagaaacaauauuuugaggacucaagagagcgagugugccugcgucaacgggucguguuucaccgugaugacagauggaccaucugacggccaggcuuccuacaaaaucuuucggaucgaaaaggguaaaauugugaagucagucgagaugaaugcccccaacuaucauuacgaagagugcaguuguuacccugauagcuccgagaucacuugcguuugccgcgacaauuggcacgggucuaacagaccaugggugagcuucaaucagaaccucgaauaucagauuggauacauauguucaggcaucuuuggcgauaauccgaggcccaacgacaaaaccgggaguugcggaccuguauccagcaauggugcgaacggcgugaagggguucucuuuuaaguauggaaacggcgucuggauuggucggacaaaaucaaucaguagccgcaauggguucgagaugaucugggauccaaacggcuggaccggaacggacaauaacuuuuccauuaagcaagacauagugggcaucaaugaauggucuggguacucggggagcuucguucagcaucccgagcugacuggucuggauuguauucgaccuugcuucuggguggaacucaucagaggcaggccaaaagagaacacaauuuggaccuccgggucaaguaucucuuuuuguggagucaauagcgacacugugggcugguccuggcccgauggugcagaguuaccguucacaauagacaaguga

SEQ ID NO: 148144 - RNA, 1410 nt, Artificial Sequence; identical to SEQ ID NO: 146137
  derived and/or modified CDS sequence (opt3) from neuraminidase__InfluenzaA__ADO25145

SEQ ID NO: 148145 - RNA, 1410 nt, Artificial Sequence; identical to SEQ ID NO: 144786
  derived and/or modified CDS sequence (opt3) from neuraminidase__InfluenzaA__ADO25155

SEQ ID NO: 148146 - RNA, 1410 nt, Artificial Sequence; identical to SEQ ID NO: 144786
  derived and/or modified CDS sequence (opt3) from neuraminidase__InfluenzaA__ADO25165

SEQ ID NO: 148147 - RNA, 1410 nt, Artificial Sequence; identical to SEQ ID NO: 144786
  derived and/or modified CDS sequence (opt3) from neuraminidase__InfluenzaA__ADO25175

SEQ ID NO: 148148 - RNA, 1410 nt, Artificial Sequence
  derived and/or modified CDS sequence (opt3) from neuraminidase__InfluenzaA__ADO25185
augaaccccaaucagaagaucauuaccauaggcagcgugugcaugacaaucgggauggccaaccugauucuccaaaucggaaauauuaucuccauauggaucucucacucaauucagcuugguaaccagaaucagaucgagacuuguaaccaaagugucauuacguacgaaaauaacaccuggguuaaucagacauaugugaacaucagcaauacuaacuucgcugcaggccaguccguagugucugucaaacuggccggaaauucgucauugugcccugugagcggaugggcgauauacaguaaggacaacuccauuagaaucggcucuaaaggugauguuuuugugauuagggagccauucaucagcuguuccccguuagaaugccggaccuuuuuccugacacagggggcucuacucaaugacaagcauucaaacggaaccaucaaagaucgcagucccuaucgaacucugaugagcuguccuauuggcgaggucccaucucccuacaacucccguuuugaaucaguggccuggagcgcaagugccugccacgacggcauaaauuggcuuacaaucgggauuucuggaccugauaacggugcuguagcaguucugaaguauaauggcaucauaaccgacacgauuaaguccuggagaaacaauaucuugaggacucaagagagcgagugugccugcgugaacgggucguguuucaccgucaugacagauggaccaucugacggccaggcuuccuacaaaaucuuucggauugaaaaggguaaaaucgugaagucaguggagaugaaugcccccaacuaucauuacgaagagugcaguuguuacccugauagcuccgagauuacuugcgucugccgcgacaauuggcacgggucuaacagaccauggguuagcuucaaucagaaccucgaauaucagauaggauacaucuguucaggcauuuuuggcgauaauccgaggcccaacgacaaaaccgggaguugcggaccuguguccagcaauggugcgaacggcguaaagggguucucuuuuaaguauggaaacggcguguggaucggucggacaaaaucaaugaguagccgcaauggguucgagaugaucugggauccaaacggcuggaccggaacggacaauaacuuuuccauuaagcaagacauagucggcaucaaugaauggucuggguacucggggagcuucgugcagcaucccgagcugacuggucuggauuguauucgaccuugcuucuggguugaacucaucagaggcaggccaaaagagaacacaauuuggaccuccgggucaaguaucucuuuuuguggagugaauagcgacacugucggcugguccuggcccgauggugcagaguuaccguucacaauagacaaguga

SEQ ID NO: 148149 - RNA, 1410 nt, Artificial Sequence; identical to SEQ ID NO: 147215
  derived and/or modified CDS sequence (opt3) from neuraminidase__InfluenzaA__ADO25195

SEQ ID NO: 148150 - RNA, 1410 nt, Artificial Sequence; identical to SEQ ID NO: 145923
  derived and/or modified CDS sequence (opt3) from neuraminidase__InfluenzaA__ADO25205

SEQ ID NO: 148151 - RNA, 1410 nt, Artificial Sequence; identical to SEQ ID NO: 146137
  derived and/or modified CDS sequence (opt3) from neuraminidase__InfluenzaA__ADO25215

SEQ ID NO: 148152 - RNA, 1410 nt, Artificial Sequence; identical to SEQ ID NO: 144786
  derived and/or modified CDS sequence (opt3) from neuraminidase__InfluenzaA__ADO25225

SEQ ID NO: 148153 - RNA, 1410 nt, Artificial Sequence; identical to SEQ ID NO: 146137
  derived and/or modified CDS sequence (opt3) from neuraminidase__InfluenzaA__ADO25235

SEQ ID NO: 148154 - RNA, 1410 nt, Artificial Sequence; identical to SEQ ID NO: 144786
  derived and/or modified CDS sequence (opt3) from neuraminidase__InfluenzaA__ADO25245

SEQ ID NO: 148155 - RNA, 1410 nt, Artificial Sequence; identical to SEQ ID NO: 144786
  derived and/or modified CDS sequence (opt3) from neuraminidase__InfluenzaA__ADO25255

SEQ ID NO: 148156 - RNA, 1410 nt, Artificial Sequence; identical to SEQ ID NO: 146567
  derived and/or modified CDS sequence (opt3) from neuraminidase__InfluenzaA__ADO25265

SEQ ID NO: 148157 - RNA, 1410 nt, Artificial Sequence; identical to SEQ ID NO: 146378
  derived and/or modified CDS sequence (opt3) from neuraminidase__InfluenzaA__ADO25275

SEQ ID NO: 148158 - RNA, 1410 nt, Artificial Sequence; identical to SEQ ID NO: 146137
  derived and/or modified CDS sequence (opt3) from neuraminidase__InfluenzaA__ADO25285

SEQ ID NO: 148159 - RNA, 1413 nt, Artificial Sequence
  derived and/or modified CDS sequence (opt3) from neuraminidase__InfluenzaA__ADO27623
augaaccccaaucagaagaucauuaccauaggcagcaucuccauugccaucgggauuaucucucugaugcuccaaauaggaaacaucauuucaaucugggcuagucacagcauucagacagguucccagaauaacacuggcaucugcaaucagagaauaauuacguacgagaacucuaccugggugaaucauacauaugugaacaucaauaacacuaauguugcagccggggaagacaaaaccucggugacacuugcgggaaacucaagccuguguaguauuuccggcugggcuaucuacaccaaggauaauucuaucaggauugguagcaaaggggacguauucgugauacgggagccuuuuaucuccugcucacacuuggaaugucgcacuuucuuuuuaacacaaggagcccugcuaaacgauaagcauaguaauggcaccgucaaagaccgaagcccauaucgugcacucaugucuugcccgcugggcgaggcccccuccccuuacaacucaaaguucgaaagcguggcuuggagugcaucugccugucacgaugggaugggauggcuuacgauugguaucuccggcccagacaacggggcuguugccgugcugaaguauaauggaauaauuacuggcaccaucaaaagcuggaagaaacagaucuugagaacacaggagucggagugcgucuguaugaacgguucuugcuuuacuauuaugaccgaugggcccuccaauaaggcggcaucauacaaaaucuucaagauugaaaagggaaaagugacaaagaguauagagcucaacgccccuaauuuuuauuacgaagaguguagcugcuacccagacaccggcaucguaauguguguuugcagggauaacuggcauggcuccaaucggcccugggugucuuucaaccagaaucuggacuaucaaauuggguacaucugcagcggagucuuuggugauaacccucgcccagaggacggcgaagggucauguaauccggugacgguggauggagcuaacggcgucaaagguuucaguuauaaguacgggaauggcguuuggaucggaagaacuaaauccaacaggcugcggaagggcuuugagaugauuugggaccccaauggguggacaaacaccgacagcgauuucucugugaaacaggacguaguggccauaacugauuggucaggauauagugguagcuuuguccagcacccugaacucacaggcuuagacugcauccgcccauguuucuggguggagcugguucgagggcuucccagagaaaacaccacgauuuggaccuccggaucuucgaucagcuucugcggcgucaauuccgauacagcaaacuggucauggccugacggugcugaguugccauuuacuauugauaaguga

SEQ ID NO: 148160 - RNA, 1410 nt, Artificial Sequence; identical to SEQ ID NO: 144786
  derived and/or modified CDS sequence (opt3) from neuraminidase__InfluenzaA__ADO30410

SEQ ID NO: 148161 - RNA, 1410 nt, Artificial Sequence; identical to SEQ ID NO: 146137
  derived and/or modified CDS sequence (opt3) from neuraminidase__InfluenzaA__ADO30420

SEQ ID NO: 148162 - RNA, 1410 nt, Artificial Sequence; identical to SEQ ID NO: 145494
  derived and/or modified CDS sequence (opt3) from neuraminidase__InfluenzaA__ADP95343

SEQ ID NO: 148163 - RNA, 1410 nt, Artificial Sequence; identical to SEQ ID NO: 144776
  derived and/or modified CDS sequence (opt3) from neuraminidase__InfluenzaA__ADP95353

SEQ ID NO: 148164 - RNA, 1410 nt, Artificial Sequence; identical to SEQ ID NO: 144776
  derived and/or modified CDS sequence (opt3) from neuraminidase__InfluenzaA__ADP95363

SEQ ID NO: 148165 - RNA, 1410 nt, Artificial Sequence; identical to SEQ ID NO: 144776
  derived and/or modified CDS sequence (opt3) from neuraminidase__InfluenzaA__ADP95373

SEQ ID NO: 148166 - RNA, 1410 nt, Artificial Sequence; identical to SEQ ID NO: 144776
  derived and/or modified CDS sequence (opt3) from neuraminidase__InfluenzaA__ADP95383

SEQ ID NO: 148167 - RNA, 1410 nt, Artificial Sequence; identical to SEQ ID NO: 144776
  derived and/or modified CDS sequence (opt3) from neuraminidase__InfluenzaA__ADP95393

SEQ ID NO: 148168 - RNA, 1410 nt, Artificial Sequence
  derived and/or modified CDS sequence (opt3) from neuraminidase__InfluenzaA__ADQ43774
augaaccccaaucagaagaucauuaccauaggcagcgggugcaugacaaucggaauggccaaccugauucuccaaaucgguaauauuaucuccauauggaucucucacucaauucagcuuggcaaccagaaucagaucgagacuuguaaccaaagugugauuacguacgaaaauaacaccugggucaaucagacauauguuaacaucagcaauacuaacuucgcugcagggcaguccgugguaucugugaaacuggccggaaauucgucauugugcccugucagcggcugggcgauauacaguaaggacaacuccauuagaaucgguucuaaaggggauguguuuguuauuagggagccauucaucagcuguuccccguuagaaugccggaccuuuuuccugacacagggagcucuacucaaugacaagcauucaaacggcaccaucaaagaucgcagucccuaucgaacucugaugagcuguccuauuggcgaggugccaucucccuacaacucccguuuugaaucagucgccuggagcgcaagugccugccacgacgggauaaauuggcuuacaaucggaauuucugguccugauaacggcgcuguggcaguacugaaguauaaugggaucauaaccgacacgauuaaguccuggagaaacaauaucuugaggacucaagagagcgagugugccugcguuaacggaucguguuucaccgugaugacagauggcccaucugacggucaggcuuccuacaaaaucuuucggauugaaaaggggaaaaucgucaagucaguggagaugaaagcccccaauuaucauuacgaagagugcaguuguuacccugauagcuccgagauuacuugcgugugccgcgacaacuggcacggaucuaauagaccaugggucagcuucaaccagaaucucgaauaucagauaggcuacaucuguucaggcauuuuuggggauaacccgaggcccaaugacaagaccggaaguugcgguccuguuuccagcaacggcgcgaauggggugaagggauucucuuuuaaauauggcaacgguguauggaucgggcggacaaagucaaucaguagccgcaacggcuucgagaugauuugggauccaaauggauggaccggcacggacaacaauuuuuccauaaaacaagacaucguggggauuaacgaauggucuggauacucggguagcuucguccagcaucccgagcugacuggccuggauuguauccgaccuugcuucuggguggaacucauuagagggaggccaaaggagaauacaaucuggaccuccggaucaaguauaucuuuuuguggcguuaacagcgacacuguggguugguccuggcccgauggggcagaguuaccguucacaaucgacaaauga

SEQ ID NO: 148169 - RNA, 1410 nt, Artificial Sequence
  derived and/or modified CDS sequence (opt3) from neuraminidase__InfluenzaA__ADQ92578
augaaccccaaucagaagaucauuaccauaggcagcgugucccugacaaucucuacuauuugcuucuuuaugcaaaucgccauucucaucacgaccgucacacuucacuucaaacaguacgaguuuaacucaccuccaaauaaccagguuauacugugugaaccgacuaucauugagagaaauaucaccgaaauuguguauuugacaaacgcuaccaucgagaaggaaauaugccccaaauuagcagaguacaggaauuggaguaagccucagugugacauuacuggguucgccccauuuagcaaagauaacuccauccggcugucugcgggaggugacauuuggguaacacgcgagcccuaugugucgugcgauccugacaaguguuaccaauucgcucuaggccaggggaccacgcucaauaacguccauucaaauaacacugugcgagaucguaccccauauagaacacugcuuaugaaugaacugggaguucccuuucacuugggcacuaaacaggugugcaucgccuggagcaguuccucuugucaugacgguaaggcauggcuccacgucugcaucaccggggaugacaagaacgccacagcuagcuucauuuacaauggaaggcugguggauuccguaguuucauggaguaaagagauacugcggacccaggaaagcgagugugugugcaucaacggcacguguacugucgugaugacagacggcucugcauccgggaaggccgauaccaaaauucucuuuaucgaggaaggaaagauagugcauacuucaacauuaagcgguagugcucaacacgucgaggaaugcucuugcuauccucgcuacccaggcguuagaugugugugcagggacaacuggaagggguccaaucggccgauuguagauaucaacaucaaagaccacagcauugugucgucuuacgucuguuccggacuggugggcgacacccccaggaagaaugauucaaguagcuccucucauugccuugacccuaacaaugaggaaggugggcacggaguuaaaggcugggccuucgaugacggcaacgauguguggauggggcgaacgaucagcgagaagucaagauugggauaugagaccuuuaaagucauugaagguuggaguaauccaaaguccaaacugcagauaaaccgccaggugaucguagaccggggcaaucguagcggguacucuggaauuuucucaguugagggcaagaguuguaucaaccgcugcuuuuauguggaacuaaucagagguaggaaggaggaaacagagguccucuggacuagcaauuccauuguggucuucugugggaccucuggcacauacggaacuggcucguggcccgauggggcggacauaaaccugaugccuaucuga

SEQ ID NO: 148170 - RNA, 1410 nt, Artificial Sequence; identical to SEQ ID NO: 144647
  derived and/or modified CDS sequence (opt3) from neuraminidase__InfluenzaA__ADR32364

SEQ ID NO: 148171 - RNA, 1410 nt, Artificial Sequence
  derived and/or modified CDS sequence (opt3) from neuraminidase__InfluenzaA__ADT64478
augaaccccaaucagaagaucauuaccauaggcagcgugugcaugacaaucgggauggccaaccugauucuccaaaucggaaauauuaucuccauauggaucggucacucuauucagcuuggcaaccagaaucagaucgagacuuguaaccaaucagucauuacguacgaaaauaacaccuggguuaaucagacauaugugaacaucaguaauacuaacuucgcugcagggcagagcguaguguccgucaaacuggccggaaauucuucguugugcccugugucaggcugggcgauauacagcaaggacaacaguguuagaauugguuccaaaggggauguguuugucaucagggagccauucauuucuuguagcccguuagaaugccggaccuuuuuccugacacagggagcucuacucaaugacaagcauuccaacggcaccaucaaagaucgcucacccuaucgaacucugaugaguuguccuaucggcgaggugccaagccccuacaacucucguuuugaauccguagccuggucagcaagcgccugccacgacgggauuaauuggcuuacaauaggaaucagugguccugauaacggcgcuguugcagugcugaaguauaaugggauuaucaccgacacgauaaagucuuggagaaacaauauuuugaggacucaagaguccgagugugccugcgucaacggaagcuguuucaccgugaugacagauggcccaucgaauggucaggcuucuuacaaaaucuuucggaucgaaaaggggaaaauugugaaguccgucgagaugaacgcccccaauuaucauuacgaagagugcucauguuacccugacaguagcgagaucacuugcguuugccgcgauaacuggcacggauccaauagaccaugggugucuuucaaccagaaucucgaauaucagauuggcuacauauguagcggcaucuuuggggacaacccgaggcccaaugauaaaaccggaucaugcgguccuguaaguuccaacggcgcgaacggggugaagggauucagcuuuaaguauggcaauggugucuggauugggcggacaaaaucuaucucaagucgcaacggcuucgagaugaucugggacccaaauggauggaccggcacggauaacaauuuuagcauuaagcaagacauaguggggaucaacgaaugguccggauacucugguucguucguucagcaucccgagcugacuggccuggacuguauucgaccuugcuucuggguggaacucaucagagggaggccaaaagagaauacaauuuggaccagcggauccucaaucaguuuuuguggcgucaacucugauacuguggguuggagcuggcccgacggggcagaguuaccguucacaauagauaaguga

SEQ ID NO: 148172 - RNA, 1410 nt, Artificial Sequence
  derived and/or modified CDS sequence (opt3) from neuraminidase__InfluenzaA__ADT78889
augaaccccaaucagaagaucauuaccauaggcagcgugucccugacaaucgccacugucugcuuccucaugcaaauugcuauccuuguuacgaccgugacacugcacuuuaaacagcaugagugugacucuccugcaucaaaccagguaaugccaugcgaaccgauuaucauagagagaaauaucacugaaauuguguacuugaacaauaccacaaucgagaaggaaauuugucccaaagucguggaguauaggaacuggaguaagccucagugccaaaucaccggguucgccccauuuagcaaagauaauuccauacgguuaucugcgggaggugacauuuggguuacucgcgagcccuacgugucgugugauccuggcaagugcuaucaguucgcucuggggcagggaacaacccuagacaacaagcacucaaaugauacgauccaugaccgaauaccacaccguacucuccugaugaacgaacuuggcguccccuuucaucuggguaccagacagguguguguagccuggagcaguuccucuugccacgaugggaaagcaugguugcacguuugugugacaggagacgauaagaaugccacugcuagcuucaucuacgacggcaggcucgucgauuccaucggcucauggagucaaaacauucugcggacccaggagagcgaaugcguguguauaaaugggacaugcaccguggucaugacggacggaucugcauccggucgcgccgauacuagaauccuguuuauugaggagggcaaaaucguucauauaucaccucucagcgggagugcucagcacguggaagagugcucuuguuauccaagguacccggacguacggugcauuugucgcgacaacuggaagggauccaaucgacccgugaucgauaucaacauggaagacuauagcauugauucgucuuacgucugcuccggcuuagugggugacacaccuagaaacgaugacaggucaaguaauagcaacugucgggauccaaauaacgagcgugggaaucccggaguuaaaggcugggccuucgacaacggcgaugacguguggauggggcgcaccaucuccaaggaucugagaucuggauacgaaacuuuuaaggucauugguggcuggagcacaccuaauucaaaaagucagauaaacaggcaagugaucguagacuccaauaacuggagcggguauucuggaauuuucucaguugagggcaagaguugcaucaaucgguguuuuuacguggagcuuauccgaggucgccagcaggaaaccagagucugguggacgagcaacuccauuguggucuucugcgggaccucuggcacauauggaacuggcucguggccagacggggcgaauauuagcuuuaugcccaucuga

SEQ ID NO: 148173 - RNA, 1410 nt, Artificial Sequence
  derived and/or modified CDS sequence (opt3) from neuraminidase__InfluenzaA__ADT78899
augaaccccaaucagaagaucauuaccauaggcagcgugucccugacaaucgccacugucugcuuccucaugcaaauugcuauccuugcaacgaccguuacacugcacuuuaaacagcaugagugugacucuccugccucaaaccaggugaugccaugcgaaccgauuaucauagagagaaauaucacugaaauuguauacuugaacaauaccacaaucgagaaggaaauuugucccgagguggucgaguauaggaacuggaguaaaccucagugccaaaucaccggguucgcgccauuuagcaaggauaauuccauacgguuaucugcuggaggugacauuugggugaugcgcgaacccuacguuucguguaacccuggcaaaugcuaucaguucgcccuggggcagggaacuacacuagauaauaagcacucaaacggcaccauccaugaccguauuccacaccgaacgcuccugaugaaugagcuuggugugcccuuucaucuggggacuaagcaggucuguguggcauggagcaguuccucuugccacgauggaaaagccugguugcacguauguguuaccggcgacgauagaaacgcuacagccagcuucaucuacgacggcaggcucguggauuccaucgggucauggagucaaaauauucugcggacucaggaaagcgagugcgucuguauaaacggaaccugcacaguggugaugaccgacgguucugcauccggccgcgcugauacgagaauccuguuuauuaaggaggggaaaaucguccauauaucaccucucagcggaagugcccagcacauugaagagugcucuuguuauccaagguacccggacguucggugcaucugucgcgauaauuggaagggcuccaaccgacccgugaucgacauuaacauggaagacuauagcaucgauucgucuuacguaugcuccgguuuagugggggacacuccuagaaaugaugacucaaguagcaacuccaauuguagggauccaaacaaugagcggggaaaccccggcgucaaaggcugggcguucgacaauggggaugacguguggaugggacguacaauuucuaaggaucugcgcagcgguuacgaaaccuuuaagguuauaggcggguggucaacuccuaacaguaaaucccaggugaauagacaagucaucguggacaacaauaacuggagcggauauucuggcauuuucucaguagaggguaagaguugcaucaauagguguuuuuacguugagcuuauccgggggcgaccacaggaaacacgcgugugguggaccagcuccucuauugucguguucugcggcacgucgggaaccuauggcacagggagcuggcccgauggagcaaacauaaauuuuaugccgaucuga

SEQ ID NO: 148174 - RNA, 1410 nt, Artificial Sequence
  derived and/or modified CDS sequence (opt3) from neuraminidase__InfluenzaA__ADT78963
augaaccccaaucagaagaucauuaccauaggcagcgugucccugacaaucgccacugucugcuuccucaugcaaauugcuauccuugcaacgaccguuacacugcacuuuaaacagcaugagugugacucuccugccucaaaccaggugaugccaugcgaaccgauuaucauagagagaaauaucacugaaauuguauacuugaacaauaccacaaucgagaaggaaauuugucccgagguggucgaguauaggaacuggaguaaaccucagugccaaaucaccggguucgcgccauuuagcaaggauaauuccauacgguuaucugcuggaggugacauuugggugacucgcgaacccuacguuucgugugauccuggcaaaugcuaucaguucgcccuggggcagggaacaacccuagacaacaagcacucaaaugauacgauccaugaccguauuccacaccgaacucuccugaugaacgagcuuggcgugcccuuucaucuggguaccagacaggucuguguggcauggagcaguuccucuugccacgaugggaaggccugguugcacguauguguuacaggagacgauaggaaugcuacugccagcuucaucuacgacggccggcucguggauuccaucggcucauggagucaaaacauucugcgcacccaggaaagcgagugcgucuguauaaaugggacaugcaccguggugaugacggacggaucugcauccgguagagcugauacuaggauccuguuuauuaaagagggcaagaucguccauauaucaccucucagcgggagugcccagcacguugaagagugcucuuguuauccacgguacccggacgugcgcugcauuugucgagacaacuggaaaggauccaauagacccguaaucgauaucaacauggaagacuauagcauugauucgucuuacgugugcuccggcuuagucggugacacaccuaggaacgaugaccggucaaguaauagcaacugucgugauccaaauaacgagcgcgggaaucccggagugaagggcugggcguucgacaacggcaaugauguuuggauggggagaaccaucuccaaagaccugaggucuggauacgaaacuuuuaaggugauugguggcuggagcacaccuaacucaaagagucaggucaaucggcaagugauaguagauaacaauaacugguccggguauagcggaaucuucucuguugagggcaaaucaugcauuaaucgauguuuuuacguggagcuuauccgcgguagacagcaggaaaccagggucugguggacgaguaacagcaucguggucuucugcgggaccuccggcacauauggaacuggcucuuggccagacggggcaaauauuaacuuuaugcccauauga

SEQ ID NO: 148175 - RNA, 1410 nt, Artificial Sequence
  derived and/or modified CDS sequence (opt3) from neuraminidase__InfluenzaA__ADT79001
augaaccccaaucagaagaucauuaccauaggcagcaucucccugacaauugccacuaucugcuuccucaugcaaauugcuauccuugugacgaccgucacacugcacuuuaaacaguacgagugugacucuccugcaaacaaucagguuaugccaugcgaaccgauaaucauugagagaaacaucacugaaauuguguauuugaccaauacaaccaucgagaaggaaauaugucccaaauuaguagaguacaggaacuggucaaagccucagugcaaaauuacuggguucgccccauuuaguaaggauaauagcauccggcuguccgcgggaggugacauuugggugacacgcgagcccuaugucucuugugauccuggcaagugcuaccaauucgcucuagggcagggaaccacgcucgacaacaaacauucgaaugauacuauccacgaccgaaucccacaucguacccugcuuaugaacgaacugggcgugcccuuucacuuggguacaagacagguuuguauugccuggucaagcaguuccugccaugaugggaaggcauggcuccacgugugugucacuggagacgauaaaaaugccaccgcuucuuucauauaugacggcaggcugguggauagcaucggcuccuggucacagaacauucugcggacacaagagagugaaugcguauguaucaaugggaccugcacgguugugaugacugacggaagcgcaucugguaaggccgauacacgcauacucuuuauugaggagggcaaaaucguccacaucuccccuuuaucagggagcgcucagcauguggaagagugcaguuguuacccaagauauccgggagugaggugcauuugucgggacaacuggaagggcucuaaucgccccgucguugacaucaacgugaaggauuacuccauugacagcucguacguaugcucuggucuggugggggauaccccucgaaacaaugacagauccucaaguagcuauuguaggaacccaaauaacgaacggggaaaucacggcgucaaaggcugggccuucgaugacgggaacgauguguggaugggacguacuauauccaaggacucucgcagcgguuacgagacauuuaaaguuaucggcggguggucaacccccaauaguaagucccagauuaacagacaggugaucgucgauagcgacaauaggucuggauauucaggcaucuucaguguggaagguaaaagcugcauuaaccgguguuuuuacguagagcuuauacgagggcgcgagcaagaaacgagaguuugguggaccuccaauucuaucguggucuucugcggcacaucgggaacuuauggcaccgggagcuggccugauggagcggacauuaacuugaugccaaucuga

SEQ ID NO: 148176 - RNA, 1410 nt, Artificial Sequence; identical to SEQ ID NO: 142166
  derived and/or modified CDS sequence (opt3) from neuraminidase__InfluenzaA__ADT79021

SEQ ID NO: 148177 - RNA, 1410 nt, Artificial Sequence
  derived and/or modified CDS sequence (opt3) from neuraminidase__InfluenzaA__ADT79041
augaaccccaaucagaagaucauuaccauaggcagcgugucccugacaaucgccacugucugcuuccucaugcaaauugcuauccuuguuacgaccgugacacugcacuuuagacaguacgagugugacucuccugcaaacaaucagguaaugccaugcgaaccgauuaucauagagaggaacaucacugaaauuguguauuugaauaacaccacaaucgagaaagaaauuugucccaaguuagucgaguaccggaauuggucaaaaccucagugcaagaucaccggguucgccccauuuaguaaagauaacagcauacgccuguccgcgggaggugacauuugggugacucgagagcccuauguuucuugugauccuggcaagugcuaccaauucgcucuagggcagggaacaacccucgacaauaagcauucgaacgauacgauccacgaccguauuccacauagaacucugcuuaugaaugaacugggcgugcccuuucacuuggguaccaggcaggucuguaucgccuggucaagcaguuccugccaugaugggaaagcauggcuccacguguguguaacaggagacgauaagaacgccacugcuucuuucaucuaugacggccggcugguugauagcauuggcuccuggucacagaauauacugcgcacccaagagagugaaugcguguguaucaacgggacaugcaccgucgugaugacggacggaagcgcaucugguagagccgauacuaaaauucucuuuaucgaggagggcaagauagugcacauuuccccuuuaucagggagcgcucagcaugucgaagagugcaguuguuacccaagguauccgggaguucggugcaucugucgcgacaauuggaaaggcucuaaccgacccgugguagacaucaacguggaagauuacuccauugacagcucguacgucugcucuggucuggugggggauacaccuagaaauaacgacagguccucaaauaguaacugucggaauccaaacaaugagcguggaaaccacggcguuaagggcugggccuucgaugacgggaaugauguguggaugggacgcaccaucagcaaggaccuuagauccgguuaugaaacuuuuaaagucauuggcggguggucuacacccaacagcaagucacagauaaauaggcaagugaucguagauagugacaaccgguccggauacagcggcauuuucucuguugaggguaaaucaugcaucaaucgauguuuuuauguggaguugauccgcgggagagaacaggagaccagggucugguggacgaguaacagcauuguggucuucugcggcaccuccggaacauacggcacugggucuuggccugauggagcggacauaaaucugaugccaaucuga

SEQ ID NO: 148178 - RNA, 1410 nt, Artificial Sequence; identical to SEQ ID NO: 143808
  derived and/or modified CDS sequence (opt3) from neuraminidase__InfluenzaA__ADT79121

SEQ ID NO: 148179 - RNA, 1410 nt, Artificial Sequence
  derived and/or modified CDS sequence (opt3) from neuraminidase__InfluenzaA__ADT79131
augaaccccaaucagaagaucauuaccauaggcagcgugucccugacaaucgccacugucugcuuccucaugcaaauugcuauccuugcaacgaccguuacacugcacuuuaaacagcaugagugugacucuccugccucaaaccaggugaugccaugcgaaccgauuaucauagagagaaauaucacugaaauuguauacuugaacaauaccacaaucgagaaggaaauuugucccgagguggucgaguauaggaacuggaguaaaccucagugccaaaucaccggguucgcgccauuuagcaaggauaauuccauacgguuaucugcuggaggugacauuugggugacucgcgaacccuacguuucgugugauccuggcaaaugcuaucaguucgcccuggggcagggaacaacccuagacaacaagcacucaaauggcacgauccaugaucguauuccacaccgaacucuccugaugaacgagcuuggugugcccuuucaucuggggaccaagcaggucuguguggcauggagcaguuccucuugccacgacggaaaagccugguugcacguauguguuacaggcgaugacagaaaugcuacugccagcuucaucuacgauggcaggcucgaagacuccaucgggucauggagucaaaacauucugcggacccaggagagcgagugcguguguauaaauggaacaugcaccgucgugaugacggaugguucugcauccggccgcgcugacacuagaauccuguuuauuaaggaagggaaaaucgugcauauaucaccucucagcggaagugcccagcacauugaggaaugcucuuguuauccaagguacccggauguccggugcaucugucgcgacaacuggaagggcuccaaucgacccguuuuagacaucagcauggaggauuauucgauugacucuuccuacgugugcucaggucugguaggggauacaccuagaaacgacgauaguagcuccaacucuaauuguagggacccaaacaaugaacggggaaaccccggcgugaaaggcugggcguucgauaauggggacgaugucuggaugggacguaccaucagcaaggaccuucgcucagguuacgagacuuuuaaggugauuggcggguggaguacaccuaacuccaaaagccagguuaauagacaagugauagucgauaacaauaacuggucuggauauucaggcaucuucaguguggaggguaagagcugcauuaauagguguuuuuacguagaauugauccgggggcgaucccaggagacccgcguuugguggacgucuaacucgaucguggucuucugcggcaccagcggaacauauggcacuggguccuggccagacggagcaaauauuaacuuuaugcccauauga

SEQ ID NO: 148180 - RNA, 1410 nt, Artificial Sequence; identical to SEQ ID NO: 144786
  derived and/or modified CDS sequence (opt3) from neuraminidase__InfluenzaA__ADT79234

SEQ ID NO: 148181 - RNA, 1410 nt, Artificial Sequence; identical to SEQ ID NO: 144776
  derived and/or modified CDS sequence (opt3) from neuraminidase__InfluenzaA__ADT79244

SEQ ID NO: 148182 - RNA, 1410 nt, Artificial Sequence
  derived and/or modified CDS sequence (opt3) from neuraminidase__InfluenzaA__ADU25480
augaaccccaaucagaagaucauuauaaucagcuccauuugccugaucaacggcauuaccucucucauccuucaaauagggaauaucauuucaaucuggauuagucacagcauccagauaggaaaccagaaucagacagagacuuguucccaaaacauuaucacguacgaaaauaacaccugggugaaucagacauaugucaacauuucuaauaacaauuucguugccgagcaggcugugguaucgaugaaacuggcagguucaagcccuuugugcccagugaguggcugggccaucuacuccaaggacaacucugucagaaucgggagcaaaggagauguguuuguuauuagggaaccguucauauccuguucacauuuagagugccggaccuuuuuccugacucagggcgcgcuacucaaugacaagcacaguaacgguacaaucaaagaucgcagccccuaucgaacccugaugucuuguccuauuggggaagugccaucccccuacaacucacguuuugagagcgucgcuuggagugccucugcaugccaugacggaacuuccuggcuuacaaucggcauaagcggcccugauaauggggccguggcuguacugaaguauaacgacauuaucaccgauacgaucaagucguggagaaauaacauuuugaggacucaagagucugaauguguuugcgugaauggauccuguuucaccgucaugacagacgguccaucaaacggccaggcaaguuacaaaaucuuuaagauugagaaagggaagguggugaaaagcgucgaacucaaugcccccaacuaucacuacgaggagugcuccuguuacccugauucuggagaaauaaucugcguuugccgggacaauuggcauggcagcaaccgcccaugggugucauucaaucagaaccuggaguaucagauugguuacaucuguagugggauccugggagauaauccgagacccaacgacaggacuggcuccugcggcccuguaagccucaauggggcuaacggagugaaggguuuuucuuucaaguauggcaacggggucuggauuggacggaccaaaucaaguagcucccgcucuggcuuugaaaugauaugggauccaaaugguuggacagagaccgacaacaauuucuuagugaagcaagacaucguugggaugacggauuggucgggcuacagcggauccuuugugcagcaccccgaacugacuggcaugaacuguaugcgaccuugcuucugggucgagcuuauuagagggaggccaaaagagaauacaaucuggaccucaggaaguucuauuagcuucuguggugugaacuccgacacuguagauuggucauggcccgacggcgccgaauugccguuuacaaucgauaaguga

SEQ ID NO: 148183 - RNA, 1410 nt, Artificial Sequence; identical to SEQ ID NO: 144786
  derived and/or modified CDS sequence (opt3) from neuraminidase__InfluenzaA__ADU59780

SEQ ID NO: 148184 - RNA, 1410 nt, Artificial Sequence
  derived and/or modified CDS sequence (opt3) from neuraminidase__InfluenzaA__ADU59789
augaaccccaaucagaagaucauuaccauaggcagcgugugcaugacaaucgggauggccaaccugauucuccaaaucggaaauauuaucuccauauggaucucucacucaauucagcuugguaaccagaaucagaucgagacuuguaaccaaagugucauuacguacgaaaauaacaccuggguuaaucagacauaugugaacguaagcaauacuaacuucgcugcaggccaguccguggucucugugaaacuggccggaaauucgucauugugcccuguuagcggaugggcgaucuacaguaaggacaacuccauaagaauuggcucuaaaggugauguguuugucaucagggagccauucauuagcuguuccccguuagaaugccggaccuuuuuccugacacagggggcucuacucaaugacaagcauucaaacggaaccaucaaagaucgcagucccuaucgaacucugaugagcuguccuaucggcgaggugccaucucccuacaacucccguuuugaaucaguagccuggagcgcaagugccugccacgacggcauuaauuggcuuacaauagggaucucuggaccugauaacggugcuguugcagugcugaaguauaauggcauuaucaccgacacgauaaaguccuggagaaacaauauuuugaggacucaagagagcgagugugccugcgucaacgggucguguuucaccgugaugacagauggaccaucugacggccaggcuuccuacaaaaucuuucggaucgaaaaggguaaaauugugaagucagucgagaugaaugcccccaacuaucauuacgaagagugcaguuguuacccugauagcuccgagaucacuugcguuugccgcgacaauuggcacgggucuaacagaccaugggugagcuucaaucagaaccucgaauaucagauuggauacauauguucaggcaucuuuggcgauaauccgaggcccaacgacaaaaccgggaguugcggaccuguauccagcaauggugcgaacggcgugaagggguucucuuuuaaguauggaaacggcgucuggauuggucggacaaaaucaaucaguagccgcaauggguucgagaugaucugggauccaaacggcuggaccggaacggacaauaacuuuuccauuaagcaagacauagugggcaucaaugaauggucuggguacucggggagcuucguucagcaucccgagcugacuggucuggauuguauucgaccuugcuucuggguggaacucaucagaggcaggccaaaagagaacacaauuuggaccuccgggucaaguaucucuuuuuguggagucaauagcgacacugugggcugguccuggcccgauggugcagaguuaccguucacaauagacaaguga

SEQ ID NO: 148185 - RNA, 1410 nt, Artificial Sequence; identical to SEQ ID NO: 144786
  derived and/or modified CDS sequence (opt3) from neuraminidase__InfluenzaA__ADU59829

SEQ ID NO: 148186 - RNA, 1410 nt, Artificial Sequence
  derived and/or modified CDS sequence (opt3) from neuraminidase__InfluenzaA__ADU59838
augaaccccaaucagaagaucauuauaaucggcagcgugugcaugaccauugggauggccaaccugauccuccaaauuggaaauaucauauccaucuggauuucucacucaauccagcuugguaaccagaaucagauugagacauguaaccaaagugucaucacuuacgaaaauaacacguggguuaaucagaccuaugugaacauaagcaauacaaacuucgcugcaggccaguccguagugucugucaaacuggccggaaauucgucauugugcccugugagcggaugggcgauuuacaguaaggacaacuccaucagaauuggcucuaaaggugauguuuuugugaucagggagccauucaucagcuguuccccguuagaaugccggaccuuuuuccugacucagggggcucuacucaaugacaagcauucaaacggaacaauuaaagaucgcagucccuaucgaacccugaugagcuguccuauaggcgaggucccaucucccuacaacucccguuuugaaucaguggccuggagcgcaagugccugccacgacggcaucaauuggcuuacuauugggaucucuggaccugauaacggugcuguagcaguucugaaguauaauggcauaauuacagacaccaucaaguccuggagaaacaauaucuugaggacgcaagagagcgagugugccugcgugaacgggucguguuucacugucaugaccgauggaccaucugacggccaggcuuccuacaaaauuuuucggaucgaaaaggguaaaauugugaagucaguggagaugaaugcccccaacuaucauuucgaagagugcaguuguuacccugauagcuccgagauaacaugcgucugccgcgacaauuggcacgggucuaacagaccauggguuagcuuuaaucagaaccucgaauaccagaucggauauauuuguucaggcaucuucggcgauaauccgaggcccaacgacaaaacugggaguugcggaccuguguccagcaauggugcgaacggcguaaagggguuuucuuucaaguacggaaacggcguguggaucggucggaccaaaucaauuaguagccgcaauggguuugagaugauaugggauccaaacggcuggacaggaaccgacaauaacuucuccaucaagcaagacauugucggcaucaaugaauggucuggguauucggggagcuucgugcagcaucccgagcugacgggucuggauuguauucgaccuugcuuuuggguugaacucaucagaggcaggccaaaagagaacacuauauggacauccgggucaaguaucucuuucuguggagugaauagcgacaccgucgauugguccuggcccgacggcgcagaguuaccguuuacuauugauaaguga

SEQ ID NO: 148187 - RNA, 1410 nt, Artificial Sequence; identical to SEQ ID NO: 146137
  derived and/or modified CDS sequence (opt3) from neuraminidase__InfluenzaA__ADU59847

SEQ ID NO: 148188 - RNA, 1410 nt, Artificial Sequence; identical to SEQ ID NO: 144786
  derived and/or modified CDS sequence (opt3) from neuraminidase__InfluenzaA__ADU59907

SEQ ID NO: 148189 - RNA, 1410 nt, Artificial Sequence; identical to SEQ ID NO: 144786
  derived and/or modified CDS sequence (opt3) from neuraminidase__InfluenzaA__ADU59917

SEQ ID NO: 148190 - RNA, 1410 nt, Artificial Sequence; identical to SEQ ID NO: 144786
  derived and/or modified CDS sequence (opt3) from neuraminidase__InfluenzaA__ADU59920

SEQ ID NO: 148191 - RNA, 1410 nt, Artificial Sequence; identical to SEQ ID NO: 144786
  derived and/or modified CDS sequence (opt3) from neuraminidase__InfluenzaA__ADU59941

SEQ ID NO: 148192 - RNA, 1410 nt, Artificial Sequence
  derived and/or modified CDS sequence (opt3) from neuraminidase__InfluenzaA__ADU76311
augaaccccaaucagaagaucauuaccauaggcagcgugugcaugacaaucgggauggccaaccugauucuccaaaucggaaauauuaucuccauauggaucucucacucaauucagcuugguaaccagaaucagaucgagacuuguaaccaaagugucauuacguacgaaaauaacaccuggguuaaucagacauaugugaacaucagcaauacuaacuucgcugcaggccaguccguagugucugucaaacuggccggaaauucgucauugugcccugugagcggaugggcgauauacaguaaggacaacuccauuagaaucggcucuaaaggugauguuuuugugauuagggagccauucaucagcuguuccccguuagaaugccggaccuuuuuccugacacagggggcucuacucaaugacaagcauucaaacggaaccaucaaagaucgcagucccuaucgaacucugaugagcuguccuauuggcgaggucccaucucccuacaacucccguuuugaaucaguggccuggagcgcaagugccugccacgacggcauaaauuggcuuacaaucgggauuucuggaccugauaacggugcuguagcaguucugaaguauaauggcaucauaaccgacacgauuaaguccuggagaaacaauaucuugaggacucaagagagcgagugugccugcgugaacgggucguguuucaccgucaugacagauggaccaucugacggccaggcuuccuacaaaaucuuucggauugaaaaggguaaaaucgugaagucaguggagaugaaugcccccaacuaucauuacgaagagugcaguuguuacccugauagcuccgagauuacuugcgucugccgcgacaauuggcacgggucuaacagaccauggguuagcuucaaucagaaccucgaauaucagauaggauacaucuguucaggcauuuuuggcgauaauccgaggcccaacgacaaaaccgggaguugcggaccuguguccagcaauggugcgaacggcguaaagggguucucuuuuaaguauggaaacggcguguggaucggucggacaaaaucaaucaguagccgcaauggguucgagaugauuugggauccaaacggcuggaccggaacggacaauaacuuuuccauaaagcaagacaucgucggcauuaaugaauggucuggguacucggggagcuucgugcagcaucccgagcugacuggucuggauuguauccgaccuugcuucuggguugaacucauuagaggcaggccaaaagagaacacaaucuggaccuccgggucaaguauaucuuuuuguggagugaauagcgacacugucggcugguccuggcccgauggugcaaaguuaccguucacaaucgacaaauga

SEQ ID NO: 148193 - RNA, 1410 nt, Artificial Sequence
  derived and/or modified CDS sequence (opt3) from neuraminidase__InfluenzaA__ADU76313
augaaccccaaucagaagaucauuaccauaggcagcgugugcaugacaaucgggauggccaaccugauucuccaaaucggaaauauuaucuccauauggaucucucacucaauucagcuugguaaccagaaucagaucgagacuuguaaccaaagugucauuacguacgaaaauaacaccuggguuaaucagacauaugugaacaucagcaauacuaacuucgcugcaggccaguccguagugucugucaaacuggccggaaauucgucauugugcccugugagcggaugggcgauauacaguaaggacaacuccauuagaaucggcucuaaaggugauguuuuugugauuagggagccauucaucagcuguuccccguuagaaugccggaccuuuuuccugacacagggggcucuacucaaugacaagcauucaaacggaaccaucaaagaucgcagucccuaucgaacucugaugagcuguccuauuggcgaggucccaucucccuacaacucccguuuugaaucaguggccuggagcgcaagugccugccacgacggcauaaauuggcuuacaaucgggauuucuggaccugauaacggugcuguagcaguucugaaguauaauggcaucauaaccgacacgauuaaguccuggagaaacaauaucuugaggacucaagagagcgagugugccugcgugaacgggucguguuucaccgucaugacagauggaccaucugacggccaggcuuccuacaaaaucuuucggauugaaaaggguaaaaucgugaagucaguggagaugaaugcccccaacuauuacuacgaagagugcaguuguuauccugauagcuccgagauuacuugcgucugccgcgacaauuggcaugggucuaacagaccauggguuagcuucaaucagaaccucgaauaccagauaggauauaucuguucaggcauuuuuggcgauaauccgaggcccaacgacaaaaccgggaguugcggaccuguguccagcaauggugcgaacggcguaaagggguucucuuuuaaguacggaaacggcguguggaucggucggacaaaaucaaucaguagccgcaauggguucgagaugauuugggauccaaacggcuggaccggaacggacaauaacuuuuccauaaagcaagacaucgucggcauuaaugaauggucuggguauucggggagcuucgugcagcaccccgagcugacuggucuggauuguauccgaccuugcuucuggguugaacucauuagaggcaggccaaaagagaacacaaucuggaccuccgggucaaguauaucuuuuuguggagugaauagcgacacugucggcugguccuggcccgauggugcaaaguuaccguucacaaucgacaaauga

SEQ ID NO: 148194 - RNA, 1410 nt, Artificial Sequence; identical to SEQ ID NO: 148193
  derived and/or modified CDS sequence (opt3) from neuraminidase__InfluenzaA__ADU76314

SEQ ID NO: 148195 - RNA, 1410 nt, Artificial Sequence; identical to SEQ ID NO: 148193
  derived and/or modified CDS sequence (opt3) from neuraminidase__InfluenzaA__ADU76315

SEQ ID NO: 148196 - RNA, 1410 nt, Artificial Sequence; identical to SEQ ID NO: 148193
  derived and/or modified CDS sequence (opt3) from neuraminidase__InfluenzaA__ADU76316

SEQ ID NO: 148197 - RNA, 1410 nt, Artificial Sequence
  derived and/or modified CDS sequence (opt3) from neuraminidase__InfluenzaA__ADU76317
augaaccccaaucagaagaucauuaccauaggcagcgugugcaugacaaucgggauggccaaccugauucuccaaaucggaaauauuaucuccauauggaucucucacucaauucagcuugguaaccagaaucagaucgagacuuguaaccaaagugucauuacguacgaaaauaacaccuggguuaaucagacauaugugaacaucagcaauacuaacuucgcugcaggccaguccguagugucugucaaacuggccggaaauucgucauugugcccugugagcggaugggcgauauacaguaaggacaacuccauuagaaucggcucuaaaggugauguuuuugugauuagggagccauucaucagcuguuccccguuagaaugccggaccuuuuuccugacacagggggcucuacucaaugacaagcauucaaacggaaccaucaaagaucgcagucccuaucgaacucugaugagcuguccuauuggcgaggucccaucucccuacaacucccguuuugaaucaguggccuggagcgcaagugccugccacgacggcauaaauuggcuuacaaucgggauuucuggaccugauaacggugcuguagcaguucugaaguauaauggcaucauaaccgacacgauuaaguccuggagaaacaauaucuugaggacucaagagagcgagugugccugcgugaacgggucguguuucaccgucaugacagauggaccaucugacggccaggcuuccuacaaaaucuuucggauugaaaaggguaaaaucgugaagucaguggagaugaaugcccccaacuaucauuacgaagagugcaguuguuacccugauagcuccgagauuacuugcgucugccgcgacaauuggcacgggucuaacagaccauggguuagcuucaaucagaaccucgaauaucagauaggauacaucuguucaggcauuuuuggcgauaauccgaggcccaacgacaaaaccgggaguugcggaccuguguccagcaauggugcgaacggcguaaagggguucucuuuuaaguauggaaacggcguguggaucggucggacaaaaucaaccaguagccgcaauggguucgagaugaucugggauccaaacggcuggacgggaacugacaauaacuuuuccauuaagcaagacauagucggcaucaaugaauggucuggguacucggggagcuucgugcagcaucccgagcugacaggucuggauuguauucgaccuugcuucuggguugaacucaucagaggcaggccaaaagagaacaccauuuggacuuccgggucaaguaucucuuuuuguggagugaauagcgacacagucggcugguccuggcccgauggugcagaguuaccguucaccauagacaaguga

SEQ ID NO: 148198 - RNA, 1410 nt, Artificial Sequence
  derived and/or modified CDS sequence (opt3) from neuraminidase__InfluenzaA__ADU76318
augaaccccaaucagaagaucauuaccauaggcagcgugugcaugacaaucgggauggccaaccugauucuccaaaucggaaauauuaucuccauauggaucucucacucaauucagcuugguaaccagaaucagaucgagacuuguaaccaaagugucauuacguacgaaaauaacaccuggguuaaucagacauaugugaacaucagcaauacuaacuucgcugcaggccaguccguagugucugucaaacuggccggaaauucgucauugugcccugugagcggaugggcgauauacaguaaggacaacuccauuagaaucggcucuaaaggugauguuuuugugauuagggagccauucaucagcuguuccccguuagaaugccggaccuuuuuccugacacagggggcucuacucaaugacaagcauucaaacggaaccaucaaagaucgcagucccuaucgaacucugaugagcuguccuauuggcgaggucccaucucccuacaacucccguuuugaaucaguggccuggagcgcaagugccugccacgacggcauaaauuggcuuacaaucgggauuucuggaccugauaacggugcuguagcaguucugaaguauaauggcaucauaaccgacacgauuaaguccuggagaaacaauaucuugaggacucaagagagcgagugugccugcgugaacgggucguguuucaccgucaugacagauggaccaucugacggccaggcuuccuacaaaaucuuucggauugaaaaggguaaaaucgugaagucaguggagaugaaugcccccaacuaucauuacgaagagugcaguuguuacccugauagcuccgagauuacuugcgucugccgcgacaauuggcacgggucuaacagaccauggguuagcuucaaucauaaccucgaauaucagauaggauacaucuguucaggcauuuuuggcgauaauccgaggcccaacgacaaaaccgggaguugcggaccuguguccagcaauggugcgaacggcguaaagggguucucuuuuaaguauggaaacggcguguggaucggucggacaaaaucaaucaguagccgcaauggguucgagaugauuugggauccaaacggcuggaccggaacggacaauaacuuuuccauaaagcaggacaucgucggcauuaaugaauggucuggguacucggggagcuucgugcaacaccccgagcugacuggucuggauuguauccgaccuugcuucuggguugaacucauuagaggcaggccaaaagagaacacaaucuggaccuccgggucaaguauaucuuuuuguggagugaauagcgacacugucggcugguccuggcccgauggugcagaguuaccguucacaaucgacaaguga

SEQ ID NO: 148199 - RNA, 1410 nt, Artificial Sequence; identical to SEQ ID NO: 146029
  derived and/or modified CDS sequence (opt3) from neuraminidase__InfluenzaA__ADU76319

SEQ ID NO: 148200 - RNA, 1410 nt, Artificial Sequence; identical to SEQ ID NO: 144786
  derived and/or modified CDS sequence (opt3) from neuraminidase__InfluenzaA__ADU76320

SEQ ID NO: 148201 - RNA, 1410 nt, Artificial Sequence; identical to SEQ ID NO: 144786
  derived and/or modified CDS sequence (opt3) from neuraminidase__InfluenzaA__ADU76321

SEQ ID NO: 148202 - RNA, 1410 nt, Artificial Sequence
  derived and/or modified CDS sequence (opt3) from neuraminidase__InfluenzaA__ADU76322
augaaccccaaucagaagaucauuaccauaggcagcgugugcaugacaaucgggauggccaaccugauucuccaaaucggaaauauuaucuccauauggaucucucacucaauucagcuugguaaccagaaucagaucgagacuuguaaccaaagugucauuacguacgaaaauaacaccuggguuaaucagacauaugugaacaucagcaauacuaacuucgcugcaggccaguccguagugucugucaaacuggccggaaauucgucauugugcccugugagcggaugggcgauauacaguaaggacaacuccauuagaaucggcucuaaaggugauguuuuugugauuagggagccauucaucagcuguuccccguuagaaugccggaccuuuuuccugacacagggggcucuacucaaugacaagcauucaaacggaaccaucaaagaucgcagucccuaucgaacucugaugagcuguccuauuggcgaggucccaucucccuacaacucccguuuugaaucaguggccuggagcgcaagugccugccacgacggcauaaauuggcuuacaaucgggauuucuggaccugauaacggugcuguagcaguucugaaguauaauggcaucauaaccgacacgauuaaguccuggagaaacaauaucuugaggacucaagagagcgagugugccugcgugaacgggucguguuucaccgucaugacagauggaccaucugacggccaggcuuccuacaaaaucuuucggauugaaaaggguaaaguggugaagucagucgagaugaaugcccccaacuaucauuacgaagagugcaguuguuacccugauagcuccgagaucacuugcguuugccgcgacaauuggcacgggucuaacagaccaugggugagcuucaaucagaaccucgaauaucagauuggauacauauguucaggcaucuuuggcgauaauccgaggcccaacgacaaaaccgggaguugcggaccuguauccagcaauggugcgaacggcgugaagggguucucuuuuaaguauggaaacggcgucuggauuggucggacaaaaucaaucaguagccgcaauggguucgagaugaucugggauccaaacggcuggaccggaacggacaauaacuuuuccauuaagcaagacauagugggcaucaaugaauggucuggguacucggggagcuucguucagcaucccgagcugacuggucuggauuguauucgaccuugcuucuggguggaacucaucagaggcaggccaaaagagaacacaauuuggaccuccgggucaaucauaaguuuuuguggagucaauucugacacugugggcuggagcuggcccgauggugcagaguuaccguucacaaucgacaaguga

SEQ ID NO: 148203 - RNA, 1410 nt, Artificial Sequence; identical to SEQ ID NO: 148192
  derived and/or modified CDS sequence (opt3) from neuraminidase__InfluenzaA__ADU76323

SEQ ID NO: 148204 - RNA, 1410 nt, Artificial Sequence; identical to SEQ ID NO: 148193
  derived and/or modified CDS sequence (opt3) from neuraminidase__InfluenzaA__ADU76324

SEQ ID NO: 148205 - RNA, 1410 nt, Artificial Sequence; identical to SEQ ID NO: 148192
  derived and/or modified CDS sequence (opt3) from neuraminidase__InfluenzaA__ADU76325

SEQ ID NO: 148206 - RNA, 1410 nt, Artificial Sequence; identical to SEQ ID NO: 148193
  derived and/or modified CDS sequence (opt3) from neuraminidase__InfluenzaA__ADU76326

SEQ ID NO: 148207 - RNA, 1410 nt, Artificial Sequence; identical to SEQ ID NO: 148193
  derived and/or modified CDS sequence (opt3) from neuraminidase__InfluenzaA__ADU76327

SEQ ID NO: 148208 - RNA, 1410 nt, Artificial Sequence; identical to SEQ ID NO: 148192
  derived and/or modified CDS sequence (opt3) from neuraminidase__InfluenzaA__ADU76328

SEQ ID NO: 148209 - RNA, 1410 nt, Artificial Sequence; identical to SEQ ID NO: 148193
  derived and/or modified CDS sequence (opt3) from neuraminidase__InfluenzaA__ADU76329

SEQ ID NO: 148210 - RNA, 1410 nt, Artificial Sequence; identical to SEQ ID NO: 148193
  derived and/or modified CDS sequence (opt3) from neuraminidase__InfluenzaA__ADU76330

SEQ ID NO: 148211 - RNA, 1410 nt, Artificial Sequence; identical to SEQ ID NO: 148193
  derived and/or modified CDS sequence (opt3) from neuraminidase__InfluenzaA__ADU76331

SEQ ID NO: 148212 - RNA, 1410 nt, Artificial Sequence; identical to SEQ ID NO: 148193
  derived and/or modified CDS sequence (opt3) from neuraminidase__InfluenzaA__ADU76332

SEQ ID NO: 148213 - RNA, 1410 nt, Artificial Sequence; identical to SEQ ID NO: 144786
  derived and/or modified CDS sequence (opt3) from neuraminidase__InfluenzaA__ADU76333

SEQ ID NO: 148214 - RNA, 1410 nt, Artificial Sequence; identical to SEQ ID NO: 144786
  derived and/or modified CDS sequence (opt3) from neuraminidase__InfluenzaA__ADU76334

SEQ ID NO: 148215 - RNA, 1410 nt, Artificial Sequence; identical to SEQ ID NO: 144786
  derived and/or modified CDS sequence (opt3) from neuraminidase__InfluenzaA__ADU76335

SEQ ID NO: 148216 - RNA, 1410 nt, Artificial Sequence; identical to SEQ ID NO: 148193
  derived and/or modified CDS sequence (opt3) from neuraminidase__InfluenzaA__ADU76336

SEQ ID NO: 148217 - RNA, 1410 nt, Artificial Sequence; identical to SEQ ID NO: 145553
  derived and/or modified CDS sequence (opt3) from neuraminidase__InfluenzaA__ADU76337

SEQ ID NO: 148218 - RNA, 1410 nt, Artificial Sequence; identical to SEQ ID NO: 146688
  derived and/or modified CDS sequence (opt3) from neuraminidase__InfluenzaA__ADU76338

SEQ ID NO: 148219 - RNA, 1410 nt, Artificial Sequence; identical to SEQ ID NO: 148192
  derived and/or modified CDS sequence (opt3) from neuraminidase__InfluenzaA__ADU76339

SEQ ID NO: 148220 - RNA, 1410 nt, Artificial Sequence; identical to SEQ ID NO: 144786
  derived and/or modified CDS sequence (opt3) from neuraminidase__InfluenzaA__ADU76341

SEQ ID NO: 148221 - RNA, 1410 nt, Artificial Sequence; identical to SEQ ID NO: 144786
  derived and/or modified CDS sequence (opt3) from neuraminidase__InfluenzaA__ADU76342

SEQ ID NO: 148222 - RNA, 1410 nt, Artificial Sequence; identical to SEQ ID NO: 144786
  derived and/or modified CDS sequence (opt3) from neuraminidase__InfluenzaA__ADU76343

SEQ ID NO: 148223 - RNA, 1410 nt, Artificial Sequence; identical to SEQ ID NO: 148193
  derived and/or modified CDS sequence (opt3) from neuraminidase__InfluenzaA__ADU76344

SEQ ID NO: 148224 - RNA, 1410 nt, Artificial Sequence; identical to SEQ ID NO: 148193
  derived and/or modified CDS sequence (opt3) from neuraminidase__InfluenzaA__ADU76345

SEQ ID NO: 148225 - RNA, 1410 nt, Artificial Sequence
  derived and/or modified CDS sequence (opt3) from neuraminidase__InfluenzaA__ADU76346
augaaccccaaucagaagaucauuaccauaggcagcgugugcaugacaaucgggauggccaaccugauucuccaaaucggaaauauuaucuccauauggaucucucacucaauucagcuugguaaccagaaucagaucgagacuuguaaccaaagugucauuacguacgaaaauaacaccuggguuaaucagacauaugugaacaucagcaauacuaacuucgcugcaggccaguccguagugucugucaaacuggccggaaauucgucauugugcccugugagcgggugggcgauauacaguaaggacaacuccauuagaaucggcucuaaaggugauguuuuugugauuagggagccauucaucagcuguuccccguuagaaugccggaccuuuuuccugacacagggggcucuacucaaugacaagcauucaaacggaaccaucaaagaucgcagucccuaucgaacucugaugagcuguccuauuggcgaggucccaucucccuacaacucccguuuugaaucaguggccuggagcgcaagugccugccacgacggcauaaauuggcuuacaaucgggauuucuggaccugauaacggugcuguagcaguucugaaguauaauggcaucauaaccgacacgauuaaguccuggagaaacaauaucuugaggacucaagagagcgagugugccugcgugaacgggucguguuucaccgucaugacagauggaccaucugacggccaggcuuccuacaaaaucuuucggauugaaaaggguaaaaucgugaagucaguggagaugaaugcccccaacuaucauuacgaagagugcaguuguuacccugauagcuccgagauuacuugcgucugccgcgacaauuggcacgggucuaacagaccauggguuagcuucaaucagaaccucgaauaucagauaggauacaucuguucaggcauuuuuggcgauaauccgaggcccaacgacaaaaccgggaguugcggaccuguguccagcaauggugcgaacggcguaaagggguucucuuuuaaguauggaaacggcguguggaucggucggacaaaaucaaucaguagccgcaauggguucgagaugauuugggauccaaacggcuggaccgaaacggacaauaacuuuuccauaaagcaagacaucgucggaauuaaugaguggucuggcuacucggggagcuucgugcagcaucccgaacugacuggacuggauuguauccgaccuugcuucuggguugagcucauuagagguaggccaaaagagaacacaaucuggaccuccggcucaaguauaucuuuuuguggggugaauagcgacacugucggaugguccuggcccgauggcgcagaauuaccguucacaaucgacaaguga

SEQ ID NO: 148226 - RNA, 1410 nt, Artificial Sequence; identical to SEQ ID NO: 145553
  derived and/or modified CDS sequence (opt3) from neuraminidase__InfluenzaA__ADU76347

SEQ ID NO: 148227 - RNA, 1410 nt, Artificial Sequence
  derived and/or modified CDS sequence (opt3) from neuraminidase__InfluenzaA__ADV17285
augaaccccaaucaggagaucauuaccauaggcagcgugugcaugacaaucgggauggccaaccugauucuccaaaucggaaauauuaucuccauauggaucucucacucaauucagcuugguaaccagaaucagaucgaaacuuguaaccaaagugucauuacguacgagaauaacaccuggguuaaucagacauaugugaacaucagcaauacuaacuucgcugcaggccaguccguagugucugucaagcuggccggaaauucgucauugugcccugugagcggaugggcgauauacaguaaagacaacuccauuagaaucggcucuaagggugauguuuuugugauuagggaaccauucaucagcuguuccccguuagagugccggaccuuuuuccugacacagggggcucuacucaaugacaaacauucaaacggaaccaucaaggaucgcagucccuaucgaacucugaugagcuguccuauuggcgaagucccaucucccuacaacucccguuuugagucaguggccuggagcgcaagugccugccacgacggcauaaauuggcuuacaaucgggauuucuggaccugauaacggugcuguagcaguucugaaauauaauggcaucauaaccgacacgauuaaguccuggagaaacaauaucuugaggacucaagagagcgaaugugccugcgugaacgggucguguuucaccgucaugacagauggaccaucugacggccaggcuuccuacaagaucuuucggauugagaaagguaagaucgugaaaucaguggaaaugaaugcccccaacuaucauuacgaggagugcaguuguuacccugauagcuccgaaauuacuugcgucugccgcgacaauuggcacgggucuaacagaccauggguuagcuucaaucagaaccucgaguaucagauaggauacaucuguucaggcauuuuuggcgauaauccgaggcccaacgacaagaccgggaguugcggaccuguguccagcaauggugcgaacggcguaaaaggguucucuuuucgguauggaaacggcguguggaucggucgcacaaagucaaucaguagccgaaauggguucgaaaugauuugggauccaaacggcuggaccggaacggacaauaacuuuuccauaaagcaagacaucgucggcauuaaugaguggucuggguacucggggagcuucgugcagcaucccgaacugacuggucuggauuguaucagaccuugcuucuggguugagcucauuaggggccggccaaaagagaacacaaucuggaccuccgggucaaguauaucuuuuuguggagugaauagcgacacugucggcugguccuggcccgauggugcagaauuaccguucacaaucgacaaguga

SEQ ID NO: 148228 - RNA, 1410 nt, Artificial Sequence; identical to SEQ ID NO: 144786
  derived and/or modified CDS sequence (opt3) from neuraminidase__InfluenzaA__ADV17295

SEQ ID NO: 148229 - RNA, 1410 nt, Artificial Sequence
  derived and/or modified CDS sequence (opt3) from neuraminidase__InfluenzaA__ADV17305
augaaccccaaucagaagaucauuaccauaggcagcgugugcaugacaaucgggauggccaaccugauucuccaaaucggaaauauuaucuccauauggaucucucacucaauucagcuugguaaccagaaucagaucgagacuuguaaccaaagugucauuacguacgaaaauaacaccuggguuaaucagacauaugugaacaucagcaauacuaacuucgcugcaggccaguccguagugucugucaaacuggccggaaauucgucauugugcccugugagcgggugggcgauauacaguaaggacaacuccauuagaaucggcucuaaaggugauguuuuugugauuagggagccauucaucagcuguuccucauuagaaugccggaccuuuuuccugacacagggggcucuacucaaugacaagcauaguaacggaaccaucaaagaucgcagcccguaucgaacucugaugucuugucccauuggcgaggucccuuccccauacaacucacguuuugaaagcguggccuggagugcaucugccugccacgacggcauaaauuggcuuacaaucgggauuuccggaagcgauaacggugcuguagcaguucugaaguauaauggcaucauaaccgacacgauuaagucguggagaaacaauaucuugaggacucaagagucugagugugccugcgugaacggguccuguuucaccaucaugacagauggacccucagacggccaggcuaguuacaaaauuuuucggaucgaaaaggguaaaauugucaagagcguggagaugaaugccccuaacuaucauuacgaagagugcuccuguuacccagauucuagcgagauaacuugcgugugccgcgacaauuggcacgggucaaacagacccugggucaguuucaaucagaaccucgaauaucagaucggauacauuuguuccggcaucuuuggcgauaauccuaggccaaacgacaaaaccgggagcugcggaccgguuucuucaaauggugcgaacggcgugaagggguucaguuuuaaguauggaaacggcguauggaucggucggacaaaaagcauuuccucucgcaauggguucgagaugauaugggaucccaacggcuggaccggaacggacaauaacuuuucgaucaagcaagacauugugggcaucaaugaauggagcggguacuccggaucauucguccagcauccugagcugacuggucuggauuguauucgaccaugcuucuggguggaacucaucagaggcaggcccaaagagaacacaauauggaccagugggucuagcaucuccuuuuguggaguuaauucagacacugugggcuggagcuggccugauggugcagaguuaccauucacaauugacaaguga

SEQ ID NO: 148230 - RNA, 1410 nt, Artificial Sequence; identical to SEQ ID NO: 144786
  derived and/or modified CDS sequence (opt3) from neuraminidase__InfluenzaA__ADV17315

SEQ ID NO: 148231 - RNA, 1410 nt, Artificial Sequence; identical to SEQ ID NO: 146217
  derived and/or modified CDS sequence (opt3) from neuraminidase__InfluenzaA__ADV17325

SEQ ID NO: 148232 - RNA, 1410 nt, Artificial Sequence
  derived and/or modified CDS sequence (opt3) from neuraminidase__InfluenzaA__ADV17335
augaaccccaaucagaagaucauuaccauaggcagcgugugcaugacaaucgggauggccaaccugauucuccaaaucggaaauauuaucuccauauggaucucucacucaauucagcuugguaaccagaaucagaucgagacuuguaaccaaagugucauuacguacgaaaauaacaccuggguuaaucagacauaugugaacaucagcaauacuaacuucgcugcaggccaguccguagugucugucaaacuggccggaaauucgucauugugcccugugagcggaugggcgauauacaguaaggacaacuccauuagaaucggcucuaaaggugauguuuuugugauuagggagccauucaucagcuguuccccguuagaaugccggaccuuuuuccugacacagggggcucuacucaaugacaagcauucaaacggaaccaucaaagaucgcagucccuaucgaacucugaugagcuguccuauuggcgaggucccaucucccuacaacucccguuuugaaucaguggccuggagcgcaagugccugccacgacggcauaaauuggcuuacaaucgggauuucuggaccugauaacggugcuguagcaguucugaaguauaauggcaucauaaccgacacgauuaaguccuggagaaacaauaucuugaggacucaagagagcgagugugccugcgugaacgggucguguuucaccgucaugacagauggaccaucugacggccaggcuuccuacaaaaucuuucggauugaaaaggguaaaaucgugaagucaguggagaugaaugcccccaacuaucauuacgaagagugcaguuguuacccugauagcuccgagauuacuugcgucugccgcgacaauuggcacgggucuaacagaccauggguuagcuucaaucagaaccucgaauaucagauaggauacaucuguucaggcguguuuggcgauaauccgaggcccaacgacaaaaccgggaguugcggaccuguauccagcaauggugcgaacggcgugaagggguucucuuuuaaguauggaaacggcgucuggauuggucggacaaaaucaaucaguagccgcaauggguucgagaugaucugggauccaaacggcuggaccggaacggacaauaacuuuuccauuaagcaagacauagugggcaucaaugaauggucuggguacucggggagcuucguucagcaucccgagcugacuggucuggauuguauucgaccuugcuucuggguggaacucaucagaggcaggccaaaagagaacacaauuuggaccuccgggucaaguaucucuuuuuguggagucaauagcgacacugugggcugguccuggcccgauggugcagagugcccguucacaauagacaaguga

SEQ ID NO: 148233 - RNA, 1410 nt, Artificial Sequence; identical to SEQ ID NO: 144786
  derived and/or modified CDS sequence (opt3) from neuraminidase__InfluenzaA__ADV19022

SEQ ID NO: 148234 - RNA, 1410 nt, Artificial Sequence
  derived and/or modified CDS sequence (opt3) from neuraminidase__InfluenzaA__ADV41679
augaaccccaaucagaagaucauuaccauaggcagcgugugcaugacaaucgggauggccaaccugauucuccaaaucggaaauauuaucuccauauggaucucucacucaauucagcuuagaaaccagaaucagaucgagacuuguaaccaaagugucauuacguacgaaaauaacaccuggguuaaucagacauaugugaacaucagcaauacuaacuucgcugcaggucaguccguagugucugucaaacuggccggcaauucgucauugugcccugugagcgggugggcgauauacaguaaggacaacuccauuaggaucggaucuaaaggcgauguuuuugugauucgggagccauucaucagcuguuccccguuagaaugccgcaccuuuuuccugacacagggugcucuacucaaugacaagcauucaaacgggaccaucaaagaucgaagucccuaucguacucugaugagcuguccuauuggagaggucccaucucccuacaacuccagauuugaaucaguggccuggagcgcaagugccugccacgacggcauaaauuggcuuacaaucggcauuucugggccugauaacggagcuguagcaguucugaaguauaaugguaucauaaccgacacgauuaaguccuggaggaacaauaucuugcggacucaagagagcgagugugccugcgugaacggcucguguuucaccgucaugacagaugggccaucugacggacaggcuuccuacaaaaucuuucgcauugaaaagggcaaaaucgugaagucaguggagaugaaugcccccaacuaucauuacgaagagugcaguuguuacccugauagcuccgagauuacuugcgucugcagagacaauuggcacgguucuaacaggccauggguuagcuucaaucagaaccucgaauaucagauaggguacaucuguucaggaauuuuuggcgauaauccgcggcccaacgacaaaaccggcaguugcgggccuguguccagcaauggagcgaacgguguaaagggcuucucuuuuaaguaugggaacggaguguggaucggccgcacaaaaucaaucaguagccgaaaugguuucgagaugauuugggauccaaacggguggaccggcacggacaauaacuuuuccauaaagcaagacaucgucggaauuaaugaauggucuggcuacucggggagcuucgugcagcaucccgagcugacuggacuggauuguaucagaccuugcuucuggguugaacucauuaggggucggccaaaagagaacacaaucuggaccuccggcucaaguauaucuuuuuguggggugaauagcgacacugucggaugguccuggcccgauggcgcagaguuaccguucacaaucgacaaguga

SEQ ID NO: 148235 - RNA, 1410 nt, Artificial Sequence
  derived and/or modified CDS sequence (opt3) from neuraminidase__InfluenzaA__ADV76582
augaaccccaaucagaagaucauuaccauaggcagcgugucccugacaaucucuacugucugcuucuuuaugcaaauugccauccucauuacgaccguuacacuucacuucaaacaguacgaguuuaacucaccuccaaauaaccaggugaugcugugugaaccgacuaucauagagagaaauaucaccgaaauuguauauuugacaaacaccacuaucgagaaggaaauuugccccaaauuagcugaguacaggaauuggaguaagccucagugugacaucacaggguucgcaccauuuagcaaagauaacuccauacggcugucugccggaggugacauuugggugacccgcgagcccuaugucucgugcgauccugacaaguguuaccaauucgcgcuaggccaggggacgacucucaauaacgugcauucaaauaacaccguucgagaucguacaccauauagaacucugcuuaugaaugaacugggagugcccuuucacuugggcaccaagcaggucugcaucgcuuggagcaguuccucuugucaugacgguaaagccuggcuccacgugugcauuacaggggaugacaagaacgcaaccgccagcuucaucuacaauggaaggcugguagauuccguugugucauggaguaaagagauccugcggacgcaggaaagcgagugugucugcauuaacggcacuuguacaguggugaugaccgacggcucugcuuccgggaaggcagauacuaaaauacucuuuaucgaggaaggaaagauuguccauacaucaaccuuaagcgguagugcccaacacguugaggaaugcucuugcuauccucgcuacccaggcgugagauguguaugcagggacaacuggaagggguccaaucggccgaucguggauauaaacauuaaagaccacagcaucgucucgucuuacguguguuccggacugguuggcgacacgccccgcaagaaugauucaaguagcuccucucauugccuugacccuaacaaugaggaaggugggcacggagugaaaggcugggcuuucgaugacggcaacgaugucuggauggggcgaaccaucaaugagacaagcagauugggauaugagacuuuuaaggugauugaagguuggucaaacccaaaaaguaagcugcagaucaauaggcagguaauuguugacaaaggcaaccgguccggguacagcggaauauucucuguggagggcaagucauguaucaaucguugcuuuuaugucgaacuaauucgcgguagaaaggaggaaaccgaggugcucuggacaaguaacagcaucgucguguucugugggacuuccggcaccuacggaacaggcucuuggcccgauggggccgaccugaaucuuaugccuaucuga

SEQ ID NO: 148236 - RNA, 1410 nt, Artificial Sequence; identical to SEQ ID NO: 144647
  derived and/or modified CDS sequence (opt3) from neuraminidase__InfluenzaA__ADV76590

SEQ ID NO: 148237 - RNA, 1410 nt, Artificial Sequence; identical to SEQ ID NO: 144647
  derived and/or modified CDS sequence (opt3) from neuraminidase__InfluenzaA__ADV76601

SEQ ID NO: 148238 - RNA, 1410 nt, Artificial Sequence; identical to SEQ ID NO: 145640
  derived and/or modified CDS sequence (opt3) from neuraminidase__InfluenzaA__ADV76612

SEQ ID NO: 148239 - RNA, 1410 nt, Artificial Sequence; identical to SEQ ID NO: 144647
  derived and/or modified CDS sequence (opt3) from neuraminidase__InfluenzaA__ADV76623

SEQ ID NO: 148240 - RNA, 1410 nt, Artificial Sequence; identical to SEQ ID NO: 144647
  derived and/or modified CDS sequence (opt3) from neuraminidase__InfluenzaA__ADV76634

SEQ ID NO: 148241 - RNA, 1410 nt, Artificial Sequence; identical to SEQ ID NO: 147514
  derived and/or modified CDS sequence (opt3) from neuraminidase__InfluenzaA__ADV76645

SEQ ID NO: 148242 - RNA, 1410 nt, Artificial Sequence
  derived and/or modified CDS sequence (opt3) from neuraminidase__InfluenzaA__ADV76667
augaaccccaaucagaagaucauuaccauaggcagcgugucccugacaaucgccacugucugcuuccucaugcaaauugcuauccuuguuacgaccgugacacugcacuuuaaacaguacgagugugacucuccugcaucaaaccagguaaugccaugcgaaccgauuaucauagagagaaauaucacugaaauuguguauuugaacaauaccacaaucgagaaggaaauuugucccaaagucguggaguacaggaacuggaguaagccucagugccaaaucaccggguucgccccauuuagcaaagauaauuccauacgguuaucugcgggaggugacauuuggguuacucgcgagcccuaugugucgugugaucauggcaagugcuaccaguucgcucuggggcagggaacaacccuagacaacaagcacucaaaugauacgauccaugaccguauuccucaccgaacucuccugaugaacgaacuuggcgucccauuucaucuggguaccagacagguguguaucgccuggagcaguuccucuugccacgaugggaaagcaugguugcacguauguaucacaggagacgauaagaaugccacugcuagcuucauuuaugacggcaggcucguugauuccauaggcucauggagucaaaacauccugcggacccaggagagcgaaugcguguguauuaaugggacaugcaccgucgugaugacggacggaucugcauccggucgcgccgauacuagaauccuguuuauagaggagggcaaaauugugcauaucucaccccucagcgggagugcucagcacgucgaagagugcucuuguuacccuagguauccaggaguucggugcaucugucgcgacaacuggaagggcuccaaucgaccggugguagacauuaacauggaagauuacagcaucgacucgucuuacgugugcuccgguuuagucggggauacacccagaaacgacgauaggucaaguaauagcaaaucccggaacccuaauaacgagcguggaaaucagggcgugaagggcugggccuucgacaacggggaugacguuuggaugggacgcaccauuucuagagaucugaggagcgguuaugaaacuuuuaaggugauaggcggguggucaacaccaaauaguaaaucccaaaucaaccggcaggucauuguggacagcgauaaucgaucuggauacucaggcaucuucaguguagaggguaagagcuguaucaaccgcugcuuuuauguugagcuuauuagagggaggaaacaggaaacccgggugugguggacguccaauucuauagucguguucuguggcaccucgggaacauacggcacugggagcuggcccgacggagcgaacaucaauuuuaugccuauuuga

SEQ ID NO: 148243 - RNA, 1410 nt, Artificial Sequence; identical to SEQ ID NO: 147516
  derived and/or modified CDS sequence (opt3) from neuraminidase__InfluenzaA__ADV76676

SEQ ID NO: 148244 - RNA, 1410 nt, Artificial Sequence; identical to SEQ ID NO: 146657
  derived and/or modified CDS sequence (opt3) from neuraminidase__InfluenzaA__ADV76697

SEQ ID NO: 148245 - RNA, 1410 nt, Artificial Sequence
  derived and/or modified CDS sequence (opt3) from neuraminidase__InfluenzaA__ADV76708
augaaccccaaucagaagaucauuaccauaggcagcgugucccugacaaucucuacuauuugcuucuuuaugcagacggccauccucauuaccacagucacucuucacuucaaacagugugaguuuaacucaccuccaaauaaccagguuaugcugugcgaaccgaccaucauagagagaaauaucacagaaauuguguacuugaccaacaucacuauugagaaggaaaucugucccaaauuagcugaguauaggaauuggaguaagccucagugcgacauaacaggguucgcaccauuuagcaaagauaacuccauucggcugucugccggaggugacaucuggguaacccgcgagcccuacgugucgugugauccugacaagugcuaucaauucgcgcuaggccaggggacgacucucaauaacguccauucaaauaacaccgugcgagaucguacaccauacagaacucugcuuaugaaugaacugggaguucccuuucacuugggcaccaaacagguguguauugcuuggagcaguuccucuugccaugacgguaaggccuggcuccacgucuguaucacaggggaugacaagaacgcaaccgccagcuucaucuauaauggaaggcugguggauuccguaguuucauggaguaaagagauucugcggacgcaggaaagcgagugcguguguauaaacggcacuugcacagucgugaugaccgacggcucugcuuccgggaaggcagauacuaaaauccucuuuauugaggaaggaaagaucgugcauacaucaaccuuaagcgguagugcccaacacgucgaggaaugcucuuguuacccucgcuauccaggcguuagaugcguguguagggacaacuggaagggguccaaucggccgauaguagauauuaacaucaaagaccacagcaucgugucgucuuacgucugcuccggacuggugggcgacacgccccgcaagaaugauucaaguagcuccucucauugucuugacccuaacaaugaggaaggugggcacggaguuaaaggcugggcuuucgaugacggcaacgauguguggauggggcgaaccauuagcgagaagucaagauugggauacgagacauuuaaagucaucgaagguuggaguaauccaaaguccaaacugcagauuaacaggcaagugauaguagaccggggcaaucguagcggguauucuggaaucuucucaguugagggcaagaguugcauuaaccgcuguuuuuacguggaacuaaucagagguaggaaggaggaaacugagguccucuggaccagcaauuccaucguggucuucugcgggacaucuggcacuuauggaaccggcucguggcccgauggggccgacauuaaccugaugccuauauga

SEQ ID NO: 148246 - RNA, 1410 nt, Artificial Sequence
  derived and/or modified CDS sequence (opt3) from neuraminidase__InfluenzaA__ADV76719
augaaccccaaucagaagaucauuaccauaggcagcgugucccugacaaucucuacuauuugcuucuuuaugcaaaucgccauucucaucacgaccgucacacuucacuucaaacaguacgaguuuaacucaccuccaaauaaccagguuaugcugugugaaccgacuauaaucgagaagaauauuaccgaaaucguguauuugacaaacaccacuauugagaaagaaaucugccccaaguuagcugaguacagaaauuggaguaaaccucagugugacauaacaggguucgcaccauuuagcaaggauaacuccauuaggcugucugccggaggugacaucuggguaacccgggagcccuaugugucgugcgauccugacaaguguuaccaauucgcgcuaggccaggggacgacucucaauaacguccauucaaauaacaccgugcgcgaucgaacaccauaucguacucugcuuaugaaugaacugggaguucccuuucacuugggcaccaaacaggugugcauugcuuggagcaguuccucuugucaugacgguaaggccuggcuccacgucugcaucacaggggaugacaaaaacgcaaccgccagcuucaucuacaauggaagacugguggauuccguaguuucauggaguaaggagauucugaggacgcaggaaagcgagugugugugcauaaacggcacuuguacagucgugaugaccgacggcucugcuuccgggaaagcagauacuaagauccucuuuauugaggaaggaaagaucgugcauacaucaaccuuaagcgguagugcccaacacgucgaggaaugcucuugcuauccucgguacccaggcguucgcugugugugcagagacaacuggaaaggguccaauaggccgauaguagauauuaacaucaaggaccacagcaucgugucgucuuacgucuguuccggacuggugggcgacacgccccggaaaaaugauucaaguagcuccucucauugccuugacccuaacaaugaggaaggugggcacggaguuaagggcugggcuuucgaugacggcaacgauguguggauggggcgcaccauuagcgagaaaucacgauugggauaugagacauuuaaggucaucgaagguuggaguaauccaaaauccaagcugcagaugaacagacaggugauuguagacaggggcaaucggagcggguacucuggaauauucucaguugagggcaagaguuguaucaaccguugcuuuuauguggaacuaauucgcgguagaaaagaggaaacugagguccucuggaccagcaauuccaucguggucuucugugggacaucuggcacuuacggaaccggcucguggcccgauggggccgacaucaaccugaugccuauuuga

SEQ ID NO: 148247 - RNA, 1410 nt, Artificial Sequence
  derived and/or modified CDS sequence (opt3) from neuraminidase__InfluenzaA__ADV76730
augaaccccaaucagaagaucauuaccauaggcagcgugucccugacaaucucuacuauuugcuucuuuaugcaaaucgccauucucaucacgaccgucacacuucacuucaaacaguacgaguuuaacucaccuccaaauaaccagguuaugcugugugaaccgacuauaaucgagagaaauauuaccgaaaucguguauuugacaaacaccacuauugagaaggaaaucugccccaaauuagcugaguacaggaauuggaguaagccucagugugacauaacaggguucgcaccauuuagcaaagauaacuccauucggcugucugccggaggugacaucuggguaacccgcgagcccuaugugucgugcgauccugacaaguguuaccaauucgcgcuaggccaggggacgacucucaauaacguccauucaaauaacaccgugcgagaucguacaccauauagaacucugcuuaugaaugaacugggaguucccuuucacuugggcaccaaacaggugugcauugcuuggagcaguuccucuugucaugacgguaaggccuggcuccacgucugcaucacaggggaugacaagaacgcaaccgccagcuucaucuacaauggaaggcugguggauuccguaguuucauggaguaaagagacgcugcggacucaggaaagcgagugugugugcauuaacggcacauguaccgucgugaugacugacggcucugcuuccgggaaggcagauacaaaaauacucuuuaucgaggaaggaaagauugugcauaccucaacguuaagcgguagugcccaacacgucgaggaaugcucuugcuauccucgcuacccaggcguuagaugugugugcagggacaacuggaagggguccaaucggccgaucguagauauaaacauuaaagaccacagcaucgugucgucuuacgucuguuccggacuggugggcgacacccccaggaaggaugacucaaguagcuccucucauugccuugauccuaauaacgaggaaggugggcacggaguuaaaggcugggcuuucgacgauggcaaugacguguggauggggcgaacaaucagcgagaagucaagauugggauaugagacuuuuaaagucauugaagguuggaguaacccaaaguccaaacugcagaucaaucgccaggugauuguagaucggggcaaccguagcggguacucuggaauauucucaguugagggcaagaguuguaucaaucgcugcuuuuauguggaacuaauuagagguaggaaggaggaaaccgagguccucuggacaagcaacuccaucguggucuucugugggacuucuggcaccuacggaacaggcucguggcccgacggggccgauaucaaucugaugccuauuuga

SEQ ID NO: 148248 - RNA, 1410 nt, Artificial Sequence
  derived and/or modified CDS sequence (opt3) from neuraminidase__InfluenzaA__ADV78132
augaaccccaaucagaagaucauuaccauaggcagcgugugcaugacaaucgggauggccaaccugauucuccaaaucggaaauauuaucuccauauggaucucucacucaauucagcuugguaaccagagucagaucgagacuuguaaucaaagcgucauuacguacgaaaacaauaccuggcugaaccagacauauguuaauaucuccaacacuaauuucgcugcaggccagucugugguaucggugaaauuggccgggaacucaucauuaugcccugucaguggaugggcgauauacuccaaggacaauucuauuagaaucggcagcaaaggugauguguuuguuauuagggagccauucaucuccuguucaccgagugaaugccggaccuuuuuccugacacagggggcucuacucaacgacaagcauagcaauggaaccaucaaagaucgcucucccuaucgaacucugauguccuguccuauuggcgaggugccaucacccuacaacagccguuuugaaagugucgccuggucugcauccgccugccacgacggcauaaacuggcuuacaaucgggauuagcggaccugauaauggugcuguggcaguacugaaguauaacggcaucauaaccgacacgauuaagucguggagaaauaacaucuugaggacucaagagucugagugugccugcguuaauggguccuguuucaccaucaugacagauggaccaucagacggccaggcuaguuacaaaauuuuucggaucgaaaaggguaaaauugucaagagcguggggaugaacgcccccaauuaucauuacgaggaaugcuccuguuacccugauucuagcgagauaacuugcgugugccgcgacaacuggcacggaucaaauagaccaugggugaguuucaaccagaaucucgaguaucagaucggcuacauuuguuccggcaucuuuggggauaacccgaggcccaaugacaaaaccggaagcugcgguccugucucuucaaacggcgcgaaugggguuaagggauucaguuuuaaguauggcaacgguguguggaucgggcggacaaaaagcauuuccucucgcaagggcuucgaaaugauaugggauccaaacggauggaccggcacggacaauaacuuuucgaucaaacaagacauuguagggaucaaugaguggagcggauacuccgguucauucgugcagcaucccgaacugacuggccuggauuguauucgaccuugcuucugggucgagcucaucagagggaggccaaaggaaaacacaauaugggcaaguggaucuagcaucuccuuuuguggcgugaauagcgacaccguugguuggagcuggcccgauggggccgaguuaccguucauuaucgacaaauga

SEQ ID NO: 148249 - RNA, 1413 nt, Artificial Sequence
  derived and/or modified CDS sequence (opt3) from neuraminidase__InfluenzaA__ADW09104
augaaccccaaucagaagaucauuaccauaggcagcaucuccauugccaucgggauuaucucucugaugcuccaaauaggaaacaucauuucaaucugggcuagucacagcauucagacagguucccagaauaacacuggcaucugcaaucagagaauaauuacguacgagaacucuaccugggugaaucauacauaugucaacaucaauaacacuaauguuguggcaggggaagacaaaaccucgguaacacuugccggaaacucaagccuguguaguauuuccggcugggcgaucuacaccaaggauaauucuaucaggauugguagcaaaggggacguguucgucauacgggagccuuuuaucuccugcucacacuuggaaugucgcacuuucuuuuuaacacaaggagcucugcuaaacgauaagcauaguaauggcaccgugaaagaccgaagcccauaucgugcccucaugucuugcccgcugggcgaggcacccuccccuuacaacucaaaguucgaaagcguugccuggagugcuucugcaugucacgaugggaugggauggcuuacgauugguaucuccggcccagacaacggggccguggcuguccugaaguauaauggaauaauuacuggcaccaucaaaagcuggaagaaacagaucuugagaacacaggagucggagugcguguguaugaacgguucuugcuuuacuauuaugaccgaugggcccaauaacaaggccgcguccuacaaaaucuucaagauugaaaagggaaaaguaacaaagucaauagagcucaaugcaccuaacuuuuauuacgaagaguguaguugcuacccagacaccggcaucguuaugugugugugcagggauaauuggcauggcagcaaccggcccugggucuccuucaaucagaaccuggacuaucaaauuggguacaucugcucuggaguguuuggugauaauccucgcccagaggacggcgaagggagcuguaacccggugacggucgauggagccaauggcguuaaagguuucucauauaaguacgggaacggcguguggaucggaagaacuaaaaguaauaggcugcggaagggcuuugagaugauuugggaccccaacggguggacaaacaccgacuccgauuucagcguaaaacaggacguggucgcuauaacugauuggucuggauauucagguaguuuugugcagcacccugaacucacaggcuuagacugcauccgcccauguuucuggguugagcuggugcgagggcuucccagagaaaauaccacgauuuggaccagcggauccucuaucucguucugcggcgucaacagcgauacagccaauugguccuggccugacggugcagaguugccauuuacuauugauaaguga

SEQ ID NO: 148250 - RNA, 1413 nt, Artificial Sequence; identical to SEQ ID NO: 145509
  derived and/or modified CDS sequence (opt3) from neuraminidase__InfluenzaA__ADW09114

SEQ ID NO: 148251 - RNA, 1413 nt, Artificial Sequence
  derived and/or modified CDS sequence (opt3) from neuraminidase__InfluenzaA__ADW09123
augaaccccaaucagaagaucauuaccauaggcagcaucuccauugccaucgggauuacaucucugaugcuccaaaucggaaacauaaucucaauuugggcuagucacagcauccagacugguucccagaauaacacgggcauuugcaaucagagaaucauaaccuacgagaacucuacaugggugaaucauacuuaugucaacauuaauaacaccaauguuguggcaggggaagacaaaacaucgguaacccuugccggaaacucaagccuguguaguaucuccggcugggcgauuuacacuaaggauaauucuaucaggaucgguagcaaaggggacguguucgucauucgggagccuuuuauauccugcucacacuuggaaugucgcacauucuuuuuaacccaaggagcucugcuaaacgauaagcauaguaauggcacggugaaagaccgaagcccauaucgugcccucaugucuugcccgcugggcgaggcacccuccccuuacaacucaaaguucgaaagcguugccuggagugcuucugcaugucacgaugggaugggauggcuuacuaucgguauuuccggcccagacaacggggccguggcuguccugaaguauaauggaaucauaaccggcacaauuaaaagcuggaagaaacagaucuugagaacucaggagucggagugcguguguaugaacgguucuugcuuuaccaucaugacagaugggcccuccaauaaggccgcgucauacaaaauuuucaagaucgaaaagggaaaaguaaccaagaguauugagcucaacgcaccuaauuuuuauuacgaagaguguagcugcuacccagacacgggcauaguuaugugugugugcagggauaacuggcauggcuccaaucggcccugggucucuuucaaccagaaucuggacuaucaaaucggguacauuugcagcggaguguuuggugauaacccucgcccagaggacggcgaagggucauguaauccggugacugucgauggagccgacggcguuaaagguuucaguuauaaguacgggaacggcguguggaucggaagaacaaaauccaauaggcugcggaagggcuuugagaugaucugggaccccaacggguggaccaauacugauagcgacuucucuguaaaacaggauguggucgcuauuacagacuggucaggauauagugguagcuuugugcagcacccugaacucaccggcuuagauugcauacgcccauguuucuggguugagcuggugcgagggcuucccagagaaaacacgaccaucuggacauccggaucuucgauuagcuucugcggcgucaacuccgacacugccaauuggucauggccugauggugcagaguugccauuuaccaucgacaaguga

SEQ ID NO: 148252 - RNA, 1413 nt, Artificial Sequence
  derived and/or modified CDS sequence (opt3) from neuraminidase__InfluenzaA__ADW09156
augaaccccaaucagaagaucauuaccauaggcagcaucuccauugccaucgggauuaucucucugaugcuccaaauaggaaacaucauuucaaucugggcuagucacagcauucagacagguucccagaauaacacuggcaucugcaaucagagaauaauuacguacgagaacucuaccugggugaaucauacauaugucaacaucaauaacacuaauguuguggcaggggaagacaaaaccucgguaacacuugccggaaacucaagccuguguaguauuuccggcugggcgaucuacaccaaggauaauucuaucaggauugguagcaaaggggacguguucgucauacgggagccuuuuaucuccugcucacacuuggaaugucgcacuuucuuuuuaacacaaggagcucugcuaaacgauaagcauaguaauggcaccgugaaagaccgaagcccauaucgugcccucaugucuugcccgcugggcgaggcacccuccccuuacaacucaaaguucgaaagcguugccuggagugcuucugcaugucacgaugggaugggauggcuuacgauugguaucuccggcccagacaacggggccguggcuguccugaaguauaauggaauaauuacuggcaccaucaaaagcuggaagaaacagaucuugagaacacaggagucggagugcguguguaugaacgguucuugcuuuacuauuaugaccgaugggcccuccaauaaggccgcgucauacaaaaucuucaagauugaaaagggaaaaguaacaaagaguauagagcucaacgcaccuaauuuuuauuacgaagaguguagcugcuacccagacaccggcaucguuaugugugugugcagggauaacuggcauggcuccaaucggcccugggucucuuucaaccagaaucuggacuaucaaauuggguacaucugcagcggaguguuuggugauaacccucgcccagaggacggcgaagggucauguaauccggugacggucgauggagccgacggcguuaaagguuucaguuauaaguacgggaacggcguguggaucggaagaacuaaauccaauaggcugcggaagggcuuugagaugauuugggaccccaacggguggacaaauaccgauagcgacuucucuguaaaacaggauguggucgcuauaacugacuggucaggauauagugguagcuuugugcagcacccugaacucacaggcuuagauugcauccgcccauguuucuggguugagcuggugcgagggcuucccagagaaaacaccacgauuuggaccuccggaucuucgaucagcuucugcggcgucaacuccgacacagccaauuggucauggccugauggugcagaguugccauuuacuauugacaaguga

SEQ ID NO: 148253 - RNA, 1413 nt, Artificial Sequence
  derived and/or modified CDS sequence (opt3) from neuraminidase__InfluenzaA__ADW09167
augaaccccaaucagaagaucauuaccauaggcagcaucuccauugccaucgggauuaucucucugaugcuccaaauaggaaacaucauuucaaucugggcuagucacagcauucagacagguucccagaauaacacuggcaucugcaaucagagaauaauuacguacgagaacucuaccugggugaaucauacauaugucaacaucaauaacacuaauguuguggcaggggaagacaaaaccucgguaacacuugccggaaacucaagccuguguaguauuuccggcugggcgaucuacaccaaggauaauucuaucaggauugguagcaaaggggacguguucgucauacgggagccuuuuaucuccugcucacacuuggaaugucgcacuuucuuuuuaacacaaggagcucugcuaaacgauaagcauaguaauggcaccgugaaagaccgaagcccauaucgugcccucaugucuugcccgcugggcgaggcacccuccccuuacaacucaaaguucgaaagcguugccuggagugcuucugcaugucacgaugggaugggauggcuuacgauugguaucuccggcccagacaacggggccguggcuguccugaaguauaauggaauaauuacuggcaccaucaaaagcuggaagaaacagaucuugagaacacaggagucggagugcguguguaugaacgguucuugcuuuacuauuaugaccgaugggcccuccaauaaggccgcgucauacaaaaucuucaagauugaaaagggaaaaguaacaaagaguauagagcucaacgcaccuaauuuuuauuacgaagaguguagcugcuacccagacaccggcaucguuaugugugugugcagggauaacuggcauggcuccaaucggcccugggucucuuucaaccagaaucuggacuaucaaauuggguacaucugcagcggaguguuuggugauaacccucgcccagaggacggcgaagggucauguaauccggugacggucaacggagccgauggcguuaaagguuucaguuauaaguacgggaauggcguguggaucggaagaacuaaauccaacaggcugcggaagggcuuugagaugauuugggaccccaauggguggacaaacaccgacagcgauuucucuguaaaacaggacguggucgcuauaacugauuggucaggauauagugguagcuuugugcagcacccugaacucacaggcuuagacugcauccgcccauguuucuggguugagcuggugcgagggcuucccagagaaaacaccacgauuuggaccuccggaucuucgaucagcuucugcggcgucaauuccgauacagccaacuggucauggccugacggugcagaguugccauuuacuauugauaaguga

SEQ ID NO: 148254 - RNA, 1413 nt, Artificial Sequence; identical to SEQ ID NO: 145509
  derived and/or modified CDS sequence (opt3) from neuraminidase__InfluenzaA__ADW09178

SEQ ID NO: 148255 - RNA, 1413 nt, Artificial Sequence; identical to SEQ ID NO: 145509
  derived and/or modified CDS sequence (opt3) from neuraminidase__InfluenzaA__ADW09189

SEQ ID NO: 148256 - RNA, 1413 nt, Artificial Sequence; identical to SEQ ID NO: 148253
  derived and/or modified CDS sequence (opt3) from neuraminidase__InfluenzaA__ADW09211

SEQ ID NO: 148257 - RNA, 1413 nt, Artificial Sequence
  derived and/or modified CDS sequence (opt3) from neuraminidase__InfluenzaA__ADW09222
augaaccccaaucagaagaucauuaccauaggcagcaucuccauugccaucgggauuaucucucugaugcuccaaauaggaaacaucauuucaaucugggcuagucacagcauucagacagguucccagaauaacacuggcaucugcaaucagagaauaauuacguacgagaacucuaccugggugaaucauacauaugucaacaucaauaacacuaauguuguggcaggggaagacaaaaccucgguaacacuugccggaaacucaagccuguguaguauuuccggcugggcgaucuacaccaaggauaauucuaucaggauugguagcaaaggggacguguucgucauacgggagccuuuuaucuccugcucacacuuggaaugucgcacuuucuuuuuaacacaaggagcucugcuaaacgauaagcauaguaauggcaccgugaaagaccgaagcccauaucgugcccucaugucuugcccgcugggcgaggcacccuccccuuacaacucaaaguucgaaagcguugccuggagugcuucugcaugucacgaugggaugggauggcuuacgauugguaucuccggcccagacaacggggccguggcuguccugaaguauaauggaauaauuacuggcaccaucaaaagcuggaagaaacagaucuugagaacacaggagucggagugcguguguaugaacgguucuugcuuuacuauuaugaccgaugggcccuccaauaaggccgcgucauacaaaaucuucaagauugaaaagggaaaaguaacaaagaguauagagcucaacgcaccuaauuuuuauuacgaagaguguagcugcuacccagacaccggcaucguuaugugugugugcagggauaacuggcauggcuccaaucggcccugggucucuuucaaccagaaucuggacuaucaaauuggguacaucugcagcggaguguuuggugauaacccucgcccagaggacggcgaagggucauguaauagugugacggucgauggagccgacggcguuaaagguuucuccuauaaguacgggaacggcguguggaucggaagaacuaaaagcaauaggcugcggaagggcuuugagaugauuugggacccgaacggguggacaaauaccgauucugacuucucaguaaaacaggauguggucgcuauaacugacuggaguggauauagcgguuccuuugugcagcaccccgaacucacaggcuuagauugcauccgcccuuguuucuggguugagcuggugcgagggcuuccaagagaaaacaccacgauuuggaccucuggaucgagcaucuccuucugcggcgucaacucagacacagccaauuggaguuggcccgauggugcagaguugccuuuuacuauugacaaguga

SEQ ID NO: 148258 - RNA, 1413 nt, Artificial Sequence
  derived and/or modified CDS sequence (opt3) from neuraminidase__InfluenzaA__ADW09233
augaaccccaaucagaagaucauuaccauaggcagcaucuccauugccaucgggacaauuucucugaugcuccaaaucggaaacauaaucucaauuugggcuagucacagcauccagacugguucccagaauaacacgggcauuugcaaucagagaaucauaaccuacgagaacucuacaugggugaaucauacuuaugucaacauuaauaacaccaauguuguggcaggggaagacaaaacaucgguaacccuugccggaaacucaagccuguguaguaucuccggcugggcgauuuacacuaaggauaauucuaucaggaucgguagcaaaggggacguguucgucauucgggagccuuuuauauccugcucacacuuggaaugucgcacauucuuuuuaacccaaggagcucugcuaaacgauaagcauaguaauggcacggugaaagaccgaagcccauaucgugcccucaugucuugcccgcugggcgaggcacccuccccuuacaacucaaaguucgaaagcguugccuggagugcuucugcaugucacgaugggaugggauggcuuacuaucgguauuuccggcccagacaacggggccguggcuguccugaaguauaauggaaucauaaccggcacaauuaaaagcuggaagaaacagaucuugagaacucaggagucggagugcguguguaugaacgguucuugcuuuaccaucaugacagaugggcccuccaauaaggccgcgucauacaaaauuuucaagaucgaaaagggaaaaguaaccaagaguauugagcucaacgcaccuaauuuuuauuacgaagaguguagcugcuacccagacacgggcauaguuaugugugugugcagggauaacuggcauggcuccaaucggcccugggucucuuucaaccagaaucuggacuaucaaaucggguacauuugcagcggaguguuuggugauaacccucgcccagaggacggcgaagggucauguaauccggugacugucgauggagccaacggcguuaaagguuucaguuauaaguacgggaauggcguguggaucggaagaacaaaauccaacaggcugcggaagggcuuugagaugaucugggaccccaauggguggaccaacacugacagcgauuucucuguaaaacaggacguggucgcuauuacagauuggucaggauauagugguagcuuugugcagcacccugaacucaccggcuuagacugcauacgcccauguuucuggguugagcuggugcgagggcuucccagagaaaacacgaccaucuggacauccggaucuucgauuagcuucugcggcgucaauuccgauacugccaacuggucauggccugacggugcagaguugccauuuaccaucgauaaguga

SEQ ID NO: 148259 - RNA, 1413 nt, Artificial Sequence; identical to SEQ ID NO: 148252
  derived and/or modified CDS sequence (opt3) from neuraminidase__InfluenzaA__ADW09244

SEQ ID NO: 148260 - RNA, 1413 nt, Artificial Sequence; identical to SEQ ID NO: 148252
  derived and/or modified CDS sequence (opt3) from neuraminidase__InfluenzaA__ADW09255

SEQ ID NO: 148261 - RNA, 1413 nt, Artificial Sequence; identical to SEQ ID NO: 148252
  derived and/or modified CDS sequence (opt3) from neuraminidase__InfluenzaA__ADW09266

SEQ ID NO: 148262 - RNA, 1413 nt, Artificial Sequence; identical to SEQ ID NO: 148252
  derived and/or modified CDS sequence (opt3) from neuraminidase__InfluenzaA__ADW09277

SEQ ID NO: 148263 - RNA, 1413 nt, Artificial Sequence; identical to SEQ ID NO: 145509
  derived and/or modified CDS sequence (opt3) from neuraminidase__InfluenzaA__ADW09288

SEQ ID NO: 148264 - RNA, 1413 nt, Artificial Sequence; identical to SEQ ID NO: 148253
  derived and/or modified CDS sequence (opt3) from neuraminidase__InfluenzaA__ADW09299

SEQ ID NO: 148265 - RNA, 1413 nt, Artificial Sequence; identical to SEQ ID NO: 145509
  derived and/or modified CDS sequence (opt3) from neuraminidase__InfluenzaA__ADW09310

SEQ ID NO: 148266 - RNA, 1413 nt, Artificial Sequence; identical to SEQ ID NO: 145509
  derived and/or modified CDS sequence (opt3) from neuraminidase__InfluenzaA__ADW09330

SEQ ID NO: 148267 - RNA, 1413 nt, Artificial Sequence; identical to SEQ ID NO: 148252
  derived and/or modified CDS sequence (opt3) from neuraminidase__InfluenzaA__ADW10475

SEQ ID NO: 148268 - RNA, 1413 nt, Artificial Sequence; identical to SEQ ID NO: 148253
  derived and/or modified CDS sequence (opt3) from neuraminidase__InfluenzaA__ADW10486

SEQ ID NO: 148269 - RNA, 1413 nt, Artificial Sequence; identical to SEQ ID NO: 145509
  derived and/or modified CDS sequence (opt3) from neuraminidase__InfluenzaA__ADW10497

SEQ ID NO: 148270 - RNA, 1413 nt, Artificial Sequence
  derived and/or modified CDS sequence (opt3) from neuraminidase__InfluenzaA__ADW10508
augaaccccaaucagaagaucauuaccauaggcagcaucuccauugccaucgggauuaucucucugaugcuccaaauaggaaacaucauuucaaucugggcuagucacagcauucagacagguucccagaauaacacuggcaucugcaaucagagaauaauuacguacgagaacucuaccugggugaaucauacauaugugaacaucaauaacacuaauguuguggcaggggaagacaaaaccucgguaacacuugccggaaacucaagccuguguaguauuuccggcugggcgaucuacaccaaggauaauucuaucaggauugguagcaaaggggacguguucgucauacgggagccuuuuaucuccugcucacacuuggaaugucgcacuuucuuuuuaacacaaggagcucuggugaacgauaagcauaguaauggcaccguuaaagaccgaagcccauaucgugcccuaaugucuugcccgcucggcgaggcacccuccccuuacaacucaaaguucgaaagcguggccuggagugcuucugcaugucacgaugggaugggauggcugacgauugguaucuccggcccagacaacggggccgucgcugugcuuaaguauaauggaauaauuacuggcaccaucaaaagcuggaagaaacagauccugagaacacaggagucggagugcguauguaugaacgguucuugcuuuacuauuaugaccgaugggcccuccaauaaggccgcgucauacaaaaucuucaagauugaaaagggaaaaguuacaaagaguauagaguugaacgcaccuaauuuuuauuacgaagaguguagcugcuacccagacaccggcaucgugaugugugucugcagggauaacuggcauggcuccaaucggcccugggugucuuucaaccagaaucucgacuaucaaauuggguacaucugcagcggaguguuuggugauaacccucgcccagaggacggcgaagggucauguaauccggucacgguuaacggagccgauggcgugaaagguuucaguuauaaguacgggaauggcguauggaucggaagaacuaaauccaacaggcugcggaagggcuuugagaugauuugggaccccaauggguggacaaacaccgacagcgauuucucugugaaacaggacgucguggcuauaacugauuggucaggauauagugguagcuuuguucagcacccugaacugacaggccucgacugcauccgcccauguuucuggguggaguuaguccgagggcugcccagagaaaacaccacgauuuggaccuccggaucuucgaucagcuucugcggcgucaauuccgauacagccaacuggucauggccugacggugcagagcuuccauuuacuauugauaaguga

SEQ ID NO: 148271 - RNA, 1413 nt, Artificial Sequence; identical to SEQ ID NO: 145509
  derived and/or modified CDS sequence (opt3) from neuraminidase__InfluenzaA__ADW10519

SEQ ID NO: 148272 - RNA, 1413 nt, Artificial Sequence; identical to SEQ ID NO: 145509
  derived and/or modified CDS sequence (opt3) from neuraminidase__InfluenzaA__ADW10530

SEQ ID NO: 148273 - RNA, 1413 nt, Artificial Sequence
  derived and/or modified CDS sequence (opt3) from neuraminidase__InfluenzaA__ADW10541
augaaccccaaucagaagaucauuaccauaggcagcaucuccauugccaucgggauuaucucucugaugcuccaaauaggaaacaucauuucaaucugggcuagucacagcauucagacagguucccagaauaacacuggcaucugcaaucagagaauaauuacguacgagaacucuaccugggugaaucauacauaugucaacaucaauaacacuaauguuguggcaggggaagacaaaaccucgguaacacuugccggaaacucaagccuguguaguauuuccggcugggcgaucuacaccaaggauaauucuaucaggauugguagcaaaggggacguguucgucauacgggagccuuuuaucuccugcucacacuuggaaugucgcacuuucuuuuuaacacaaggagcucugcuaaacgauaagcauaguaauggcaccgugaaagaccgaagcccauaucgugcccucaugucuugcccgcugggcgaggcacccuccccuuacaacucaaaguucgaaagcguugccuggagugcuucugcaugucacgaugggaugggauggcuuacgauugguaucuccggcccagacaacggggccguggcuguccugaaguauaauggaauaauuacuggcaccaucaaaagcuggaagaaacagaucuugagaacacaggagucggagugcguguguauggaugguucuugcuuuacuauuaugaccgacgggcccuccaacaaggccgcgucauacaaaaucuucaagauugaaaagggaaaaguaacaaagaguauagagcucaaugcaccuaacuuuuauuacgaagaguguagcugcuacccagauaccggcaucguuaugugugugugcagggacaauuggcauggcuccaaccggcccugggucucuuucaaucagaaccuggauuaucaaauuggguacaucugcagcggaguguuuggugacaauccucgcccagaggauggcgaagggucauguaacccggugacggucgacggagccaauggcguuaaagguuucaguuauaaguacgggaacggcguguggaucggaagaacuaaauccaauaggcugcggaagggcuuugagaugauuugggaccccaacggguggacaaauaccgauagcgacuucucuguaaaacaggauguggucgcuauaacugacuggucaggauauagugguagcuuugugcagcacccugaacucacaggcuuagauugcauccgcccauguuucuggguugagcuggugcgagggcuucccagagaaaacaccacgauuuggaccuccggaucuucgaucagcuucugcggcgucaacuccgacacagccaauuggucauggccugauggugcagaguugccauuuacuauugacaaguga

SEQ ID NO: 148274 - RNA, 1413 nt, Artificial Sequence
  derived and/or modified CDS sequence (opt3) from neuraminidase__InfluenzaA__ADW10552
augaaccccaaucagaagaucauuaccauaggcagcaucuccauugccaucgggauuaucucucugaugcuccaaauaggaaacaucauuucaaucugggcuagucacagcauucagacagguucccagaauaacacuggcaucugcaaucagagaauaauuacguacgagaacucuaccugggugaaucauacauaugucaacaucaauaacacuaauguuguggcaggggaagacaaaaccucgguaacacuugccggaaacucaagccuguguaguauuuccggcugggcgaucuacaccaaggauaauucuaucaggauugguagcaaaggggacguguucgucauacgggagccuuuuaucuccugcucacacuuggaaugucgcacuuucuuuuuaacacaaggagcucugcuaaacgauaagcauaguaauggcaccgugaaagaccgaagcccauaucgugcccucaugucuugcccgcugggcgaggcacccuccccuuacaacucaaaguucgaaagcguugccuggagugcuucugcaugucacgaugggaugggauggcuuacgauugguaucuccggcccagacaacggggccguggcuguccugaaguauaauggaauaauuacuggcaccaucaaaagcuggaagaaacagaucuugagaacacaggagucggagugcguguguaugaacgguucuugcuuuacuauuaugaccgaugggcccuccaauaaggccgcgucauacaaaaucuucaagauugaaaagggaaaaguaacaaagaguauagagcucaacgcaccugacuuuuauuacgaagaguguagcugcuacccagauaccggcaucguuaugugugugugcagggacaauuggcauggcuccaaccggcccugggucucuuucaaucagaaccuggauuaucaaauuggguacaucugcagcggaguguuuggugacaauccucgcccagaggauggcgaagggucauguaacccggugacggucaauggagccgacggcguuaaagguuucaguuauaaguacgggaacggcguguggaucggaagaacuaaauccaauaggcugcggaagggcuuugagaugauuugggaccccaacggguggacaaauaccgauagcgacuucucuguaaaacaggauguggucgcuauaacugacuggucaggauauagugguagcuuugugcagcacccugaacucacaggcuuagauugcauccgcccauguuucuggguugagcuggugcgagggcuucccagagaaaacaccacgauuuggaccuccggaucuucgaucagcuucugcggcgucaacuccgacacagccaauuggucauggccugauggugcagaguugccauuuacuauugacaaguga

SEQ ID NO: 148275 - RNA, 1413 nt, Artificial Sequence; identical to SEQ ID NO: 147985
  derived and/or modified CDS sequence (opt3) from neuraminidase__InfluenzaA__ADW10563

SEQ ID NO: 148276 - RNA, 1413 nt, Artificial Sequence; identical to SEQ ID NO: 145509
  derived and/or modified CDS sequence (opt3) from neuraminidase__InfluenzaA__ADW10574

SEQ ID NO: 148277 - RNA, 1413 nt, Artificial Sequence
  derived and/or modified CDS sequence (opt3) from neuraminidase__InfluenzaA__ADW10585
augaaccccaaucagaagaucauuaccauaggcagcaucuccauugccaucgggauuaucucucugaugcuccaaauaggaucaaucauuaguaucugggcuagccacuccauucagacagguucucagaacaauacuggcaucugcaaccagagaauaauuacguacgagaauagcaccugggugaaccauacauaugucaauaucaacaauacuaacguuguggcaggggaagacaaaaagucaguaacccuugccggaaauagcagucuguguuccauuucuggcugggcgaucuacacaaaagauaacagcaucaggauugguuccaagggggacguguucgucauacgggagccuuuuaucucaugcagucacuuggaaugucgcaccuucuuuuuaacucaaggagcucugcuaaaugauaaacauagcaacggcacagugaaggaccgaucuccauaucgugcccucauguccugcccgcugggcgaggcacccucaccuuacaauagcaaguucgaaaguguugccuggucugcuuccgcaugucacgaugggaugggauggcuuaccauugguaucagcggcccagacaacggggccguggcuguccugaaauauaacggaauaauuacgggcacuaucaagucguggaaaaagcagaucuugagaacccaggagucugagugcguguguaugaaugguuccugcuuuacaauuaugacugaugggcccucaaacaaagccgcgaguuacaagaucuucaagauugaaaaaggaaagguaaccaaaagcauagagcucaaugcaccuaacuuuuauuacgaagaguguuccugcuacccagacacaggcaucguuaugugugugugcagggauaauuggcauggcucuaaccggcccugggucagcuucaaucagaaccuggaguaucaaauuggguacaucugcucaggaguguuuggugacaauccucgcccagaagauggcgaggggaguuguaacccggugaccgucgacggagccaauggcguuaaggguuucuccuauaaauacgggaacggcguguggaucggaagaacgaagucgaauaggcugcggaaaggcuuugaaaugauuugggaucccaacggguggacuaauacagacucugacuucucaguaaagcaggauguggucgcuauaaccgacuggaguggauauagcgguuccuuugugcagcacccugagcucacuggcuuagauugcauccgcccauguuucuggguugaacuggugcgagggcuucccagagagaacacaaccauuuggacgucuggaucgagcaucuccuucugcggcgucaacucagacaccgccaauuggaguuggccugauggugcagaguugccauuuacaauugacaaguga

SEQ ID NO: 148278 - RNA, 1413 nt, Artificial Sequence; identical to SEQ ID NO: 148253
  derived and/or modified CDS sequence (opt3) from neuraminidase__InfluenzaA__ADW10596

SEQ ID NO: 148279 - RNA, 1413 nt, Artificial Sequence; identical to SEQ ID NO: 148252
  derived and/or modified CDS sequence (opt3) from neuraminidase__InfluenzaA__ADW10607

SEQ ID NO: 148280 - RNA, 1413 nt, Artificial Sequence; identical to SEQ ID NO: 148252
  derived and/or modified CDS sequence (opt3) from neuraminidase__InfluenzaA__ADW10618

SEQ ID NO: 148281 - RNA, 1413 nt, Artificial Sequence; identical to SEQ ID NO: 148252
  derived and/or modified CDS sequence (opt3) from neuraminidase__InfluenzaA__ADW10629

SEQ ID NO: 148282 - RNA, 1413 nt, Artificial Sequence; identical to SEQ ID NO: 148252
  derived and/or modified CDS sequence (opt3) from neuraminidase__InfluenzaA__ADW10724

SEQ ID NO: 148283 - RNA, 1413 nt, Artificial Sequence; identical to SEQ ID NO: 148253
  derived and/or modified CDS sequence (opt3) from neuraminidase__InfluenzaA__ADW10735

SEQ ID NO: 148284 - RNA, 1413 nt, Artificial Sequence; identical to SEQ ID NO: 148253
  derived and/or modified CDS sequence (opt3) from neuraminidase__InfluenzaA__ADW10746

SEQ ID NO: 148285 - RNA, 1413 nt, Artificial Sequence
  derived and/or modified CDS sequence (opt3) from neuraminidase__InfluenzaA__ADW10757
augaaccccaaucagaagaucauuaccauaggcagcaucuccauugccaucgggauuaucucucugaugcuccaaauaggaaacaucauuucaaucugggcuagucacagcauucagacaagaucccagaauaacacugguaucugcaaucagaggauaauuacguacgagaacucuaccugggugaaucauacauaugucaacaucaauaacacuaauguuguggcaggcggggacaaaaccucgguaacacuugccggaaacucaagccuguguaguauuuccggcugggcgaucuacaccaaggauaauucuauccggauugguagcaaaggggacguguucgucauacgcgaaccuuuuaucuccugcucacacuuggagugucgaacuuucuuuuuaacacaaggagcucugcuaaacgauaagcauaguaauggcaccgugaaagaccguagcccauauagagcccucaugucuugcccgcugggcgaagcacccuccccuuacaacucaaaguucgagagcguugccuggagugcuucugcaugucacgaugggaugggauggcuuacgauugguaucuccggcccagacaacggggccguggcuguccugaaguauaauggaauaauuacuggcaccaucaaaagcuggaagaaacagaucuugaggacacaggaaucggagugcguguguaugaacgguucuugcuuuacucucaugaccgaugggcccuccaauaaggccgcgucauacaaaauuuucaagaucgagaagggaaaaguaacaaagaguauugaacugaacgcaccuaauuuuuauuacgaggaauguagcugcuacccagacaccggcauaguuaugugugugugccgggauaacuggcauggcuccaaucgccccugggucucuuucaaccagaaucuggacuaucaaaucggguacauuugcagcggaguguuuggugauaacccuagaccagaggacggcgaggggucauguaauccggugacggucgauggagccaacggcguuaaagguuucaguuauaaguacgggaauggcguguggaucggaaggacuaaauccaaccggcuccgcaagggcuuugaaaugaucugggaccccaauggguggacaaacaccgacagcgauuucucuguaaaacaggacguggucgcuauuacugauuggucaggauauagugguagcuuugugcagcacccugaguuaacaggccuggacugcauacgaccauguuucuggguugaacuugugagaggguugcccagggagaacaccacgaucuggaccuccggaucuucgauuagcuucugcggcgucaauuccgauacagccaacuggucauggccugacggugcagaacugccauuuacuaucgauaaguga

SEQ ID NO: 148286 - RNA, 1413 nt, Artificial Sequence; identical to SEQ ID NO: 148252
  derived and/or modified CDS sequence (opt3) from neuraminidase__InfluenzaA__ADW10768

SEQ ID NO: 148287 - RNA, 1413 nt, Artificial Sequence; identical to SEQ ID NO: 145509
  derived and/or modified CDS sequence (opt3) from neuraminidase__InfluenzaA__ADW10779

SEQ ID NO: 148288 - RNA, 1413 nt, Artificial Sequence
  derived and/or modified CDS sequence (opt3) from neuraminidase__InfluenzaA__ADW10790
augaaccccaaucagaagaucauuaccauaggcagcaucuccauugccaucgggauuaucucucugaugcuccaaauaggaaacaucauuucaaucugggcuagucacagcauucagacagguucccagaauaacacuggcaucugcaaucagagaauaauuacguacgagaacucuaccugggugaaucauacauaugucaacaucaauaacacuaauguuguggcaggggaagacaaaaccucgguaacacuugccggaaacucaagccuguguaguauuuccggcugggcgaucuacaccaaggauaauucuaucaggauugguagcaaaggggacguguucgucauacgggagccuuuuaucuccugcucacacuuggaaugucgcacuuucuuuuuaacacaaggagcucugcuaaacgauaagcauaguaauggcaccgugaaagaccgaagcccauaucgugcccucaugucuugcccgcugggcgaggcacccuccccuuacaacucaaaguucgaaagcguugccuggagugcuucugcaugucacgaugggaugggauggcuuacgauugguaucuccggcccagacaacggggccguggcuguccugaaguauaauggaauaauuacuggcaccaucaaaagcuggaagaaacagaucuugagaacacaggagucggagugcguguguaugaacgguucuugcuuuacuauuaugaccgaugggcccuccaauaaggccgcgucauacaaaaucuucaagauugaaaagggaaaaguaacaaagaguauagagcucaacgcaccuaauuuuuauuacgaagaguguagcugcuacccagacaccggcaucguuaugugugugugcagggauaacuggcauggcuccaaucggcccugggucucuuucaaccagaaucuggacuaucaaauuggguacaucugcagcggaguguuuggugauaacccucgcccagaggacggcgaagggucauguaauccggugacggucgauggagccaacggcguuaaagguuucaguuauaaguacgggaauggcguguggaucggaagaacuaaauccaacaggcugcggaagggcuuugagaugauuugggaccccaauggguggacaaacaccgacagcgauuucucuguaaaacaggacguggucgcuauaacugauuggucaggauauagugguagcuuugugcagcacccugaacucacaggcuuagacugcaucauuccauguuucuggguugagcuggugcgcgggcuuccccgagaaaacgccaccaucuggacguccggaucuucgauuagcuucugcggcgucaauuccgauaccgcaaacuggucauggccugacggugcugaguugccauuuacaaucgauaaguga

SEQ ID NO: 148289 - RNA, 1413 nt, Artificial Sequence; identical to SEQ ID NO: 146978
  derived and/or modified CDS sequence (opt3) from neuraminidase__InfluenzaA__ADW10801

SEQ ID NO: 148290 - RNA, 1413 nt, Artificial Sequence; identical to SEQ ID NO: 148252
  derived and/or modified CDS sequence (opt3) from neuraminidase__InfluenzaA__ADW10812

SEQ ID NO: 148291 - RNA, 1413 nt, Artificial Sequence; identical to SEQ ID NO: 148004
  derived and/or modified CDS sequence (opt3) from neuraminidase__InfluenzaA__ADW10823

SEQ ID NO: 148292 - RNA, 1413 nt, Artificial Sequence
  derived and/or modified CDS sequence (opt3) from neuraminidase__InfluenzaA__ADW10834
augaaccccaaucagaagaucauuaccauaggcagcaucuccauugccaucgggauuaucucucugaugcuccaaauaggaaacaucauuucaaucugggcuagucacagcauucagacagguucccagaauaacacuggcaucugcaaucagagaauaauuacguacgagaacucuaccugggugaaucauacauaugucaacaucaauaacacuaauguuguggcaggggaagacaaaaccucgguaacacuugccggaaacucaagccuguguaguauuuccggcugggcgaucuacaccaaggauaauucuaucaggauugguagcaaaggggacguguucgucauacgggagccuuuuaucuccugcucacacuuggaaugucgcacuuucuuuuuaacacaaggagcucugcuaaacgauaagcauaguaauggcaccgugaaagaccgaagcccauaucgugcccucaugucuugcccgcugggcgaggcacccuccccuuacaacucaaaguucgaaagcguugccuggagugcuucugcaugucacgaugggaugggauggcuuacgauugguaucuccggcccagacaacggggccguggcuguccugaaguauaauggaauaauuacuggcaccaucaaaagcuggaagaaacagaucuugagaacacaggagucggagugcguguguaugaacgguucuugcuuuacuauuaugaccgaugggcccuccaauaaggccgcgucauacaaaaucuucaagauugaaaagggaaaaguaauaaagaguaucgagcucaacgcaccuaauuuuuauuacgaagaguguagcugcuacccagacacaggcauuguuaugugugugugcagggauaacuggcauggcuccaaucggcccugggucucuuucaaccagaaucuggacuaucaaaucggguacaucugcagcggaguguuuggugauaacccucgcccagaggacggcgaagggucauguaauccggugaccgucgauggagccaacggcguuaaagguuucaguuauaaguacgggaauggcguguggauuggaagaacgaaauccaacaggcugcggaagggcuuugagaugauaugggaccccaauggguggacuaacacagacagcgauuucucuguaaaacaggacguggucgcuaucaccgauuggucaggauauagugguagcuuugugcagcacccugaacucacuggcuuagacugcauucgcccauguuucuggguugagcuggugcgagggcuucccagagaaaacacaaccaucuggacguccggaucuucgauuagcuucugcggcgucaauuccgauaccgccaacuggucauggccugacggugcagaguugccauuuacaaucgauaaguga

SEQ ID NO: 148293 - RNA, 1413 nt, Artificial Sequence; identical to SEQ ID NO: 148253
  derived and/or modified CDS sequence (opt3) from neuraminidase__InfluenzaA__ADW10845

SEQ ID NO: 148294 - RNA, 1413 nt, Artificial Sequence
  derived and/or modified CDS sequence (opt3) from neuraminidase__InfluenzaA__ADW10856
augaaccccaaucagagaaucauuaccauaggcagcaucuccauugccaucgggauuaucucucugaugcuccaaauaggaaacaucauuucaaucugggcuagucacagcauucagacagguucccagaauaacacuggcaucugcaaucagaggauaauuacguacgagaacucuaccugggugaaucauacauaugucaacaucaauaacacuaauguuguggcaggggaagacaagaccucgaugacacuugccggaaacucaagccuguguaguauuuccggcugggcgaucuacaccaaagauaauucuauccggauugguagcaagggggacguauucgugauacgcgagccuuuuaucuccugcucacacuuggaaugucgaacuuucuuuuuaacacaaggagcucugcuaaacgauaaacauaguaauggcaccgccaaggaccguagcccauauagagcacucaugucuugcccgcugggcgaggcccccuccccuuacaacucaaaauucgaaagcgucgcuuggagugcaucugccugucacgaugggaugggauggcuuacgauugguaucuccggcccagacaacggggcuguggccguucugaaguauaauggaauaauuacuggcaccaucaagagcuggaaaaagcagaucuugaggacacaggagucggagugcguguguaugaacgguucuugcuuuacuauuaugaccgaugggcccuccaauaaagcggcaucauacaagaucuucaaaauugaaaagggaaaggucacaaaaaguauagagcucaacgccccuaauuuuuauuacgaagaguguagcugcuacccagacaccggcaucgugauguguguaugccgggauaacuggcauggcuccaaucgccccuggguuucuuucaaccagaaucuggacuaucaaauuggguacaucugcagcggaguguuuggugauaacccuagaccagaggacggcgaagggucauguaauccggucacgguggauggagcuaacggcgugaaggguuucaguuauaaauacgggaauggcgucuggaucggaaggacuaaguccaaccggcugcgcaaaggcuuugagaugauuugggaccccaauggguggacaaacaccgacagcgauuucucuguuaagcaggacgugguagccauaacugauuggucaggauauagugguagcuuugugcagcacccugaacucacaggcuuagacugcauccgaccauguuucugggucgagcuggugagagggcuucccagggaaaacaccacgauuuggaccuccggaucuucgaucagcuucugcggcguuaauuccgauacagcaaacuggucauggccugacggugcugaguugccauuuacuauugauaaauga

SEQ ID NO: 148295 - RNA, 1413 nt, Artificial Sequence; identical to SEQ ID NO: 148252
  derived and/or modified CDS sequence (opt3) from neuraminidase__InfluenzaA__ADW10867

SEQ ID NO: 148296 - RNA, 1413 nt, Artificial Sequence; identical to SEQ ID NO: 148252
  derived and/or modified CDS sequence (opt3) from neuraminidase__InfluenzaA__ADW10878

SEQ ID NO: 148297 - RNA, 1413 nt, Artificial Sequence; identical to SEQ ID NO: 148252
  derived and/or modified CDS sequence (opt3) from neuraminidase__InfluenzaA__ADW10889

SEQ ID NO: 148298 - RNA, 1413 nt, Artificial Sequence; identical to SEQ ID NO: 145509
  derived and/or modified CDS sequence (opt3) from neuraminidase__InfluenzaA__ADW10900

SEQ ID NO: 148299 - RNA, 1410 nt, Artificial Sequence; identical to SEQ ID NO: 146532
  derived and/or modified CDS sequence (opt3) from neuraminidase__InfluenzaA__ADW11155

SEQ ID NO: 148300 - RNA, 1410 nt, Artificial Sequence; identical to SEQ ID NO: 144786
  derived and/or modified CDS sequence (opt3) from neuraminidase__InfluenzaA__ADW23530

SEQ ID NO: 148301 - RNA, 1410 nt, Artificial Sequence
  derived and/or modified CDS sequence (opt3) from neuraminidase__InfluenzaA__ADW54483
augaaccccaaucagaagaucauuaccauaggcagcgugugcaugacaaucgggauggccaaccugaugcuccaaauuggaaauaucauuuccaucuggauaucucacucaauccagcuugguaaccagagucagauugagacuuguaaucaaagcgucaucacguacgaaaacaauaccuggguuaaccagacauaugugaauauuuccaacacuaauuucgcugcaggccagucuguagugucggucaaacuggccgggaacagcagcuugugcccugugaguggaugggcgaucuacuccaaggacaauucuauaagaauuggcagcaaaggugauguuuuugugaucagggagccauucauuuccuguucaccguuagaaugccggaccuuuuuccugacacagggggcucuacucaacgacaagcauaguaauggaaccaucaaagaucgcagccccuaucgaacucugaugucuuguccuaucggcgaggucccaucccccuacaacucacguuuugaaagcguggccuggagugcaucugccugccacgacggcauuaacuggcuuacaauagggaucuccggaccugauaauggugcuguagcaguucugaaguauaacggcauuaucaccgacacgauaaagagcuggagaaauaacauuuugaggacucaagagucggagugugccugcgugaaugggucuuguuucaccaucaugacagauggaccauccgacggccaggcuucauacaaaaucuuucggauugaaaaggguaaaaucgucaagaguguggagaugaacgcccccaauuaucauuacgaagagugcagcuguuacccugauuccucugagauuacuugcgugugccgcgacaacuggcacgggagcaauagaccaugggucucauucaaccagaaucucgaauaucagauaggauacaucuguaguggcauuuuuggcgauaacccgaggcccaaugacaaaaccggguccugcggaccuguuagcucuaacggugcgaauggcgugaagggguucucauuuaaguauggaaacggcguauggaucggucggacaaaaaguaucagcucccgcaagggguucgagaugauuugggauccaaacggcuggaccggaacggacaauaacuuuucuauaaaacaagacaucgugggcauuaaugaauggucgggguacagcggauccuucguccagcaucccgagcugacuggucuggauuguauccgaccuugcuucuggguggaacucauuagaggcaggccaaaggagaacacaaucuggaccucagggaguucuauaucauuuuguggaguuaauuccgacacugugggcuggucauggcccgauggugcagaguuaccguucacaaucgacaaauga

SEQ ID NO: 148302 - RNA, 1410 nt, Artificial Sequence
  derived and/or modified CDS sequence (opt3) from neuraminidase__InfluenzaA__ADW54494
augaaccccaaucagaagaucauuaccauaggcagcgugugcaugacaaucgggauggccaaccugauucuccaaaucggaaauauuaucuccauauggaucucucacucaauucagcuugguaaccagaaucagaucgagacuuguaaccaaagugucauuacguacgaaaauaacaccuggguuaaucagacauaugugaacaucagcaauacuaacuucgcugcaggccaguccguagugucugucaaacuggccggaaauucgucauugugcccugugagcggaugggcgauauacaguaaggacaacuccauuagaaucggcucuaaaggugauguuuuugugauuagggagccauucaucagcuguuccccguuagaaugccggaccuuuuuccugacacagggggcucuacucaaugacaagcauucaaacggaaccaucaaagaucgcagucccuaucgaacucugaugagcuguccuauuggcgaggucccaucucccuacaacucccguuuugaaucaguggccuggagcgcaagugccugccacgacggcauaaauuggcuuacaaucgggauuucuggaccugauaacggugcuguagcaguucugaaguauaauggcaucauaaccgacacgauuaaguccuggagaaacaauaucuugaggacucaagagagcgagugugccugcgugaacgggucguguuucaccgucaugacagauggaccaucugacggccaggcuuccuacaaaaucuuucggauugaaaaggguaaaaucgugaagucaguggagaugaaugcccccaacuaucauuacgaagagugcaguuguuacccugauagcuccgagauuacuugcgucugccgcgacaauuggcacgggucuaacagaccauggguuagcuucaaucagaaccucgaauauaggauaggauacaucuguucaggcauuuuuggcgauaauccgcggcccaacgacaaaaccgggaguugcggaccuguguccagcaauggugcgaacggcguaaagggguucucuuuuaaguauggaaacggcguguggaucggucgcacaaaaucaaucaguagccgaaauggguucgagaugauuugggauccaaacggcuggaccggaacggacaauaacuuuuccauaaagcaggacaucauuggcaucaaugaauggucuggguacucggggagcuucguccaacaucccgagcugacuggucuggauuguauuagaccuugcuucuggguggaacucaucaggggccggccaaaagagaacacaauauggaccuccgggucaaguaucucuuuuuguggaguuaauagcgacacugugggcugguccuggcccgauggugcagaguuaccguucacaauugacaaguga

SEQ ID NO: 148303 - RNA, 1410 nt, Artificial Sequence
  derived and/or modified CDS sequence (opt3) from neuraminidase__InfluenzaA__ADW54514
augaaccccaaucagaagaucauuaccauaggcagcgugugcaugacaaucgggauggccaaccugauucuccaaaucggaaauauuaucuccauauggaucucucacucaauucagcuugguaaccagaaucagaucgagacuuguaaccaaagugucauuacguacgaaaauaacaccuggguuaaucagacauaugugaacaucagcaauacuaacuucgcugcaggccaguccguagugucugucaaacuggccggaaauucgucauugugcccugugagcggaugggcgauauacaguaaggacaacuccauuagaaucggcucuaaaggugauguuuuugugauuagggagccauucaucagcuguuccccguuagaaugccggaccuuuuuccugacacagggggcucuacucaaugacaagcauucaaacggaaccaucaaagaucgcagucccuaucgaacucugaugagcuguccuauuggcgaggucccaucucccuacaacucccguuuugaaucaguggccuggagcgcaagugccugccacgacggcauaaauuggcuuacaaucgggauuucuggaccugauaacggugcuguagcaguucugaaguauaauggcaucauaaccgacacgauuaaguccuggaaaaacaauaucuugagaacucaagagagcgagugugccugcgugaacgggucguguuucaccgucaugacagauggaccaucugacggccaggcuuccuacaagaucuuuaggauugaaaaagguaagaucgugaaaucaguggagaugaaugcccccaacuaucauuacgaagagugcaguuguuacccugauagcuccgagauuacuugcgucugccgggacaauuggcacgggucuaaccgcccauggguuagcuucaaucagaaccucgaauauagaauaggauacaucuguucaggcauuuuuggcgauaauccgaggcccaacgacaagaccgggaguugcggaccuguguccagcaauggugcgaacggcguaaagggguucucuuuuaaauauggaaacggcguguggaucggucggacaaagucaaucaguagccgcaauggguucgagaugauuugggauccaaacggcuggaccggaacggacaauaacuuuuccaaaaagcaggacauaaucggcauuaaugaauggucuggguacucggggagcuucguccaacaucccgagcugacuggucuggauuguauccgaccuugcuucuggguggaacucauuagaggcaggccaaaagagaacacaaucuggaccuccgggucaaguauaucuuuuuguggaguuaauagcgacacugugggcugguccuggcccgauggugcagaguuaccguucacaaucgacaaguga

SEQ ID NO: 148304 - RNA, 1410 nt, Artificial Sequence
  derived and/or modified CDS sequence (opt3) from neuraminidase__InfluenzaA__ADW54522
augaaccccaaucagaagaucauuaccauaggcagcgugugcaugaucauugggauggccaaccugauccuccaaauuggaaauaucauauccaucuggauuucucacucaauccagcuugguaaccagaaucagauugagacauguaaccaaagugucaucacuuacgaaaauaacacguggguuaaucagaccuaugugaacauaagcaauacaaacuucgcugcaggccaguccguagugucugucaaacuggccggaaauucgucauugugcccugugagcggaugggcgauuuacaguaaggacaacuccaucagaauuggcucuaaaggugauguuuuugugaucagggagccauucaucagcuguuccccguuagaaugccggaccuuuuuccugacucagggggcucuacucaaugacaagcauucaaacggaacaauuaaagaucgcagucccuaucgaacccugaugagcuguccuauaggcgaggucccaucucccuacaacucccguuuugaaucaguggccuggagcgcaagugccugccacgacggcaucaauuggcuuacuauugggaucucuggaccugauaacggugcuguagcaguucugaaguauaauggcauaauuacagacaccaucaaguccuggagaaacaauagguugcggacgcaagagagcgagugugccugcgugaacgggucguguuucacugucaugaccgauggaccaucugacggccaggcuuccuacaaaaucuuucgcauugaaaaggguaaaaucgugaagucaguggagaugaaugcccccaacuaucauuacgaagagugcaguuguuacccugauagcuccgagauuacaugcgucugcagagacaauuggcacgggucuaacaggccauggguuagcuucaaucagaaccucgaauaucagauaggauacaucuguucaggcauuuuuggcgauaauccgcggcccaacgacaaaacugggaguugcggaccuguguccagcaauggugcgaacggcguaaagggguucucuuuuaaguauggaaacggcguguggaucggucgcaccaaaucaaucaguagccgaaagggguucgagaugauuugggauccaaauggcuggacaggaaccgacaacaauuuuuccauaaaacaagacaucgucggcauuaacgaauggucuggguacucggggagcuucgugcagcaucccgagcugacgggucuggauuguaucagaccuugcuucuggguugaacucauuaggggccggccaaaggagaauacuaucuggacauccgggucaaguauaucuuuuuguggagugaacagcgacaccgucggcugguccuggcccgauggugcagaguuaccguucacuaucgacaaauga

SEQ ID NO: 148305 - RNA, 1410 nt, Artificial Sequence
  derived and/or modified CDS sequence (opt3) from neuraminidase__InfluenzaA__ADW65826
augaaccccaaucagaagaucauuaccauaggcagcgugugcaugacaaucgggauggccaaccugauucuccaaaucggaaauauuaucuccauauggaucucucacucaauucagcuugguaaccagagucagaucgagacuuguaaucaaagcgucauuacguacgaaaacaauaccuggguuaaccagacauaugugaauaucuccaacacuaauuucgcugcaggccagucuguagugucggucaaacuggccgggaacagcucauugugcccugugaguggaugggcgauauacuccaaggacaauucuauuagaaucggcagcaaaggugauguuuuugugauuagggagccauucaucuccuguucaccguuagaaugccggaccuuuuuccugacacagggggcucuacucaacgacaagcauaguaauggaaccaucaaagaucgcagccccuaucgaacucugaugucuuguccuauuggcgaggucccaucccccuacaacucacguuuugaaagcguggccuggagugcaucugccugccacgacggcauaaacuggcuuacaaucgggauuuccggaccugauaauggugcuguagcaguucugaaguauaacggcaucauaaccgacacgauuaagagcuggagaaauaacaucuugaggacucaagagucggagugugccugcgugaaugggucuuguuucaccaucaugacagauggaccauccgacggccaggcuucauacaaaauuuuucggaucgaaaaggguaaaauugucaagaguguggagaugaacgcccccaauuaucauuacgaagagugcagcuguuacccugauuccucugagauaacuugcgugugccgcgacaacuggcacgggagcaauagaccaugggucucauucaaccagaaucucgaauaucagaucggauacauuuguaguggcaucuuuggcgauaacccgaggcccaaugacaaaaccggguccugcggaccuguuagcucuaacggugcgaauggcgugaagggguucucauuuaaguauggaaacggcguauggaucggucggacaaaaaguauuagcucccgcaagggguucgagaugauaugggauccaaacggcuggaccggaacggacaauaacuuuucuaucaaacaagacauugugggcaucaaugaauggucgggguacagcggauccuucguccagcaucccgagcugacuggucuggauuguauucgaccuugcuucuggguggaacucaucagaggcaggccaaaggagaacacaauauggaccucagggaguucuaucagcuuuuguggaguuaauuccgacacugugggcuggucauggcccgauggugcagaguuaccguucacaauugacaaauga

SEQ ID NO: 148306 - RNA, 1410 nt, Artificial Sequence; identical to SEQ ID NO: 144647
  derived and/or modified CDS sequence (opt3) from neuraminidase__InfluenzaA__ADW80519

SEQ ID NO: 148307 - RNA, 1410 nt, Artificial Sequence; identical to SEQ ID NO: 144647
  derived and/or modified CDS sequence (opt3) from neuraminidase__InfluenzaA__ADW82127

SEQ ID NO: 148308 - RNA, 1410 nt, Artificial Sequence; identical to SEQ ID NO: 144647
  derived and/or modified CDS sequence (opt3) from neuraminidase__InfluenzaA__ADW82138

SEQ ID NO: 148309 - RNA, 1410 nt, Artificial Sequence; identical to SEQ ID NO: 144647
  derived and/or modified CDS sequence (opt3) from neuraminidase__InfluenzaA__ADW82149

SEQ ID NO: 148310 - RNA, 1410 nt, Artificial Sequence; identical to SEQ ID NO: 144647
  derived and/or modified CDS sequence (opt3) from neuraminidase__InfluenzaA__ADW82158

SEQ ID NO: 148311 - RNA, 1410 nt, Artificial Sequence; identical to SEQ ID NO: 144647
  derived and/or modified CDS sequence (opt3) from neuraminidase__InfluenzaA__ADW82169

SEQ ID NO: 148312 - RNA, 1410 nt, Artificial Sequence; identical to SEQ ID NO: 144647
  derived and/or modified CDS sequence (opt3) from neuraminidase__InfluenzaA__ADW82180

SEQ ID NO: 148313 - RNA, 1410 nt, Artificial Sequence; identical to SEQ ID NO: 144786
  derived and/or modified CDS sequence (opt3) from neuraminidase__InfluenzaA__ADW82191

SEQ ID NO: 148314 - RNA, 1410 nt, Artificial Sequence; identical to SEQ ID NO: 144786
  derived and/or modified CDS sequence (opt3) from neuraminidase__InfluenzaA__ADW82201

SEQ ID NO: 148315 - RNA, 1410 nt, Artificial Sequence; identical to SEQ ID NO: 144786
  derived and/or modified CDS sequence (opt3) from neuraminidase__InfluenzaA__ADW82211

SEQ ID NO: 148316 - RNA, 1410 nt, Artificial Sequence; identical to SEQ ID NO: 144786
  derived and/or modified CDS sequence (opt3) from neuraminidase__InfluenzaA__ADW82221

SEQ ID NO: 148317 - RNA, 1410 nt, Artificial Sequence; identical to SEQ ID NO: 144786
  derived and/or modified CDS sequence (opt3) from neuraminidase__InfluenzaA__ADW82231

SEQ ID NO: 148318 - RNA, 1410 nt, Artificial Sequence; identical to SEQ ID NO: 144786
  derived and/or modified CDS sequence (opt3) from neuraminidase__InfluenzaA__ADW82241

SEQ ID NO: 148319 - RNA, 1410 nt, Artificial Sequence; identical to SEQ ID NO: 144786
  derived and/or modified CDS sequence (opt3) from neuraminidase__InfluenzaA__ADW82251

SEQ ID NO: 148320 - RNA, 1410 nt, Artificial Sequence; identical to SEQ ID NO: 144786
  derived and/or modified CDS sequence (opt3) from neuraminidase__InfluenzaA__ADW82261

SEQ ID NO: 148321 - RNA, 1410 nt, Artificial Sequence; identical to SEQ ID NO: 144786
  derived and/or modified CDS sequence (opt3) from neuraminidase__InfluenzaA__ADW82271

SEQ ID NO: 148322 - RNA, 1410 nt, Artificial Sequence; identical to SEQ ID NO: 148305
  derived and/or modified CDS sequence (opt3) from neuraminidase__InfluenzaA__ADW95306

SEQ ID NO: 148323 - RNA, 1410 nt, Artificial Sequence; identical to SEQ ID NO: 148305
  derived and/or modified CDS sequence (opt3) from neuraminidase__InfluenzaA__ADW95313

SEQ ID NO: 148324 - RNA, 1410 nt, Artificial Sequence; identical to SEQ ID NO: 148305
  derived and/or modified CDS sequence (opt3) from neuraminidase__InfluenzaA__ADW95320

SEQ ID NO: 148325 - RNA, 1410 nt, Artificial Sequence; identical to SEQ ID NO: 148305
  derived and/or modified CDS sequence (opt3) from neuraminidase__InfluenzaA__ADW95327

SEQ ID NO: 148326 - RNA, 1410 nt, Artificial Sequence
  derived and/or modified CDS sequence (opt3) from neuraminidase__InfluenzaA__ADW95333
augaaccccaaucagaagaucauuaccauaggcagcgugugcaugacaaucgggauggccaaccugauucuccaaaucggaaauauuaucuccauauggaucucucacucaauucagcuugguaaccagagucagaucgagacuuguaaucaaagcgucauuacguacgaaaacaauaccuggguuaaccagacauaugugaauaucuccaacacuaauuucgcugcaggccagucuguagugucggucaaacuggccgggaacagcucauugugcccugugaguggaugggcgauauacuccaaggacaauucuauuagaaucggcagcaaaggugauguuuuugugauuagggagccauucaucuccuguucaccguuagaaugccggaccuuuuuccugacacagggggcucuacucaacgacaagcauaguaauggaaccaucaaagaucgcagccccuaucgaacucugaugucuuguccuauuggcgaggucccaucccccuacaacucacguuuugaaagcguggccuggagugcaucugccugccacgacggcauaaacuggcuuacaaucgggauuuccggaccugauaauggugcuguagcaguucugaaguauaacggcaucauaaccgacacgauuaagagcuggagaaauaacaucuugaggacucaagagucggagugugccugcgugaaugggucuuguuucaccaucaugacagauggaccauccgacggccaggcuucauacaaaauuuuucggaucgaaaaggguaaaauugucaagaguguggagaugaacgcccccaauuaucauuacgaagagugcagcuguuacccugauuccucugagauaacuugcgugugccgcgacaacuggcacgggagcaauagaccaugggucucauucaaccagaaucucgaauaucagaucggauacauuuguaguggcaucuuuggcgauaacccgaggcccaaugacaaaaccggguccugcggaccuguuagcucuaacggugcgaauggcgugaagggguucucauuuaaguauggaaacggcguauggaucgguagugcaaaaagcauuuccucucggaaggccuucgagaugauaugggauccaaacggguggacaggcaccgacaauaacuuuucgaucaaacaauacauugugggaaucaaugaauggagcggcuauuccgggucauucgucgagcaucccgaacugacgggacuggacuguauucgcccuugcuucuggguggagcucauccgagguagaccaaaggagaacacuauauggacaaguggcucuagcaucuccuuuugugggguuaauucagauaccgugggauggagcuggcccgacggcgcugaauuaccguucacuauugauaaauga

SEQ ID NO: 148327 - RNA, 1410 nt, Artificial Sequence
  derived and/or modified CDS sequence (opt3) from neuraminidase__InfluenzaA__ADX20813
augaaccccaaucagaagaucauuaccauaggcagcgugugcaugacaaucgggauggccaaccugauucuccaaaucggaaauauuaucuccauauggaucucucacucaauucagcuugguaaccagaaucagaucgagacuuguaaccaaagugucauuacguacgaaaauaacaccuggguuaaucagacauaugugaacaucagcaauacuaacuucgcugcaggccaguccguagugucugucaaacuggccggaaauucgucauugugcccugugagcgggugggcgauauacaguaaggacaacuccauuagaaucggcucuaaaggugauguuuuugugauuagggagccauucaucagcuguuccccguuagaaugccggaccuuuuuccugacacagggggcucuacucaaugacaagcauucaaacggaaccaucaaagaucgcagucccuaucgaacucugaugagcuguccuauuggcgaggucccaucucccuacaacucccguuuugaacuuguggccuggucagcaagcgccugccacgacggcauaaauuggcugacaaucgggauuaguggaccugauaacggugcuguagcaguuuugaaguauaauggcaucauaaccgacacgauuaagucuuggagaaacaauauccucaggacucaagaguccgagugugccugcgugaacgggagcuguuucaccgucaugacagauggaccaucggacggccagacuucuuacaaaaucuuucggauugaaaaggguaaaaucgugaaguccguggagaugaaugcucccaacuauuacuacgaagagugcucauguuauccugauaguagcgagauuaccugcgucugccgcgacaauuggcauggguccaacagaccauggguuucuuucaaucagaaccuggaauaccagauaggauauaucuguagcggcauuuuuggcgauaauccgaggcccaacgacaaaacagggucaugcggaccugugaguuccaauggugccaacggcguaaagggguucagcuuuaaguacggaaacggcguguggaucggucggaccaaaucuaucucaagucgcaagggguucgagaugauuugggauccaaauggcuggacgggaacugacaacaauuuuagcauaaaacaagacaucgucggcauuaacgaaugguccggguauucuggaucguucgugcagcaccccgagcugacaggucucgauuguauccgaccuugcuucuggguugaauuaauuagaggcaggccaaaggagaauaccaucuggacuagcggguccucaauaaguuuuuguggagugaacucugacacagucggcuggagcuggcccgauggugcggagcugccguucaccaucgacaaauga

SEQ ID NO: 148328 - RNA, 1410 nt, Artificial Sequence
  derived and/or modified CDS sequence (opt3) from neuraminidase__InfluenzaA__ADX20814
augaaccccaaucagaagaucauuaccauaggcagcgugugcaugacaaucgggauggccaaccugauucuccaaaucggaaauauuaucuccauauggaucucucacucaauucagcuugguaaccagagucagaucgagacuuguaaucaaagcgucauuacguacgaaaacaauaccuggguuaaccagacauaugugaauaucuccaacacuaauuucgcugcaggccagucuguagugucggucaaacuggccgggaacagcucauugugcccugugaguggaugggcgauauacuccaaggacaauucuauuagaaucggcagcaaaggugauguuuuugugauuagggagccauucaucuccuguucaccguuagaaugccggaccuuuuuccugacacagggggcucuacucaacgacaagcauaguaauggaaccaucaaagaucgcagccccuaucgaacucugaugucuuguccuauuggcgaggucccaucccccuacaacucacguuuugaaagcguggccuggagugcaucugccugccacgacggcauaaacuggcuuacaaucgggauuuccggaccugauaauggugcuguagcaguucugaaguauaacggcaucauaaccgacacgauuaagagcuggagaaauaacaucuugaggacucaagagucggagugugccugcgugaaugggucuuguuucaccaucaugacagauggaccauccgacggccaggcuucauacaaaauuuuucggaucgaaaaggguaaaauugucaagaguguggagaugaacgcccccaauuauuacuacgaagagugcagcuguuauccugauuccucugagauaacuugcgugugccgcgacaacuggcaugggagcaauagaccaugggucucauucaaccagaaucucgaauaccagaucggauauauuuguaguggcaucuuuggcgauaacccgaggcccaaugacaaaaccggguccugcggaccuguuagcucuaacggugcgaauggcgugaagggguucucauuuaaguacggaaacggcguauggaucggucggacaaaaaguauuagcucccgcaagggguucgagaugauaugggauccaaacggcuggaccggaacggacaauaacuuuucuaucaaacaagacauugugggcaucaaugaauggucgggguauagcggauccuucguccagcaccccgagcugacuggucuggauuguauucgaccuugcuucuggguggaacucaucagaggcaggccaaaggagaacacaauauggaccucagggaguucuaucagcuuuuguggaguuaauuccgacacugugggcuggucauggcccgauggugcagaguuaccguucacaauugacaaauga

SEQ ID NO: 148329 - RNA, 1410 nt, Artificial Sequence; identical to SEQ ID NO: 144647
  derived and/or modified CDS sequence (opt3) from neuraminidase__InfluenzaA__ADX21091

SEQ ID NO: 148330 - RNA, 1410 nt, Artificial Sequence; identical to SEQ ID NO: 144786
  derived and/or modified CDS sequence (opt3) from neuraminidase__InfluenzaA__ADX21101

SEQ ID NO: 148331 - RNA, 1410 nt, Artificial Sequence; identical to SEQ ID NO: 145653
  derived and/or modified CDS sequence (opt3) from neuraminidase__InfluenzaA__ADX36112

SEQ ID NO: 148332 - RNA, 1410 nt, Artificial Sequence
  derived and/or modified CDS sequence (opt3) from neuraminidase__InfluenzaA__ADX87386
augaaccccaaucagagaaucauuaccauaggcagcgugucccugacaaucucuacuauuugcuucuuuaugcaaaucgccauucucaucacgaccgucacacuucacuucaagcaguacgaguuuaacucaccuccaaauaaccagguuaugcugugugaaccgacuauaaucgagaggaauauuaccgaaaucguguauuugacaaacaccacuauugagaaagaaaucugccccaaguuagcugaguaccggaauuggaguaaaccucagugugacauaacaggguucgcaccauuuagcaaggauaacuccauucgccugucugccggaggugacaucuggguaacccgagagcccuaugugucgugcgauccugacaaauguuaccaauucgcgcuaggccaggggacgacucucaauaacguccauucaaauaacaccgugcgugauagaacaccauauaggacucugcuuaugaaugaacugggaguucccuuucacuugggcaccaaacaggugugcauugcuuggagcaguuccucuugucaugacgguaaggccuggcuccacgucugcaucacaggggaugacaagaacgcaaccgccagcuucaucuacaauggacggcugguggauuccguaguuucauggaguaaggagauucugcgcacgcaggaaagcgagugugugugcauaaacggcacuuguacagucgugaugaccgacggcucugcuuccgggaaagcagauacuaagauccucuuuauugaggaaggaaaaaucgugcauacaucaaccuuaagcgguagugcccaacacgucgaggaaugcucuugcuauccuagauacccaggcguuaggugugugugccgggacaacuggaagggguccaaucgcccgauaguagauauuaacaucaaggaccacagcaucgugucgucuuacgucuguuccggacuggugggcgacacgccccggaaaaaugauucaaguagcuccucucauugccuugacccuaacaaugaggaaggugggcacggaguuaagggcugggcuuucgaugacggcaacgauguguggauggggagaaccauuagcgagaaaucaagguugggauaugagacauuuaaggucaucgaagguuggaguaauccaaaauccaagcugcagauuaaccgacaggugauaguagaccguggcaaucgcagcggguacucuggaaucuucucaguugagggcaaaaguuguauuaacagaugcuuuuauguggaacuaaucaggggucggaaggaggaaacugagguccucuggaccagcaauuccaucguggucuucugugggacaucuggcacuuacggaaccggcucguggcccgauggggccgacauuaaccugaugccuguguga

SEQ ID NO: 148333 - RNA, 1410 nt, Artificial Sequence
  derived and/or modified CDS sequence (opt3) from neuraminidase__InfluenzaA__ADX96270
augaaccccaaucagaagaucauuaccauaggcagcgugugcaugacaaucgggauggccaaccugauucuccaaaucggaaauauuaucuccauauggaucucucacucaauucagcuugguaaccagaaucagaucgagacuuguaaccaaaguauuaucacguacgaaaauaacaccugggucaaucagacauauguuaacauaagcaauacuaacuucgcugcaggccaguccguggccucuguaaaacuggcgggaaauucgucauugugcccugugagcggaugggcuauuuacaguaaggacaacuccgucagaaucggcucuaaaggugauguguuuguuauuagggagccauucaucagcuguuccccguuagaaugccggaccuuuuuccugacacagggggcccuacucaaugacaagcauucaaacggaaccaucaaagaucgcagucccuaucgaacucugaugagcuguccuauuggcgaggugccaucucccuacaacucccguuuugaaucagucgcauggagcgccagugcuugccacgacggcauaaauuggcuuacaaucgggauuucuggaccugauaacggugcaguggccguacugaaguauaauggcaucauaaccgacacgauuaaguccuggagaaacaauaucuugaggacucaagagagcgagugugcuugcguuaacgggucguguuucaccgugaugacagauggaccaucugacggccaggccuccuacaaaaucuuucggauugaaaaggguaaaaucgucaagucaguggagaugaaugcgcccaacuaucauuacgaagagugcaguuguuacccugauagcuccgagauuacuugcgugugccgcgacaauuggcacgggucuaacagaccaugggucagcuucaaucagaaccucgaauaucagauaggauacaucuguucaggcauuuuuggcgauaauccgaggcccaacgacaaaaccgggaguugcggaccuguuuccagcaauggugcaaacggcgugaagggguucucuuuuaaguauggaaacggcguauggaucggucggacaaaaucaaucaguagccgcaauggguucgagaugauuugggauccaaacggcuggaccggaacggacaauaacuuuuccauaaagcaagacaucgugggcauuaaugaauggucuggguacucggggagcuucguccagcaucccgagcugacuggucuggauuguauccgaccuugcuucuggguggaacucauuagaggcaggccaaaagagaacacaaucuggaccuccgggucaaguauaucuuuuuguggaguuaauagcgacacugugggcugguccuggcccgauggugccgaguuaccguucacaaucgacaaguga

SEQ ID NO: 148334 - RNA, 1410 nt, Artificial Sequence; identical to SEQ ID NO: 148333
  derived and/or modified CDS sequence (opt3) from neuraminidase__InfluenzaA__ADX96280

SEQ ID NO: 148335 - RNA, 1410 nt, Artificial Sequence; identical to SEQ ID NO: 145369
  derived and/or modified CDS sequence (opt3) from neuraminidase__InfluenzaA__ADX96290

SEQ ID NO: 148336 - RNA, 1410 nt, Artificial Sequence; identical to SEQ ID NO: 144786
  derived and/or modified CDS sequence (opt3) from neuraminidase__InfluenzaA__ADX96300

SEQ ID NO: 148337 - RNA, 1410 nt, Artificial Sequence; identical to SEQ ID NO: 144786
  derived and/or modified CDS sequence (opt3) from neuraminidase__InfluenzaA__ADX96310

SEQ ID NO: 148338 - RNA, 1410 nt, Artificial Sequence
  derived and/or modified CDS sequence (opt3) from neuraminidase__InfluenzaA__ADX96330
augaaccccaaucagaagaucauuaccauaggcagcgugugcaugacaaucgggauggccaaccugauucuccaaaucggaaaugguauuuccaucuggauaucucacucaauccagcuuggcaaccagaaucagauugagacuuguaaccaaagugucaucacguacgaaaauaacaccuggguuaaucagacauaugugaacauuagcaauacuaacuucgcugcagggcaguccguagugucugucaaacuggccggaaauucgucauugugcccugugagcggcugggcgaucuacaguaaggacaacuccauaagaauugguucuaaaggggauguuuuugugaucagggagccauucauuagcuguuccccguuagaaugccggaccuuuuuccugacacagggagcucuacucaaugacaagcauucaaacggcaccaucaaagaucgcagucccuaucgaacucugaugagcuguccuaucggcgaggucccaucucccuacaacucccguuuugaaucaguggccuggagcgcaagugccugccacgacgggauuaauuggcuuacaauaggaaucucugguccugauaacggcgcuguagcaguucugaaguauaaugggauuaucaccgacacgauaaaguccuggagaaacaauauuuugaggacucaagagagcgagugugccugcgugaacggaucguguuucaccgucaugacagauggcccaucugacggucaggcuuccuacaaaaucuuucggaucgaaaaggggaaaauugugaagucaguggagaugaaugcccccaacuaucauuacgaagagugcaguuguuacccugauagcaaugagaucacuugcgucugccgcgacaacuggcacggauccaauagaccauggguuucuuucaaccagaaucucgaauaucagauuggcuacauauguagcggcaucuuuggggauaacccgaggcccaaugacaaaaccggaucaugcgguccugugaguuccaacggcgcgaacgggguaaagggauucagcuuuaaguauggcaaugguguguggauugggcggacaaaaucuaucucaagucgcaacggcuucgagaugaucugggauccaaauggauggaccggcacggacaacaauuuuagcauuaagcaagacauagucgggaucaacgaaugguccggauacucugguucguucgugcagcaucccgagcugacuggccuggauuguauucgaccuugcuucuggguugaacucaucagagggaggccaaaagagaauacaauuuggaccagcggauccucaaucaguuuuuguggcgugaacucugacacugucgguuggagcuggcccgauggggcagaguuaccguucacaauagacaaguga

SEQ ID NO: 148339 - RNA, 1410 nt, Artificial Sequence; identical to SEQ ID NO: 144786
  derived and/or modified CDS sequence (opt3) from neuraminidase__InfluenzaA__ADX96339

SEQ ID NO: 148340 - RNA, 1410 nt, Artificial Sequence
  derived and/or modified CDS sequence (opt3) from neuraminidase__InfluenzaA__ADX96349
augaaccccaaucagaagaucauuaccauaggcagcgugugcaugacaaucgggauggccaaccugauucuccaaaucggaaauauuaucuccauauggaucucucacucaauucagcuugguaaccagaaucagaucgagacuuguaaccaaagugucauuacguacgaaaauaacaccuggguuaaucagacauaugugaacaucagcaauacuaacuucgcugcaggccaguccguagugucugucaaacuggccggaaauucgucauugugcccugugagcgggugggcgauauacaguaaggacaacuccauuagaaucggcucuaaaggugauguuuuugugauuagggagccauucaucagcuguuccccguuagaaugccggaccuuuuuccugacacagggggcucuacucaaugacaagcauucaaacggaaccaucaaagaucgcagucccuaucgaacucugaugagcuguccuauuggcgaggucccaucucccuacaacucccguuuugaaucaguggccuggagcgcaagugccugccacgacggcauaaauuggcuuacaaucgggauuucuggaccugauaacggugcuguagcaguucugaaguauaauggcaucauaaccgacacgauuaaguccuggagaaacaauaucuugaggacucaagagagcgagugugccugcgugaacgggucguguuucaccgucaugacagauggaccaucugacggccaggcuuccuacaaaaucuuucggauugaaaaggguaaaaucgugaagucaguggagaugaaugcccccaacuaucauuacgaagagugcaguuguuacccugauagcaaugagauuacuugcgucugccgcgacaacuggcacggguccaauagaccauggguuucuuucaaccagaaucucgaauaucagauaggauacaucuguagcggcauuuuuggcgauaacccgaggcccaaugacaaaaccgggucaugcggaccugugaguuccaacggugcgaacggcguaaagggguucagcuuuaaguauggaaauggcguguggaucggucggacaaaaucuaucucaagucgcaacggguucgagaugauuugggauccaaauggcuggaccggaacggacaacaauuuuagcauaaagcaagacaucgucggcauuaacgaaugguccggguacucuggaucguucgugcagcaucccgagcugacuggucuggauuguauccgaccuugcuucuggguugaacucauuagaggcaggccaaaagagaauacaaucuggaccagcggguccucaauaaguuuuuguggagugaacucugacacugucggcuggagcuggcccgauggugcagaguuaccguucacaaucgacaaguga

SEQ ID NO: 148341 - RNA, 1410 nt, Artificial Sequence; identical to SEQ ID NO: 144786
  derived and/or modified CDS sequence (opt3) from neuraminidase__InfluenzaA__ADX96359

SEQ ID NO: 148342 - RNA, 1410 nt, Artificial Sequence; identical to SEQ ID NO: 144786
  derived and/or modified CDS sequence (opt3) from neuraminidase__InfluenzaA__ADX96369

SEQ ID NO: 148343 - RNA, 1410 nt, Artificial Sequence
  derived and/or modified CDS sequence (opt3) from neuraminidase__InfluenzaA__ADX96380
augaaccccaaucagaagaucauuaccauaggcagcgugugcaugacaaucgggauggccaaccugauucuccaaaucggaaauauuaucuccauauggccuguccacucuauccagcuugguaaccagaaucagauugagacuuguaaccaaucaguuaucacguacgaaaauaacaccugggugaaucagacauauguaaacauuaguaauacuaacuucgcugcaggccagagcguggucuccaugaaacuggccgggaacucuucguugugcccagugggaggcugggcgaucuacucaaaggacaauagcguuagaauagguaguaaaggggauguguuugucauuagggagccguucaucuccuguucucccuuagaaugccggaccuuuuuccugacacagggagcucuacucaaugacaagcauagcaacggcaccauuaaagaucgcuccccuuaucgaacucugaugucauguccaaucggcgaggugcccaguccuuacaacagccguuuugaaucuguagccugguccgcaucagccugccacgacgggaucaauuggcuuacaauuggaauaagcgguccagauaacggcgcuguugcagugcugaaguauaaugggaucauuaccgacacgaucaagaguuggagaaacaauauauugaggacucaagagucugagugugccugcgucaacggauccuguuucaccgugaugacagauggccccagcgacggucaggcuucguacaaaauuuuucggaucgaaaaggggaaaaucguggagucugucgaaaugaaugccccuaacuaucauuacgaggagugcuccuguuacccagauucaagugaaauuacuugcguuugccgcgacaauuggcacggaagcaacagaccguggguguccuucaaucagaaccucgaguaucagaucggcuacauuuguucuggcauauuuggggauaaucccaggccuaacgacaagaccggaagcugcgguccaguaucaaguaauggcgcgaacggggugaaaggauucuccuuuaaguauggcaacggugucuggaucgggcggacaaagagcauuucuucacgcaauggcuucgaaaugaucugggaucccaacggauggaccggcacggacaauaacuuuaguaucaaacaagacauuguggggauaaaugaguggagcggauacuccgguucuuucguucagcauccugaacugacuggccuggauuguauccgaccaugcuucuggguggagcucauuagagggaggcccaaggagaacacaaucuggaccucgggaagcuccauuucauuuuguggcgucaauagugacacuguggguuggucuuggccggauggggcagaauuaccuuucacaaucgacaaauga

SEQ ID NO: 148344 - RNA, 1410 nt, Artificial Sequence
  derived and/or modified CDS sequence (opt3) from neuraminidase__InfluenzaA__ADX96390
augaaccccaaucagaagaucauuaccauaggcagcgugugcaugacaaucgggauggccaaccugauucuccaaaucggaaauauuaucuccauauggcuuucucacucaauccagcuggguaaccagaaucagauugagacuuguaaccaaagugucaucacguacgaaaauaacaccuggguuaaucagacauaugugaacauuagcaauacuaacuucgcugcaggccaguccguagugucugucaaauuggccggaaauucgucauuaugcccugugagcggaugggcgaucuacaguaaggacaacuccauaagaauuggcucuaaaggugauguuuuugugaucagggagccauucauuagcuguuccccgcuggaaugccggaccuuuuuccuaacacagggggcucuccugaaugacaagcauucaaacggaaccaucaaagaucgcagucccuaucgaacucuuaugagcuguccuaucggcgaggucccaucucccuacaacucccguuuugaaucaguggccuggagcgcaagugccugccacgacggcauuaauuggcugacaauagggaucucuggaccugauaacggugcuguagcaguuuugaaguauaauggcauuaucaccgacacgauaaaguccuggagaaacaauauucucaggacucaagagagcgagugugccugcgugaacgggucguguuucaccgucaugacagauggaccaucugacggccaggcuuccuacaaaaucuuucggaucgaaaaggguaaaauugugaagucaguggagaugaaugcccccaacuaucauuacgaagagugcaguuguuacccugauagcuccgagaucacuugcgucugccgcgacaauuggcacgggucuaacagaccauggguuagcuucaaucagaaccuggaauaucagauuggauacauauguucaggcaucuuuggcgauaauccgaggcccaacgacaaaaccgggaguugcggaccuguguccagcaauggugcgaacggcguaaagggguucucuuuuaaguauggaaacggcguguggauuggucggacaaaaucaaucaguagccgcaauggguucgagaugaucugggauccaaacggcuggaccggaacggacaauaacuuuuccauuaagcaagacauagucggcaucaaugaauggucuggguacucggggagcuucgugcagcaucccgagcugacuggucucgauuguauucgaccuugcuucuggguugaauuaaucagaggcaggccaaaagagaacacaauuuggaccuccgggucaaguaucucuuuuuguggagugaauagcgacacugucggcugguccuggcccgauggugcagagcugccguucacaauagacaaguga

SEQ ID NO: 148345 - RNA, 1410 nt, Artificial Sequence; identical to SEQ ID NO: 144786
  derived and/or modified CDS sequence (opt3) from neuraminidase__InfluenzaA__ADX96400

SEQ ID NO: 148346 - RNA, 1410 nt, Artificial Sequence; identical to SEQ ID NO: 144786
  derived and/or modified CDS sequence (opt3) from neuraminidase__InfluenzaA__ADX96410

SEQ ID NO: 148347 - RNA, 1410 nt, Artificial Sequence; identical to SEQ ID NO: 144786
  derived and/or modified CDS sequence (opt3) from neuraminidase__InfluenzaA__ADX96419

SEQ ID NO: 148348 - RNA, 1410 nt, Artificial Sequence
  derived and/or modified CDS sequence (opt3) from neuraminidase__InfluenzaA__ADX96429
augaaccccaaucagaagaucauuaccauaggcagcgugugcaugacaaucgggauggccaaccugauucuccaaaucggaaauauuaucuccauauggaucucucacucaauucagcuugguaaccagaaucagaucgagacuuguaaccaaagugucauuacguacgaaaauaacaccuggguuaaucagacauaugugaacaucagcaauacuaacuucgcugcaggccaguccguagugucugucaaacuggccggaaauucgucauugugcccugugagcgggugggcgauauacaguaaggacaacuccguuagaauuggcucuaaaggugauguguuugucaucagggagccauucauuagcuguuccccguuagaaugccggaccuuuuuccugacacagggggcucuacucaaugacaagcauucaaacggaaccaucaaagaucgcagucccuaucgaacucugaugagcuguccuaucggcgaggugccaucucccuacaacucccguuuugaaucaguagccuggagcgcaagugccugccacgacggcauuaauuggcuuacaauagggaucucuggaccugauaacggugcuguugcagugcugaaguauaauggcauuaucaccgacacgauaaaguccuggagaaacaauauuuugaggacucaagagagcgagugugccugcgucaacgggucguguuucaccgugaugacagauggaccaucuaauggccaggcuuccuacaaaaucuuucggaucgaaaaggguaaaauugugaagucagucgagaugaacgcccccaauuaucauuacgaagagugcaguuguuacccugacagcuccgagaucacuugcguuugccgcgauaacuggcacgggucuaauagaccaugggugagcuucaaccagaaucucgaauaucagauuggauacauauguucaggcaucuuuggcgacaacccgaggcccaaugauaaaaccgggaguugcggaccuguauccagcaacggugcgaacggcgugaagggguucucuuuuaaguauggaaauggcgucuggauuggucggacaaaaucaaucaguagccgcaacggguucgagaugaucugggacccaaauggcuggaccggaacggauaacaauuuuuccauuaagcaagacauagugcgaaucaacgaauggucuggcuacucggggagcuucguucagcaucccgagcugacuggacuggacuguauuagaccuugcuucuggguggaacucaucaggggucggccaaaagagaauacaauuuggaccuccggcucaaguaucucuuuuuguggggucaacagcgauacugugggaugguccuggcccgacggcgcagaguuaccguucacaauagauaaguga

SEQ ID NO: 148349 - RNA, 1410 nt, Artificial Sequence; identical to SEQ ID NO: 144786
  derived and/or modified CDS sequence (opt3) from neuraminidase__InfluenzaA__ADX96449

SEQ ID NO: 148350 - RNA, 1410 nt, Artificial Sequence; identical to SEQ ID NO: 144786
  derived and/or modified CDS sequence (opt3) from neuraminidase__InfluenzaA__ADX96469

SEQ ID NO: 148351 - RNA, 1410 nt, Artificial Sequence; identical to SEQ ID NO: 144786
  derived and/or modified CDS sequence (opt3) from neuraminidase__InfluenzaA__ADX96489

SEQ ID NO: 148352 - RNA, 1410 nt, Artificial Sequence; identical to SEQ ID NO: 144786
  derived and/or modified CDS sequence (opt3) from neuraminidase__InfluenzaA__ADX96499

SEQ ID NO: 148353 - RNA, 1410 nt, Artificial Sequence
  derived and/or modified CDS sequence (opt3) from neuraminidase__InfluenzaA__ADX96509
augaaccccaaucagaagaucauuaccauaggcagcgugugcaugacaaucgggauggccaaccugauucuccaaaucggaaauauuaucuccauauggaucucucacucaauucagcuugguaaccagaaucagaucgagacuuguaaccaaagugucauuacguacgaaaauaacaccuggguuaaucagacauaugugaacaucagcaauacuaacuucgcugcaggccaguccguagugucugucaaacuggccggaaauucgucauugugcccugugagcggaugggcgauauacaguaaggacaacuccauuagaaucggcucuaauggugauguuuuugugauuagggagccauucaucagcuguuccccguuagaaugccggaccuuuuuccugacacagggggcucuacucaacgacaaacauucaaacggaaccaucaaggaucgcagucccuaucgaacucugaugagcuguccuauuggcgaggucccaucucccuacaauucccguuuugaaucaguggccuggagcgcaagugccugccacgacggcauaaacuggcuuacaaucgggauuucuggaccugauaauggugcuguagcaguucugaaauauaacggcaucauaaccgacacgauuaaguccuggagaaauaacaucuugaggacucaagagagcgagugugccugcgugaaugggucguguuucaccgucaugacagauggaccaucugacggccaggcuuccuacaagaucuuucggauugaaaaagguaagaucgugaaaucaguggagaugaacgcccccaauuaucauuacgaagagugcaguuguuacccugauagcuccgagauuacuugcgucugccgcgacaacuggcacgggucuaauagaccauggguuagcuucaaccagaaucucgaauaucagauaggauacaucuguucaggcauuuuuggcgauaacccgaggcccaaugacaagaccgggaguugcggaccuguguccagcaacggugcgaacggcguaaaaggguucucuuuuaaguauggaaauggcguguggaucggucggacaaagucaaucaguagccgcaacggguucgagaugauuugggauccaaauggcuggaccggaacggacaacaauuuuuccauaaaacaagacaucgucggcauuaacgaauggucuggguacucggggagcuucgugcagcaucccgagcugacuggucuggauuguauccgaccuugcuucuggguugaacucauuagaggcaggccaaaggagaauacaaucuggaccuccgggucaaguauaucuuuuuguggagugaacagcgacacugucggcugguccuggcccgauggugcagaguuaccguucacaaucgacaaauga

SEQ ID NO: 148354 - RNA, 1410 nt, Artificial Sequence; identical to SEQ ID NO: 144786
  derived and/or modified CDS sequence (opt3) from neuraminidase__InfluenzaA__ADX96519

SEQ ID NO: 148355 - RNA, 1410 nt, Artificial Sequence; identical to SEQ ID NO: 144786
  derived and/or modified CDS sequence (opt3) from neuraminidase__InfluenzaA__ADX96529

SEQ ID NO: 148356 - RNA, 1410 nt, Artificial Sequence; identical to SEQ ID NO: 144786
  derived and/or modified CDS sequence (opt3) from neuraminidase__InfluenzaA__ADX96539

SEQ ID NO: 148357 - RNA, 1410 nt, Artificial Sequence; identical to SEQ ID NO: 144786
  derived and/or modified CDS sequence (opt3) from neuraminidase__InfluenzaA__ADX96549

SEQ ID NO: 148358 - RNA, 1410 nt, Artificial Sequence; identical to SEQ ID NO: 144786
  derived and/or modified CDS sequence (opt3) from neuraminidase__InfluenzaA__ADX96559

SEQ ID NO: 148359 - RNA, 1410 nt, Artificial Sequence; identical to SEQ ID NO: 144786
  derived and/or modified CDS sequence (opt3) from neuraminidase__InfluenzaA__ADX96569

SEQ ID NO: 148360 - RNA, 1410 nt, Artificial Sequence; identical to SEQ ID NO: 144776
  derived and/or modified CDS sequence (opt3) from neuraminidase__InfluenzaA__ADX96579

SEQ ID NO: 148361 - RNA, 1410 nt, Artificial Sequence; identical to SEQ ID NO: 144786
  derived and/or modified CDS sequence (opt3) from neuraminidase__InfluenzaA__ADX96589

SEQ ID NO: 148362 - RNA, 1410 nt, Artificial Sequence; identical to SEQ ID NO: 144786
  derived and/or modified CDS sequence (opt3) from neuraminidase__InfluenzaA__ADX96599

SEQ ID NO: 148363 - RNA, 1410 nt, Artificial Sequence
  derived and/or modified CDS sequence (opt3) from neuraminidase__InfluenzaA__ADX96609
augaaccccaaucagaagaucauuaccauaggcagcgugugcaugacaaucgggauggccaaccugauucuccaaaucggaaauauuaucuccauauggaucucucacucaauucagcuugguaaccagaaucagaucgagacuuguaaccaaagugucauuacguacgaaaauaacaccuggguuaaucagacauaugugaacaucagcaauacuaacuucgcugcaggccaguccguagugucugucaaacuggccgggaacucgucauugugcccugugggaggcugggcgauauacagcaaggacaauaguguuagaauugguuccaaaggggauguguuugucaucagggagccauucauuucuuguagcccguuagaaugccggaccuuuuuccugacacagggagcucuacucaaugacaagcauuccaacggcaccaucaaagaucgcucacccuaucgaacucugaugaguuguccuaucggcgaggugccaagccccuacaacucucguuuugaauccguagccuggucagcaagcgccugccacgacgggauuaauuggcuuacaauaggaaucagugguccugauaacggcgcuguugcagugcugaaguauaaugggauuaucaccgacacgauaaagucuuggagaaacaauauuuugaggacucaagaguccgagugugccugcgucaacggaagcuguuucaccgugaugacagauggcccaucgaauggucaggcuucuuacaaaaucuuucggaucgaaaaggggaaaauugugaaguccgucgagaugaacgcccccaauuaucauuacgaagagugcucauguuacccugacaguagcgagaucacuugcguuugccgcgauaacuggcacggauccaauagaccaugggugucuuucaaccagaaucucgaauaucagauuggcuacauauguagcggcaucuuuggggacaacccgaggcccaaugauaaaaccggaucaugcgguccuguaaguuccaacggcgcgaacggggugaagggauucagcuuuaaguauggcgacggugucuggauugggcggacaaaaucuaucucaagucgcaauggcuucgagaugaucugggauccaaacggauggaccggcacggacaauaacuuuagcauuaagcaagacauaguggggaucaaugaaugguccggauacucugguucguucguucagcaucccgagcugacuggccuggauuguauucgaccuugcuucuggguggaacucaucagagggaggccaaaagagaacacaauuuggaccagcggauccucaaucaguuuuuguggcgucaauucugacacuguggguuggagcuggcccgauggggcagaguuaccguucacaauagacaaguga

SEQ ID NO: 148364 - RNA, 1410 nt, Artificial Sequence; identical to SEQ ID NO: 144776
  derived and/or modified CDS sequence (opt3) from neuraminidase__InfluenzaA__ADX96619

SEQ ID NO: 148365 - RNA, 1410 nt, Artificial Sequence; identical to SEQ ID NO: 144786
  derived and/or modified CDS sequence (opt3) from neuraminidase__InfluenzaA__ADX96629

SEQ ID NO: 148366 - RNA, 1410 nt, Artificial Sequence; identical to SEQ ID NO: 144786
  derived and/or modified CDS sequence (opt3) from neuraminidase__InfluenzaA__ADX96639

SEQ ID NO: 148367 - RNA, 1410 nt, Artificial Sequence; identical to SEQ ID NO: 144786
  derived and/or modified CDS sequence (opt3) from neuraminidase__InfluenzaA__ADX96649

SEQ ID NO: 148368 - RNA, 1410 nt, Artificial Sequence; identical to SEQ ID NO: 144776
  derived and/or modified CDS sequence (opt3) from neuraminidase__InfluenzaA__ADX96659

SEQ ID NO: 148369 - RNA, 1410 nt, Artificial Sequence; identical to SEQ ID NO: 144786
  derived and/or modified CDS sequence (opt3) from neuraminidase__InfluenzaA__ADX96669

SEQ ID NO: 148370 - RNA, 1410 nt, Artificial Sequence; identical to SEQ ID NO: 144786
  derived and/or modified CDS sequence (opt3) from neuraminidase__InfluenzaA__ADX96679

SEQ ID NO: 148371 - RNA, 1410 nt, Artificial Sequence; identical to SEQ ID NO: 144786
  derived and/or modified CDS sequence (opt3) from neuraminidase__InfluenzaA__ADX96689

SEQ ID NO: 148372 - RNA, 1410 nt, Artificial Sequence; identical to SEQ ID NO: 144786
  derived and/or modified CDS sequence (opt3) from neuraminidase__InfluenzaA__ADX96699

SEQ ID NO: 148373 - RNA, 1410 nt, Artificial Sequence
  derived and/or modified CDS sequence (opt3) from neuraminidase__InfluenzaA__ADX96709
augaaccccaaucagaagaucauuaccauaggcagcgugugcaugacaaucgggauggccaaccugauucuccaaaucggaaauauuaucuccauauggaucucucacucaauucagcuugguaaccagaaucagaucgagacuuguaaccaaagugucauuacguacgaaaauaacaccuggguuaaucagacauaugugaacaucagcaauacuaacuucgcugcaggccaguccguagugucugucaaacuggccggaaauucgucauugugcccugugagcggaugggcgauauacaguaaggacaacuccauuagaaucggcucuaaaggugauguuuuugugauuagggagccauucaucagcuguuccccguuagaaugccggaccuuuuuccugacacagggggcucuacucaaugacaagcauucaaacggaaccaucaaagaucgcagucccuaucgaacucugaugagcuguccuauuggcgaggucccaucucccuacaacucccguuuugaaucaguggccuggagcgcaagugccugccacgacggcauaaauuggcuuacaaucgggauuucuggaccugauaacggugcuguagcaguucugaaguauaauggcaucauaaccgacacgauuaaguccuggagaaacaauaucuugaggacucaagagagcgagugugccugcgugaacgggucguguuucaccgucaugacagauggaccaucugacggccaggcuuccuacaaaaucuuucggauugaaaaggguaaaaucgugaagucaguggagauuaaugcccccaacuaucauuacgaagagugcaguuguuacccugauagcuccgagauaacuugcgucugccgcgacaauuggcacgggucuaacagaccauggguuagcuucaaucagaaccucgaauaucagaucggauacauuuguucaggcaucuuuggcgauaauccgaggcccaacgacgagaccgggaguugcggaccuguguccagcaauggugcgaacggcguaaaaggguucucuuuuaaguauggaaacggcguguggaucggucggacaaagucaauuaguagccgcaauggguucgaaaugauaugggauccaaacggcuggaccggaacggacaauaacuuuuccaucaaacaagacauugucggcaucaaugaguggucuggguacucggggagcuucgugcagcaucccgaacugacuggucuggauuguauucgaccuugcuucuggguugagcucaucagaggcaggccaaaggagaacacaauauggaccuccgggucaaguaucucuuuuuguggagugaauagcgacacugucggcugguccuggcccgauggugcagaauuaccguucacaauugacaaauga

SEQ ID NO: 148374 - RNA, 1410 nt, Artificial Sequence
  derived and/or modified CDS sequence (opt3) from neuraminidase__InfluenzaA__ADX96719
augaaccccaaucagaagaucauuaccauaggcagcgugugcaugacaaucgggauggccaaccugauucuccaaaucggaaauauuaucuccauauggaucucucacucaauucagcuugguaaccagaaucagaucgagacuuguaaccaaagugucauuacguacgaaaauaacaccuggguuaaucagacauaugugaacaucagcaauacuaacuucgcugcaggccaguccguagugucugucaaauuugccggaaauucgucacugugcccugugagcggaugggcgauauacaguaaggacaacuccauuagaaucggcucuaaaggugauguuuucgugauuagggagccauuuaucagcuguuccccguuggaaugccggaccuucuuuuuaacacagggggcucugcuaaaugacaagcauucaaacggaaccaucaaagaucgcagucccuaucgaacucucaugagcuguccuauuggcgaggucccaucucccuacaacucccguuucgaaucaguggccuggagcgcaagugccugccacgacggcauaaauuggcugacaaucgggauuucuggaccugauaacggugcuguagcaguucuuaaguauaauggcaucauaaccgacacgauuaaguccuggagaaacaauauccugaggacucaagagagcgagugugccugcgugaacgggucguguuuuaccgucaugacagauggaccaucugacggccaggcuuccuacaaaaucuuccggauugaaaaggguaaaaucgugaagucaguggagaugaaugcccccaacuaucauuacgaagagugcaguuguuacccugauagcuccgagauuacuugcgucugccgcgacaauuggcacgggucuaacagaccauggguuagcuuuaaucagaacuuggaauaucagauaggauacaucuguucaggcauuuucggcgauaauccgaggcccaacgacaaaaccgggaguugcggaccuguguccagcaauggugcgaacggcguaaagggguuuucuuucaaguauggaaacggcguguggaucggucggacaaaaucaaucaguagccgcaauggguuugagaugauuugggauccaaacggcuggaccggaacggacaauaacuucuccauaaagcaagacaucgucggcauuaaugaauggucuggguacucggggagcuucgugcagcaucccgagcucacuggucuggauuguauccgaccuugcuuuuggguugaacugauuagaggcaggccaaaagaguccacaguguggaccucagggaguucuaucagcuucuguggagucaacuccgacacugugggcuggucauggcccgauggugcagagcucccguuuacaauagacaaguga

SEQ ID NO: 148375 - RNA, 1410 nt, Artificial Sequence; identical to SEQ ID NO: 144786
  derived and/or modified CDS sequence (opt3) from neuraminidase__InfluenzaA__ADX96729

SEQ ID NO: 148376 - RNA, 1410 nt, Artificial Sequence
  derived and/or modified CDS sequence (opt3) from neuraminidase__InfluenzaA__ADX96739
augaaccccaaucagaagaucauuaccauaggcagcgugugcaugacaaucgggauggccaaccugauucuccaaaucggaaauauuaucuccauauggaucucucacucaauucagcuugguaaccagaaucagaucgagacuuguaaccaaagugucauuacguacgaaaauaacaccuggguuaaucagacauaugugaacaucagcaauacuaacuucgcugcaggccaguccguagugucugucaaacuggccggaaauucgucauugugcccugugagcggaugggcgauauacaguaaggacaacuccauuagaaucggcucuaaaggugauguuuuugugauuagggagccauucaucagcuguuccccguuagaaugccggaccuuuuuccugacacagggggcucuacucaaugacaagcauucaaacggaaccaucaaagaucgcagucccuaucgaacucugaugagcuguccuauuggcgaggucccaucucccuacaacucccguuuugaaucaguggccuggagcgcaagugccugccacgacggcauaaauuggcuuacaaucgggauuucuggaccugauaacggugcuguagcaguucugaaguauaauggcaucauaaccgacacgauuaaguccuggagaaacaauaucuugaggacucaagagagcgagugugccugcgugaacgggucguguuucaccgucaugacagauggaccaucugacggccaggcuuccuacaaaaucuuucggauugaaaaggguaaaaucgugaagucaguggagaugaaugcccccaacuaucauuacgaagagugcaguuguuacccugauagcuccgagauuacuugcgucugccgcgacaauuggcacgggucuaacagaccauggguuagcuucaaucagaaccucgaauaucagauaggauacaucuguucaggcauuuuuggcgauaauccgaggcccaacgacaaaaccgggaguugcggaccuguguccagcaauggugcgaacggcguaaagggguucucuuuuaaguauggaaacggcguguggaucggucggacaaaaucaaucaguagccgcaauggguucgagaugauuugggauccaaacggcuggaccggaacggacaauaacuuuuccauaaagcaagacaucgucggcauuaaugaauggucuggguacucggggagcuucgugcagcaucccgagcugacuggucuggauuguauccgaccuugcuucuggguugaacucauuagaggcaggccaaaagagaacacaaucuggaccuccgggucaaguauaucuuuuuguggagucaagagcgacacugugggcugguccuggcccgauggugcagaguuaccguucacaaucgacaaauga

SEQ ID NO: 148377 - RNA, 1410 nt, Artificial Sequence; identical to SEQ ID NO: 144786
  derived and/or modified CDS sequence (opt3) from neuraminidase__InfluenzaA__ADX96749

SEQ ID NO: 148378 - RNA, 1410 nt, Artificial Sequence; identical to SEQ ID NO: 144786
  derived and/or modified CDS sequence (opt3) from neuraminidase__InfluenzaA__ADX96759

SEQ ID NO: 148379 - RNA, 1410 nt, Artificial Sequence; identical to SEQ ID NO: 145760
  derived and/or modified CDS sequence (opt3) from neuraminidase__InfluenzaA__ADX96769

SEQ ID NO: 148380 - RNA, 1410 nt, Artificial Sequence; identical to SEQ ID NO: 144786
  derived and/or modified CDS sequence (opt3) from neuraminidase__InfluenzaA__ADX96779

SEQ ID NO: 148381 - RNA, 1410 nt, Artificial Sequence
  derived and/or modified CDS sequence (opt3) from neuraminidase__InfluenzaA__ADX96789
augaaccccaaucagaagaucauuaccauaggcagcgugugcaugacaaucgggauggccaaccugauucuccaaaucggaaauauuaucuccauauggaucucucacucaauucagcuugguaaccagaaucagaucgagacuuguaaccaaagugucauuacguacgaaaauaacaccuggguuaaucagacauaugugaacaucagcaauacuaacuucgcugcaggccaguccguagugucucugaaauuggccggaaauucgucauuaugcccugucagcggaugggcgauauacaguaaggacaacuccauuagaaucggcucuaaaggugauguguuuguuauuagggagccauucaucagcuguuccccgcuggaaugccggaccuuuuuccuaacacagggggcucuccugaaugacaagcauucaaacggaaccaucaaagaucgcagucccuaucgaacucuuaugagcuguccuauuggcgaggugccaucucccuacaacucccguuuugaaucagucgccuggagcgcaagugccugccacgacggcauaaauuggcugacaaucgggauuucuggaccugauaacggugcuguggcaguauugaaguauaauggcaucauaaccgacacgauuaaguccuggagaaacaauauccucaggacucaagagagcgagugugccugcguuaacgggucguguuucaccgugaugacagauggaccaucugacggccaggcuuccuacaaaaucuuucggauugaaaaggguaaaaucgucaagucaguggagaugaaugcccccaacuaucauuacgaagagugcaguuguuacccugauagcuccgagauuacuugcgugugccgcgacaauuggcacgggucuaacagaccaugggucagcuucaaucagaaccuggaauaucagauaggauacaucuguucaggcauuuuuggcgauaauccgaggcccaacgacaaaaccgggaguugcggaccuguuuccagcaauggugcgaacggcgugaagggguucucuuuuaaguauggaaacggcguauggaucggucggacaaaaucaaucaguagccgcaauggguucgagaugauuugggauccaaacggcuggaccggaacggacaauaacuuuuccauaaagcaagacaucgugggcauuaaugaauggucuggguacucggggagcuucguccagcaucccgagcugacuggucucgauuguauccgaccuugcuucuggguggaauuaauuagaggcaggccaaaagagaacacaaucuggaccuccgggucaaguauaucuuuuuguggaguuaauagcgacacugugggcugguccuggcccgauggugcagagcugccguucacaaucgacaaguga

SEQ ID NO: 148382 - RNA, 1410 nt, Artificial Sequence; identical to SEQ ID NO: 144786
  derived and/or modified CDS sequence (opt3) from neuraminidase__InfluenzaA__ADX96799

SEQ ID NO: 148383 - RNA, 1410 nt, Artificial Sequence; identical to SEQ ID NO: 144941
  derived and/or modified CDS sequence (opt3) from neuraminidase__InfluenzaA__ADX96809

SEQ ID NO: 148384 - RNA, 1410 nt, Artificial Sequence; identical to SEQ ID NO: 144786
  derived and/or modified CDS sequence (opt3) from neuraminidase__InfluenzaA__ADX96819

SEQ ID NO: 148385 - RNA, 1410 nt, Artificial Sequence; identical to SEQ ID NO: 146009
  derived and/or modified CDS sequence (opt3) from neuraminidase__InfluenzaA__ADX96829

SEQ ID NO: 148386 - RNA, 1410 nt, Artificial Sequence
  derived and/or modified CDS sequence (opt3) from neuraminidase__InfluenzaA__ADX96839
augaaccccaaucagaagaucauuaccauaggcagcgugugcaugacaaucgggauggccaaccugauucuccaaaucggaaauauuaucuccauauggaucucucacucaauucagcuugguaaccagaaucagaucgagacuuguaaccaaagugucauuacguacgaaaauaacaccuggguuaaucagacauaugugaacaucagcaauacuaacuucgcugcaggccaguccguagugucugucaaacuggccggaaauucgucauugugcccugugagcgggugggcgauauacaguaaggacaacaauguuagaauuggcuccaaaggugauguguuugucaucagggagccauucauuucuuguagcccguuagaaugccggaccuuuuuccugacacagggggcucuacucaacgacaagcauuccaacggaaccaucaaagaucgcucacccuaucgaacucugaugaguuguccuaucggcgaggugccaagccccuacaauucucguuuugaauccguagccuggucagcaagcgccugccacgacggcauuaacuggcuuacaauagggaucaguggaccugauaauggugcuguugcagugcugaaguauaacggcauuaucaccgacacgauaaagucuuggagaaauaacauuuugaggacucaagaguccgagugugccugcgucaaugggagcuguuucaccgugaugacagauggaccaucggacggccaggcuucuuacaaaaucuuucggaucgaaaaggguaaaauugugaaguccgucgagaugaacgcccccaauuaucauuacgaagagugcucauguuacccugauaguagcgagaucacuugcguuugccgcgacaacuggcacggguccaauagaccaugggugucuuucaaccagaaucucgaauaucagauuggauacauauguagcggcaucuuuggcgauaacccgaggcccaaugacaaaaccgggucaugcggaccuguaaguuccaacggugcgaacggcgugaagggguucagcuuuaaguauggaaauggcgucuggauuggucggacaaaaucuaucucaagucgcaacggguucgagaugaucugggauccaaauggcuggaccggaacggacaacaauuuuagcauuaagcaagacauagugggcaucaacgaaugguccggguacucuggaucguucguucagcaucccgagcugacuggucuggauuguauucgaccuugcuucuggguggaacucaucagaggcaggccaaaagagaauacaauuuggaccagcggguccucaaucaguuuuuguggagucaacucugacacugugggcuggagcuggcccgauggugcagaguuaccguucacaauagacaaguga

SEQ ID NO: 148387 - RNA, 1410 nt, Artificial Sequence; identical to SEQ ID NO: 144786
  derived and/or modified CDS sequence (opt3) from neuraminidase__InfluenzaA__ADX96849

SEQ ID NO: 148388 - RNA, 1410 nt, Artificial Sequence; identical to SEQ ID NO: 144786
  derived and/or modified CDS sequence (opt3) from neuraminidase__InfluenzaA__ADX96859

SEQ ID NO: 148389 - RNA, 1410 nt, Artificial Sequence; identical to SEQ ID NO: 146009
  derived and/or modified CDS sequence (opt3) from neuraminidase__InfluenzaA__ADX96869

SEQ ID NO: 148390 - RNA, 1410 nt, Artificial Sequence; identical to SEQ ID NO: 144786
  derived and/or modified CDS sequence (opt3) from neuraminidase__InfluenzaA__ADX96879

SEQ ID NO: 148391 - RNA, 1410 nt, Artificial Sequence; identical to SEQ ID NO: 144786
  derived and/or modified CDS sequence (opt3) from neuraminidase__InfluenzaA__ADX96899

SEQ ID NO: 148392 - RNA, 1410 nt, Artificial Sequence
  derived and/or modified CDS sequence (opt3) from neuraminidase__InfluenzaA__ADX96909
augaaccccaaucagaagaucauuaccauaggcagcgugugcaugacaaucgggauggccaaccugauucuccaaaucggaaauauuaucuccauauggaucucucacucaauucagcuugguaaccagaaucagaucgagacuuguaaccaaagugucauuacguacgaaaauaacaccuggguuaaucagacauaugugaacaucagcaauacuaacuucgcugcaggccaguccguagugucugucaaacuggccggaaauucgucauugugcccugugagcgggugggcgauauacaguaaggacaacuccauuagaaucggcucuaaaggugauguuuuugugauuagggagccauucaucagcuguuccccguuagaaugccggaccuuuuuccugacacagggggcucuacucaaugacaagcauucaaacggaaccaucaaagaucgcagucccuaucgaacucugaugagcuguccuauuggcgaggucccaucucccuacaacucccguuuugaaucaguggccuggagcgcaagugccugccacgacggcauaaauuggcuuacaaucgggauuucuggaccugauaacggugcuguagcaguucugaaguauaauggcaucauaaccgacacgauuaaguccuggagaaacgauaucuugaggacucaagagagcgagugugccugcgugaaugggucguguuucaccgucaugacagacggaccaucugauggccaggcuuccuacaaaaucuuucggauugaaaaggguaaaaucgugaagucaguggagauuaacgcccccaauuaucauuacgaagagugcaguuguuacccugacagcuccgagauaacuugcgucugccgcgauaacuggcacgggucuaauagaccauggguuagcuucaaccagaaucucgaauaucagaucggauacauuuguucaggcaucuuuggcgacaacccgaggcccaaugauaaaaccgggaguugcggaccuguguccagcaacggugcgaauggcguaaagggguucucuuuuaaguauggaaacggcguguggaucggucggacaaaaucaauuaacagucgcaauggguucgagaugauaugggacccaaacggcuggaccggaacggacaauaacuuuagcaucaagcaagauauugucggcaucaaugaaugguccggguacucuggaucguucgugcagcaucccgagcugacuggucuggacuguauucgaccuugcuucuggguugaacucaucagaggcaggccaaaagagaacacaauauggaccagcggguccucaaucaguuuuuguggagucaauucugauacugugggcuggagcuggcccgacggugcagaguuaccguucacaauugauaaguga

SEQ ID NO: 148393 - RNA, 1410 nt, Artificial Sequence; identical to SEQ ID NO: 144786
  derived and/or modified CDS sequence (opt3) from neuraminidase__InfluenzaA__ADX96919

SEQ ID NO: 148394 - RNA, 1410 nt, Artificial Sequence; identical to SEQ ID NO: 144786
  derived and/or modified CDS sequence (opt3) from neuraminidase__InfluenzaA__ADX96929

SEQ ID NO: 148395 - RNA, 1410 nt, Artificial Sequence; identical to SEQ ID NO: 144786
  derived and/or modified CDS sequence (opt3) from neuraminidase__InfluenzaA__ADX96939

SEQ ID NO: 148396 - RNA, 1410 nt, Artificial Sequence; identical to SEQ ID NO: 145369
  derived and/or modified CDS sequence (opt3) from neuraminidase__InfluenzaA__ADX96949

SEQ ID NO: 148397 - RNA, 1410 nt, Artificial Sequence; identical to SEQ ID NO: 144786
  derived and/or modified CDS sequence (opt3) from neuraminidase__InfluenzaA__ADX96959

SEQ ID NO: 148398 - RNA, 1410 nt, Artificial Sequence
  derived and/or modified CDS sequence (opt3) from neuraminidase__InfluenzaA__ADX96969
augaaccccaaucagaugaucauuaccauaggcagcgugugcaugacaaucgggauggccaaccugauucuccaaaucggaaauauuaucuccauauggaucucucacucaauucagcuugguaaccagaaucagaucgagacuuguaaccaaagugucauuacguacgaaaauaacaccuggguuaaucagacauaugugaacaucagcaauacuaacuucgcugcaggccaguccguagugucugucaagcuggccggaaauucgucauugugcccugugagcggaugggcgauauacaguaaagacaacuccguuagaauuggcucuaagggugauguguuugucaucagggagccauucauuagcuguuccccguuagaaugccggaccuuuuuccugacacagggggcucuacucaaugacaaacauucaaacggaaccaucaaggaucgcagucccuaucgaacucugaugagcuguccuaucggcgaggugccaucucccuacaacucccguuuugaaucaguagccuggagcgcaagugccugccacgacggcauuaauuggcuuacaauagggaucucuggaccugauaacggugcuguugcagugcugaaauauaauggcauuaucaccgacacgauaaaguccuggagaaacaauauuuugaggacucaagagagcgagugugccugcgucaacgggucguguuucaccgugaugacagauggaccaucuaauggccaggcuuccuacaagaucuuucggaucgaaaaagguaagauugugaaaucagucgagaugaacgcccccaauuaucauuacgaagagugcaguuguuacccugacagcuccgagaucacuugcguuugccgcgauaacuggcacgggucuaauagaccaugggugagcuucaaccagaaucucgaauaucagauuggauacauauguucaggcaucuuuggcgacaacccgaggcccaaugauaagaccgggaguugcggaccuguauccagcaacggugcgaacggcgugaaaggguucucuuuuaaguauggaaauggcgucuggauuggucggacaaagucaaucaguagccgcaacggguucgagaugaucugggacccaaauggcuggaccggaacggauaacaauuuuuccauuaaacaagacauagugggcaucaacgaauggucuggguacucggggagcuucguucagcaucccgagcugacuggucuggacuguauucgaccuugcuucuggguggaacucaucagaggcaggccaaaggagaauacaauuuggaccuccgggucaaguaucucuuuuuguggagucaacagcgauacugugggcugguccuggcccgacggugcagaguuaccguucacaauagauaaauga

SEQ ID NO: 148399 - RNA, 1410 nt, Artificial Sequence; identical to SEQ ID NO: 146009
  derived and/or modified CDS sequence (opt3) from neuraminidase__InfluenzaA__ADX96979

SEQ ID NO: 148400 - RNA, 1410 nt, Artificial Sequence; identical to SEQ ID NO: 146009
  derived and/or modified CDS sequence (opt3) from neuraminidase__InfluenzaA__ADX96989

SEQ ID NO: 148401 - RNA, 1407 nt, Artificial Sequence
  derived and/or modified CDS sequence (opt3) from neuraminidase__InfluenzaA__ADX96999
augaaccccaaucagaagaucauuaccauaggcagcgugugcaugacaaucgggauggccaaccugauucuccaaaucggaauuaucuccauauggaucucucacucaauucagcuugguaaucagaaccagaucgagacuuguaaucaaagugucauuacguacgaaaacaauaccuggguuaaccagacauaugugaauaucagcaacacuaauuucgcugcaggccaguccguagugucugucaaacuggccgggaacucgucauugugcccugugagcggaugggcgauauacaguaaggacaauuccauuagaaucggcucuaaaggugauguuuuugugauuagggagccauucaucagcuguuccccguuagaaugccggaccuuuuuccugacacagggggcucuacucaacgacaagcauucaaauggaaccaucaaagaucgcagucccuaucgaacucugaugagcuguccuauuggcgaggucccaucucccuacaacucccguuuugaaucaguggccuggagcgcaagugccugccacgacggcauaaacuggcuuacaaucgggauuucuggaccugauaauggugcuguagcaguucugaaguauaacggcaucauaaccgacacgauuaaguccuggagaaauaacaucuugaggacucaagagagcgagugugccugcgugaaugggucguguuucaccgucaugacagauggaccaucuaacggccaggcuuccuacaaaaucuuucggauugaaaaggguaaaaucgugaagucaguggagaugaaugcccccaacuaucauuacgaagagugcaguuguuacccugacagcuccgagauuacuugcgucugccgcgauaauuggcacgggucuaacagaccauggguuagcuucaaucagaaccucgaauaucagauaggauacaucuguucaggcauuuuuggcgacaauccgaggcccaacgauaaaaccgggaguugcggaccuguguccagcaauggugcgaacggcguaaagggguucucuuuuaaguauggaaacggcguguggaucggucggacaaaaucaaucaguagccgcaauggguucgagaugauuugggacccaaacggcuggaccggaacggauaauaacuuuuccauaaagcaagacaucgucggcauuaaugaauggucuggguacucggguagcuucgugcagcaucccgagcugacuggacuggacuguauccgaccuugcuucuggguugaacucauuagaggcaggccaaaagagaacacaaucuggaccuccgggucaaguauaucuuuuuguggagugaauagcgauacugucggcugguccuggcccgacggugcagaguuaccguucacaaucgauaaguga

SEQ ID NO: 148402 - RNA, 1410 nt, Artificial Sequence; identical to SEQ ID NO: 144786
  derived and/or modified CDS sequence (opt3) from neuraminidase__InfluenzaA__ADX97009

SEQ ID NO: 148403 - RNA, 1410 nt, Artificial Sequence; identical to SEQ ID NO: 144941
  derived and/or modified CDS sequence (opt3) from neuraminidase__InfluenzaA__ADX97020

SEQ ID NO: 148404 - RNA, 1410 nt, Artificial Sequence
  derived and/or modified CDS sequence (opt3) from neuraminidase__InfluenzaA__ADX97030
augaaccccaaucagaagaucauuaccauaggcagcgugugcaugaucauugggauggccaaccugaugcuccaaaucggaaauauuaucuccauauggaucucucacucaauucagcuugguaaccagaaucagaucgagacauguaaccaaagugucauuacuuacgaaaauaacacguggguuaaucagaccuaugugaacaucagcaauacaaacuucgcugcaggccaguccguagugucugucaaacuggccggaaauucgucauugugcccugugagcggaugggcgauauacaguaaggacaacuccguuagaauuggcucuaaaggugauguguuugucaucagggagccauucauuagcuguuccccguuagaaugccggaccuuuuuccugacucagggggcucuacucaaugacaagcauucaaacggaacaaucaaagaucgcagucccuaucgaacccugaugagcuguccuaucggcgaggugccaucucccuacaacucccguuuugaaucaguagccuggagcgcaagugccugccacgacggcauuaauuggcuuacuauagggaucucuggaccugauaacggugcuguugcagugcugaaguauaauggcauuaucacagacaccauaaaguccuggagaaacaauauuuugaggacgcaagagagcgagugugccugcgucaacgggucguguuucacugugaugaccgauggaccaucugacggccaggcuuccuacaaaaucuuucggaucgaaaaggguaaaauugugaagucagucgagaugaaugcccccaacuaucauuacgaagagugcaguuguuacccugauagcuccgagaucacaugcguuugccgcgacaauuggcacgggucuaacagaccaugggugagcuucaaucagaaccucgaauaucagauuggauacauauguucaggcaucuuuggcgauaauccgaggcccaacgacaaaacugggaguugcggaccuguauccagcaauggugcgaacggcgugaagggguucucuuuuaaguauggaaacggcgucuggauuggucggaccaaaucaaucaguagccgcaauggguucgagaugaucugggauccaaacggcuggacaggaaccgacaauaacuuuuccauuaagcaagacauagugggcaucaaugaauggucuggguacucggggagcuucguucagcaucccgagcugacgggucuggauuguauucgaccuugcuucuggguggaacucaucagaggcaggccaaaagagaacacuauuuggacauccgggucaaguaucucuuuuuguggagucaauagcgacaccgugggcugguccuggcccgauggugcagaguuaccguucacuauagacaaguga

SEQ ID NO: 148405 - RNA, 1410 nt, Artificial Sequence; identical to SEQ ID NO: 146334
  derived and/or modified CDS sequence (opt3) from neuraminidase__InfluenzaA__ADX98643

SEQ ID NO: 148406 - RNA, 1410 nt, Artificial Sequence; identical to SEQ ID NO: 144786
  derived and/or modified CDS sequence (opt3) from neuraminidase__InfluenzaA__ADX98653

SEQ ID NO: 148407 - RNA, 1410 nt, Artificial Sequence
  derived and/or modified CDS sequence (opt3) from neuraminidase__InfluenzaA__ADX98668
augaaccccaaucagaagaucauuaccauaggcagcaucugcauuacaaucgggauggccaaccugauucuccaaaucggaaauauaaucuccauuuggaucucucacucaauucagcuugguaaccagaaucagaucgagacuuguaaccaaagugugauaacguacgaaaauaacaccugggucaaucagacauauguuaacauuagcaauacuaacuucgcugcaggccaguccgugguaucugugaaacuggccggaaauucgucauugugcccugucagcggaugggcgaucuacaguaaggacaacuccauuagaaucggcucuaaaggugauguguuuguuaucagggagccauucauuagcuguuccccguuagaaugccggaccuuuuuccugacacagggggcucuacucaaugacaagcauucaaacggaaccauaaaagaucgcagucccuaucgaacucugaugagcuguccuaucggcgaggugccaucucccuacaacucccguuuugaaucagucgccuggagcgcaagugccugccacgacggcauuaauuggcuuacaaucgggauaucuggaccugauaacggugcuguggcaguacugaaguauaauggcauuaucaccgacacgaucaaguccuggagaaacaauauuuugaggacucaagagagcgagugugccugcguuaacgggucguguuucaccgugaugacagauggaccaucugacggccaggcuuccuacaaaaucuuucggauugaaaaggguaaaauagucaagucaguggagaugaaugcccccaacuaucauuacgaagagugcaguuguuacccugauagcuccgagaucacuugcgugugccgcgacaauuggcacgggucuaacagaccaugggucagcuucaaucagaaccucgaauaucagauuggauacaucuguucaggcaucuuuggcgauaauccgaggcccaacgacaaaaccgggaguugcggaccuguuuccagcaauggugcgaacggcgugaagggguucucuuuuaaguauggaaacggcguauggauuggucggacaaaaucaauaaguagccgcaauggguucgagaugaucugggauccaaacggcuggaccggaacggacaauaacuuuuccauuaagcaagacaucgugggcauuaaugaauggucuggguacucggggagcuucguccagcaucccgagcugacuggucuggauuguauccgaccuugcuucuggguggaacucauaagaggcaggccaaaagagaacacaaucuggaccuccgggucaaguauuucuuuuuguggaguuaauagcgacacugugggcugguccuggcccgauggugcagaguuaccguucacaaucgacaaguga

SEQ ID NO: 148408 - RNA, 1410 nt, Artificial Sequence; identical to SEQ ID NO: 144786
  derived and/or modified CDS sequence (opt3) from neuraminidase__InfluenzaA__ADX98678

SEQ ID NO: 148409 - RNA, 1410 nt, Artificial Sequence; identical to SEQ ID NO: 144786
  derived and/or modified CDS sequence (opt3) from neuraminidase__InfluenzaA__ADX98698

SEQ ID NO: 148410 - RNA, 1410 nt, Artificial Sequence
  derived and/or modified CDS sequence (opt3) from neuraminidase__InfluenzaA__ADX98708
augaaccccaaucagaagaucauuaccauaggcagcgugugcaugacaaucgggauggccaaccugauucuccaaaucggaaauauuaucuccauauggaucucucacucaauucagcuugguaaccagaaucagaucgagacuuguaaccaaagugucauuaucuacgaaaauaacacguggguuaaucagaccuaugugaacauaagcaauacaaacuucgcugcaggccaguccguagugucugucaaacuggccggaaauucgucauugugcccugugagcggaugggcgauuuacaguaaggacaacuccaucagaauuggcucuaaaggugauguuuuugugaucagggagccauucaucagcuguuccccguuagaaugccggaccuuuuuccugacucagggggcucuacucaaugacaagcauucaaacggaacaauuaaagaucgcagucccuaucgaacccugaugagcuguccuauaggcgaggucccaucucccuacaacucccguuuugaaucaguggccuggagcgcaagugccugccacgacggcaucaauuggcuuacuauugggaucucuggaccugauaacggugcuguagcaguucugaaguauaauggcauaauuacagacaccaucaaguccuggagaaacaauaucuugaggacgcaagagagcgagugugccugcgugaacgggucguguuucacugucaugaccgauggaccaucugacggccaggcuuccuacaaaauuuuucggaucgaaaaggguaaaauugugaagucaguggagaugaaugcccccaacuaucauuacgaagagugcaguuguuacccugauagcuccgagauaacaugcgucugccgcgacaauuggcacgggucuaacagaccauggguuagcuucaaucagaaccucgaauaucagaucggauacauuuguucaggcaucuuuggcgauaauccgaggcccaacgacaaaacugggaguugcggaccuguguccagcaauggugcgaacggcguaaagggguucucuuuuaaguauggaaacggcguguggaucggucggaccaaaucaauuaguagccgcaauggguucgagaugauaugggauccaaacggcuggacaggaaccgacaauaacuuuuccaucaagcaagacauugucggcaucaaugaauggucuggguacucggggagcuucgugcagcaucccgagcugacgggucuggauuguauucgaccuugcuucuggguugaacucaucagaggcaggccaaaagagaacacuauauggacauccgggucaaguaucucuuuuuguggagugaauagcgacaccgucggcugguccuggcccgauggugcagaguuaccguucacuauugacaaguga

SEQ ID NO: 148411 - RNA, 1410 nt, Artificial Sequence; identical to SEQ ID NO: 144786
  derived and/or modified CDS sequence (opt3) from neuraminidase__InfluenzaA__ADX98722

SEQ ID NO: 148412 - RNA, 1410 nt, Artificial Sequence; identical to SEQ ID NO: 144786
  derived and/or modified CDS sequence (opt3) from neuraminidase__InfluenzaA__ADX98732

SEQ ID NO: 148413 - RNA, 1410 nt, Artificial Sequence; identical to SEQ ID NO: 144786
  derived and/or modified CDS sequence (opt3) from neuraminidase__InfluenzaA__ADX98742

SEQ ID NO: 148414 - RNA, 1410 nt, Artificial Sequence; identical to SEQ ID NO: 146137
  derived and/or modified CDS sequence (opt3) from neuraminidase__InfluenzaA__ADX98751

SEQ ID NO: 148415 - RNA, 1410 nt, Artificial Sequence; identical to SEQ ID NO: 144786
  derived and/or modified CDS sequence (opt3) from neuraminidase__InfluenzaA__ADX98761

SEQ ID NO: 148416 - RNA, 1410 nt, Artificial Sequence
  derived and/or modified CDS sequence (opt3) from neuraminidase__InfluenzaA__ADX98770
augaaccccaaucagaagaucauuaccauaggcagcgugugcaugacaaucgggauggccaaccugauucuccaaaucggaaauauuaucuccauauggaucucucacucaauucagcuugguaaccagaaucagaucgagacuuguaaccaaagugucauuacguacgaaaauaacaccuggguuaaucagacauaugugaacaucagcaauacuaacuucgcugcaggccaguccguagugucugucaaacuggccggaaauucgucauugugcccugugagcggaugggcgauauacaguaaggacaacuccauuagaaucggcucuaaaggugauguuuuugugauuagggagccauucaucagcuguuccccguuagaaugccggaccuuuuuccugacacagggggcucuacucaaugacaagcauucaaacggaaccaucaaagaucgcagucccuaucgaacucugaugagcuguccuauuggcgaggucccaucucccuacaacucccguuuugaaucaguggccuggagcgcaagugccugccacgacggcauaaauuggcuuacaaucgggauuucuggaccugauaacggugcuguagcaguucugaaguauaauggcaucauaaccgacacgauuaaguccuggagaaacaauaucuugaggacucaagagagcgagugugccugcgugaacgggucguguuucaccgucaugacagauggaccaucugacggccaggcuuccuacaaaaucuuucggauugaaaaggguaaaaucgugaagucaguggagaugaaugcccccaacuaucauuacgaagagugcaguuguuacccugauagcuccgagauuacuugcgucugccgcgacaauuggcacgggucuaacagaccaugggggagcuucaaucagaaccucgaauaucagauaggcuacaucuguucaggcauuuuuggggauaauccgaggcccaacgacaaaaccggaaguugcgguccuguuuccagcaauggcgcgaacggggugaagggauucucuuuuaaguauggcaacgguguauggaucgggcggacaaaaucaaucaguagccgcaauggcuucgagaugauuugggauccaaacggauggaccggcacggacaauaacuuuuccauaaagcaagacaucguggggauuaaugaauggucuggauacucggguagcuucguccagcaucccgagcugacuggccuggauuguauccgaccuugcuucuggguggaacucauuagagggaggccaaaagagaacacaaucuggaccuccggaucaaguauaucuuuuuguggcguuaauagcgacacuguggguugguccuggcccgauggggcagaguuaccguucacaaucgacaaguga

SEQ ID NO: 148417 - RNA, 1410 nt, Artificial Sequence; identical to SEQ ID NO: 144786
  derived and/or modified CDS sequence (opt3) from neuraminidase__InfluenzaA__ADX98780

SEQ ID NO: 148418 - RNA, 1410 nt, Artificial Sequence
  derived and/or modified CDS sequence (opt3) from neuraminidase__InfluenzaA__ADX98788
augaaccccaaucagaagaucauuaccauaggcagcgugugcaugacaaucgggauggccaaccugguccuccaaauuggaaauaucauuuccaucuggauaucucacucaauccagcuugguaaccagaaucagauugagacuuguaaccaaaguguuaucacguacgaaaauaacaccugggugaaucagacauauguaaacauuagcaauacuaacuucgcugcaggccaguccguggucucugugaaacuggccggaaauucgucauugugcccuguuagcggaugggcgaucuacaguaaggacaacuccauaagaauuggcucuaaaggugauguguuugucaucagggagccauucauuagcuguuccccguuagaaugccggaccuuuuuccugacacagggggcucuacucaaugacaagcauucaaacggaaccaucaaagaucgcagucccuaucgaacucugaugagcuguccuaucggcgaggugccaucucccuacaacucccguuuugaaucaguagccuggagcgcaagugccugccacgacggcauuaauuggcuuacaauagggaucucuggaccugauaacggugcuguugcagugcugaaguauaauggcauuaucaccgacacgauaaaguccuggagaaacaauauuuugaggacucaagagagcgagugugccugcgucaacgggucguguuucaccgugaugacagauggaccaucugacggccaggcuuccuacaaaaucuuucggaucgaaaaggguaaaauugugaagucagucgagaugaaugcccccaacuaucauuacgaagagugcaguuguuacccugauagcuccgagaucacuugcguuugccgcgacaauuggcacgggucuaacagaccaugggugagcuucaaucagaaccucgaauaucagauuggauacauauguucaggcaucuuuggcgauaauccgaggcccaacgacaaaaccgggaguugcggaccuguauccagcaauggugcgaacggcgugaagggguucucuuuuaaguauggaaacggcgucuggauuggucggacaaaaucaaucaguagccgcaauggguucgagaugaucugggauccaaacggcuggaccggaacggacaauaaguuuuccauuaaacaagacauagugggcaucaacgaauggucuggguacucggggagcuucguucagcaucccgagcugacuggucuggauuguauucgaccuugcuucuggguggaacucaucagaggcaggccaaaggagaauacaauuuggaccuccgggucaaguaucucuuuuuguggagucaacagcgacacugugggcugguccuggcccgauggugcagaguuaccguucacaauagacaaauga

SEQ ID NO: 148419 - RNA, 1410 nt, Artificial Sequence
  derived and/or modified CDS sequence (opt3) from neuraminidase__InfluenzaA__ADX98809
augaaccccaaucagaagaucauuaccauaggcagcgugugcaugacaaucgggauggccaaccugauucuccaaaucggaaauauuauccuuauauggaucucccacucuauucagcuggguaaccagaaucagaucgagacuuguaaccaaucagucauuacguacgaaaauaacaccuggguuaaucagacauaugugaacaucaguaauacuaacuucgcugcaggccagagcguaguguccgucaaauuggccggaaauucuucguuaugcccugugucagggugggcgauauacagcaaggacaacaguauuagaaucggcuccaaaggugauguuuuugugauuagggagccauucaucucuuguagcccgcuggaaugccggaccuuuuuccuaacacagggggcucuccugaaugacaagcauuccaacggaaccaucaaagaucgcucacccuaucgaacucuuaugaguuguccuauuggcgaggucccaagccccuacaacucucguuuugaauccguggccuggucagcaagcgccugccacgacggcauaaauuggcugacaaucgggauuaguggaccugauaacggugcuguagcaguuuugaaguauaauggcaucauaaccgacacgauuaagucuuggagaaacaauauccucaggacucaagaguccgagugugccugcgugaacgggagcuguuucaccgucaugacagauggaccaucggacggccaggcuucuuacaaaaucuuucggauugaaaaggguaaaaucgugaaguccguggagaugaaugcccccaacuaucauuacgaagagugcucauguuacccugauaguagcgagauuacuugcgucugccgcgacaauuggcacggguccaacagaccauggguuucuuucaaucagaaccuggaauaucagauaggauacaucuguagcggcauuuuuggcgauaauccgaggcccaacgacaaaaccgggucaugcggaccugugaguuccaauggugcgaacggcguaaagggguucagcuuuaaguauggaaacggcguguggaucggucggacaaaaucuaucucaagucgcaauggguucgagaugauuugggauccaaacggcuggaccggaacggacaauaacuuuagcauaaagcaagacaucgucggcauuaaugaaugguccggguacucuggaucguucgugcagcaucccgagcugacuggucucgauuguauccgaccuugcuucuggguugaauuaauuagaggcaggccaaaagagaacacaaucuggaccagcggguccucaauaaguuuuuguggagucaauucugacacugugggcuggagcuggcccgauggugcagagcugccguucacaaucgacaaguga

SEQ ID NO: 148420 - RNA, 1410 nt, Artificial Sequence; identical to SEQ ID NO: 144786
  derived and/or modified CDS sequence (opt3) from neuraminidase__InfluenzaA__ADX98821

SEQ ID NO: 148421 - RNA, 1410 nt, Artificial Sequence; identical to SEQ ID NO: 144786
  derived and/or modified CDS sequence (opt3) from neuraminidase__InfluenzaA__ADX98846

SEQ ID NO: 148422 - RNA, 1410 nt, Artificial Sequence
  derived and/or modified CDS sequence (opt3) from neuraminidase__InfluenzaA__ADX98856
augaaccccaaucagaagaucaugaccauuggcagcgugugcaugacaauagggauggccaaccugauccuccaaauuggaaauaucauuuccaucuggauaucucacucaauccagcuugguauucagaaccagaucgagacuuguaaucaaagugucauuacguacgaaaacaauaccuggguuaaccagacauaugugaauaucagcaacacuaauuucgcugcaggccaguccguagugucugucaaacuggccgggaacucgucauugugcccugugagcggaugggcgauauacaguaaggacaauuccauuagaaucggcucuaaaggugauguuuuugugauuagggagccauucaucagcuguuccccguuagaaugccggaccuuuuuccugacacagggggcucuacucaacgacaagcauucaaauggaaccaucaaagaucgcagucccuaucgaacucugaugagcuguccuauuggcgaggucccaucucccuacaacucccguuuugaaucaguggccuggagcgcaagugccugccacgacggcauaaacuggcuuacaaucgggauuucuggaccugauaauggugcuguagcaguucugaaguauaacggcaucauaaccgacacgauuaaguccuggagaaauaacaucuugaggacucaagagagcgagugugccugcgugaaugggucguguuucaccgucaugacagauggaccaucugacggccaggcuuccuacaaaaucuuucggauugaaaaggguaaaaucgugaagucaguggagaugaacgcccccaauuaucauuacgaagagugcaguuguuacccugauagcuccgagauuacuugcgucugccgcgacaacuggcacgggucuaauagaccauggguuagcuucaaccagaaucucgaauaucagauaggauacaucuguucaggcauuuuuggcgauaacccgaggcccaaugacaaaaccgggaguugcggaccuguguccagcaacggugcgaauggcguaaagggguucucuuuuaaguauggaaacggcguguggaucggucggacaaaaucaaucaguagccgcaacggguucgagaugauuugggauccaaauggcuggaccggaacggacaacaauuuuuccauaaagcaagacaucgucggcauuaacgaauggucuggguacucggguagcuucgugcagcaucccgagcugacuggacuggauuguauccgaccuugcuucuggguugaacucauuagaggcaggccaaaagagaauacaaucuggaccuccgggucaaguauaucuuuuuguggagugaacagcgacacugucggcugguccuggcccgauggugcagaguuaccguucacaaucgacaaguga

SEQ ID NO: 148423 - RNA, 1410 nt, Artificial Sequence; identical to SEQ ID NO: 144786
  derived and/or modified CDS sequence (opt3) from neuraminidase__InfluenzaA__ADX98863

SEQ ID NO: 148424 - RNA, 1410 nt, Artificial Sequence; identical to SEQ ID NO: 144786
  derived and/or modified CDS sequence (opt3) from neuraminidase__InfluenzaA__ADX98873

SEQ ID NO: 148425 - RNA, 1410 nt, Artificial Sequence
  derived and/or modified CDS sequence (opt3) from neuraminidase__InfluenzaA__ADX98883
augaaccccaaucagaagaucauuaccauaggcagcgugugcaugacaaucgggauggccaaccugauucuccaaaucggaaauauuaucuccauauggaucucucacucaauucagcuugguaaccagaaucagaucgagacuuguaaccaaagugucauuacguacgaaaauaacaccuggguuaaucagacauaugugaacaucagcaauacuaacguagcugcaggccaguccguggucucugugaaacuggccgggaauagcucauugugcccuguuagcggaugggcgauauacaguaaggacaacuccauuagaaucggcucuaaaggugaugcuuucgugauuagggagccauuuaucagcuguuccccguuagaaugccggaccuucuuucugacacagggggcccuacucaaugacaagcauucaaacggaaccaucaaagaucgcagucccuaucgaacucugaugagcuguccuauuggcgaggucccaucucccuacaacucccguuucgaaucaguggcauggagcgccagugcuugccacgacggcauaaauuggcuuacaaucgggauuucuggaccugauaacggugcaguagccguucugaaguauaauggcaucauaaccgacacgauuaaguccuggagaaacaauaucuugaggacucaagagagcgagugugcuugcgugaacgggucguguuuuaccgucaugacagauggaccaucugacggccaggccuccuacaaaaucuuccggauugaaaaggguaaaaucgugaagucaguggagaugaaugcgcccaacuaucauuacgaagagugcaguuguuacccugauagcuccgagauuacuugcgucugccgcgacaauuggcacgggucuaacagaccauggguuagcuuuaaucagaaccucgaauaucagauaggauacaucuguucaggcauuuucggcgauaauccgaggcccaacgacaaaaccgggaguugcggaccuguguccagcaauggugcaaacggcguaaagggguuuucuuucaaguauggaaacggcguguggaucggucggacaaaaucaaucaguagccgcuccggguuugagaugauuugggauccaaauggcuggaccggaacggacaacaauuucucuauaaagcaagacaucgucggcauuaacgaauggucgggguacagcggauccuuugugcagcaucccgagcugacuggucuggauuguauccgaccuugcuucuggguugaacucauuagaggcaggccaaaagagaauacaaucuggaccucagggaguucuauaucguucuguggagugaacuccgacacugucggcuggucauggcccgauggugccgaguuaccguuuacaaucgacaaguga

SEQ ID NO: 148426 - RNA, 1410 nt, Artificial Sequence; identical to SEQ ID NO: 144786
  derived and/or modified CDS sequence (opt3) from neuraminidase__InfluenzaA__ADX98893

SEQ ID NO: 148427 - RNA, 1410 nt, Artificial Sequence; identical to SEQ ID NO: 144786
  derived and/or modified CDS sequence (opt3) from neuraminidase__InfluenzaA__ADX98903

SEQ ID NO: 148428 - RNA, 1410 nt, Artificial Sequence; identical to SEQ ID NO: 146339
  derived and/or modified CDS sequence (opt3) from neuraminidase__InfluenzaA__ADX98913

SEQ ID NO: 148429 - RNA, 1410 nt, Artificial Sequence; identical to SEQ ID NO: 146217
  derived and/or modified CDS sequence (opt3) from neuraminidase__InfluenzaA__ADX98923

SEQ ID NO: 148430 - RNA, 1410 nt, Artificial Sequence; identical to SEQ ID NO: 146223
  derived and/or modified CDS sequence (opt3) from neuraminidase__InfluenzaA__ADX98933

SEQ ID NO: 148431 - RNA, 1410 nt, Artificial Sequence; identical to SEQ ID NO: 144786
  derived and/or modified CDS sequence (opt3) from neuraminidase__InfluenzaA__ADX98943

SEQ ID NO: 148432 - RNA, 1410 nt, Artificial Sequence; identical to SEQ ID NO: 146743
  derived and/or modified CDS sequence (opt3) from neuraminidase__InfluenzaA__ADX98953

SEQ ID NO: 148433 - RNA, 1410 nt, Artificial Sequence; identical to SEQ ID NO: 144786
  derived and/or modified CDS sequence (opt3) from neuraminidase__InfluenzaA__ADX98963

SEQ ID NO: 148434 - RNA, 1410 nt, Artificial Sequence
  derived and/or modified CDS sequence (opt3) from neuraminidase__InfluenzaA__ADX98973
augaaccccaaucagaagaucauuaccauaggcagcgugugcaugacaaucgggauggccaaccugauucuccaaaucggaaauauuaucuccauauggaucucucacucaauucagcuugguaaccagaaucagaucgagacuuguaaccaaagugucauuacguacgaaaauaacaccuggguuaaucagacauaugugaacaucagcaauacuaacuucgcugcaggccaguccguagugucugucaaacuggccggaaauucgucauugugcccugugagcgggugggcgauauacaguaaggacaacuccauuagaaucggcucuaaaggugauguuuuugugauuagggagccauucaucagcuguuccccguuagaaugccggaccuuuuuccugacacagggggcucuacucaaugacaagcauucaaacggaaccaucaaagaucgcagucccuaucgaacucugaugauuuguccuauaggcgaggucccaagccccuacaacucucguuuugaauccguggccuggucagcaagcgccugccacgacggcaucaauuggcuuacaauugggaucaguggaccugauaacggugcuguagcaguucugaaguauaauggcauaauuaccgacacgaucaagucuuggagaaacaauaucuugaggacucaagaguccgagugugccugcgugaacgggagcuguuucaccgucaugacagauggaccaucggacggccaggcuucuuacaaaauuuuucggaucgaaaaggguaaaauugugaaguccguggagaugaaugcccccaacuaucauuacgaagagugcucauguuacccugauaguagcgagauaacuugcgucugccgcgacaauuggcacggguccaacagaccauggguuucuuucaaucagaaccucgaauaucagaucggauacauuuguagcggcaucuuuggcgauaauccgaggcccaacgacaaaaccgggucaugcggaccugugaguuccaauggugcgaacggcguaaagggguucagcuuuaaguauggaaacggcguguggaucggucggacaaaaucuauuucaagucgcaauggguucgagaugauaugggauccaaacggcuggaccggaacggacaauaacuuuagcaucaagcaagacauugucggcaucaaugaaugguccggguacucuggaucguucgugcagcaucccgagcugacuggucuggauuguauucgaccuugcuucuggguugaacucaucagaggcaggccaaaagagaacacaauauggaccagcggguccucaaucaguuuuuguggagucaauucugacacugugggcuggagcuggcccgauggugcagaguuaccguucacaauugacaaguga

SEQ ID NO: 148435 - RNA, 1410 nt, Artificial Sequence; identical to SEQ ID NO: 144786
  derived and/or modified CDS sequence (opt3) from neuraminidase__InfluenzaA__ADX98983

SEQ ID NO: 148436 - RNA, 1410 nt, Artificial Sequence; identical to SEQ ID NO: 144786
  derived and/or modified CDS sequence (opt3) from neuraminidase__InfluenzaA__ADX98993

SEQ ID NO: 148437 - RNA, 1410 nt, Artificial Sequence; identical to SEQ ID NO: 144786
  derived and/or modified CDS sequence (opt3) from neuraminidase__InfluenzaA__ADX99003

SEQ ID NO: 148438 - RNA, 1365 nt, Artificial Sequence
  derived and/or modified CDS sequence (opt3) from neuraminidase__InfluenzaA__ADX99584
augaaccccaaucagaagaucaccacaauuggcagcauaugccugguggucgggcucaucucccuuauucugcaaaucggaaacauuaucucuauauggaucucacacaguauucagacugguagccagaaucauacgggcaucuguaaccagaauauuaucaccuacaaaaacuccacauggguuaaggacacuaccucugugauauugacaggaaauucgucauuaugcccuauuagagggugggccaucuauagcaaagauaacaguauuaggaucggcuccaagggugacguauucgugauccgggagccauuuauuucuuguagccaccuggaaugccgcaccuucuuucuaacucaaggggcucuccugaaugauaaacauuccaacggaacagucaaggaccgaucaccguaccgugcacuuaugaguugucccgugggcgaggccccuagcccauauaauucuagauucgaauccguugcguggucagcuagcgccugccacgauggcaugggguggcugaccauaggaaucaguggucccgacaacggcgcaguggccgucuugaaguacaaugggauuaucacggagacuauaaaaucuuggaggaagaaaauucuccggacccaggaauccgagugugcuugcgugaacggaagcuguuuuacaaucaugacugauggcccuucggacggucuggcaucuuauaagaucuucaaaauugagaaggggaagguaaccaaauccaucgaacugaaugccccaaacucacauuacgaggaaugcaguuguuaucccgauacaggaaagguuaugugcgugugccgcgacaacuggcacggcagcaauagaccuugggucuccuuugaucagaaccucgacuaccagauuggcuacauauguucugggguguucggagauaauccaaggccggaggacgguaccggcagcugcgggcccguguaugucgacggagcuaacggcguuaaagguuuuucauaccgguaugggaauggcguguggaucggacgcacgaagagucacuccagccgacauggcuucgagaugauuugggauccuaacggguggacugaaacagacucuaaauuuucaguaagacaagauguggucgccaugaccgacuggaguggauacagcgguuccuucgugcagcacccagaguuaacuggccuggauuguaugaggcccugcuuuuggguugaacuuauccgggggcguccuaaggagaaaacaaucuggaccucugcgucgagcauuuccuucuguggagucaauucagacacgguggauuggaguuggccagacggcgcagaauugcccuucucuauagauaaguga

SEQ ID NO: 148439 - RNA, 1365 nt, Artificial Sequence; identical to SEQ ID NO: 148438
  derived and/or modified CDS sequence (opt3) from neuraminidase__InfluenzaA__ADX99595

SEQ ID NO: 148440 - RNA, 1365 nt, Artificial Sequence; identical to SEQ ID NO: 148438
  derived and/or modified CDS sequence (opt3) from neuraminidase__InfluenzaA__ADX99606

SEQ ID NO: 148441 - RNA, 1365 nt, Artificial Sequence; identical to SEQ ID NO: 148438
  derived and/or modified CDS sequence (opt3) from neuraminidase__InfluenzaA__ADX99617

SEQ ID NO: 148442 - RNA, 1365 nt, Artificial Sequence; identical to SEQ ID NO: 148438
  derived and/or modified CDS sequence (opt3) from neuraminidase__InfluenzaA__ADX99628

SEQ ID NO: 148443 - RNA, 1365 nt, Artificial Sequence; identical to SEQ ID NO: 148438
  derived and/or modified CDS sequence (opt3) from neuraminidase__InfluenzaA__ADX99639

SEQ ID NO: 148444 - RNA, 1365 nt, Artificial Sequence; identical to SEQ ID NO: 143767
  derived and/or modified CDS sequence (opt3) from neuraminidase__InfluenzaA__ADX99650

SEQ ID NO: 148445 - RNA, 1365 nt, Artificial Sequence; identical to SEQ ID NO: 143767
  derived and/or modified CDS sequence (opt3) from neuraminidase__InfluenzaA__ADX99672

SEQ ID NO: 148446 - RNA, 1365 nt, Artificial Sequence; identical to SEQ ID NO: 143767
  derived and/or modified CDS sequence (opt3) from neuraminidase__InfluenzaA__ADX99683

SEQ ID NO: 148447 - RNA, 1365 nt, Artificial Sequence; identical to SEQ ID NO: 143767
  derived and/or modified CDS sequence (opt3) from neuraminidase__InfluenzaA__ADX99694

SEQ ID NO: 148448 - RNA, 1365 nt, Artificial Sequence; identical to SEQ ID NO: 143767
  derived and/or modified CDS sequence (opt3) from neuraminidase__InfluenzaA__ADX99705

SEQ ID NO: 148449 - RNA, 1365 nt, Artificial Sequence; identical to SEQ ID NO: 143767
  derived and/or modified CDS sequence (opt3) from neuraminidase__InfluenzaA__ADX99846

SEQ ID NO: 148450 - RNA, 1365 nt, Artificial Sequence; identical to SEQ ID NO: 143767
  derived and/or modified CDS sequence (opt3) from neuraminidase__InfluenzaA__ADX99857

SEQ ID NO: 148451 - RNA, 1365 nt, Artificial Sequence; identical to SEQ ID NO: 143767
  derived and/or modified CDS sequence (opt3) from neuraminidase__InfluenzaA__ADX99868

SEQ ID NO: 148452 - RNA, 1365 nt, Artificial Sequence; identical to SEQ ID NO: 143767
  derived and/or modified CDS sequence (opt3) from neuraminidase__InfluenzaA__ADX99879

SEQ ID NO: 148453 - RNA, 1365 nt, Artificial Sequence; identical to SEQ ID NO: 143767
  derived and/or modified CDS sequence (opt3) from neuraminidase__InfluenzaA__ADX99890

SEQ ID NO: 148454 - RNA, 1365 nt, Artificial Sequence; identical to SEQ ID NO: 143767
  derived and/or modified CDS sequence (opt3) from neuraminidase__InfluenzaA__ADX99901

SEQ ID NO: 148455 - RNA, 1365 nt, Artificial Sequence
  derived and/or modified CDS sequence (opt3) from neuraminidase__InfluenzaA__ADX99912
augaaccccaaucagaagaucauuaccauaggcagcaucugccugguggucgggcucauuucccuuauccugcaaauuggaaacaucauaucuaucuggauuucacacaguauccagacagguagccagaaucauacuggcauuuguaaccagaauaucauaacguacaaaaacuccaccuggguuaaggacacaacuucugugauuuugaccggaaauucgucauuaugcccuaucagagggugggccauuuauagcaaagauaacaguaucaggaucggcuccaagggugacguauucauuauacgggagccauuuaucucuuguagccaccuggaaugccgcacauucuuucuaacccaaggggcucuccugaaugauaaacauuccucaggaacugugaaggaccgaaguccguaccgugcacuuaugagcugucccgucggcgaggccccuucuccauauaacuccagauucgaaucaguggcguggagcgcuagugccugccacgauggcaugggguggcugacaauuggaaucucuggucccgacaauggcgcaguugccguguugaaguacaacgggauaauuaccgagacgaucaaauccuggaggaagaaaauccuccggacucaggaaagcgagugugcuugcgucaauggaucguguuuuaccauuaugacagauggcccuucugacggucuggcauccuauaagaucuucaaaauugagaaggggaaggugacuaaaucaauagaacugaacgccccaaauagucauuacgaggaaugcagcuguuaucccgauaccggaaagguaaugugcguuugccgcgacaacuggcacggcuccaacagaccuugggugucuuuugaucagaaucucgacuaccagaucggcuacauuuguagcggggucuucggagauaacccaaggccggaggacgguacaggcucaugcgggcccguguauguggacggagcuaauggcgucaaagguuuuaguuaccgguaugggaacggcguuuggaucggacgcaccaagucccacagcucucgacauggcuucgagaugaucugggauccuaauggguggacggaaacugacucaaaauuuagugugagacaagauguaguggccaugacagacuggagcggauacuccgguucuuucguccagcacccagaguuaaccggccuggauuguaugaggcccugcuuuuggguggaacuuauucgggggcguccuaaggagaaaacuauauggacaucggcgagcuccaucucauucuguggaguuaacagugacaccguggauuggucuuggccagacggcgcagaauugcccuucagcauugauaaguga

SEQ ID NO: 148456 - RNA, 1365 nt, Artificial Sequence; identical to SEQ ID NO: 143767
  derived and/or modified CDS sequence (opt3) from neuraminidase__InfluenzaA__ADX99923

SEQ ID NO: 148457 - RNA, 1365 nt, Artificial Sequence; identical to SEQ ID NO: 143767
  derived and/or modified CDS sequence (opt3) from neuraminidase__InfluenzaA__ADX99934

SEQ ID NO: 148458 - RNA, 1365 nt, Artificial Sequence; identical to SEQ ID NO: 143767
  derived and/or modified CDS sequence (opt3) from neuraminidase__InfluenzaA__ADX99956

SEQ ID NO: 148459 - RNA, 1365 nt, Artificial Sequence; identical to SEQ ID NO: 143767
  derived and/or modified CDS sequence (opt3) from neuraminidase__InfluenzaA__ADX99967

SEQ ID NO: 148460 - RNA, 1365 nt, Artificial Sequence; identical to SEQ ID NO: 143767
  derived and/or modified CDS sequence (opt3) from neuraminidase__InfluenzaA__ADX99978

SEQ ID NO: 148461 - RNA, 1365 nt, Artificial Sequence; identical to SEQ ID NO: 143767
  derived and/or modified CDS sequence (opt3) from neuraminidase__InfluenzaA__ADX99989

SEQ ID NO: 148462 - RNA, 1365 nt, Artificial Sequence; identical to SEQ ID NO: 143767
  derived and/or modified CDS sequence (opt3) from neuraminidase__InfluenzaA__ADY00001

SEQ ID NO: 148463 - RNA, 1365 nt, Artificial Sequence; identical to SEQ ID NO: 143767
  derived and/or modified CDS sequence (opt3) from neuraminidase__InfluenzaA__ADY00012

SEQ ID NO: 148464 - RNA, 1365 nt, Artificial Sequence; identical to SEQ ID NO: 143767
  derived and/or modified CDS sequence (opt3) from neuraminidase__InfluenzaA__ADY00023

SEQ ID NO: 148465 - RNA, 1413 nt, Artificial Sequence
  derived and/or modified CDS sequence (opt3) from neuraminidase__InfluenzaA__ADY04729
augaaccccaaucagaagaucauuaccauaggcagcaucuccauugccaucgggauuaucucucugaugcuccaaauaggaaacaucauuucaaucugggcuagucacagcauucagacagguucccagaaucauacuggcgugugcaaccagagaaucauaacguacgaaaauucuaccugggucaaccacacauauguuaauauuaacaauacuaacgugaucgcagggaaagacaagaccucgguaacaauggccggaaauucaagccuuuguaguauuuccggcugggcgaucuacaccaaagauaacucuaucaggauugguagcaagggggacguguucgucauacgggagccuuuuaucuccugcucacaucuggagugucgcacuuucuuuuugacacaaggagcuuuacugaaugauaaacacaguaacggcaccgugaaggaccgaagcccauaucgugcccuaaugucuugcccgcucggcgaagcacccuccccuuacaauucaaaguucgagagcguugccuggagugcuucugcaugucaugaugggaugggauggcugacgauugguaucuccggcccagacaacggggccguggcuguccuuaaauauaacggaauaauuacugaaaccaucaagagcuggaaaaagcagauccugagaacacaggagucggagugcguguguguaaauggcucuugcuuuacuauuaugaccgauggucccuccaacggggccgcgucauacaaaaucuucaagauugaaaagggaaaaguuacaaagaguauagaguugaaugcaccuaacuuucacuaugaagaguguagcugcuacccagacaccggcacggugaugugugucugcagggauaauuggcacggcuccaaccggcccugggugucuuucaaucagaaccucgacuaccaaaucggguauauuugcagcggaguguuuggugauaauccucgcccaaaagacggcgaggggucauguaacccggucacuguugauggagccaauggcgugaaggguuucaguuacaaauaugggaacggcguauggaucggaagaacaaaguccaauaggcugcggaaaggcuuugaaaugaucugggaccccaacggguggaccgacacugauagcgacuucucugugaagcaggaugucguggcuauuacagacuggucaggauacagugguagcuuuguucagcauccugagcugaccggccucgauugcauacgcccauguuucuggguggaauuaguccgagggcugcccaaggagaauacgaccaucuggacauccggaucuucgauuagcuucugcggcgugaacuccgacacugccaacuggucauggccugauggugcagaacuuccauuuaccaucgacaaauga

SEQ ID NO: 148466 - RNA, 1410 nt, Artificial Sequence; identical to SEQ ID NO: 147566
  derived and/or modified CDS sequence (opt3) from neuraminidase__InfluenzaA__ADY11828

SEQ ID NO: 148467 - RNA, 1410 nt, Artificial Sequence; identical to SEQ ID NO: 144647
  derived and/or modified CDS sequence (opt3) from neuraminidase__InfluenzaA__ADY11839

SEQ ID NO: 148468 - RNA, 1410 nt, Artificial Sequence; identical to SEQ ID NO: 144647
  derived and/or modified CDS sequence (opt3) from neuraminidase__InfluenzaA__ADY17657

SEQ ID NO: 148469 - RNA, 1410 nt, Artificial Sequence; identical to SEQ ID NO: 144647
  derived and/or modified CDS sequence (opt3) from neuraminidase__InfluenzaA__ADY17668

SEQ ID NO: 148470 - RNA, 1410 nt, Artificial Sequence; identical to SEQ ID NO: 144647
  derived and/or modified CDS sequence (opt3) from neuraminidase__InfluenzaA__ADY17679

SEQ ID NO: 148471 - RNA, 1410 nt, Artificial Sequence; identical to SEQ ID NO: 144647
  derived and/or modified CDS sequence (opt3) from neuraminidase__InfluenzaA__ADY17690

SEQ ID NO: 148472 - RNA, 1410 nt, Artificial Sequence; identical to SEQ ID NO: 144647
  derived and/or modified CDS sequence (opt3) from neuraminidase__InfluenzaA__ADY17701

SEQ ID NO: 148473 - RNA, 1410 nt, Artificial Sequence; identical to SEQ ID NO: 144786
  derived and/or modified CDS sequence (opt3) from neuraminidase__InfluenzaA__ADY38722

SEQ ID NO: 148474 - RNA, 1410 nt, Artificial Sequence; identical to SEQ ID NO: 146535
  derived and/or modified CDS sequence (opt3) from neuraminidase__InfluenzaA__ADY38723

SEQ ID NO: 148475 - RNA, 1410 nt, Artificial Sequence; identical to SEQ ID NO: 144786
  derived and/or modified CDS sequence (opt3) from neuraminidase__InfluenzaA__ADY38734

SEQ ID NO: 148476 - RNA, 1410 nt, Artificial Sequence; identical to SEQ ID NO: 146378
  derived and/or modified CDS sequence (opt3) from neuraminidase__InfluenzaA__ADY38753

SEQ ID NO: 148477 - RNA, 1410 nt, Artificial Sequence; identical to SEQ ID NO: 144786
  derived and/or modified CDS sequence (opt3) from neuraminidase__InfluenzaA__ADY38763

SEQ ID NO: 148478 - RNA, 1410 nt, Artificial Sequence; identical to SEQ ID NO: 144786
  derived and/or modified CDS sequence (opt3) from neuraminidase__InfluenzaA__ADZ04600

SEQ ID NO: 148479 - RNA, 1410 nt, Artificial Sequence; identical to SEQ ID NO: 144786
  derived and/or modified CDS sequence (opt3) from neuraminidase__InfluenzaA__ADZ04610

SEQ ID NO: 148480 - RNA, 1410 nt, Artificial Sequence; identical to SEQ ID NO: 144786
  derived and/or modified CDS sequence (opt3) from neuraminidase__InfluenzaA__ADZ04693

SEQ ID NO: 148481 - RNA, 1410 nt, Artificial Sequence; identical to SEQ ID NO: 144786
  derived and/or modified CDS sequence (opt3) from neuraminidase__InfluenzaA__ADZ04701

SEQ ID NO: 148482 - RNA, 1410 nt, Artificial Sequence; identical to SEQ ID NO: 144786
  derived and/or modified CDS sequence (opt3) from neuraminidase__InfluenzaA__ADZ04711

SEQ ID NO: 148483 - RNA, 1410 nt, Artificial Sequence
  derived and/or modified CDS sequence (opt3) from neuraminidase__InfluenzaA__ADZ05393
augaaccccaaucagaagaucauuaccauagacagcgugugcaugacaaucggcauggccaaccugauucuccaaaucgggaauauuaucuccauauggaucucucacucaauucagcuuggaaaccagaaucagaucgagacuuguaaccaaagugucauuacguacgaaaauaacaccuggguuaaucagacauaugugaacaucagcaauacuaacuucgcugcaggucaguccguagugucugucaaacuggccggcaauucgucauugugcccugugagcgggugggcgauauacaguaaggauaacuccguuagaauuggaucuaaaggcgacguguuugucaucagggagccauucauuagcuguuccccguuagaaugccggaccuuuuuccugacacagggugcucuacucaaugauaagcauucaaacgggaccaucaaagaccgcagucccuaucgaacucugaugagcuguccuaucggagaggugccaucucccuacaacucccguuuugaaucaguagccuggagcgcaagugccugccacgauggcauuaauuggcuuacaauaggcaucucugggccugacaacggagcuguugcagugcugaaguauaaugguauuaucaccgauacgauaaaguccuggagaaacaauauuuugaggacucaagagagcgagugugccugcgucaacggcucguguuucaccgugaugacagacgggccaucuaauggacaggcuuccuacaaaaucuuucggaucgaaaagggcaaaauugugaagucagucgagaugaacgcccccaauuaucauuacgaagagugcaguuguuacccugauagcuccgagaucacuugcguuugccgcgacaacuggcacgguucuaauagaccaugggugagcuucaaccagaaucucgaauaucagauuggguacauauguucaggaaucuuuggcgauaacccgaggcccaaugacaaaaccggcaguugcgggccuguauccagcaacggagcgaacggugugaagggcuucucuuuuaaguaugggaauggagucuggauuggccggacaaaaucaaucaguagccgcaacgguuucgagaugaucugggauccaaauggguggaccggcacggacaacaauuuuuccauuaagcaagacauagugggaaucaacgaauggucuggcuacucggggagcuucguucagcaucccgagcugacuggacuggauuguauucgaccuugcuucuggguggaacucaucagagguaggccaaaagagaauacaauuuggaccuccggcucaaguaucucuuuuuguggggucaacagcgacacugugggaugguccuggcccgauggcgcagaguuaccguucacaauagacaaguga

SEQ ID NO: 148484 - RNA, 1413 nt, Artificial Sequence
  derived and/or modified CDS sequence (opt3) from neuraminidase__InfluenzaA__ADZ05837
augaaccccaaucagaagaucauuaccauaggcagcaucuccauugccaucgggauuaucucucugaugcuccaaauaggaaacaucauuucaaucugggcuagucacagcauucagacagguucccagaauaacacuggcaucugcaaucagagaauaauuacgugugagaacucuaccugggugaaucauacauacgucaacaucaauaacacuaauguuguggcaggggaagacaaaaccucgguaacacuugccggaaacucaagccugugcaguauuuccggcugggcgaucuauaccaaggauaauucuaucaggauugguagcaaaggggacguguucgucauacgggagccuuuuaucuccuguucacacuuggaaugccgcacuuucuuuuuaacacaaggagcucugcuaaacgauaagcauaguaauggcaccgugaaagaccgaagcccauaccgugcccucaugucuuguccgcugggcgaggcacccuccccuuauaacucaaaguucgaaagcguugccuggagugcuucugcaugccacgaugggaugggauggcuuacgauugguaucuccggcccagacaacggggccguggcuguccugaaguacaauggaauaauuacuggcaccaucaaaagcuggaagaaacagaucuugagaacacaggagucggagugugugugcaugaacgguucuuguuuuacuauuaugaccgaugggcccuccaauaaggccgcgucauauaaaaucuucaagauugaaaagggaaaaguaacaaagaguauagagcucaacgcaccuaauuuuuacuaugaagagugcagcuguuacccagacaccggcaucguuaugugcgugugcagggauaacuggcauggcuccaaucggcccugggucucuuucaaccagaaucuggacuaccaaauuggguauaucuguagcggaguguuuggugauaacccucgcccagaggacggcgaagggucaugcaauccggugacggucgauggagccaacggcguuaaagguuucaguuacaaguaugggaauggcguguggaucggaagaacuaaauccaacaggcugcggaagggcuuugagaugauuugggaccccaauggguggacaaacaccgacagcgauuucucuguaaaacaggacguggucgcuacuacagauuggucaggauacagugguagcuuugugcagcacccugaacucaccggcuuagacuguauacgcccaugcuucuggguugagcuggugcgagggcuucccagagaaaacacgaccaucuggacauccggaucuucgauuagcuucuguggcgucaauuccgauacugccaacuggucauggccugacggugcagaguugccauuuaccaucgauaaguga

SEQ ID NO: 148485 - RNA, 1413 nt, Artificial Sequence; identical to SEQ ID NO: 145509
  derived and/or modified CDS sequence (opt3) from neuraminidase__InfluenzaA__ADZ05848

SEQ ID NO: 148486 - RNA, 1410 nt, Artificial Sequence; identical to SEQ ID NO: 145953
  derived and/or modified CDS sequence (opt3) from neuraminidase__InfluenzaA__ADZ05858

SEQ ID NO: 148487 - RNA, 1410 nt, Artificial Sequence; identical to SEQ ID NO: 144786
  derived and/or modified CDS sequence (opt3) from neuraminidase__InfluenzaA__ADZ47841

SEQ ID NO: 148488 - RNA, 1410 nt, Artificial Sequence; identical to SEQ ID NO: 144786
  derived and/or modified CDS sequence (opt3) from neuraminidase__InfluenzaA__ADZ47851

SEQ ID NO: 148489 - RNA, 1410 nt, Artificial Sequence
  derived and/or modified CDS sequence (opt3) from neuraminidase__InfluenzaA__ADZ47861
augaaccccaaucagaagaucauuaccauaggcagcgugugcaugacaaucgggcuggccaaccucauucuucaaaucggaaauauuaucuccauauggaucucucacucaauucagcuggguaaccagaaucagaucgagacuuguaaccaaagugucauuacguacgaaaauaacaccuggguuaaucagacauaugugaacaucagcaauauaaacuucgcugcaggccaguccguagugucugucaaauuggccggaaauucgucauuaugcccugugagcggaugggcgauuuacaguaaggacaacuccguuagaaucggcucuaaaggugauguguuugucauuagggagccauucaucagcuguuccccgcuggaaugccggaccuuuuuccuaacucagggggcucuccugaaugacaagcauucaaacggaacaaucaaagaucgcagucccuaucgaacccuuaugagcuguccuauuggcgaggugccaucucccuacaacucccguuuugaaucaguagccuggagcgcaagugccugccacgacggcauaaauuggcugacuaucgggauuucuggaccugauaacggugcuguugcaguguugaaguauaauggcaucauaacagacaccauuaaguccuggagaaacaauauccucaggacgcaagagagcgagugugccugcgucaacgggucguguuucacugugaugaccgauggaccaucugacggccaggcuuccuacaaaaucuuucggauugaaaaggguaaaaucgugaagucagucgagaugaaugcccccaacuaucauuacgaagagugcaguuguuacccugauagcuccgagauuacaugcguuugccgcgacaauuggcacgggucuaacagaccaugggugagcuucaaucagaaccuggaauauaggauaggauacaucuguucaggcauuuuuggcgauaauccgcggcccaacgacaaaacugggaguugcggaccuguauccagcaauggugcgaacggcgugaagggguucucuuuuaaguauggaaacggcgucuggaucggucgcaccaaaucaaucaguagccgaaauggguucgagaugauuugggauccaaacggcuggacaggaaccgacaagaauuuuuccauaaaacaggacaucgugggcauuaacgaauggucuggguacucggggagcuucguucaacaucccgagcugacgggucucgauuguaucagaccuugcuucuggguggaauuaauuaggggccggccaaaggagaauacuaucuggacauccgggucaaguauaucuuuuuguggagucaacagcgacaccgugggcugguccuggcccgauggugcagagcugccguucacuaucgacaaauga

SEQ ID NO: 148490 - RNA, 1413 nt, Artificial Sequence
  derived and/or modified CDS sequence (opt3) from neuraminidase__InfluenzaA__ADZ53101
augaaccccaaucagaagaucauuaccauaggcagcaucuccauugccaucgggauuaucucucugaugcuccaaauaggaaacaucauuucaaucugggcuagucacagcauucagacagguucccagaauaacacuggcaucugcaaucagagaauaauuacguacgagaacucuaccugggugaaucauacauaugucaacaucaauaacacuaaaguuguggcaggggaagacaagaccucgguaacacuugccggaaauucaagccuguguaguauuuccggcugggcgaucaacaccaaagauaauucuaucaggauugguagcaagggggacguguucgucauacgggagccuuuuaucuccugcucacacuuggaaugucgcacuuucuuuuuaacacaaggagcucugcuaaacgauaaacauaguaauggcaccgugaaggaccgaagcccauaccgugcccucaugucuugcccgcugggcgaggcacccuccccuuauaacucaaaguucgaaagcguugccuggagugcuucugcaugucacgaugggaugggauggcuuacgauugguaucuccggcccagacaacggggccguggcuguccugaaauacaauggaauaauuacuggcaccaucaagagcuggaaaaagcagaucuugagaacacaggagucggagugcguguguaugaacgguucuugcuuuacuauuaugaccgaugggcccuccaauaaagccgcgucauauaagaucuucaagauugaaaaaggaaagguaacaaaaaguauagagcucaacgcaccuaauuuuuacuaugaagaguguagcugcuacccagacaccggcaucguuaugugugugugcagggauaacuggcauggcuccaaucggcccugggucucuuucaaccagaaucuggacuaccaaauuggguauaucugcagcggaguguuuggugauaacccucgcccagaggacggcgaagggucauguaauccggugacggucgauggagccaacggcguuaaggguuucaguuacaaauaugggaauggcguguggaucggaagaacuaaguccaacaggcugcggaaaggcuuugagaugauuugggaccccaauggguggacaaacaccgacagcgauuucucuguaaagcaggacguggucgcuauaacugauuggucaggauacagugguagcuuugugcagcacccugaacucacaggcuuagacugcauccgcccauguuucuggguugagcuggugcgagggcuucccagagaaaacaccacgauuuggaccuccggaucuucgaucagcuucugcggcgucaauuccgauacagccaacuggucauggccugacggugcagaguugccauuuacuauugauaaguga

SEQ ID NO: 148491 - RNA, 1410 nt, Artificial Sequence
  derived and/or modified CDS sequence (opt3) from neuraminidase__InfluenzaA__ADZ53124
augaaccccaaucagaagaucauuaccauaggcagcgugugcaugacaaucgggauggccaaccugauucuccaaaucggaaauauuaucuccauauggaucucucacucaauucagcuugguaaccagaaucagaucgagacuuguaaccaaagugucauuacguacgaaaauaacaccuggguuaaucagacauaugugaacaucagcaauacuaacuucgcugcaggccaguccguagugucugucaaacuggccggaaauucgucauugugcccugugagcggaugggcgauauacaguaaggacaacuccauuagaaucggcucuaaaggugauguuuuugugauuagggagccauucaucagcuguuccccguuagaaugccggaccuuuuuccugacacagggggcucuacucaaugacaagcauucaaacggaaccaucaaagaucgcagucccuaucgaacucugaugagcuguccuauuggcgaggucccaucucccuacaacucccguuuugaaucaguggccuggagcgcaagugccugccacgacggcauaaauuggcuuacaaucgggauuucuggaccugauaacggugcuguagcaguucugaaguauaauggcaucauaaccgacacgauuaaguccuggagaaacaauaucuugaggacucaagagagcgagugugccugcgugaacgggucguguuucaccgucaugacagauggaccaucugacggccaggcuuccuacaaaaucuuucggauugaaaaggguaaaaucgugaagucaguggagaugaaugcccccaacuauuacuacgaagagugcaguuguuauccugauagcuccgagauuacuugcgucugccgcgacaauuggcaugggucuaacagaccauggguuagcuucaaucagaaccucgaauaccagauaggauauaucuguucaggcauuuuuggcgauaauccgaggcccaacgacaaaaccgggaguugcggaccuguguccagcaauggugcgaacggcguaaagggguucucuuuuaaguacggaaacggcguguggaucggucggacaaaaucaaucaguagccgcaauggguucgagaugauuugggauccaaacggcuggaccggaacggacaaugacuuuuccauaaagcaagauaucgucggcauuaacgaauggucuggguauucggggagcuucgugcagcaccccgagcugacuggucuggacuguauccgaccuugcuucuggguugaacucauuagaggcaggccaaaagagaauacaaucuggaccuccgggucaaguauaucuuuuuguggagugaacagcgauacugucggcugguccuggcccgacggugcagaguuaccguucacaaucgauaaguga

SEQ ID NO: 148492 - RNA, 1410 nt, Artificial Sequence; identical to SEQ ID NO: 144786
  derived and/or modified CDS sequence (opt3) from neuraminidase__InfluenzaA__ADZ53130

SEQ ID NO: 148493 - RNA, 1410 nt, Artificial Sequence; identical to SEQ ID NO: 144776
  derived and/or modified CDS sequence (opt3) from neuraminidase__InfluenzaA__ADZ53132

SEQ ID NO: 148494 - RNA, 1410 nt, Artificial Sequence; identical to SEQ ID NO: 144786
  derived and/or modified CDS sequence (opt3) from neuraminidase__InfluenzaA__ADZ53134

SEQ ID NO: 148495 - RNA, 1410 nt, Artificial Sequence; identical to SEQ ID NO: 144786
  derived and/or modified CDS sequence (opt3) from neuraminidase__InfluenzaA__ADZ53136

SEQ ID NO: 148496 - RNA, 1410 nt, Artificial Sequence; identical to SEQ ID NO: 145140
  derived and/or modified CDS sequence (opt3) from neuraminidase__InfluenzaA__ADZ53137

SEQ ID NO: 148497 - RNA, 1410 nt, Artificial Sequence; identical to SEQ ID NO: 144786
  derived and/or modified CDS sequence (opt3) from neuraminidase__InfluenzaA__ADZ53139

SEQ ID NO: 148498 - RNA, 1410 nt, Artificial Sequence
  derived and/or modified CDS sequence (opt3) from neuraminidase__InfluenzaA__ADZ53141
augaaccccaaucagaagaucauuaccauaggcagcgugugcaugacaaucgggauggccaaccugauucuccaaaucggaaauauuaucuccauauggaucucucacucaauucagcuugguaaccagaaucagaucgagacuuguaaccaaagugucauuacguacgaaaauaacaccuggguuaaucagacauaugugaacaucagcaauacuaacuucgcugcaggccaguccguagugucugucaaacuggccggaaauucgucauugugcccugugagcggaugggcgauauacaguaaggacaacuccauuagaaucggcucuaaaggugauguuuuugugauuagggagccauucaucagcuguuccccguuagaaugccggaccuuuuuccugacacagggggcucuacucaaugacaagcauucaaacggaaccaucaaagaucgcagucccuaucgaacucugaugagcuguccuauuggcgaggucccaucucccuacaacucccguuuugaaucaguggccuggagcgcaagugccugccacgacggcauaaauuggcuuacaaucgggauuucuggaccugauaacggugcuguagcaguucugaaguauaauggcaucauaaccgacacgauuaaguccuggagaaacaauaucuugaggacucaagagagcgagugugccugcgugaacgggucguguuucaccgucaugacagauggaccaucugacggccaggcuuccuacaaaaucuuucggauugaaaaggguaaaaucgugaagucaguggagaugaaugcccccaacuaucauuacgaagagugcaguuguuacccugauagcuccgagauuacuugcgucugccgcgacaauuggcacgggucuaacagaccauggguuagcuucaaucagaaccucgaauaucagauaggauacaucuguucaggcauuuuuggcgauaauccgaggcccaacgacaaaaccgggaguugcggaccuguguccagcaauggugcgaacggcguaaagggguucucuuuuaaguauggaaacggcguguggaucggucggacaaaaucaaucaguagccgcaauggguucgagaugauuugggauccaaacggcuggaccggaacggacaaugacuuuuccauaaagcaagauaucgucggcauuaacgaauggucuggguacucggggagcuucgugcagcauuccgagcugacuggucuggacuguauccgacccugcuucuggguugaacucauuagaggcaggccuaaagagaauacaaucuggaccucagggaguucuaucagcuuuuguggagugaacuccgauacugucggcuggucauggccagacggugcagaguuacccuucacaauagauaaguga

SEQ ID NO: 148499 - RNA, 1410 nt, Artificial Sequence; identical to SEQ ID NO: 144647
  derived and/or modified CDS sequence (opt3) from neuraminidase__InfluenzaA__AEA03712

SEQ ID NO: 148500 - RNA, 1410 nt, Artificial Sequence; identical to SEQ ID NO: 144647
  derived and/or modified CDS sequence (opt3) from neuraminidase__InfluenzaA__AEA03722

SEQ ID NO: 148501 - RNA, 1410 nt, Artificial Sequence; identical to SEQ ID NO: 144647
  derived and/or modified CDS sequence (opt3) from neuraminidase__InfluenzaA__AEA03744

SEQ ID NO: 148502 - RNA, 1410 nt, Artificial Sequence
  derived and/or modified CDS sequence (opt3) from neuraminidase__InfluenzaA__AEA03755
augaaccccaaucagaagaucauuaccauaggcagcgugucccugacaaucucuacuauuugcuucuuuaugcagaucgccauucucaucacgaccgucacacuucacuucaaacaguacgaguuuaacucaccuccaaauaaccagguuaugcugugugaaccgacuauaaucgagagaaauauuaccgaaaucguguauuugacaaacaccacuauugagaaggaaaucugccccaaauuagcugaguacaggaauuggaguaagccucagugugacauaacaggguucgcaccauuuagcaaagauaacuccauucggcugucugccggaggugacaucuggguaacccgcgagcccuaugugucgugcgauccugacaaguguuaccaauucgcgcuaggccaggggacgacucucaauaacguccauucaaauaacaccgugcgaggacguacaccauauagaacucugcuuaugaaugaacugggcguucccuuucacuuggguaccaaacaggugugcauugcuuggagcaguuccucuugucaugaugggaaggccuggcuccacgucugcaucacaggagacgauaagaacgcaaccgccagcuucaucuacaauggcaggcugguggacuccguaguuucauggaguaaagagauucugcggacgcaggaaagcgagugugugugcauaaacggcacuuguacagucgugaugaccgaugggucugcuuccggaaaggcagacacuaaaauccucuuuauugaggaagguaagaucgugcauacaucaaccuuaagcggcagugcccaacacgucgaggaaugcucuugcuauccucgcuacccagggguuagaugugugugcagggauaacuggaagggauccaaucggccgauaguagacauuaacaucaaagaucacagcaucgugucgucuuacgucuguuccggccuggugggugacacgccccgcaagaaugacucaaguagcuccucucauugccuugauccuaacaaugaggaagggggacacggcguuaaaggcugggcuuucgacgaugggaacgacguguggaugggacgaaccauuagcgagaagucaagauuggguuaugagacauuuaaagucaucgaaggcuggaguaauccaaaguccaaacugcagauuaacaggcaagugauaguagaucgggggaaucguagcggauacucuggcaucuucucaguugaggguaagaguuguauuaaccgcugcuuuuauguggaacuaaucagagggaggaaggaggaaacugagguccucuggaccagcaauuccaucguggucuucuguggcacaucuggaacuuacggcaccgggucguggcccgacggagccgauauuaaccugaugccuauauga

SEQ ID NO: 148503 - RNA, 1410 nt, Artificial Sequence; identical to SEQ ID NO: 144647
  derived and/or modified CDS sequence (opt3) from neuraminidase__InfluenzaA__AEA03766

SEQ ID NO: 148504 - RNA, 1410 nt, Artificial Sequence; identical to SEQ ID NO: 144647
  derived and/or modified CDS sequence (opt3) from neuraminidase__InfluenzaA__AEA03796

SEQ ID NO: 148505 - RNA, 1410 nt, Artificial Sequence; identical to SEQ ID NO: 144647
  derived and/or modified CDS sequence (opt3) from neuraminidase__InfluenzaA__AEA03806

SEQ ID NO: 148506 - RNA, 1410 nt, Artificial Sequence
  derived and/or modified CDS sequence (opt3) from neuraminidase__InfluenzaA__AEA03817
augaaccccaaucagaagaucauuaccauaggcagcgugucccugacaaucucuacuauuugcuucuuuaugcaaaucgccauucucaucacgaccgucacacuucacuucaaacaguacgaguuuaacucaccuccaaauaaccagguuaugcugugugaaccgacuauaaucgagagaaauauuaccgaaaucguguauuugacaaacaccacuauugagaaggaaaucugccccaaauuagcugaguacaggaauuggaguaagccucagugugacauaacaggguucgcaccauuuagcaaagauaacuccauucggcugucugccggaggugacaucuggguaacccgcgagcccuaugugucgugcgauccugaccgauguuaccaauucgcgcuaggccaggggacgacucucaauaacguccauucaaauaacaccgugcgugauagaacaccauauaggacucugcuuaugaaugaacugggaguucccuuucacuugggcaccaaacaggugugcauugcuuggagcaguuccucuugucaugacgguaaggccuggcuccacgucugcaucacaggggaugacaagaacgcaaccgccagcuucaucuacaauggacggcugguggauuccguaguuucauggaguaaggagauucugcgcacgcaggaaagcgagugugugugcauaaacggcacuuguacagucgugaugaccgacggcucugcuuccgggaaagcagauacuaagauccucuuuauugaggaaggaaaaaucgugcauacaucaaccuuaagcgguagugcccaacacgucgaggaaugcucuugcuauccuagauacccaggcguuaggugugugugccgggacaacuggaagggguccaaucgcccgauaguagauauuaacaucaaggaccacagcaucgugucgucuuacgucuguuccggacuggugggcgacacgccccggaaaaaugauucaaguagcuccucucauugccuugacccuaacaaugaggaaggugggcacggaguuaagggcugggcuuucgaugacggcaacgauguguggauggggagaaccauuagcgagaaaucaagguugggauaugagacauuuaaggucaucgaagguuggaguaauccaaaauccaagcugcagauuaaccgacaggugauaguagaccguggcaaucgcagcggguacucuggaaucuucucaguugagggcaaaaguuguauuaacagaugcuuuuauguggaacuaaucaggggucggaaggaggaaacugagguccucuggaccagcaauuccaucguggucuucugugggacaucuggcacuuacggaaccggcucguggcccgauggggccgacauuaaccugaugccuauauga

SEQ ID NO: 148507 - RNA, 1410 nt, Artificial Sequence; identical to SEQ ID NO: 144647
  derived and/or modified CDS sequence (opt3) from neuraminidase__InfluenzaA__AEA03828

SEQ ID NO: 148508 - RNA, 1410 nt, Artificial Sequence; identical to SEQ ID NO: 144647
  derived and/or modified CDS sequence (opt3) from neuraminidase__InfluenzaA__AEA03838

SEQ ID NO: 148509 - RNA, 1410 nt, Artificial Sequence; identical to SEQ ID NO: 147803
  derived and/or modified CDS sequence (opt3) from neuraminidase__InfluenzaA__AEA03849

SEQ ID NO: 148510 - RNA, 1410 nt, Artificial Sequence; identical to SEQ ID NO: 144647
  derived and/or modified CDS sequence (opt3) from neuraminidase__InfluenzaA__AEA03860

SEQ ID NO: 148511 - RNA, 1410 nt, Artificial Sequence
  derived and/or modified CDS sequence (opt3) from neuraminidase__InfluenzaA__AEA03871
augaaccccaaucagaagaucauuaccauaggcagcgugucccugacaaucucuacuauuugcuucuuuaugcagaucgccauucucaucacgaccgucacacuucacuucaaacaguacgaguuuaacucaccuccaaauaaccagguuaugcugugugaaccgacuauaaucgagagaaauauuaccgaaaucguguauuugacaaacaccacuauugagaaggaaaucugccccaaauuagcugaguacaggaauuggaguaagccucagugugacauaacaggguucgcaccauuuagcaaagauaacuccauucggcugucugccggaggugacaucuggguaacccgcgagcccuaugugucgugcgauccugacaaguguuaccaauucgcgcuaggccaggggacgacucucaauaacguccauucaaauaacaccgugcgagaucguacaccauauagaacucugcuuaugaaugaacugggaguucccuuucacuugggcaccaaacaggugugcauugcuuggagcaguuccucuugucaugacgguaaggccuggcuccacgucugcaucacaggggaugacaagaacgcaaccgccagcuucaucuacaauggaaggcugguggauuccguaguuucauggaguaaagagauucugcggacgcaggaaagcgagugugugugcauaaacggcacuuguacagucgugaucaccgacggcucugcuuccgggaaggcagauacuaaaauucucuuuaucgaggaaggaaagauagugcauacaucaaccuuaagcgguagugcccaacacgucgaggaaugcucuugcuauccucgcuacccaggcguuagaugugugugcagggacaacuggaagggguccaaucggccgauuguagauaucaacaucaaagaccacagcauugugucgucuuacgucuguuccggacuggugggcgacacgccccgcaagaaugauucaaguagcuccucucauugccuugacccuaacaaugaggaaggugggcacggaguuaaaggcugggcuuucgaugacggcaacgauguguggauggggcgaaccaucagcgagaagucaagauugggauaugagacauuuaaagucauugaagguuggaguaauccaaaguccaaacugcagauaaacaggcaagugaucguagaccggggcaaucguagcggguacucuggaauuuucucaguugagggcaagaguuguaucaaccgcugcuuuuauguggaacuaaucagagguaggaaggaggaaacugagguccucuggaccagcaauuccauuguggucuucugugggacaucuggcacuuacggaaccggcucguggcccgauggggccgacauaaaccugaugccuaucuga

SEQ ID NO: 148512 - RNA, 1410 nt, Artificial Sequence; identical to SEQ ID NO: 144647
  derived and/or modified CDS sequence (opt3) from neuraminidase__InfluenzaA__AEA03879

SEQ ID NO: 148513 - RNA, 1410 nt, Artificial Sequence
  derived and/or modified CDS sequence (opt3) from neuraminidase__InfluenzaA__AEA03889
augaaccccaaucagaagaucauuaccauaggcagcgugucccugacaaucucuacuauuugcuucuuuaugcaaaucgccauucucaucacgaccgucacacuucacuucaaacaguacgaguuuaacucaccuccaaauaaccagguuaugcugugugaaccgacuauaaucgagagaaauauuaccgaaaucguguauuugacaaacaccacuauugagaaggaaaucugccccaaauuagcugaguacaggaauuggaguaagccucagugugacauaacaggguucgcaccauuuagcaaagauaacuccauucggcugucugccggaggugacaucuggguaacccgcgagcccuaugugucgugcgauccugacaaguguuaccaauucgcgcuaggccaggggacgacucucaauaacguccauucaaauaacaaggugcgagaucguaccccauauagaacacugcuuaugaaugaacugggaguucccuuucacuugggcacuaaacaggugugcauugcuuggagcaguuccucuugucaugacgguaaggccuggcuccacgucugcaucaccggggaugacaaaaacgcaacagccagcuucaucuacaauggaaggcugguggauuccguaguuucauggaguaaggagauucugcggacccaggaaagcgagugugugugcauaaacggcacguguacugucgugaugacagacggcucugcuuccgggaaagcagauaccaagauccucuuuauugaggaaggaaagaucgugcauacuucaacauuaagcgguagugcccaacacgucgaggaaugcucuugcuauccucgcuacccaggcguuagaugugugugcagggacaacuggaaaggguccaaucggccgauaguagauauuaacaucaaggaccacagcaucgugucgucuuacgucuguuccggacuggugggcgacacccccaggaaaaaugauucaaguagcuccucucauugccuugacccuaacaaugaggaaggugggcacggaguuaagggcugggcuuucgaugacggcaacgauguguggauggggcgaacgauuagcgagaaaucaagauugggauaugagaccuuuaaggucaucgaagguuggaguaauccaaaauccaagcugcagauuaaccgccaggugauaguagaccggggcaaucguagcggguacucuggaaucuucucaguugagggcaagaguuguauuaaccgcugcuuuuauguggaacuaaucagagguaggaaagaggaaacagagguccucuggacuagcaauuccaucguggucuucugugggaccucuggcacauacggaacuggcucguggcccgauggggccgacauuaaccugaugccuauauga

SEQ ID NO: 148514 - RNA, 1410 nt, Artificial Sequence
  derived and/or modified CDS sequence (opt3) from neuraminidase__InfluenzaA__AEA03898
augaaccccaaucagaagaucauuaccauaggcagcgugucccugacaaucucuacuauuugcuucuuuaugcagaucgccauucucaucacgaccgucacacuucacuucaaacaguacgaguuuaacucaccuccaaauaaccagguuaugcugugugaaccgacuauaaucgagagaaauauuaccgaaaucguguauuugacaaacaccacuauugagaaggaaaucugccccaaauuagcugaguacaggaauuggaguaagccucagugugacauaacaggguucgcaccauuuagcaaagauaacuccauucggcugucugccggaggugacaucuggguaacccgcgagcccuaugugucgugcgauccugacaaguguuaccaauucgcgcuaggccaggggacgacucucaauaacguccauucaaauaacaccgugcgagaucguacaccauauagaacucugcuuaugaaugaacugggaguucccuuucacuugggcaccaaacaggugugcauugcuuggagcaguuccucuugucaugacgguaaggccuggcuccacgucugcaucacaggggaugacaagaacgcaaccgccagcuucaucuacaauggaaggcugguggauuccguaguuucauggaguaaagagauucugcggacgcaggaaagcgagugugugugcauaaacggcacuuguacagucgugaugaccgacggcucugcuuccgggaaggcagauacuaaaauccucuuuauugaggaaggaaagaucgugcauacaucaaccuuaagcgguagugcccaacacgucgaggaaugcucuugcuauccucgcuacccaggcguuagaugugugugcagggacaacuggaagggguccaaucggccgauaguagauauuaacaucaaagaccacagcaucgugucgucuuacgucuguuccggacuggugggcgacacgccccgcaagucagauaguagcuccucuagccauugccuugacccuaauaacgaggaaggugggcacggaguuaaaggcugggcuuucgaugacggcaaugauguguggauggggcgaaccauuucagagaagaguagauugggauaugagacauuuaaagucaucgaagguugguccaacccaaagagcaaacugcagauuaauaggcaagugauaguagaccggggcaaccguucuggguacucaggaaucuucaguguugagggcaagagcuguauuaaucgcugcuuuuauguggaacuaaucagagguaggaaggaggaaacugagguccucuggaccuccaacucuaucguggucuucugugggacaucgggcacuuacggaaccggcagcuggcccgauggggccgacauuaaucugaugccuauauga

SEQ ID NO: 148515 - RNA, 1410 nt, Artificial Sequence; identical to SEQ ID NO: 144647
  derived and/or modified CDS sequence (opt3) from neuraminidase__InfluenzaA__AEA03909

SEQ ID NO: 148516 - RNA, 1410 nt, Artificial Sequence
  derived and/or modified CDS sequence (opt3) from neuraminidase__InfluenzaA__AEA03924
augaaccccaaucagaagaucauuaccauaggcagcgugucccugacaaucucuacuauuugcuucuuuaugcaaaucgccauucucaucacgaccgucacacuucacuucaaacaguacgaguuuaacucaccuccaaauaaccagguuaugcugugugaaccgacuauaaucgagagaaauauuaccgaaaucguguauuugacaaacaccacuauugagaaggaaaucugccccaaauuagcugaguacaggaauuggaguaagccucagugugacauaacaggguucgcaccauuuagcaaagauaacuccauucggcugucugccggaggugacaucuggguaacccgcgagcccuaugugucgugcgauccugacaaguguuaccaauucgcgcuaggccaggggacgacucucaauaacguccauucaaauaacaccgugcgagaucguacaccauauagaacucugcuuaugaaugaacugggaguucccuuucacuugggcaccaaacaggugugcauugcuuggagcaguuccucuugucaugacgguaaggccuggcuccacgucugcaucacaggggaugacaagaacgcaaccgccagcuucaucuacaauggaaggcugguggauuccguaguuucauggaguaaagagauucugcggacgcaggaaagcgagugugugugcauaaacggcacuuguacagucgugaugaccgacggcucugcuuccgggaaggcagauacuaaaauccucuuuauugaggaaggaaagaucauacauacaucaaccuuaagcgguagugcccaacacguggaggaaugcucuugcuauccucgcuacccaggcgucagauguguuugcagggacaacuggaagggguccaaucggccgauuguggauaucaacaucaaagaccacagcauuguaucgucuuacguguguuccggacuggucggcgacacgccccgcaagaaugauucaaguagcuccucucauugccuugacccuaacaaugaggaaggugggcacggagugaaaggcugggcuuucgaugacggcaacgauguuuggauggggcgaaccaucagcgagaagucaagauugggauaugagacauuuaaagugauugaagguuggaguaauccaaaguccaaacugcagauaaacaggcaggucaucguggaccggggcaaucguagcggguacucuggaauuuucucaguagagggcaagaguuguaucaaccgcugcuuuuauguugaacuaaucagagguaggaaggaggaaacugaggugcucuggaccagcaauuccauugucguguucugugggacaucuggcacuuacggaaccggcucguggcccgauggggccgacauaaaccugaugccuaucuga

SEQ ID NO: 148517 - RNA, 1410 nt, Artificial Sequence; identical to SEQ ID NO: 144647
  derived and/or modified CDS sequence (opt3) from neuraminidase__InfluenzaA__AEA03935

SEQ ID NO: 148518 - RNA, 1410 nt, Artificial Sequence
  derived and/or modified CDS sequence (opt3) from neuraminidase__InfluenzaA__AEA03946
augaaccccaaucagaagaucauuaccauaggcagcgugucccugacaaucucuacuauuugcuucuuuaugcagaucgccauucucaucacgaccgucacacuucacuucaaacaguacgaguuuaacucaccuccaaauaaccagguuaugcugugugaaccgacuauaaucgagagaaauauuaccgaaaucguguauuugacaaacaccacuauugagaaggaaaucugccccaaauuagcugaguacaggaauuggaguaagccucagugugacauaacaggguucgcaccauuuagcaaagauaacuccauucggcugucugccggaggugacaucuggguaacccgcgagcccuaugugucgugcgauccugacaaguguuaccaauucgcgcuaggccaggggacgacucucaauaacguccauucaaauaacaccgugcgagaucguacaccauauagaacucugcuuaugaaugaacugggaguucccuuucacuugggcaccaaacaggugugcauugcuuggagcaguuccucuugucaugacgguaaggccuggcuccacgucugcaucacaggggaugacaagaacgcaaccgccagcuucaucuacaauggaaggcugguggauuccguaguuucauggagugaggaaauucugcggacgcaggagagcgagugugugugcauaaacggcacuuguacagucgugaugaccgacggcucugcuuccgggaaagcagauacuaagauccucuuuauugaagagggaaaaaucgugcauacaucaaccuuaagcgguagugcccaacacgucgaagagugcucuugcuauccucgcuacccaggcguuagaugugugugcagggacaacuggaagggguccaaucggccgauaguagauauuaacaucaaggaccacagcaucgugucgucuuacgucuguuccggacuggugggcgacacgccccgcaaaaaugauucaaguagcuccucucauugccuugacccuaacaaugaagagggugggcacggaguuaagggcugggcuuucgaugacggcaacgauguguggauggggcgaaccauuagcgagaaaucaagauugggauaugaaacauuuaaggucaucgaggguuggaguaauccaaaauccaagcugcagauuaacaggcaagugauaguagaccggggcaaucguagcggguacucuggaaucuucucaguugaaggcaaaaguuguauuaaccgcugcuuuuauguggagcuaaucagagguaggaaggaagagacugagguccucuggaccagcaauuccaucguggucuucugugggacaucuggcacuuacggaaccggcucguggcccgauggggccgacauuaaccugaugccuauauga

SEQ ID NO: 148519 - RNA, 1410 nt, Artificial Sequence
  derived and/or modified CDS sequence (opt3) from neuraminidase__InfluenzaA__AEA03957
augaaccccaaucagaagaucauuaccauaggcagcgugucccugacaaucucuacuauuugcuucuuuaugcagaucgccauucucaucacgaccgucacacuucacuucaaacaguacgaguuuaacucaccuccaaauaaccagguuaugcugugugaaccgacuauaaucgagagaaauauuaccgaaaucguguauuugacaaacaccacuauugagaaggaaaucugccccaaauuagcugaguacaggaauuggaguaagccucagugugacauaacaggguucgcaccauuuagcaaagauaacuccauucggcugucugccggaggugacaucuggguaacccgcgagcccuaugugucgugcgauccugacaaguguuaccaauucgcgcuaggccaggggacgacucucaauaacguccauucaaauaacaccgugcgagaucguacaccauauagaacucugcuuaugaaugaacugggaguucccuuucacuugggcaccaaacaggugugcauugcuuggagcaguuccucuugucaugacgguaaggccuggcuccacgucugcaucacaggggaugacaagaacgcaaccgccagcuucaucuacaauggaaggcugguggauuccguaguuucauggaguaaagagauucugcggacgcaggaaagcgagugugugugcauaaacggcacuuguacagucgugaugaccgacggcucugcuuccgggaaggcagauacuaaaauccucuuuauugaggaaggaaagaucgugcauacaucaaccuuaagcgguagugcccaacacgucgaggaaugcucuugcuauccucgcuacccaggcguuagaugugugugcagggacaacuggaagggguccaaucggccgauaguagauauuaacaucaaagaccacagcaucgugucgucuuacgucuguuccggacuggugggcgacacgccccgcaagaaugauucaaguagcuccucucauugccuugacccuaacaaugaggaaggugggcacggaguuaaaggcugggcuuucgaugacggcaacgauguguggauggggcgaaccauuagcgagaagucaagauugggauaugagacauuuaaagucaucgaagguuggaguaauuccaagagcaaacugcagauuaacaggcaagugauaguagaccggggcaaucguucuggguacucaggaaucuucaguguugagggcaagagcuguauuaaccgcugcuuuuauguggaacuaaucagagguaggaaggaggaaacugagguccucuggaccuccaauucuaucguggucuucugugggacaucgggcacuuacggaaccggcagcuggccagauggggccgacauuaaccugaugcccauauga

SEQ ID NO: 148520 - RNA, 1410 nt, Artificial Sequence; identical to SEQ ID NO: 144647
  derived and/or modified CDS sequence (opt3) from neuraminidase__InfluenzaA__AEA03989

SEQ ID NO: 148521 - RNA, 1410 nt, Artificial Sequence; identical to SEQ ID NO: 147803
  derived and/or modified CDS sequence (opt3) from neuraminidase__InfluenzaA__AEA04000

SEQ ID NO: 148522 - RNA, 1410 nt, Artificial Sequence; identical to SEQ ID NO: 144647
  derived and/or modified CDS sequence (opt3) from neuraminidase__InfluenzaA__AEA04011

SEQ ID NO: 148523 - RNA, 1410 nt, Artificial Sequence; identical to SEQ ID NO: 147803
  derived and/or modified CDS sequence (opt3) from neuraminidase__InfluenzaA__AEA04022

SEQ ID NO: 148524 - RNA, 1410 nt, Artificial Sequence; identical to SEQ ID NO: 144647
  derived and/or modified CDS sequence (opt3) from neuraminidase__InfluenzaA__AEA04033

SEQ ID NO: 148525 - RNA, 1410 nt, Artificial Sequence; identical to SEQ ID NO: 144647
  derived and/or modified CDS sequence (opt3) from neuraminidase__InfluenzaA__AEA04044

SEQ ID NO: 148526 - RNA, 1410 nt, Artificial Sequence; identical to SEQ ID NO: 144647
  derived and/or modified CDS sequence (opt3) from neuraminidase__InfluenzaA__AEA04049

SEQ ID NO: 148527 - RNA, 1410 nt, Artificial Sequence; identical to SEQ ID NO: 144647
  derived and/or modified CDS sequence (opt3) from neuraminidase__InfluenzaA__AEA04059

SEQ ID NO: 148528 - RNA, 1410 nt, Artificial Sequence; identical to SEQ ID NO: 144647
  derived and/or modified CDS sequence (opt3) from neuraminidase__InfluenzaA__AEA04070

SEQ ID NO: 148529 - RNA, 1410 nt, Artificial Sequence; identical to SEQ ID NO: 147803
  derived and/or modified CDS sequence (opt3) from neuraminidase__InfluenzaA__AEA04081

SEQ ID NO: 148530 - RNA, 1410 nt, Artificial Sequence; identical to SEQ ID NO: 144647
  derived and/or modified CDS sequence (opt3) from neuraminidase__InfluenzaA__AEA04092

SEQ ID NO: 148531 - RNA, 1410 nt, Artificial Sequence; identical to SEQ ID NO: 144647
  derived and/or modified CDS sequence (opt3) from neuraminidase__InfluenzaA__AEA04103

SEQ ID NO: 148532 - RNA, 1410 nt, Artificial Sequence; identical to SEQ ID NO: 144647
  derived and/or modified CDS sequence (opt3) from neuraminidase__InfluenzaA__AEA04125

SEQ ID NO: 148533 - RNA, 1410 nt, Artificial Sequence; identical to SEQ ID NO: 144647
  derived and/or modified CDS sequence (opt3) from neuraminidase__InfluenzaA__AEA04133

SEQ ID NO: 148534 - RNA, 1410 nt, Artificial Sequence
  derived and/or modified CDS sequence (opt3) from neuraminidase__InfluenzaA__AEA04144
augaaccccaaucagaagaucauuaccauaggcagcgugucccugacaaucucuacuauuugcuucuuuaugcaaaucgccauucucaucacgaccgucacacuucacuucaaacaguacgaguuuaacucaccuccaaauaaccagguuaugcugugugaaccgacuauaaucgagagaaauauuaccgaaaucguguauuugacaaacaccacuauugagaaggaaaucugccccaaauuagcugaguacaggaauuggaguaagccucagugugacauaacaggguucgcaccauuuagcaaagauaacuccauucggcugucugccggaggugacaucuggguaacccgcgagcccuaugugucgugcgauccugacaaguguuaccaauucgcgcuaggccaggggacgacucucaauaacguccauucaaauaacaccgugcgagaucguacaccauauagaacucugcuuaugaaugaacugggaguucccuuucacuugggcaccaaacaggugugcauugcuuggagcaguuccucuugucaugacgguaaggccuggcuccacgucugcaucacaggggaugacaagaacgcaaccgccagcuucaucuacaauggaaggcugguggauuccguaguuucauggaguaaagagauucugcggacgcaggaaagcgagugugugugcauaaacggcacuuguacagucgugaugaccgacggcucugcuuccgggaaggcagauacuaaaauccucuuuauugaggaaggaaagaucauacauacaucaaccuuaagcgguagugcccaacacguggaggaaugcucuugcuauccucgcuacccaggcgucagauguguuugcagggacaacuggaagggguccaaucggccgauuguggauaucaacaucaaagaccacagcauuguaucgucuuacguguguuccggacuggucggcgacacgccccgcaagaaugauucaaguagcuccucucauugccuugacccuaacaaugaggaaggugggcacggagugaaaggcugggcuuucgaugacggcaacgauguuuggauggggcgaaccaucagcgagaagucaagauugggauaugagacauuuaaagugauugaagguuggaguaauccaaaguccaaacugcagauaaacaggcaggucaucguggaccggggcaaucguagcggguacucuggaauuuucucaguagagggcaagaguuguaucaaccgcugcuuuuauguugaacuaaucagagguaggaaggaggaaacugaggugcucuggaccagcaauuccauuauagucuucugugggacaucuggcacuuacggaaccggcucguggcccgauggggccgacaucaaccugaugccuauuuga

SEQ ID NO: 148535 - RNA, 1410 nt, Artificial Sequence; identical to SEQ ID NO: 144647
  derived and/or modified CDS sequence (opt3) from neuraminidase__InfluenzaA__AEA04155

SEQ ID NO: 148536 - RNA, 1410 nt, Artificial Sequence; identical to SEQ ID NO: 144647
  derived and/or modified CDS sequence (opt3) from neuraminidase__InfluenzaA__AEA04166

SEQ ID NO: 148537 - RNA, 1410 nt, Artificial Sequence
  derived and/or modified CDS sequence (opt3) from neuraminidase__InfluenzaA__AEA04177
augaaccccaaucagaagaucauuaccauaggcagcgugucccugacaaucucuacuauuugcuucuuuaugcagaucgccauucucaucacgaccgucacacuucacuucaaacaguacgaguuuaacucaccuccaaauaaccagguuaugcugugugaaccgacuauaaucgagagaaauauuaccgaaaucguguauuugacaaacaccacuauugagaaggaaaucugccccaaauuagcugaguacaggaauuggaguaagccucagugugacauaacaggguucgcaccauuuagcaaagauaacuccauucggcugucugccggaggugacaucuggguaacccgcgagcccuaugugucgugcgauccugacaaguguuaccaauucgcgcuaggccaggggacgacucucaauaacguccauucaaauaacaccgugcgaaaucguacaccauauagaacucugcuuaugaacgaacugggaguucccuuucacuugggcaccaaacaggugugcauugcuuggagcaguuccucuugucaugaugguaaggccuggcuccacgucugcaucacaggggacgauaagaaugcaaccgccagcuucaucuacaacggaaggcugguggacuccguaguuucauggaguaaagagauucugcggacgcaggaaagcgagugugugugcauaaacggcacuuguacagucgugaugaccgauggcucugcuuccgggaaggcagacacuaaaauccucuuuauugaggaaggaaagaucgugcauacaucaaccuuaagcgguagugcccaacacgucgaggaaugcucuugcuauccucgcuacccaggcguuagaugugugugcagggauaauuggaagggguccaaccggccgauaguagacauuaauaucaaagaucacagcaucgugucgucuuacgucuguuccggacuggugggcgacacgccccgcaagaacgacucaaguagcuccucucauugccuugauccuaauaacgaggaaggugggcacggaguuaaaggcugggcuuucgacgauggcaaugacguguggauggggcgaaccauuagcgagaagucaagauugggauaugagacauuuaaagucaucgaagguuggaguaacccaaaguccaaacugcagauuaauaggcaagugauaguagaucggggcaaccguagcggguacucuggaaucuucucaguugagggcaagaguuguauuaaucgcugcuuuuauguggaacuaaucagagguaggaaggaggaaacugagguccucuggaccagcaacuccaucguggucuucugugggacaucuggcacuuacggaaccggcucguggcccgacggggccgauauuaaucugaugccuauauga

SEQ ID NO: 148538 - RNA, 1410 nt, Artificial Sequence; identical to SEQ ID NO: 144647
  derived and/or modified CDS sequence (opt3) from neuraminidase__InfluenzaA__AEA04188

SEQ ID NO: 148539 - RNA, 1410 nt, Artificial Sequence; identical to SEQ ID NO: 145640
  derived and/or modified CDS sequence (opt3) from neuraminidase__InfluenzaA__AEA04199

SEQ ID NO: 148540 - RNA, 1410 nt, Artificial Sequence; identical to SEQ ID NO: 144647
  derived and/or modified CDS sequence (opt3) from neuraminidase__InfluenzaA__AEA04210

SEQ ID NO: 148541 - RNA, 1410 nt, Artificial Sequence; identical to SEQ ID NO: 145640
  derived and/or modified CDS sequence (opt3) from neuraminidase__InfluenzaA__AEA04229

SEQ ID NO: 148542 - RNA, 1410 nt, Artificial Sequence; identical to SEQ ID NO: 145640
  derived and/or modified CDS sequence (opt3) from neuraminidase__InfluenzaA__AEA04239

SEQ ID NO: 148543 - RNA, 1410 nt, Artificial Sequence
  derived and/or modified CDS sequence (opt3) from neuraminidase__InfluenzaA__AEA04250
augaaccccaaucagaagaucauuaccauaggcagcgugucccugacaaucucuacuauuugcuucuuuaugcaaacggccauccucauuaccacagucacucuucacuucaaacagugugaguuuaacucaccuccaaauaaccagguuaugcugugcgaaccgaccaucauagagagaaauaucacagaaauuguguacuugaccaacacuacaaucgagaaggaaauuugucccaaauuagcugaguauaggaauuggaguaagccucagugcgacaucaccggguucgcaccauuuagcaaagauaacuccauacggcugucugccggaggugacauuuggguaacgcgcgagcccuacgugucgugugauccugacaagugcuaucaauucgcgcuaggccaggggacuacccucaauaacguccauucaaauaacacagugcgaguucguacuccauacagaacccugcuuaugaaugaacugggagugcccuuucacuugggcacaaagcaggucuguaucgcuuggagcaguuccucuugccaugaugguaaagccuggcuccacguguguauuaccggggacgauaagaacgcaacggccagcuucaucuauaauggaaggcugguagacuccguugugucauggaguaaagagauccugcggacucaggaaagcgagugcgucuguauuaacggcacaugcaccguggugaugacugauggcucugcuuccgggaaggcagacacaaaaauacucuuuaucgaggaaggaaagauuguccauaccucaacguuaagcgguagugcccaacacguugaggaaugcucuuguuacccucgcuauccaggcgugagaugcguauguagggauaacuggaagggguccaaucggccgaucguggacauaaacauuaaagaucacagcaucgucucgucuuacgugugcuccggacugguuggcgacacaccccgcaagaaugacucaaguagcuccucucauugucuugauccuaacaaugaggaaggugggcacggagugaaaggcugggcuuucgacgauggcaacgacgucuggauggggcgaaccaucagcgagaagucaagauugggauacgagacuuuuaaagugauugaagguuggaguaauccaaaguccaaacugcagaucaacaggcagguaauuguugaucggggcaaucguagcggguauucuggaauauucucaguggagggcaagaguugcaucaaccgcuguuuuuacgucgaacuaauuagagguaggaaggaggaaaccgaggugcucuggacaagcaauuccaucgucguguucugcgggacuucuggcaccuauggaacaggcucguggcccgacggggccgauaucaaccugaugccuauuuga

SEQ ID NO: 148544 - RNA, 1410 nt, Artificial Sequence; identical to SEQ ID NO: 145640
  derived and/or modified CDS sequence (opt3) from neuraminidase__InfluenzaA__AEA04260

SEQ ID NO: 148545 - RNA, 1410 nt, Artificial Sequence
  derived and/or modified CDS sequence (opt3) from neuraminidase__InfluenzaA__AEA04268
augaaccccaaucagaagaucauuaccauaggcagcgugucccugacaaucucuacuauuugccucuucaugcaaacggccauccuuauuaccacagucacucugcacuuuaaacagugugaguucaacucaccuccaaauaaccaggcuauguugugcgaaccgaccaucauagagagaaauaucacagaaauuguuuacuuaaccaacacuacaaucgagaaggaaauuugucccaaacuggcagaguauaggaauuggaguaagccucagugcgacaucaccggguuugccccauucagcaaagauaacuccauacggcuaucugcgggaggugacauuugggugacgcgcgagcccuacguaucgugugauccugacaagugcuaucaauuugcucucggccaggggacuacccugaauaacgugcauucaaauaacacaguccgagaucguacuccauacagaacccuucugaugaaugaauugggagugcccuuccaccucggcacaaagcagguuuguaucgccuggagcaguuccucuugccaugacgguaaagcauggcugcacguguguauuaccggggaugacaagaacgccacggcuagcuuuaucuauaauggaaggcuggucgauuccgugguaucauggaguaaagagauccuccggacucaggaaagcgagugcguuuguauuaacggcacaugcaccguggucaugacugacggcucugcauccgggaaggccgauacaaaaauauuauucaucgaggaaggaaagauugugcauaccucaacgcugagcgguagugcucaacacguggaggaaugcucuuguuacccucgcuauccaggcgucagaugcguuuguagggacaacuggaagggguccaaucggccgaucguggauauaaacauuaaagaccacagcaucguaucgucuuacgugugcuccggacuugucggcgacacaccccgcaagaaugauucaaguagcuccucucauuguuuggacccuaacaaugaggaaggugggcacggagugaaaggcugggccuuugaugacggcaacgauguuuggauggggcgaaccaucagcgagaagucaagacugggauacgagacuuucaaagugauugaagguuggaguaauccaaaguccaaacuacagaucaacaggcaggucauuguggaccggggcaaucguagcggguauucuggaauauuuucaguagagggcaagaguugcaucaaccgcuguuucuacguugaacucauuagagguaggaaggaggaaaccgaggugcuguggacaagcaauuccaucgucguguuuugcgggacuucuggcaccuauggaacaggcucguggcccgauggggcggacaucaaccuuaugccuauuuga

SEQ ID NO: 148546 - RNA, 1410 nt, Artificial Sequence; identical to SEQ ID NO: 145640
  derived and/or modified CDS sequence (opt3) from neuraminidase__InfluenzaA__AEA04276

SEQ ID NO: 148547 - RNA, 1410 nt, Artificial Sequence; identical to SEQ ID NO: 145640
  derived and/or modified CDS sequence (opt3) from neuraminidase__InfluenzaA__AEA04287

SEQ ID NO: 148548 - RNA, 1410 nt, Artificial Sequence; identical to SEQ ID NO: 145640
  derived and/or modified CDS sequence (opt3) from neuraminidase__InfluenzaA__AEA04298

SEQ ID NO: 148549 - RNA, 1410 nt, Artificial Sequence
  derived and/or modified CDS sequence (opt3) from neuraminidase__InfluenzaA__AEA04307
augaaccccaaucagaagaucauuaccauaggcagcgugucccugacaaucucuacuauuugcuucuuuaugcaaacggccauccucauuaccacagucacucuucacuucaaacagugugaguuuaacucaccuccaaauaaccagguuaugcugugcgaaccgaccaucauagagagaaauaucacagaaauuguguacuugaccaacacuacaaucgagaaggaaauuugucccaaauuagcugaguauaggaauuggaguaagccucagugcgacaucaccggguucgcaccauuuagcaaagauaacuccauacggcugucugccggaggugacauuuggguaacgcgcgagcccuacgugucgugugauccugacaagugcuaucaauucgcgcuaggccaggggacuacccucaauaacguccauucaaauaacacagugcgagaucguacuccauacagaacccugcuuaugaaugaacugggaguucccuuucacuugggcacaaaacagguguguaucgcuuggagcaguuccucuugccaugacgguaaggccuggcuccacgucuguauuaccggggaugacaagaacgcaacggccagcuucaucuauaauggaaggcugguggauuccguaguuucauggaguaaagagauccugcggacucaggaaagcgagugcguguguauuaacggcacaugcaccgucgugaugacugacggcucugcuuccgggaaggcagauacaaaaauacucuuuaucgaggaaggaaagauugugcauaccucaacguuaagcgguagugcccaacacgucgaggaaugcucuuguuacccucgcuauccagacguuagaugcguguguagggauaacuggaagggcuccaaucggccgaucguagacauaaacauuaaagaccacagcaucgugucgucuuacgucugcuccgggcuggugggagauacccccaggaagaaugacucaaguagcuccucucauugucuugauccuaacaaugaggaaggcggucacgggguuaaaggaugggcuuucgacgauggcaacgacguguggaugggccgaacaaucagcgagaagucaagauugggguacgagacuuuuaaagucauugaaggauggaguaauccaaaguccaaacugcagaucaaccgccaggugauuguagaucgggguaaucguagcggcuauucugggauauucucaguugagggaaagaguugcaucaaccgcuguuuuuacguggaacuaauuagaggcaggaaggaggaaaccgagguccucuggacaagcaauuccaucguggucuucugcgguacuucugggaccuauggcacaggaucguggcccgacggcgccgauaucaaccugaugccuauuuga

SEQ ID NO: 148550 - RNA, 1395 nt, Artificial Sequence
  derived and/or modified CDS sequence (opt3) from neuraminidase__InfluenzaA__AEA04357
augaaccccaaucagaagaucauuaccauaggcagcaucugcaugguggucgggauuaucucccugauucuccaaaucggaaacauaguuucuaucuggauuucacacaguauccagacagguaaucagaaccauacuggcacgugugaccagagcauuaucaccuacaaaaauuccacaugggugaaccaaacuuauguaaauguggucgccgggaaggauaccacaucugugauacuugcuggaaacucgucacugugcccuauuagaggcugggcaaucuacagcaaagacaaugguguuaggauugggaguaagggagauguguucgucauccgggagccauuuaucuccuguucucacuuggaaugccgcaccuucuuuuuaacucagggcgcccugcuaaacgacaaacauagcaauggcacagugaaggaucgauccccguaucgugcgcucaugucaugucccguaggggaggcuccuaguccauacaacagcagauucgaaucuguugccugguccgcaucagccugccacgacggaauggguuggcugaccauuggcauaagcgggcccgaugacggagcuguggcaguccuuaaguauaauggcaucauuacggagacuaucaaaaguuggaggaaggaaauacugcggacccaggagucugagugugugugcgugaacgguuccuguuuuacaauuaugacugaugggccuagcggaggcccagccucguacaaaaucuucaagaucgaaaaaggcaaggucaccaagucuauugaguuggacgcucccaauucccauuaugaagagugcucauguuacccugauacaaguaaaguuaugugcgugugccgcgacaacuggcacgggagcaacagaccauggguauccuuugaucagaaucucgacuaccaaaugggauauaucuguucugguguguucggcgacaacccgaggcccaaggaugggaaaggaagcugcggcccugucuacguggacggugccaaugggguuaagggcuuuucauauaaauacggaaacggcguguggauugggcggaccaagaguauauccagccgccagggauucgagaugaucugggauccaaaugguuggacggaaacugacucuaacuuuuucacaaaacaggaugucguggcgguaaccgacuggucaggcuauagugggagcuuuguucagcaccccgagcugacuggacuggauuguaugcgaccuugcuucuggguggaacucauuagaggcaggccaaaggagaauacaaucuggaccuccgguucuucgaucagcuucuguggggucaacuccgacacgguggauuggucauggcccgacggcgcagaauuaccguuuaccauugauaaguga

SEQ ID NO: 148551 - RNA, 1410 nt, Artificial Sequence; identical to SEQ ID NO: 144515
  derived and/or modified CDS sequence (opt3) from neuraminidase__InfluenzaA__AEA04368

SEQ ID NO: 148552 - RNA, 1410 nt, Artificial Sequence
  derived and/or modified CDS sequence (opt3) from neuraminidase__InfluenzaA__AEA04379
augaaccccaaucagaagaccaucacaauuggcagcgugucccugacuauagagacggucugcuuccucaugcaaaucgccauucuugcuaccacaguuacucugcacuuuaaacagcaugaaugugacucuccugcaucaaaccaggugaugccaugcgagccgaucauuaucgaaagaaauauaaccgagaucguauacuugaacaauacaaccauugaaaaggagaucugucccgagguggucgaauauaggaacuggaguaaaccucagugccaaauuacuggguucgccccauuuagcaaggauaauuccauccgguuaucugcgggaggugacauaugggugacacgcgagcccuacguuucgugugauccuggcaaaugcuaucaguucgcucuggggcagggaaccacgcuagacaacaagcacucaaauggcacuauucaugaucgaaucccacaccguacccuccugaugaacgaacuuggugugcccuuucaucuggggacaaagcaggucuguguggccuggagcaguuccucuugccacgacggaaaagcaugguugcacguauguguuacuggcgaugacagaaaugccaccgcuagcuucauuuacgauggcaggcucguggacuccaucgggucauggagucaaaacauccugcggacacaggagagcgagugcgucuguauuaauggaaccugcacgguggugaugacugaugguucugcauccggccgcgccgacacaagaauacuguuuaucaaggaagggaaaauuguccauaucucaccucucagcggaagugcucagcacauagaggaaugcucuuguuauccaagguacccggauguucggugcauuugucgcgacaacuggaagggcuccaaucgacccgugaucgacaucaacauggaggauuauagcauugacucgucuuacguaugcuccgguuuagugggggauaccccuagaaacgacgauucaaguagcaauuccaaaucuagggacccaaacaaugaacggggaaaccccggcgucaagggcugggccuucgauaauggggacgauguguggaugggacguacuaucagcaaggacucacgcagugguuacgagacauuuaaaguuauuggcgggugguccaccccuaacagcaagucucaggugaauagacaagucauaguggauaacaauaacuggucaggauauaguggcaucuucagcguagaggguaaauccuguauuaauaggugcuuuuacguugaacugauccgggggcgaccacaggagacgcgcgugugguggaccucuaacucgaucgucguguucuguggcacaagcggaacuuauggcaccggguccuggcccgacggagcgaauauuaacuuuaugccgauauga

SEQ ID NO: 148553 - RNA, 1413 nt, Artificial Sequence; identical to SEQ ID NO: 148252
  derived and/or modified CDS sequence (opt3) from neuraminidase__InfluenzaA__AEA10295

SEQ ID NO: 148554 - RNA, 1410 nt, Artificial Sequence; identical to SEQ ID NO: 144786
  derived and/or modified CDS sequence (opt3) from neuraminidase__InfluenzaA__AEA10306

SEQ ID NO: 148555 - RNA, 1410 nt, Artificial Sequence; identical to SEQ ID NO: 148139
  derived and/or modified CDS sequence (opt3) from neuraminidase__InfluenzaA__AEA10316

SEQ ID NO: 148556 - RNA, 1410 nt, Artificial Sequence; identical to SEQ ID NO: 144786
  derived and/or modified CDS sequence (opt3) from neuraminidase__InfluenzaA__AEA10326

SEQ ID NO: 148557 - RNA, 1410 nt, Artificial Sequence; identical to SEQ ID NO: 146074
  derived and/or modified CDS sequence (opt3) from neuraminidase__InfluenzaA__AEA10335

SEQ ID NO: 148558 - RNA, 1410 nt, Artificial Sequence; identical to SEQ ID NO: 144786
  derived and/or modified CDS sequence (opt3) from neuraminidase__InfluenzaA__AEA10342

SEQ ID NO: 148559 - RNA, 1410 nt, Artificial Sequence
  derived and/or modified CDS sequence (opt3) from neuraminidase__InfluenzaA__AEA10352
augaaccccaaucagaagaucauuaccauaggcagcgugugcaugacaaucgggauggccaaccugauucuccaaaucggaaauauuaucuccauauggaucucucacucaauucagcuugguaaccagaaucagaucgagacuuguaaccaaagugucauuacguacgaaaauaacaccuggguuaaucagacauaugugaacaucagcaauacuaacuucgcugcaggccaguccguagugucugucaaacuggccggaaauucgucauugugcccugugagcgggugggcgauauacaguaaggacaacuccauuagaaucggcucuaaaggugauguuuuugugauuagggagccauucaucagcuguuccccguuagaaugccggaccuuuuuccugacacagggggcucuacucaaugacaagcauucaaacggaaccaucaaagaucgcagucccuaucgaacucugaugagcuguccuauuggcgaggucccaucucccuacaacucccguuuugaaucaguggccuggagcgcaagugccugccacgacggcauaaauuggcuuacaaucgggauuucuggaccugauaacggugcuguagcaguucugaaguauaauggcaucauaaccgacacgauuaaguccuggagaaacaauaucuugaggacucaagagagcgagugugccugcaucaacgggucguguuucaccgugaugacagauggaccaucugacggccaggcuuccuacaaaauuuuucggaucgaaaaggguaaaauugucaagucaguggagaugaaugcccccaacuaucauuacgaagagugcaguuguuacccugauagcuccgagauaacuugcgugugccgcgacaauuggcacgggucuaacagaccaugggucagcuucaaucagaaccucgaauaucagaucggauacauuuguucaggcaucuuuggcgauaauccgaggcccaacgacaaaaccgggaguugcuccccuguuagcucuaauggagcgaacggugugaagggcuucucauuuaaguaugggaacggaguauggaucggccggacaaaaaguauuagcucccgcaaugguuucgagaugauaugggauccaaacggguggaccggcacggacaauaacuuuucuaucaagcaagacauugugggaaucaaugaauggucgggcuacagcggguccuucguccagcaucccgagcugacuggacuggauuguauucgaccuugcuucuggguggaacucaucagagguaggccaaaagagaacacaauauggaccucaggcaguucuaucagcuuuugugggguuaauuccgacacugugggauggucauggcccgauggcgcagaguuaccguucacaauugacaaguga

SEQ ID NO: 148560 - RNA, 1410 nt, Artificial Sequence; identical to SEQ ID NO: 144786
  derived and/or modified CDS sequence (opt3) from neuraminidase__InfluenzaA__AEA48991

SEQ ID NO: 148561 - RNA, 1410 nt, Artificial Sequence; identical to SEQ ID NO: 147458
  derived and/or modified CDS sequence (opt3) from neuraminidase__InfluenzaA__AEA72707

SEQ ID NO: 148562 - RNA, 1410 nt, Artificial Sequence; identical to SEQ ID NO: 147458
  derived and/or modified CDS sequence (opt3) from neuraminidase__InfluenzaA__AEA72718

SEQ ID NO: 148563 - RNA, 1410 nt, Artificial Sequence; identical to SEQ ID NO: 147458
  derived and/or modified CDS sequence (opt3) from neuraminidase__InfluenzaA__AEA72729

SEQ ID NO: 148564 - RNA, 1410 nt, Artificial Sequence
  derived and/or modified CDS sequence (opt3) from neuraminidase__InfluenzaA__AEA72742
augaaccccaaucagaagaucauuaccauaggcagcgugugcaugacaaucgggauggccaaccugauucuccaaaucggaaauauuaucuccauauggaucucucacucaauucagcuugguaaccagagucagaucgagacuuguaaucaaagcgucauuacguacgaaaacaauaccuggguuaaccagacauaugugaauaucuccaacacuaauuucgcugcaggccagucuguagugucggucaaacuggccgggaacagcucauugugcccugugaguggaugggcgauauacuccaaggacaauucuauuagaaucggcagcaaaggugauguuuuugugauuagggagccauucaucuccuguucaccguuagaaugccggaccuuuuuccugacacagggggcucuacucaacgacaagcauaguaauggaaccaucaaagaucgcagccccuaucgaacucugaugucuuguccuauuggcgaggucccaucccccuacaacucacguuuugaaagcguggccuggagugcaucugccugccacgacggcauaaacuggcuuacaaucgggauuuccggaccugauaauggugcuguagcaguucugaaguauaacggcaucauaaccgacacgauuaagagcuggagaaauaacaucuugaggacucaagagucggagugugccugcgugaaugggucuuguuucaccaucaugacagauggaccauccgacggccaggcuucauacaaaauuuuucggaucgaaaaggguaaaauugucaagaguguggagaugaacgcccccaauuaucauuacgaagagugcagcuguuacccugauuccucugagauaacuugcgugugccgcgacaacuggcacgggagcaauagaccaugggucucauucaaccagaaucucgaauaucagaucggauacauuuguaguggcaucuuuggcgauaacccgaggcccaaugacaaaaccggguccugcggaccuguuagcucuaacggugcgaauggcgugaagggguucucauuuaaguauggaaacggcguauggaucggucggacaaaaaguauuagcucccgcaacggguucgagaugauaugggauccaaauggcuggaccggaacggacaacaauuuuucuaucaagcaagacauugugggcaucaacgaauggucgggguacagcggauccuucguccagcaucccgagcugacuggucuggauuguauucgaccuugcuucuggguggaacucaucagaggcaggccaaaagagaauacaauauggaccucagggaguucuaucagcuuuuguggaguuaacuccgacacugugggcuggucauggcccgauggugcagaguuaccguucacaauugacaaguga

SEQ ID NO: 148565 - RNA, 1410 nt, Artificial Sequence; identical to SEQ ID NO: 147061
  derived and/or modified CDS sequence (opt3) from neuraminidase__InfluenzaA__AEA72779

SEQ ID NO: 148566 - RNA, 1410 nt, Artificial Sequence
  derived and/or modified CDS sequence (opt3) from neuraminidase__InfluenzaA__AEA72789
augaaccccaaucagaagaucauuaccauaggcagcgugugcaugacaaucgggauggccaaccugauucuccaaaucggaaauauuaucuccauauggaucucucacucaauucagcuugguaaccagagucagaucgagacuuguaaucaaagcgucauuacguacgaaaacaauaccuggguuaaccagacauaugugaauaucuccaacacuaauuucgcugcaggccagucuguagugucggucaaacuggccgggaacagcagcuugugcccugugaguggaugggcgauauacuccaaggacgauucuauuagaaucggcagcaaaggugacguuuuugugauuagggagccauucaucuccuguucaccguuagaaugccggaccuuuuuccugacacagggggcucuacucaaugauaagcauaguaacggaaccaucaaagaccgcagccccuaucgaacucugaugucuuguccuauuggcgaggucccaucccccuacaauucacguuuugaaagcguggccuggagugcaucugccugccacgauggcauaaacuggcuuacaaucgggauuuccggaccugacaacggugcuguagcaguucugaaguauaauggcaucauaaccgauacgauuaagagcuggagaaacaauaucuugaggacucaagagucggagugugccugcgugaacgggucuuguuucaccgucaugacagacggaccauccgauggccaggcuucauacaaaaucuuucggauugaaaaggguaaaaucgugaagaguguggagaugaaugcccccaacuaucauuacgaagagugcagcuguuacccugacuccucugagauuacuugcgucugccgcgauaauuggcacgggagcaacagaccauggguuucauucaaucagaaccucgaauaucagauaggauacaucuguaguggcauuuuuggcgacaauccgaggcccaacgauaaaaccggguccugcggaccugugagcucuaauggugcgaacggcguaaagggguucucauuuaaguauggaaauggcguguggaucggucggacaaaaaguaucagcucccgcaacggguucgagaugauuugggacccaaacggcuggaccggaacggacaauaacuuuucuauaaagcaagauaucgucggcauuaaugaauggucgggguacagcggauccuucgugcagcaucccgagcugacuggucuggacuguauccgaccuugcuucuggguugaacucauuagaggcaggccaaaagagaacacaaucuggaccucagggaguucuauaucauuuuguggagucaauuccgauacugugggcuggucauggcccgacggugcagaguuaccguucacaaucgauaaguga

SEQ ID NO: 148567 - RNA, 1410 nt, Artificial Sequence; identical to SEQ ID NO: 147458
  derived and/or modified CDS sequence (opt3) from neuraminidase__InfluenzaA__AEA73291

SEQ ID NO: 148568 - RNA, 1410 nt, Artificial Sequence; identical to SEQ ID NO: 147458
  derived and/or modified CDS sequence (opt3) from neuraminidase__InfluenzaA__AEA73302

SEQ ID NO: 148569 - RNA, 1410 nt, Artificial Sequence; identical to SEQ ID NO: 147458
  derived and/or modified CDS sequence (opt3) from neuraminidase__InfluenzaA__AEA73313

SEQ ID NO: 148570 - RNA, 1410 nt, Artificial Sequence; identical to SEQ ID NO: 147458
  derived and/or modified CDS sequence (opt3) from neuraminidase__InfluenzaA__AEA73324

SEQ ID NO: 148571 - RNA, 1410 nt, Artificial Sequence; identical to SEQ ID NO: 147458
  derived and/or modified CDS sequence (opt3) from neuraminidase__InfluenzaA__AEA73335

SEQ ID NO: 148572 - RNA, 1410 nt, Artificial Sequence; identical to SEQ ID NO: 147458
  derived and/or modified CDS sequence (opt3) from neuraminidase__InfluenzaA__AEA73346

SEQ ID NO: 148573 - RNA, 1410 nt, Artificial Sequence; identical to SEQ ID NO: 147458
  derived and/or modified CDS sequence (opt3) from neuraminidase__InfluenzaA__AEA73357

SEQ ID NO: 148574 - RNA, 1410 nt, Artificial Sequence; identical to SEQ ID NO: 147458
  derived and/or modified CDS sequence (opt3) from neuraminidase__InfluenzaA__AEA73368

SEQ ID NO: 148575 - RNA, 1410 nt, Artificial Sequence; identical to SEQ ID NO: 147458
  derived and/or modified CDS sequence (opt3) from neuraminidase__InfluenzaA__AEA73379

SEQ ID NO: 148576 - RNA, 1410 nt, Artificial Sequence; identical to SEQ ID NO: 147458
  derived and/or modified CDS sequence (opt3) from neuraminidase__InfluenzaA__AEA73390

SEQ ID NO: 148577 - RNA, 1410 nt, Artificial Sequence; identical to SEQ ID NO: 147458
  derived and/or modified CDS sequence (opt3) from neuraminidase__InfluenzaA__AEA73401

SEQ ID NO: 148578 - RNA, 1410 nt, Artificial Sequence; identical to SEQ ID NO: 147458
  derived and/or modified CDS sequence (opt3) from neuraminidase__InfluenzaA__AEA73412

SEQ ID NO: 148579 - RNA, 1410 nt, Artificial Sequence; identical to SEQ ID NO: 147458
  derived and/or modified CDS sequence (opt3) from neuraminidase__InfluenzaA__AEA73423

SEQ ID NO: 148580 - RNA, 1410 nt, Artificial Sequence; identical to SEQ ID NO: 147458
  derived and/or modified CDS sequence (opt3) from neuraminidase__InfluenzaA__AEA73455

SEQ ID NO: 148581 - RNA, 1410 nt, Artificial Sequence; identical to SEQ ID NO: 147458
  derived and/or modified CDS sequence (opt3) from neuraminidase__InfluenzaA__AEA73466

SEQ ID NO: 148582 - RNA, 1410 nt, Artificial Sequence
  derived and/or modified CDS sequence (opt3) from neuraminidase__InfluenzaA__AEA73477
augaaccccaaucagaagaucauuaccauaggcagcgugucccugacaaucucuacuauuugcuucuuuaugcagaucgccauucucaucacgaccgucacacuucacuucaaacaguacaaguuuaacucaccuccaaauaaccagguuaugcugugugagccgacuauaaucgaaagaaauauuaccgagaucguguauuugacaaacaccacuauugaaaaagagaucugccccaaguuagcugaauacaggaauuggaguaaaccucagugugacauaacaggguucgcaccauuuagcaaggauaacuccauucggcugucugccggaggugacaucuggguaacccgcgagcccuaugugucgugcgauccugacaaguguuaccaauucgcgcuaggccaggggacgacucucaauaacguccauucaaauaacaccgugcgagaucguacaccauauagaacucugcuuaugaaugagcugggaguucccuuucacuugggcaccaaacaggugugcauugcuuggagcaguuccucuugucaugacgguaaggccuggcuccacgucugcaucacaggggaugacaaaaacgcaaccgccagcuucaucuacaauggaaggcugguggauuccguaguuucauggaguaaggaaauucugcggacgcaggagagcgaaugugugugcauaaacggcacuuguacagucgugaugaccgacggcucugcuuccgggaaagcagauacuaagauccucuuuauugaggagggaaagaucgugcauacaucaaccuuaagcgguagugcccaacacgucgaagagugcucuugcuauccucgcuacccaggcguuagaugugugugcagggacaacuggaaaggguccaaucggccgauaguagauauuaacaucaaggaccacagcaucgugucgucuuacgucuguuccggacuggugggcgacacgccccgcaaaaaugauucaaguagcuccucucauugccuugacccuaacaaugaagagggugggcacggaguuaagggcugggcuuucgaugacggcaacgauguguggauggggcgaaccauuaaugaaacaagcagauugggauaugagacuuuuaaagucaucgaggguuggucaaacccaaagaguaaacugcagauuaauaggcaagugauaguagaccggggcaaccguuccggguacagcggaaucuucucuguugaaggcaagucauguauuaaucgcugcuuuuauguggagcuaaucagagguaggaaggaagagaccaaaguccucuggacaaguaacagcaucguggucuucugugggacuuccggcaccuacggaacaggcucuuggcccgauggggccgaccugaaucuuaugccuauuuga

SEQ ID NO: 148583 - RNA, 1410 nt, Artificial Sequence; identical to SEQ ID NO: 147458
  derived and/or modified CDS sequence (opt3) from neuraminidase__InfluenzaA__AEA73488

SEQ ID NO: 148584 - RNA, 1410 nt, Artificial Sequence
  derived and/or modified CDS sequence (opt3) from neuraminidase__InfluenzaA__AEA73499
augaaccccaaucagaagaucauuaccauaggcagcgugucccugacaaucucuacuauuugcuucuuuaugcagaucgccauucucaucacgaccgucacacuucacuucaaacaguacaaguuuaacucaccuccaaauaaccagguuaugcugugugagccgacuauaaucgaaagaaauauuaccgagaucguguauuugacaaacaccacuauugaaaaagagaucugccccaaguuagcugaauacaggaauuggaguaaaccucagugugacauaacaggguucgcaccauuuagcaaggauaacuccauucggcugucugccggaggugacaucuggguaacccgcgagcccuaugugucgugcgauccugacaaguguuaccaauucgcgcuaggccaggggacgacuauuaauaacguccauucaaauaacaccgugcgagaucguacaccauauagaacucuccugaugaaugagcuuggaguucccuuucaccugggcaccaaacaggugugcaucgcuuggagcaguuccucuugucaugacgguaaggccugguugcacgucugcaucacaggggaugacaaaaacgcaaccgccagcuucauuuacaauggaaggcucguggauuccguaguuucauggaguaaggaaauacugcggacgcaggagagcgaaugugugugcaucaacggcacuuguacagucgugaugaccgacggcucugcuuccgggaaagcagauacuaagauucuguuuaucgaggagggaaagauagugcauacaucaacccucagcgguagugcccaacacgucgaagagugcucuugcuauccucgcuacccaggcguuagaugugugugcagggacaacuggaaaggguccaaucggccgauuguagauaucaacaucaaggaccacagcauugugucgucuuacgucuguuccggauuagugggcgacacgccccgcaaaaaugauucaaguagcuccucucauugccuggacccuaacaaugaagagggugggcacggaguuaagggcugggcuuucgaugacggcaacgauguguggauggggcgaaccaucaaugaaacaagcagacuuggauaugagacuuuuaaagucauugaggguuggucaaacccaaagaguaaauugcagauaaauaggcaagugaucguagaccggggcaaccguuccggguacagcggaauuuucucuguugaaggcaagucauguaucaaucgcugcuuuuauguggagcugaucagagguaggaaggaagagaccgaaguccuauggacaaguaacagcauuguggucuucugugggacuuccggcaccuacggaacaggcucuuggcccgauggggccgaccucaaucugaugccuauauga

SEQ ID NO: 148585 - RNA, 1410 nt, Artificial Sequence; identical to SEQ ID NO: 147458
  derived and/or modified CDS sequence (opt3) from neuraminidase__InfluenzaA__AEA73510

SEQ ID NO: 148586 - RNA, 1410 nt, Artificial Sequence; identical to SEQ ID NO: 147458
  derived and/or modified CDS sequence (opt3) from neuraminidase__InfluenzaA__AEA73521

SEQ ID NO: 148587 - RNA, 1410 nt, Artificial Sequence; identical to SEQ ID NO: 147458
  derived and/or modified CDS sequence (opt3) from neuraminidase__InfluenzaA__AEA73532

SEQ ID NO: 148588 - RNA, 1410 nt, Artificial Sequence; identical to SEQ ID NO: 147458
  derived and/or modified CDS sequence (opt3) from neuraminidase__InfluenzaA__AEA73543

SEQ ID NO: 148589 - RNA, 1410 nt, Artificial Sequence; identical to SEQ ID NO: 147458
  derived and/or modified CDS sequence (opt3) from neuraminidase__InfluenzaA__AEA73554

SEQ ID NO: 148590 - RNA, 1410 nt, Artificial Sequence; identical to SEQ ID NO: 147458
  derived and/or modified CDS sequence (opt3) from neuraminidase__InfluenzaA__AEA73565

SEQ ID NO: 148591 - RNA, 1413 nt, Artificial Sequence; identical to SEQ ID NO: 145509
  derived and/or modified CDS sequence (opt3) from neuraminidase__InfluenzaA__AEA73576

SEQ ID NO: 148592 - RNA, 1413 nt, Artificial Sequence; identical to SEQ ID NO: 145509
  derived and/or modified CDS sequence (opt3) from neuraminidase__InfluenzaA__AEA73587

SEQ ID NO: 148593 - RNA, 1413 nt, Artificial Sequence; identical to SEQ ID NO: 148252
  derived and/or modified CDS sequence (opt3) from neuraminidase__InfluenzaA__AEA73598

SEQ ID NO: 148594 - RNA, 1413 nt, Artificial Sequence; identical to SEQ ID NO: 145509
  derived and/or modified CDS sequence (opt3) from neuraminidase__InfluenzaA__AEA73609

SEQ ID NO: 148595 - RNA, 1413 nt, Artificial Sequence; identical to SEQ ID NO: 145509
  derived and/or modified CDS sequence (opt3) from neuraminidase__InfluenzaA__AEA73620

SEQ ID NO: 148596 - RNA, 1413 nt, Artificial Sequence
  derived and/or modified CDS sequence (opt3) from neuraminidase__InfluenzaA__AEA73631
augaaccccaaucagaagaucauuaccauaggcagcaucuccauugccaucgggauuaucucucugaugcuccaaauaggaaacaucauuucaaucugggcuagucacagcauucagacagguucccagaauaacacuggcaucugcaaucagagaauaauuacguacgagaacucuaccugggugaaucauacauaugucaacaucaauaacacuaauguuguggcaggggaagacaaaaccucgguaacacuugccggaaacucaagccuguguaguauuuccggcugggcgaucuacaccaaggauaauucuaucaggauugguagcaaaggggacguguucgucauacgggagccuuuuaucuccugcucacacuuggaaugucgcacuuucuuuuuaacacaaggagcucugcuaaacgauaagcauaguaauggcaccgugaaagaccgaagcccauaucgugcccucaugucuugcccgcugggcgaggcacccuccccuuacaacucaaaguucgaaagcguugccuggagugcuucugcaugucacgaugggaugggauggcuuacgauugguaucuccggcccagacaacggggccguggcuguccugaaguauaauggaauaauuacuggcaccaucaaaagcuggaagaaacagaucuugagaacacaggagucggagugcguguguaugaacgguucuugcuuuacuauuaugaccgaugggcccuccaauaaggccgcgucauacaaaaucuucaagauugaaaagggaaaaguaacaaagaguauagagcucaacgcaccuaauuuuuauuacgaagaguguagcugcuacccagacaccggcaucguuaugugugugugcagggauaacuggcauggcuccaaucggcccugggucucuuucaaccagaaucuggacuaucaaauuggguacaucugcagcggaguguuuggugauaacccucgcccagaggacggcgaagggucauguaauccggugacggucgauggagccaacggcguuaaagguuucaguuauaaguacgggaauggcguguggaucggaagaauuaaauccaacaggcugcggaagggcuuugagaugauaugggaccccaauggguggacuaacacagacagcgauuucucuguaaaacaggacguggucgcuaucaccgauuggucaggauauagugguagcuuugugcagcacccugaacucacuggcuuagacugcauucgcccauguuucuggguugagcuggugcgagggcuucccagagaaaacacaaccaucuggacguccggaucuucgauuagcuucugcggcgucaauuccgauaccgccaacuggucauggccugacggugcagaguugccauuuacaaucgauaaguga

SEQ ID NO: 148597 - RNA, 1413 nt, Artificial Sequence
  derived and/or modified CDS sequence (opt3) from neuraminidase__InfluenzaA__AEA73642
augaaccccaaucagagaaucauuaccauaggcagcaucuccauugccaucgggauuaucucucugaugcuccaaauaggaaacaucauuucaaucugggcuagucacagcauucagacagguucccagaauaacacuggcaucugcaagcagaggauaauuacguacgaaaauucuaccugggugaaccauacauaugucaauaucaacaauacuaacguuguggcaggggaggacaaaaccucgguaacacuugccggaaauucaagccuguguaguauuuccggcugggcgaucuacaccaaggauaacucuauccggauugguagcaaaggggacguguucgucauacgcgagccuuuuaucuccugcucacacuuggaaugucgaacuuucuuuuuaacacaaggagcucugcuaaaugauaagcauaguaacggcaccgccaaagaccguagcccauauagagcacucaugucuugcccgcugggcgaggcccccuccccuuacaauucaaaguucgaaagcguggcuuggagugcaucugccugucacgaugggaugggauggcuuacgauugguaucuccggcccagacaacggggcuguugccgugcugaaguauaacggaauaauuacuggcaccaucaaaagcuggaagaaacagaucuugaggacacaggagucggagugcgucuguaugaaugguucuugcuuuacuauuaugaccgaugggcccuccaacaaggcggcaucauacaaaaucuucaagauugaaaagggaaaagugacaaagaguauagagcucaaugccccuaacuuuuauuacgaagaguguagcugcuacccagacaccggcaucguaauguguguuugccgggauaauuggcauggcuccaaccgccccugggugucuuucaaucagaaccuggacuaucaaauuggguacaucugcagcggagucuuuggugauaauccuagaccagaggacggcgaagggucauguaacccggugacgguggauggagcuaauggcgucaaagguuucaguuauaaguacgggaacggcguuuggcugggaaggacuaaauccaaucggcuccgcaagggcuuugagaugaucugggaccccaacggguggacaaauaccgacagcgauuucucugugaaacaggacguaguggccauuacugauuggucaggauauagugguagcuuuguccagcacccugaauuaacaggccuggacugcauacgaccauguuucuggguggagcuuguuagaggguugcccagggaaaacaccacgaucuggaccuccggaucuucgauuagcuucugcggcgugaacuccgauacagcaaauuggucauggccugacggugcugagcugccauuuacuaucgauaaguga

SEQ ID NO: 148598 - RNA, 1413 nt, Artificial Sequence; identical to SEQ ID NO: 145509
  derived and/or modified CDS sequence (opt3) from neuraminidase__InfluenzaA__AEA73653

SEQ ID NO: 148599 - RNA, 1413 nt, Artificial Sequence
  derived and/or modified CDS sequence (opt3) from neuraminidase__InfluenzaA__AEA73664
augaaccccaaucagaagaucauuaccauaggcagcaucuccauugccaucgggauuaucucucugaugcuccaaauaggaaacaucauuucaaucugggcuagucacagcauucagacagguucccagaauaacacuggcaucugcaaucagagaauaauuacguacgagaacucuaccugggugaaucauacauaugucaacaucaauaacacuaauguuguggcaggggaagacaaaaccucgguaacacuugccggaaacucaagccuguguaguauuuccggcugggcgaucuacaccaaggauaauucuaucaggauugguagcaaaggggacguguucgucauacgggagccuuuuaucuccugcucacacuuggaaugucgcacuuucuuuuuaacacaaggagcucugcuaaacgauaagcauaguaauggcaccgugaaagaccgaagcccauaucgugcccucaugucuugcccgcugggcgaggcacccuccccuuacaacucaaaguucgaaagcguugccuggagugcuucugcaugucacgaugggaugggauggcuuacgauugguaucuccggcccagacaacggggccguggcuguccugaaguauaauggaauaauuacuggcaccaucaaaagcuggaagaaacagaucuugagaacacaggagucggagugcguguguaugaacgguucuugcuuuacuauuaugaccgaugggcccuccaauaaggccgcgucauacaaaaucuucaagauugaaaagggaaaaguaacaaagaguauagagcucaacgcaccuaauuuuuauuacgaagaguguagcugcuacccagacaccggcaucguuaugugugugugcagggauaacuggcauggcuccaaucggcccugggucucuuucaaccagaaucuggacuaucaaauuggguacaucugcagcggaguguuuggugauaacccucgcccagaggacggcgaagggucauguaauccggugacggucaacggagccgauggcguuaaagguuucaguuauaaguacgggaauggcguguggaucggaagaacuaaauccaacaggcugcggaagggcuuugagaugauuugggaccccaauggguggacaaacaccgacagcgauuucucuguaaaacaggacguggucgcuauaacugauuggucaggauauagugguagcuuugugcagcacccugaacucacaggcuuagacugcauccgcccauguuucuggguugagcuggugcgagggcuucccaaggaaaacaccacgauuuggaccuccggaucuucgaucagcuucugcggcgucaauuccgauacagccaacuggucauggccugacggugcagaguugccauuuacuauugauaaguga

SEQ ID NO: 148600 - RNA, 1413 nt, Artificial Sequence
  derived and/or modified CDS sequence (opt3) from neuraminidase__InfluenzaA__AEA73675
augaaccccaaucagaagaucauuaccauaggcagcaucuccauugccaucgggauuaucucucugaugcuccaaauaggaaacaucauuucaaucugggcuagucacagcauucagacagguucccagaauaacacuggcaucugcaaucagagaauaauuacguacgagaacucuaccugggugaaucauacauaugucaacaucaauaacacuaauguuguggcaggggaagacaaaaccucgguaacacuugccggaaacucaagccuguguaguauuuccggcugggcgaucuacaccaaggauaauucuaucaggauugguagcaaaggggacguguucgucauacgggagccuuuuaucuccugcucacacuuggaaugucgcacuuucuuuuuaacacaaggagcucugcuaaacgauaagcauaguaauggcaccgugaaagaccgaagcccauaucgugcccucaugucuugcccgcugggcgaggcacccuccccuuacaacucaaaguucgaaagcguugccuggagugcuucugcaugucacgaugggaugggauggcuuacgauugguaucuccggcccagacaacggggccguggcuguccugaaguauaauggaauaauuacuggcaccaucaaaagcuggaagaaacagaucuugagaacacaggagucggagugcguguguaugaacgguucuugcuuuacuauuaugaccgaugggcccuccaauaaggccgcgucauacaaaaucuucaagauugaaaagggaaaaguaacaaagaguauagagcucaacgcaccuaauuuuuauuacgaagaguguagcugcuacccagacaccggcaucguuaugugugugugcagggauaacuggcauggcuccaaucggcccugggucucuuucaaccagaaucuggacuaucaaauuggguacaucugcagcggaguguuuggugauaacccucgcccagaggacggcgaagggucauguaauccggugacggucgauggagccgacggcguuaaagguuucaguuauaaguacgggaacggcguguggaucggaagaacuaaauccaauaggcugcggaagggcuuugagaugauuugggaccccaacggguggacaaauaccgauagcgacuucucuguaaaacaggauguggucgcuauaacugacuggucaggauauagugguagcuuugugcagcacccugaacucacaggcuuagauugcauccgcccauguuucuggauugagcugguucgagggcuucccagagaaaacaccacgaucuggaccuccggaucuucgauuagcuucugcggcgugaacuccgacacagccaauuggucauggccugauggugcagaguugccauuuacuaucgacaaguga

SEQ ID NO: 148601 - RNA, 1413 nt, Artificial Sequence; identical to SEQ ID NO: 148252
  derived and/or modified CDS sequence (opt3) from neuraminidase__InfluenzaA__AEA73686

SEQ ID NO: 148602 - RNA, 1413 nt, Artificial Sequence
  derived and/or modified CDS sequence (opt3) from neuraminidase__InfluenzaA__AEA73697
augaaccccaaucagaagaucauuaccauaggcagcaucuccauugccaucgggauuaucucucugaugcuccaaauaggaaacaucauuucaaucugggcuagucacagcauucagacagguucccagaauaacacuggcaucugcaaucagagaauaauuacguacgagaacucuaccugggugaaucauacauaugucaacaucaauaacacuaauauuguugcaggggaagacaaaaccucggugacacuugccggaaacucaagccuguguaguaucuccggcugggcgaucuacaccaaggauaauucuauuaggauagguagcaaaggggacguauucgugauccgggagccuuuuauuuccugcucacacuuggaaugucgcacuuucuuuuuaacacaaggagcucugcuaaacgauaagcauaguaauggcaccgucaaagaccgaagcccauaucgugcccucaugucuugcccgcugggcgaggcacccuccccuuacaacucaaaguucgaaagcguggccuggagugcuucugcaugucacgaugggaugggauggcuuacgaucgguauauccggcccagacaacggggccguugcugugcugaaguauaauggaauuaucacuggcaccaucaaaagcuggaagaaacagauuuugagaacacaggagucggagugcgucuguaugaacgguucuugcuuuacuaucaugaccgaugggcccuccaauaaggccgcgucauacaaaauuuucaagauagaaaagggaaaagugacaaagaguguagagcucaacgcaccuaauuuuuauuacgaagaguguagcugcuacccagacaccggcaucguuaugugugugugcagggauaacuggcauggcuccaaucggcccugggucucuuucaaccagaaucuggacuaucaaauuggguacaucugcagcggaguguuuggugauaacccucgcccagaggacggcgaagggucauguaauccggugacggucaacggagccgauggcguuaaagguuucaguuauaaguacgggaauggcguguggaucggaagaacuaaauccaacaggcugcggaagggcuuugagaugauuugggaccccaauggguggacaaacaccgacagcgauuucucuguaaaacaggacguggucgcuauaacugauuggucaggauauagugguagcuuugugcagcacccugaacucacaggcuuagacugcauccgcccauguuucuggguugagcuggugcgagggcuucccagagaaaacaccacgauuuggaccuccggaucuucgaucagcuucugcggcgucaauuccgauacagccaacuggucauggccugacggugcagaguugccauuuacuauugauaaguga

SEQ ID NO: 148603 - RNA, 1413 nt, Artificial Sequence; identical to SEQ ID NO: 148253
  derived and/or modified CDS sequence (opt3) from neuraminidase__InfluenzaA__AEA73708

SEQ ID NO: 148604 - RNA, 1413 nt, Artificial Sequence; identical to SEQ ID NO: 145509
  derived and/or modified CDS sequence (opt3) from neuraminidase__InfluenzaA__AEA73719

SEQ ID NO: 148605 - RNA, 1413 nt, Artificial Sequence; identical to SEQ ID NO: 145509
  derived and/or modified CDS sequence (opt3) from neuraminidase__InfluenzaA__AEA73730

SEQ ID NO: 148606 - RNA, 1413 nt, Artificial Sequence; identical to SEQ ID NO: 145509
  derived and/or modified CDS sequence (opt3) from neuraminidase__InfluenzaA__AEA73741

SEQ ID NO: 148607 - RNA, 1413 nt, Artificial Sequence; identical to SEQ ID NO: 145509
  derived and/or modified CDS sequence (opt3) from neuraminidase__InfluenzaA__AEA73752

SEQ ID NO: 148608 - RNA, 1413 nt, Artificial Sequence; identical to SEQ ID NO: 148252
  derived and/or modified CDS sequence (opt3) from neuraminidase__InfluenzaA__AEA73763

SEQ ID NO: 148609 - RNA, 1410 nt, Artificial Sequence; identical to SEQ ID NO: 144786
  derived and/or modified CDS sequence (opt3) from neuraminidase__InfluenzaA__AEA73774

SEQ ID NO: 148610 - RNA, 1410 nt, Artificial Sequence; identical to SEQ ID NO: 144786
  derived and/or modified CDS sequence (opt3) from neuraminidase__InfluenzaA__AEA73784

SEQ ID NO: 148611 - RNA, 1410 nt, Artificial Sequence; identical to SEQ ID NO: 144786
  derived and/or modified CDS sequence (opt3) from neuraminidase__InfluenzaA__AEA73794

SEQ ID NO: 148612 - RNA, 1410 nt, Artificial Sequence; identical to SEQ ID NO: 144786
  derived and/or modified CDS sequence (opt3) from neuraminidase__InfluenzaA__AEA73804

SEQ ID NO: 148613 - RNA, 1410 nt, Artificial Sequence; identical to SEQ ID NO: 144786
  derived and/or modified CDS sequence (opt3) from neuraminidase__InfluenzaA__AEA73814

SEQ ID NO: 148614 - RNA, 1410 nt, Artificial Sequence; identical to SEQ ID NO: 144786
  derived and/or modified CDS sequence (opt3) from neuraminidase__InfluenzaA__AEA73824

SEQ ID NO: 148615 - RNA, 1410 nt, Artificial Sequence
  derived and/or modified CDS sequence (opt3) from neuraminidase__InfluenzaA__AEA73834
augaaccccaaucagaagaucauuaccauaggcagcaucugcaugacaauugggauggccaaccugauccuccaaauuggaaauaucauauccaucuggauuucucacucaauccagcuugguaaccagaaucagauugagacuuguaaccaaagugugaucacguacgaaaauaacaccugggucaaucagacauauguuaacauaagcaauacuaacuucgcugcaggccaguccgugguaucugugaaacuggccggaaauucgucauugugcccugucagcggaugggcgauuuacaguaaggacaacuccaucagaauuggcucuaaaggugauguguuuguuaucagggagccauucaucagcuguuccccguuagaaugccggaccuuuuuccugacacagggggcucuacucaaugacaagcauucaaacggaaccauuaaagaucgcagucccuaucgaacucugaugagcuguccuauaggcgaggugccaucucccuacaacucccguuuugaaucagucgccuggagcgcaagugccugccacgacggcaucaauuggcuuacaauugggaucucuggaccugauaacggugcuguggcaguacugaaguauaauggcauaauuaccgacacgaucaaguccuggaaaaacaauaucuugagaacucaagagagcgagugugccugcguuaacgggucguguuucaccgugaugacagauggaccaucugacggccaggcuuccuacaagauuuuuaggaucgaaaaagguaagauugucaaaucaguggagaugaaugcccccaacuaucauuacgaagagugcaguuguuacccugauagcuccgagauaacuugcgugugccgggacaauuggcacgggucuaaccgcccaugggucagcuucaaucagaaccucgaauaucagaucggauacauuuguucaggcaucuuuggcgauaauccgagacccaacgacaagaccgggaguugcggaccuguuuccagcaauggugcgaacggcgugaagggguucucuuuuaaauauggaaacggcguauggaucgguaggacaaagucaauuaguagccggaauggguucgagaugauaugggauccaaacggcuggaccggaacggacaauaacuuuuccaucaaacaagacauugugggcaucaaugaauggucuggguacucggggagcuucguccagcaucccgagcugacuggucuggauuguauucgcccuugcuucuggguggaacucauccgaggcagaccaaaggagaacacaauauggaccuccgggucaaguaucucuuuuuguggaguuaauagcgacacugugggcugguccuggcccgauggugcagaguuaccguucacaauugacaaauga

SEQ ID NO: 148616 - RNA, 1410 nt, Artificial Sequence; identical to SEQ ID NO: 148148
  derived and/or modified CDS sequence (opt3) from neuraminidase__InfluenzaA__AEA73844

SEQ ID NO: 148617 - RNA, 1410 nt, Artificial Sequence; identical to SEQ ID NO: 144786
  derived and/or modified CDS sequence (opt3) from neuraminidase__InfluenzaA__AEA73854

SEQ ID NO: 148618 - RNA, 1410 nt, Artificial Sequence; identical to SEQ ID NO: 144786
  derived and/or modified CDS sequence (opt3) from neuraminidase__InfluenzaA__AEA73864

SEQ ID NO: 148619 - RNA, 1410 nt, Artificial Sequence; identical to SEQ ID NO: 146567
  derived and/or modified CDS sequence (opt3) from neuraminidase__InfluenzaA__AEA73874

SEQ ID NO: 148620 - RNA, 1410 nt, Artificial Sequence; identical to SEQ ID NO: 146567
  derived and/or modified CDS sequence (opt3) from neuraminidase__InfluenzaA__AEA73884

SEQ ID NO: 148621 - RNA, 1410 nt, Artificial Sequence; identical to SEQ ID NO: 148148
  derived and/or modified CDS sequence (opt3) from neuraminidase__InfluenzaA__AEA73894

SEQ ID NO: 148622 - RNA, 1410 nt, Artificial Sequence
  derived and/or modified CDS sequence (opt3) from neuraminidase__InfluenzaA__AEA73904
augaaccccaaucagaagaucauuaccauaggcagcgugugcaugacaaucgggauggccaaccugguccuccaaauuggaaauaucauuuccaucuggauaucucacucaauccagcuugguaaccagaaucagauugagacuuguaaccaaaguguuaucacguacgaaaauaacaccugggugaaucagacauauguaaacauuagcaauacuaacuucgcugcaggccaguccguggucucugugaaacuggccggaaauucgucauugugcccuguuagcggaugggcgaucuacaguaaggacaacuccauaagaauuggcucuaaaggugauguguuugucaucagggagccauucauuagcuguuccccguuagaaugccggaccuuuuuccugacacagggggcucuacucaaugacaagcauucaaacggaaccaucaaagaucgcagucccuaucgaacucugaugagcuguccuaucggcgaggugccaucucccuacaacucccguuuugaaucaguagccuggagcgcaagugccugccacgacggcauuaauuggcuuacaauagggaucucuggaccugauaacggugcuguugcagugcugaaguauaauggcauuaucaccgacacgauaaaguccuggagaaacaauauuuugaggacucaagagagcgagugugccugcgucaacgggucguguuucaccgugaugacagauggaccaucugacggccaggcuuccuacaaaaucuuucggaucgaaaaggguaaaauugugaagucagucgagaugaaugcccccaacuaucauuacgaagagugcaguuguuacccugauagcuccgagaucacuugcguuugccgcgacaauuggcacgggucuaacagaccaugggugagcuucaaucagaaccucgaauaucagauuggauacauauguucaggcaucuuuggcgauaauccgaggcccaacgacaaaaccgggaguugcggaccuguauccagcaauggugcgaacggcgugaagggguucucuuuuaaguauggaaacggcgucuggauuggucggacaaaaucaaucaguagccgcaauggguucgagaugaucugggauccaaacggcuggaccggaacggacaauaacuuuuccauuaagcaagacauaaucggcauuaaugaauggucuggguacucggggagcuucgugcagcaucccgagcugacuggucuggauuguauccgaccuugcuucuggguugaacucauuagaggcaggccaaaagagaagacaaucuggaccuccgggucaaguauaucuuuuuguggagugaacagcgacacugucggcugguccuggcccgauggugcagaguuaccguucacaaucgacaaauga

SEQ ID NO: 148623 - RNA, 1410 nt, Artificial Sequence; identical to SEQ ID NO: 144786
  derived and/or modified CDS sequence (opt3) from neuraminidase__InfluenzaA__AEA73914

SEQ ID NO: 148624 - RNA, 1410 nt, Artificial Sequence; identical to SEQ ID NO: 146567
  derived and/or modified CDS sequence (opt3) from neuraminidase__InfluenzaA__AEA73924

SEQ ID NO: 148625 - RNA, 1410 nt, Artificial Sequence; identical to SEQ ID NO: 148225
  derived and/or modified CDS sequence (opt3) from neuraminidase__InfluenzaA__AEA73934

SEQ ID NO: 148626 - RNA, 1410 nt, Artificial Sequence
  derived and/or modified CDS sequence (opt3) from neuraminidase__InfluenzaA__AEA73944
augaaccccaaucagaagaucauuaccauaggcagcgugugcaugacaaucgggauggccaaccugauucuccaagucggaaauaucauuuccaucuggauaucucacucaauccagcuugguaaccagaaucagauugagacuuguaaccaaaguguuaucacguacgaaaauaacaccugggugaaucagacauauguaaacauuagcaauacuaacuucgcugcaggccaguccguggucucugugaaacuggccggaaauucgucauugugcccuguuagcggaugggcgaucuacaguaaggacaacuccauaagaauuggcucuaaaggugauguguuugucaucagggagccauucauuagcuguuccccguuagaaugccggaccuuuuuccugacacagggggcucuacucaaugacaagcauucaaacggaaccaucaaagaucgcagucccuaucgaacucugaugagcuguccuaucggcgaggugccaucucccuacaacucccguuuugaaucaguagccuggagcgcaagugccugccacgacggcauuaauuggcuuacaauagggaucucuggaccugauaacggugcuguugcagugcugaaguauaauggcauuaucaccgacacgauaaaguccuggagaaacaauauuuugaggacucaagagagcgagugugccugcgucaacgggucguguuucaccgugaugacagauggaccaucugacggccaggcuuccuacaaaaucuuucggaucgaaaaggguaaaauugugaagucagucgagaugaaugcccccaacuauuacuacgaagagugcaguuguuauccugauagcuccgagaucacuugcguuugccgcgacaauuggcaugggucuaacagaccaugggugagcuucaaucagaaccucgaauaccagauuggauauauauguucaggcaucuuuggcgauaauccgaggcccaacgacaaaaccgggaguugcggaccuguauccagcaauggugcgaacggcgugaagggguucucuuuuaaguacggaaacggcgucuggauuggucggacaaaaucaaucaguagccgcaauggguucgagaugaucugggauccaaacggcuggaccggaacggacaauaacuuuuccauuaagcaagacauagugggcaucaaugaauggucuggguauucggggagcuucguucagcaccccgagcugacuggucuggauuguauucgaccuugcuucuggguggaacucaucagaggcaggccaaaagagaacacaauuuggaccuccgggucaaguaucucuuuuuguggagucaauagcgacacugugggcugguccuggcccgauggugcagaguuaccguucacaauagacaaguga

SEQ ID NO: 148627 - RNA, 1410 nt, Artificial Sequence; identical to SEQ ID NO: 144786
  derived and/or modified CDS sequence (opt3) from neuraminidase__InfluenzaA__AEA73954

SEQ ID NO: 148628 - RNA, 1410 nt, Artificial Sequence; identical to SEQ ID NO: 144786
  derived and/or modified CDS sequence (opt3) from neuraminidase__InfluenzaA__AEA73964

SEQ ID NO: 148629 - RNA, 1410 nt, Artificial Sequence
  derived and/or modified CDS sequence (opt3) from neuraminidase__InfluenzaA__AEA73974
augaaccccaaucagaagaucauuaccauaggcagcgugugcaugacaaucgggauggccaaccugauucuccaaaucggaaauauuaucuccauauggaucucucacucaauucagcaugguaaccagaaucagaucgagacuuguaaccaaagugucauuacguacgaaaauaacaccuggguuaaucagacauaugugaacaucagcaauacuaacuucgcugcaggccaguccguagugucugucaaacuugccggaaauucgucacugugcccugugagcggaugggcgauauacaguaaggacaacuccauuagaaucggcucuaaaggugauguuuuugugauuagggagccauucaucagcuguuccccguuggaaugccggaccuuuuucuuaacacagggggcucugcuaaaugacaagcacucaaacggaaccaucaaagaucgcagucccuaucgaacucucaugagcuguccuauuggcgaggucccaucucccuacaacucccguuuugaaucaguggccuggagcgcaagugccugccaugacggcauaaauuggcugacaaucgggauuucuggaccugauaacggugcuguagcaguucuuaaguauaauggcaucauaaccgacacgauuaaguccuggagaaacaauauccugaggacucaagagagcgagugugccugcgugaacgggucguguuucaccgucaugacagauggaccaucugacggccaggcuuccuacaaaaucuuucggauugaaaaggguaaaaucgugaagucaguggagaugaaugcccccaacuaucacuacgaagagugcaguuguuacccugauagcuccgagauuacuugcgucugccgcgacaauuggcaugggucuaacagaccauggguuagcuucaaucagaacuuggaauaucagauaggauacaucuguucaggcauuuuuggcgauaauccgaggcccaacgacaaaaccgggaguugcggaccuguguccagcaauggugcgaacggcguaaagggguucucuuuuaaguauggaaacggcguguggaucggucggacaaaaucaaucaguagccgcaauggguucgagaugauuugggauccaaacggcuggaccggaacggacaauaacuuuuccauaaagcaagacaucgucggcauuaaugaauggucuggguacucggggagcuucgugcagcaccccgagcucacuggucuggauuguauccgaccuugcuucuggguugaacugauuagaggcaggccaaaagagaacacaaucuggaccuccgggucaaguauaucuuuuuguggagugaauagcgacacugucggcugguccuggcccgauggugcagagcucccguucacaaucgacaaguga

SEQ ID NO: 148630 - RNA, 1410 nt, Artificial Sequence; identical to SEQ ID NO: 144786
  derived and/or modified CDS sequence (opt3) from neuraminidase__InfluenzaA__AEA73984

SEQ ID NO: 148631 - RNA, 1410 nt, Artificial Sequence; identical to SEQ ID NO: 146137
  derived and/or modified CDS sequence (opt3) from neuraminidase__InfluenzaA__AEA73994

SEQ ID NO: 148632 - RNA, 1410 nt, Artificial Sequence
  derived and/or modified CDS sequence (opt3) from neuraminidase__InfluenzaA__AEA74004
augaaccccaauaagaaaaucauuauaaucggcagcgugugcaugaccauugggauggccaaccugauccuccagauuggaaauaucauauccaucuggauuucucacucaauccaacuugguaaccagaaucagauugagacauguaaccagagugucaucacuuacgaaaauaacacguggguuaaucaaaccuaugugaacauaagcaauacaaacuucgcugcaggccaguccguagugucugucaagcuggccggaaauucgucauugugcccugugagcggaugggcgauuuacaguaaagacaacuccaucagaauuggcucuaagggugauguuuuugugaucagggagccauucaucagcuguuccccguuagaaugccggaccuuuuuccugacucagggggcucuacucaaugacaaacauucaaacggaacaauuaaggaucgcagucccuaucgaacccugaugagcuguccuauaggcgaggucccaucucccuacaacucccguuuugaaucaguggccuggagcgcaagugccugccacgacggcaucaauuggcuuacuauugggaucucuggaccugauaacggugcuguagcaguucugaaguauaauggcauaauuacagacaccaucaaauccuggagaaacaauaucuugaggacgcaggagagcgagugugccugcgugaacgggucguguuucacugucaugaccgauggaccaucugacggccaggcuuccuacaagauuuuucggaucgaaaaagguaagauugugaaaucaguggagaugaaugcccccaacuaucauuacgaagagugcaguuguuacccugauagcuccgagauaacaugcgucugccgcgacaauuggcacgggucuaacagaccauggguuagcuucaaucaaaaccucgaauaucagaucggauacauuuguucaggcaucuuuggcgauaauccgaggcccaacgacaagacugggaguugcggaccuguguccagcaauggugcgaacggcguaaagggguucucuuuuaaauauggaaacggcguguggaucggucggaccaagucaauuaguagccgcaauggguucgagaugauaugggauccaaacggcuggacaggaaccgacaauaacuuuuccaucaaacaggacauugucggcaucaaugaauggucuggguacucggggagcuucgugcaacaucccgagcugacgggucuggauuguauucgaccuugcuucuggguugaacucaucagaggcaggccaaaggagaacacuauauggacauccgggucaaguaucucuuuuuguggagugaauagcgacaccgucggcugguccuggcccgauggugcagaguuaccguucacuauugacaaauga

SEQ ID NO: 148633 - RNA, 1410 nt, Artificial Sequence; identical to SEQ ID NO: 145963
  derived and/or modified CDS sequence (opt3) from neuraminidase__InfluenzaA__AEA74014

SEQ ID NO: 148634 - RNA, 1410 nt, Artificial Sequence; identical to SEQ ID NO: 145963
  derived and/or modified CDS sequence (opt3) from neuraminidase__InfluenzaA__AEA74024

SEQ ID NO: 148635 - RNA, 1410 nt, Artificial Sequence; identical to SEQ ID NO: 144786
  derived and/or modified CDS sequence (opt3) from neuraminidase__InfluenzaA__AEA74032

SEQ ID NO: 148636 - RNA, 1410 nt, Artificial Sequence; identical to SEQ ID NO: 144786
  derived and/or modified CDS sequence (opt3) from neuraminidase__InfluenzaA__AEA74034

SEQ ID NO: 148637 - RNA, 1410 nt, Artificial Sequence
  derived and/or modified CDS sequence (opt3) from neuraminidase__InfluenzaA__AEA77302
augaaccccaaucagaagaucauuaccauaggcagcgugucccugacaaucucuacuauuugcuucuuuaugcaaaucgccauucucaucacgaccgucacacuucacuucaaacaguacgaguuuaacucaccuccaaauaaccagguuaugcugugugaaccgacuauaaucgagagaaauauuaccgaaaucguguauuugacaaacaccacuauugagaaggaaaaaugccccaaguuagcugaguacaggaauuggaguaaaccucagugugacaucacaggguucgcaccauuuagcaaggauaacuccauacggcugucugccggaggugacauuuggguaacccgcgagcccuaugugucgugcgauccugacaaguguuaccaauucgcgcuaggccaggggacgacucucaauaacguccauucaaauaacaccgugcgagaucguacaccauauagaacucugcuuaugaaugaacugggaguucccuuucacuugggcaccaaacaggugugcaucgcuuggagcaguuccucuugucaugacgguaaggccuggcuccacgucugcauuacaggggaugacaaaaacgcaaccgccagcuucaucuacaauggaaggcugguggauuccguaguuucauggaguaaggagauccugcggacgcaggaaagcgagugugugugcauuaacggcacuuguacagucgugaugaccgacggcucugcuuccgggaaagcagauacuaagauacucuuuaucgaggaaggaaagauugugcauacaucaaccuuaagcgguagugcccaacacgucgaggaaugcucuugcuauccucgcuacccaggcguuagaugugugugcagggacaacuggaaaggguccaaucggccgaucguagauauaaacauuaaggaccacagcaucgugucgucuuacgucuguuccggacuggugggcgacacgcccaaaaagaaugauucaaguagcuccucucauugccuugacccuaacaaugaggaaggugggcacggaguuaaaggcugggcuuucgaugacggcaacgauguguggauggggcgcaccaucagcgagaagucacgauugggauaugagacauuuaaagucauugaagguuggaguaauccaaaguccaagcugcagaucaacagacaggugauuguagacaggggcaaucggagcggguacucuggaauauucucaguugagggcaaaaguuguaucaaccguugcuuuuauguggaacuaauucgcgguagaaaggaggaaacugagguccucuggaccagcaauuccaucguggucuucugugggacaucuggcacuuacggaaccggcucguggcccgauggggccgacaucaaccugaugccuauuuga

SEQ ID NO: 148638 - RNA, 1410 nt, Artificial Sequence; identical to SEQ ID NO: 148305
  derived and/or modified CDS sequence (opt3) from neuraminidase__InfluenzaA__AEB21318

SEQ ID NO: 148639 - RNA, 1410 nt, Artificial Sequence
  derived and/or modified CDS sequence (opt3) from neuraminidase__InfluenzaA__AEB21328
augaaccccaaucagaagaucauuaccauaggcagcgugugcaugacaaucgggauggccaaccugauucuccaaaucggaaauauuaucuccauauggaucucucacucaauucagcuugguaaccagagucagaucgagacuuguaaucaaagcgucauuacguacgaaaacaauaccuggguuaaccagacauaugugaauaucuccaacacuaauuucgcugcaggccagucuguagugucggucaaacuggccgggaacagcucauugugcccugugaguggaugggcgauauacuccaaggacaauucuauuagaaucggcagcaaaggugauguuuuugugauuagggagccauucaucuccuguucaccguuagaaugccggaccuuuuuccugacacagggggcucuacucaacgacaagcauaguaauggaaccaucaaagaucgcagccccuaucgaacucugaugucuuguccuauuggcgaggucccaucccccuacaacucacguuuugaaagcguggccuggagugcaucugccugccacgacggcuucaacuggcuuacaauagggaucuccggaccugauaauggugcuguagcaguucugaaguauaacggcauuaucaccgacacgauaaagagcuggagaaauaacauuuugaggacucaagagucggagugugccugcgugaaugggucuuguuuuaccaucaugacagauggaccauccgacggccaggcuucauacaaaaucuuccggauugaaaaggguaaaaucgucaagaguguggagaugaacgcccccaauuaucauuacgaagagugcagcuguuacccugauuccucugagauuacuugcgugugccgcgacaacuggcacgggagcaauagaccaugggucucauuuaaccagaaucucgaauaucagauaggauacaucuguaguggcauuuucggcgauaacccgaggcccaaugacaaaaccggguccugcggaccuguuagcucuaacggugcgaauggcgugaagggguuuucauucaaguauggaaacggcguauggaucggucggacaaaaaguaucagcucccgcaagggguuugagaugauuugggauccaaacggcuggaccggaacggacaauaacuucucuauaaaacaagacaucgugggcauuaaugaauggucgggguacagcggauccuucguccagcaucccgagcugacuggucuggauuguauccgaccuugcuuuuggguggaacucauuagaggcaggccaaaggagaacacaaucuggaccucagggaguucuaugagcuucuguggaguuaauuccgacacugugggcuggucauggcccgauggugcagaguuaccguuuacaauagacaaauga

SEQ ID NO: 148640 - RNA, 1410 nt, Artificial Sequence; identical to SEQ ID NO: 148305
  derived and/or modified CDS sequence (opt3) from neuraminidase__InfluenzaA__AEB21340

SEQ ID NO: 148641 - RNA, 1410 nt, Artificial Sequence
  derived and/or modified CDS sequence (opt3) from neuraminidase__InfluenzaA__AEB21350
augaaccccaaucagaagaucauuaccauaggcagcgugugcaugacaaucgggauggccaaccugauucuccaaaucggaaauauuaucuccauauggaucucucacucaauucagcuugguaaccagagucagaucgagacuuguaaucaaagcgucauuacguacgaaaacaauaccuggguuaaccagacauaugugaauaucuccaacacuaauuucgcugcaggccagucuguagugucggucaaacuggccgggaacagcucauugugcccugugaguggaugggcgauauacuccaaggacaauucuauuagaaucggcagcaaaggugauguuuuugugauuagggagccauucaucuccuguucaccgagugaaugccggaccuuuuucuuaacacagggggcucugcuaaacgacaagcauagcaauggaaccaucaaagaucgcucucccuaucgaacucucauguccuguccuauuggcgaggucccaucacccuacaacagccguuuugaaaguguggccuggucugcauccgccugccacgacggcauaaacuggcugacaaucgggauuagcggaccugauaauggugcuguagcaguucuuaaguauaacggcaucauaaccgacacgauuaagucguggagaaauaacauccugaggacucaagagucugagugugccugcgugaauggguccuguuucaccaucaugacagauggaccaucagacggccaggcuaguuacaaaauuuuucggaucgaaaaggguaaaauugucaagagcguggagaugaacgcccccaauuaucauuacgaagagugcuccuguuacccugauucuagcgagauaacuugcgugugccgcgacaacuggcacgggucaaauagaccaugggucaguuucaaccagaauuuggaauaucagaucggauacauuuguuccggcaucuuuggcgauaacccgaggcccaaugacaaaaccgggagcugcggaccuguuucuucaaacggugcgaauggcgugaagggguucaguuuuaaguauggaaacggcguauggaucggucggacaaaaagcauuauaucccgcaagggguucgagaugaucugggauccaaacggcuggaccggaacggacaauaacuuuucuauuaaacaagacaucgugggcauuaaugaauggucgggguacagcggauccuucguccagcaucccgagcucacuggucuggauuguauccgaccuugcuucuggguggaacugauaagaggcaggccaaaggagaacacaaucuggaccucagggaguucuauuagcuuuuguggaguuaauuccgacacugugggcuggucauggcccgauggugcagagcucccguucacaaucgacaaauga

SEQ ID NO: 148642 - RNA, 1410 nt, Artificial Sequence; identical to SEQ ID NO: 148305
  derived and/or modified CDS sequence (opt3) from neuraminidase__InfluenzaA__AEB21360

SEQ ID NO: 148643 - RNA, 1410 nt, Artificial Sequence; identical to SEQ ID NO: 145653
  derived and/or modified CDS sequence (opt3) from neuraminidase__InfluenzaA__AEB40209

SEQ ID NO: 148644 - RNA, 1410 nt, Artificial Sequence; identical to SEQ ID NO: 144647
  derived and/or modified CDS sequence (opt3) from neuraminidase__InfluenzaA__AEB66898

SEQ ID NO: 148645 - RNA, 1413 nt, Artificial Sequence
  derived and/or modified CDS sequence (opt3) from neuraminidase__InfluenzaA__AEB71103
augaaccccaaucagaagaucauuaccauaggcagcgugucccuggggcucgucguuuucaacgugcuucugcacguagugucuaucauugucacagugguuguguugggaaaugacgguggcaacgggaucugcaauggaacugucgugaaagaguacaacgaaacgguaagaauugagaggguuauccaauggcauaauaccucaguggucgaauauauaccuuacuuaaacggcgguacauauacuaauaacaccgagagugugugugaugugaagggguuugccccauucagcaaagacaauggaguccggaucggcucccgcggccacguuuuugugauucgagaaccguucguaucuugcucgccccgugaguguagaacauuuuuccugacccaggggucacuacucaacgauaagcauagcaauggaacugugaaagacaggaguccuuuuaagacacugauguccgucgaggugggucagucuccaaacguuuaccaggcucgguucgaagcaguggccuggagcgcgaccgcuugccacgauggcaagaaauggaugacgaucggggucacuggacccgacuccaaggccguggcaguaguucauuauggcggugugccuaccgauauuaucaauucaugggccggggacauacuucgcacacaagagaguagcuguacuugcauucagggagauuguuacugggucaugaccgacggcccagcuaacagacaggcacaguauaggaucuacaaaucuaaccaaggcaagauuaucgggcagauggauaucaauuuuaacggaggucacauugaagagugcuccuguuaccccaaugacggcaaaguggagugcgucugucgggauaacuggacagggaccaaucgcccugugcugguuauaucaccagacuugagcuauaaggugggauaccucugcgccggccugccgagugacacgccccgaggugaagaugcucaguucucuggguccugcacuagcccuguaggcggacagggcuauggggucaagggauuugguuucagacaaggcaacgacguguggauggggaggacaaucucgcggaccucucguuccggauuugagguuauucgcgugaaaaauggcuggacucagacaucaaaggaacagaucagaaaacaagucgugguagauaaccugaauuggagugguuacagcggguccuucacccucccaauagaguuaucuggcaagagcugucuggugcccugcuucuggguugaaacgauuaggggaaaaccugaggagaagaccaucuggacaucaaguuccagcaucgucauguguggcguggacuaugaaguggccgauuggucuuggcacgacggggcgauucuuccauuugauaucgacaaaauguga

SEQ ID NO: 148646 - RNA, 1413 nt, Artificial Sequence; identical to SEQ ID NO: 146978
  derived and/or modified CDS sequence (opt3) from neuraminidase__InfluenzaA__AEB71899

SEQ ID NO: 148647 - RNA, 1410 nt, Artificial Sequence
  derived and/or modified CDS sequence (opt3) from neuraminidase__InfluenzaA__AEB71910
augaaccccaaucagaagaucauuaccauaggcagcgugugcaugacaaucgggauggccaaccugauucuccaaaucggaaauauuaucuccauauggaucucucacucaauucagcuugguaaccagaaucagaucgagacuuguaaccaaagugucauuacguacgaaaauaacaccuggguuaaucagacauaugugaacaucagcaauacuuacuucgcugcaggccaguccguagugucugucaaacuggccgggaacucgucauugugcccugugagcggaugggcgauauauaguaaggacaauuccauuagaaucggcucuaaaggugauguuuuugugauuagggagccauucaucagcuguuccccguuagaaugccggaccuuuuuccugacacagggggcucuacucaacgacaagcauucaaauggaaccaucaaagaucgcagucccuaccgaacucugaugagcuguccuauuggcgaggucccaucucccuauaacucccguuuugaaucaguggccuggagcgcaagugccugccacgacggcauaaacuggcuuacaaucgggauuucuggaccugauaauggugcuguagcaguucugaaguacaacggcaucauaaccgacacgauuaaguccuggagaaauaacaucuugaggacucaagagagcgagugugccugcgugaaugggucguguuucaccgucaugacagauggaccaucugacggccaggcuuccuauaaaaucuuucggauugaaaaggguaaaaucgugaagucaguggagaugaacgcccccaauuaccauuacgaagagugcaguuguuauccugauagcuccgagauuacuugcgucugccgcgacaacuggcacgggucuaauagaccauggguuagcuucaaccagaaucucgaauaccagauaggauauaucuguucaggcauuuuuggcgauaacccgaggcccaaugacaaaaccgggaguugcggaccuguguccagcaacggugcgaauggcguaaagggguucucuuuuaaguacggaaacggcguguggaucggucggacaaaaucaaucaguagccgcaacggguucgagaugauuugggauccaaauggcuggaccggaacggacaacaauuuuuccauaaagcaagacaucgucggcauuaacgaauggucuggguauucggguagcuucgugcagcaucccgagcugacuggacuggauuguauccgaccuugcuucuggguugaacucauuagaggcaggccaaaagagaauacaaucuggaccuccgggucaaguauaucuuuuuguggagugaacagcgacacugucggcugguccuggcccgauggugcagaguuaccguucacaaucgacaaguga

SEQ ID NO: 148648 - RNA, 1410 nt, Artificial Sequence; identical to SEQ ID NO: 144786
  derived and/or modified CDS sequence (opt3) from neuraminidase__InfluenzaA__AEB71919

SEQ ID NO: 148649 - RNA, 1410 nt, Artificial Sequence; identical to SEQ ID NO: 146532
  derived and/or modified CDS sequence (opt3) from neuraminidase__InfluenzaA__AEB71928

SEQ ID NO: 148650 - RNA, 1410 nt, Artificial Sequence
  derived and/or modified CDS sequence (opt3) from neuraminidase__InfluenzaA__AEB71939
augaaccccaaucagaagaucauuaccauaggcagcgugucccugacaaucucugccauuugcuucuuuaugcaaaucgcuauucucaucacuacggucacccuucacuucaaacaguacgaguuuaacucaccuccaaauaaccagguuaugcugugugaaccgacaauaaucgagagaaauauuacugaaaucguguauuugaccaacacaaccauugagaaggaaaucugccccaaauuagcagaguacaggaauuggaguaagccucagugugacauaacuggguucgccccauuuagcaaagauaacuccauucggcugucugcgggaggugacaucuggguaacacgcgagcccuaugugucgugcgauccugacaaguguuaccaauucgcucuaggccaggggaccacgcucaauaacguccauucaaauaacacugugcgagaucguaccccauauagaacacugcuuaugaaugaacugggaguucccuuucacuugggcacuaaacaggugugcauugccuggagcaguuccucuugucaugacgguaaggcauggcuccacgucugcaucaccggggaugacaagaacgccacagcuagcuucaucuacaauggaaggcugguggauuccguaguuucauggaguaaagagauucugcggacccaggaaagcgagugugugugcauaaacggcacguguacugucgugaugacagacggcucugcauccgggaaggccgauaccaaaauccucuuuauugaggaaggaaagaucgugcauacuucaacauuaagcgguagugcucaacacgucgaggaaugcucuugcuauccucgcuacccaggcguuagaugugugugcagggacaacuggaagggguccaaucggccgauaguagauauuaacaucaaagaccacagcaucgugucgucuuacgucuguuccggacuggugggcgacacccccaggaagaaugauucaaguagcuccucucauugccuugacccuaacaaugaggaaggugggcacggaguuaaaggcugggccuucgaugacggcaacgauguguggauggggcgaacgauuagcgagaagucaagauugggauaugagaccuuuaaagucaucgaagguuggaguaaucauaaguccaaacugcagauuaaccgccaggugauaguagaccggggcaaucguagcggguacucuggaaucuucucaguugagggcaagaguuguauuaaccgcugcuuuuauguggaacuaaucagagguaggaaggaggaaacagagguccucuggacuagcaauuccaucguggucuucugugggaccucuggcacauacggaacuggcucguggccagauggggcggaccugaaccuuaugcccauuuga

SEQ ID NO: 148651 - RNA, 1410 nt, Artificial Sequence
  derived and/or modified CDS sequence (opt3) from neuraminidase__InfluenzaA__AEB71950
augaaccccaaucagaagaucauuaccauaggcagcgugucccugacaaucucuacuauuugcuucuuuaugcagaucgccauucucaucacgaccgucacacuucacuucaaacaguacgaguuuaacucaccuccaaauaaccagguuaugcugugugaaccgacuauaaucgagagaaauauuaccgaaaucguguauuugacaaacaccacuauugagaaggaaaucugccccaaauuagcugaguacaggaauuggaguaagccucagugugacauaacaggguucgcaccauuuagcaaagauaacuccauucggcugucugccggaggugacaucuggguaacccgcgagcccuaugugucgugcgauccugacaaguguuaccaauucgcgcuaggccaggggacgacucucaauaacguccauucaaauaacaccgugcgagaucguacaccauauagaacucugcuuaugaaugaacugggaguucccuuucacuugggcaccaaacaggugugcauugcuuggagcaguuccucuugucaugacgguaaggccuggcuccacgucugcaucacaggggaugacaagaacgcaaccgccagcuucaucuacaauggaaggcugguggauuccguaguuucauggaguaaagagauucugcggacgcaggaaagcgagugugugugcauaaacggcacuuguacagucgugaugaccgacggcucugcuuccgggaaggcagauacuaaaauccucuuuauugaggaaggaaagaucgugcauacaucaaccuuaagcgguagugcccaacacgucgaggaaugcucuugcuauccucgcuacccaggcguuagaugugugugcagggacaacuggaagggguccaaucggccgauaguagauauuaacaucaaagaccacagcaucgugucgucuuacgucuguuccggacuggugggcgacacgccccgcaagaaugauucaaguagcuccucucauugccuugacccuaacaaugaggaaggugaucacgggguuaaaggaugggcuuucgacgauggcaacgacguguggaugggccgaaccauuagcgagaagucaagauugggguaugagacauuuaaagucaucgaaggauggaguaaucauaaguccaaacugcagauuaacaggcaagugauaguagaucgggguaaucguagcggcuacucugggaucuucucaguugagggaaagaguuguauuaaccgcugcuuuuauguggaacuaaucagaggcaggaaggaggaaacugagguccucuggaccagcaauuccaucguggucuucugugguacaucugggacuuacggcaccggaucguggccagacggcgccgaucugaaccuuaugcccauuuga

SEQ ID NO: 148652 - RNA, 1413 nt, Artificial Sequence; identical to SEQ ID NO: 147985
  derived and/or modified CDS sequence (opt3) from neuraminidase__InfluenzaA__AEB71961

SEQ ID NO: 148653 - RNA, 1410 nt, Artificial Sequence
  derived and/or modified CDS sequence (opt3) from neuraminidase__InfluenzaA__AEB71972
augaaccccaaucagaagaucauuaccauaggcagcgugucccugacaaucucuacuauuugcuucuuuaugcaaaucgccauucucaucacgaccgucacacuucacuucaaacaguacgaguuuaacucaccuccaaauaaccagguuaugcugugugaaccgacuauaaucgagagaaauauuaccgaaaucguguauuugacaaacaccacuauuguaaaggagaucugccccaaauuagcugaauacaggaauuggaguaagccucagugugacauaacaggguucgcaccauuuagcaaagauaacuccauucggcugucugccggaggugacaucugggugacccgcgagcccuaugucucgugcgauccugacaaguguuaccaauucgcgcuaggccaggggacgacucucaauaacgugcauucaaauaacaccguucgagaucguacaccauauagaacucugcuuaugaaugagcugggagugcccuuucacuugggcaccaagcaggucugcauugcuuggagcaguuccucuugucaugacgguaaagccuggcuccacgugugcaucacaggggaugacaagaacgcaaccgccagcuucaucuacaauggaaggcugguagauuccguugugucauggaguaaagaaauucugcggacgcaggagagcgaaugugucugcauaaacggcacuuguacaguggugaugaccgacggcucugcuuccgggaaggcagauacuaaaauccucuuuauugaggagggaaagaucguccauacaucaaccuuaagcgguagugcccaacacguugaagagugcucuugcuauccucgcuacccaggcgugagauguguaugcagggacaacuggaagggguccaaucggccgauaguggauauuaacaucaaagaccacagcaucgucucgucuuacguguguuccggacugguuggcgacacgccccgcaagaaugauucaaguagcuccucucauugccuugacccuaacaaugaagagggugggcacggagugaaaggcugggcuuucgaugacggcaacgaugucuggauggggcgaaccauuagcgaaaagucaagauugggauaugagacauuuaaagugaucgaggguuggaguaauccaaaguccaaacugcagauuaacaggcagguaauaguugaccggggcaaucguagcggguacucuggaaucuucucaguggaaggcaagaguuguauuaaccgcugcuuuuaugucgagcuaaucagagguaggaaggaagagacugaagugcucuggaccagcaauuccaucgucguguucugugggacaucuggcacuuacggaaccggcucguggcccgauggggccgacauuaaccugaugccuauauga

SEQ ID NO: 148654 - RNA, 1410 nt, Artificial Sequence
  derived and/or modified CDS sequence (opt3) from neuraminidase__InfluenzaA__AEB71983
augaaccccaaucagaagaucauuaccauaggcagcgugucccugacaaucucuacuauuugcuucuuuaugcaaaucgccauucucaucacgaccgucacacuucacuucaaacaguacgaguuuaacucaccuccaaauaaccagguuaugcugugugaaccgacuauaaucgagagaaauauuaccgaaaucguguauuugacaaacaccacuauugagaaggaaaucugccccaaauuagcugaguacaggaauuggaguaagccucagugugacauaacaggguucgcaccauuuagcaaagauaacuccauucggcugucugccggaggugacaucuggguaacccgcgagcccuaugugucgugcgauccugacaaguguuaccaauucgcgcuaggccaggggacgacucucaauaacguccauucaaauaacaccgugcgagaucguacaccauauagaacucugcuuaugaaugaacugggaguucccuuucacuugggcaccaaacaggugugcauugcuuggagcaguuccucuugucaugacgguaaggccuggcuccacgucugcaucacaggggaugacaagaacgcaaccgccagcuucaucuacaauggaaggcugguggauuccguaguuucauggaguaaagagauucugcggacgcaggaaagcgagugugugugcauaaacggcacuuguacagucgugaugaccgacggcucugcuuccgggaaggcagauacuaaaauccucuuuauugaggaaggaaagaucgugcauacaucaaccuuaagcgguagugcccaacacgucgaggaaugcucuugcuauccucgcuacccaggcguuagaugugugugcagggacaacuggaagggguccaaucggccgauaguagauauuaacaugaaagaccacagcaucgugucgucuuacgucuguuccggacuggugggcgacacgccccgccgaaaugauucaaguagcuccucucauugccuugacccuaacaaugaggaaggugggcacggaguuaagggcugggcuuucgaugacggcaacgauguguggauggggagaaccaucagcgagaaaucaagguugggauaugagacauuuaaggucauugaagguuggaguaauccaaaauccaagcugcagaucaaccgucaggugauuguagaccggggcaaucgcagcggguacucuggaauauucucaguugagggcaaaaguuguaucaacagaugcuuuuauguggaacuaauuaggggucggaaggaggaaacugagguccucuggaccagcaauuccaucguggucuucugugggacaucuggcacuuacggaaccggcucguggcccgauggggccgacaucaaccugaugccuauuuga

SEQ ID NO: 148655 - RNA, 1413 nt, Artificial Sequence
  derived and/or modified CDS sequence (opt3) from neuraminidase__InfluenzaA__AEB71995
augaaccccaaucagaagaucauuaccauaggcagcaucuccauugccaucgggauuaucucucugaugcuccaaauaggaaacaucauuucaaucugggcuagucacagcauucagacagguucccagaauaacacuggcaucugcaaucagagaauaauuacguacgagaacucuaccugggugaaucauacauauaucaacauuaauaacacuaaugugguugcaggggaagacaaaaccucggugacacuugccggaaacucaagccuguguaguaucuccggcugggcgaucuacaccaaggauaauucuauuaggauagguagcaaaggggacguauucgugauccgggagccuuuuauuuccugcucacacuuggaaugucgcacuuucuuuuuaacacaaggagcucugcuaaacgauaagcauaguaauggcaccgucaaagaccgaagcccauaucgugcccucaugucuugcccgcugggcgaggcacccuccccuuacaacucaaaguucgaaagcguggccuggagugcuucugcaugucacgaugggaugggauggcuuacgaucgguauauccggcccagacaacggggccguugcugugcugaaguauaauggaauuaucacuggcaccaucaaaagcuggaagaaacagauuuugagaacacaggagucggagugcgucuguaugaacgguucuugcuuuacuaucaugaccgaugggcccuccaauaaggccgcgucauacaaaauuuucaagauagaaaagggaaaagugacaaagaguaucgagcucaacgcaccuaauuuuuauuacgaagaguguagcugcuacccagacaccggcauuguaauguguguuugcagggauaacuggcauggcuccaaucggcccugggugucuuucaaccagaaucuggacuaucaaaucggguacaucugcagcggagucuuuggugauaacccucgcccagaggacggcgaagggucauguaauccggugacggugaacggagccgauggcgucaaagguuucaguuauaaguacgggaauggcguuuggauuggaagaacuaaauccaacaggcugcggaagggcuuugagaugauaugggaccccaauggguggacaaacaccgacagcgauuucucugugaaacaggacguaguggcuaucacugauuggucaggauauagugguagcuuuguccagcacccugaacucacaggcuuagagugcauucgcccauguuucuggguggaacugguucgagggcuucccagagagaacaccacgaucuggaccuccggaucuucgauuagcuucugcggcgucaauuccgacacagccaacuggucauggccugauggugcagaguugccauuuacuaucgacaaguga

SEQ ID NO: 148656 - RNA, 1413 nt, Artificial Sequence; identical to SEQ ID NO: 148253
  derived and/or modified CDS sequence (opt3) from neuraminidase__InfluenzaA__AEC13316

SEQ ID NO: 148657 - RNA, 1410 nt, Artificial Sequence; identical to SEQ ID NO: 144786
  derived and/or modified CDS sequence (opt3) from neuraminidase__InfluenzaA__AEC53262

SEQ ID NO: 148658 - RNA, 1410 nt, Artificial Sequence; identical to SEQ ID NO: 144786
  derived and/or modified CDS sequence (opt3) from neuraminidase__InfluenzaA__AEC53272

SEQ ID NO: 148659 - RNA, 1410 nt, Artificial Sequence; identical to SEQ ID NO: 144786
  derived and/or modified CDS sequence (opt3) from neuraminidase__InfluenzaA__AEC53282

SEQ ID NO: 148660 - RNA, 1410 nt, Artificial Sequence; identical to SEQ ID NO: 144786
  derived and/or modified CDS sequence (opt3) from neuraminidase__InfluenzaA__AEC53292

SEQ ID NO: 148661 - RNA, 1410 nt, Artificial Sequence
  derived and/or modified CDS sequence (opt3) from neuraminidase__InfluenzaA__AEC53302
augaaccccaaucagaagaucauuaccauaggcagcgugugcaugacaaucgggauggccaaccugauucuccaaaucggaaauauuaucuccauauggaucucucacucaauucagcuugguaaccagaaucagaucgagacuuguaaccaaagugucauuacguacgaaaauaacaccuggguuaaucagacauaugugaacaucagcaauacuaacuucgcugcaggccaguccguagugucugucaaacuggccggaaauucgucauugugcccugugagcggaugggcgauauacaguaaggacaacuccauuagaaucggcucuaaaggugauguuuuugugauuagggagccauucaucagcuguuccccguuagaaugccggaccuuuuuccugacacagggggcucuacucaaugacaagcauucaaacggaaccaucaaagaucgcagucccuaucgaacucugaugagcuguccuauuggcgaggucccaucucccuacaacucccguuuugaaucaguggccuggagcgcaagugccugccacgacggcauaaauuggcuuacaaucgggauuucuggaccugauaacggugcuguagcaguucugaaguauaauggcaucauaaccgacauuaucaaguccuggagaaacaauaucuugaggacgcaagagagcgagugugccugcgugaacgggucguguuucacugucaugaccgauggaccaucugacggccaggcuuccuacaaaauuuuucggaucgaaaaggguaaaauugugaagucaguggagaugaaugcccccaacuaucauuacgaagagugcaguuguuacccugauagcuccgagauaacaugcgucugccgcgacaauuggcacgggucuaacagaccauggguuagcuucaaucagaaccucgaauaucagaucggauacauuuguucaggcaucuuuggcgauaauccgaggcccaacgacaaaacugggaguugcggaccuguguccagcaauggugcgaacggcguaaagggguucucuuuuaaguauggaaacggcguguggaucggucggaccaaaucaauuaguagccgcaauggguucgagaugauaugggauccaaacggcuggacaggaaccgacaauaacuuuuccaucaagcaagacauugucggcaucaaugaauggucuggguacucggggagcuucgugcagcaucccgagcugacgggucuggauuguauucgaccuugcuucuggguugaacucaucagaggcaggccaaaagagaacacuauauggacauccgggucaaguaucucuuuuuguggagugaauagcgacaccgucggcugguccuggcccgauggugcagaguuaccguucacuauugacaaguga

SEQ ID NO: 148662 - RNA, 1410 nt, Artificial Sequence; identical to SEQ ID NO: 144786
  derived and/or modified CDS sequence (opt3) from neuraminidase__InfluenzaA__AEC53350

SEQ ID NO: 148663 - RNA, 1410 nt, Artificial Sequence; identical to SEQ ID NO: 145494
  derived and/or modified CDS sequence (opt3) from neuraminidase__InfluenzaA__AEC53407

SEQ ID NO: 148664 - RNA, 1410 nt, Artificial Sequence; identical to SEQ ID NO: 144786
  derived and/or modified CDS sequence (opt3) from neuraminidase__InfluenzaA__AEC53427

SEQ ID NO: 148665 - RNA, 1410 nt, Artificial Sequence; identical to SEQ ID NO: 145612
  derived and/or modified CDS sequence (opt3) from neuraminidase__InfluenzaA__AED99967

SEQ ID NO: 148666 - RNA, 1410 nt, Artificial Sequence; identical to SEQ ID NO: 144776
  derived and/or modified CDS sequence (opt3) from neuraminidase__InfluenzaA__AEE27161

SEQ ID NO: 148667 - RNA, 1410 nt, Artificial Sequence; identical to SEQ ID NO: 144786
  derived and/or modified CDS sequence (opt3) from neuraminidase__InfluenzaA__AEE27170

SEQ ID NO: 148668 - RNA, 1410 nt, Artificial Sequence; identical to SEQ ID NO: 144776
  derived and/or modified CDS sequence (opt3) from neuraminidase__InfluenzaA__AEE27180

SEQ ID NO: 148669 - RNA, 1410 nt, Artificial Sequence
  derived and/or modified CDS sequence (opt3) from neuraminidase__InfluenzaA__AEE27190
augaaccccaaucagaagaucauuaccauaggcagcgugugcaugacaaucgggauggccaaccugauucuccaaaucggaaauauuaucuccauauggaucucucacucaauucagcuugguaaccagaaucagaucgagacuuguaaccaaagugucauuacguacgaaaauaacaccuggguuaaucagacauaugugaacaucagcaauacuaacuucgcugcaggccaguccguagugucugucaaacuggccggaaauucgucauugugcccugugagcggaugggcgauauacaguaaggacaacuccguuagaauuggcucuaaaggugauguguuugucaucagggagccauucauuagcuguuccccguuagaaugccggaccuuuuuccugacacagggggcucuacucaaugacaagcauucaaacggaaccaucaaagaucgcagucccuaucgaacucugaugagcuguccuaucggcgaggugccaucucccuacaacucccguuuugaaucaguagccuggagcgcaagugccugccacgacggcauuaauuggcuuacaauagggaucucuggaccugauaacggugcuguugcagugcugaaguauaauggcgucauuaccgacacgaucaaguccuggagaaacaauauauugaggacucaagagagcgagugugccugcgugaacgggucguguuucaccgugaugacagauggaccaucuaauggccaggcuuccuacaaaauuuuuaagaucgaaaaagguaagaucgucaaaucaguugagaugaacgcccccaauuaucauuacgaagagugcaguuguuacccugacagcuccgagauuacuugcgugugccgggauaacuggcacgggucuaaucgcccaugggugagcuucaaccagaaucucgaauaucagaucggauacauuuguucaggcauauuuggcgacaacccgagacccaaugauaagaccgggaguugcggaccuguauccagcaacggugcgaacggcgucaagggguucucuuuuaaauauggaaauggcguguggaucgguaggacaaagucaauuaguagccggaacggguucgagaugaucugggacccaaauggcuggaccggaacggauaacaauuuuuccaucaaacaagacauuguuggcauaaacgaauggucuggguacucggggagcuucgugcagcaucccgagcugacuggucuggacuguauccgcccuugcuucugggucgaacucauucgaggcagaccaaaggagaauacaaucuggaccuccgggucaaguauuucuuuuuguggagugaacagcgauacuguaggcugguccuggcccgacggugcagaguuaccguucacaaucgauaaauga

SEQ ID NO: 148670 - RNA, 1410 nt, Artificial Sequence; identical to SEQ ID NO: 146009
  derived and/or modified CDS sequence (opt3) from neuraminidase__InfluenzaA__AEE27200

SEQ ID NO: 148671 - RNA, 1410 nt, Artificial Sequence; identical to SEQ ID NO: 147845
  derived and/or modified CDS sequence (opt3) from neuraminidase__InfluenzaA__AEG64755

SEQ ID NO: 148672 - RNA, 1362 nt, Artificial Sequence
  derived and/or modified CDS sequence (opt3) from neuraminidase__InfluenzaA__AEG64765
augaaccccaaucagaagaucauuaccauaggcagcaucugcaugguggucgggauuaucucccugauucuccaaaucggaaacauaaucucuauuuggaucucacacaguauucagacagguaaucagaaccauacuggcaucuguaaucaggggauaauuacguacaacguuguggccggacaagacagcaccuccguaauccuuacaggcaauucuucgcugugcccuauuagagguugggcuauccacucaaaagauaacgggaucaggauuggaagcaagggcgacguguucgucauacgggagccauuuaucaguuguucccauuuggaaugccgcacuuucuuuuuaacccagggcgcacugcuaaaugauaaacacucuaacgggacagugaaggaccgaagcccguaucgugcccucauguccugucccguuggagaggcgccuucaccauacaauaguagauucgaaagcguggcuuggucugccuccgcaugccaugaugguaugggcuggcugaccauugggaucucaggacccgacaacggcgccgucgcugugcuuaaauauaaugguauaauuacugagacaaucaagagcuggaggaagaaaauccugcggacccaggaaagugaguguacgugcguaaacgggucuuguuuuacuauuaugaccgauggaccuuccgacggcuuggcaagcuacaagaucuucaaaauugagaagggcaaaguuacaaagucgauagaacucaaugccccaaacucucacuaugaggaaugcuccuguuaccccgauacugggaaggugaugugcgucugccgcgacaacuggcacggaucaaauagaccuugggugaguuuugaucagaaccuggacuaucaaaucgguuacauuuguagcggcguguucggggauaauccaaggccgaaagacggaaccggcuccugcggucccgucucugcugacggggccaacggcguuaagggauuuagcuaccgguauggcaaugggguguggaucggacgcacaaaaucagauaguucccgacaugguuucgagaugaucugggacccuaacggcuggaccgagacggauagcagauuuucuguaaggcaggacguggucgcgaugacugaucggucaggguacaguggcagcuucgugcagcacccagaacugacaggacucgacuguaugcgucccugcuuuuggguugaguuaauucgcgguagaccugaagagaagaccauauggacuuccgggucuaucauuucguucuguggcgugaauagcgauacagucgacugguccuggccagauggagcagaacugcccuucaccaucgacaaauga

SEQ ID NO: 148673 - RNA, 1410 nt, Artificial Sequence
  derived and/or modified CDS sequence (opt3) from neuraminidase__InfluenzaA__AEG64787
augaaccccaaucagaagaucauuaccauaggcagcgugugcaugacaaucgggauggccaaccugauucuccaaaucggaaauauuaucuccauauggaucucucacucaauucagcuugguaaccagaaucagaucgagacuuguaaccaaagugucauuacguacgaaaauaacaccuggguuaaucagacauaugugaacaucagcaauacuaacuucgcugcaggccaguccguagugucugucaaacuggccggaaauucgucauugugcccugugagcggaugggcgauauacaguaaggacaacuccauuagaaucggcucuaaaggugauguuuuugugauuagggagccauucaucagcuguuccccguuagaaugccggaccuuuuuccugacacagggggcucuacucaaugacaagcauucaaacggaaccaucaaagaucgcagucccuaucgaacucugaugagcuguccuauuggcgaggucccaucucccuacaacucccguuuugaaucaguggccuggagcgcaagugccugccacgacggcauaaauuggcuuacaaucgggauuucuggaccugauaacggugcuguagcaguucugaaguauaauggcaucauaaccgacacgauuaaguccuggagaaacaauagguugcggacucaagagagcgagugugccugcgugaacgggucguguuucaccgucaugacagauggaccaucugacggccaggcuuccuacaaaaucuuucgcaucgaaaaggguaaaauugugaagucaguggagaugaaugcccccaacuaucauuacgaagagugcaguuguuacccugauagcuccgagaucacuugcgucugcagagacaauuggcacgggucuaacaggccauggguuagcuucaaucagaaccucgaauaucagauuggauacauauguucaggcaucuuuggcgauaauccgcggcccaacgacaaaaccgggaguugcggaccuguguccagcaauggugcgaacggcguaaagggguucucuuuuaaguauggaaacggcguguggauuggucgcacaaaaucaaucaguagccgaaauggguucgagaugaucugggauccaaacggcuggaccggaacggacaaugacuuuuccauuaagcaagauauagucggcaucaacgaauggucuggguacucggggagcuucgugcagcaucccgagcugacuggucuggacuguauuagaccuugcuucuggguugaacucaucaggggccggccaaaagagaauacaauuuggaccuccgggucaaguaucucuuuuuguggagugaacagcgauacugucggcugguccuggcccgacggugcagaguuaccguucacaauagauaaguga

SEQ ID NO: 148674 - RNA, 1410 nt, Artificial Sequence
  derived and/or modified CDS sequence (opt3) from neuraminidase__InfluenzaA__AEG64837
augaaccccaaucagaagaucauuaccauaggcagcgugucccugacaaucucuacuauuugcuucuuuaugcagaucgccauucucaucacgaccgucacacuucacuucaaacaguacgaguuuaacucaccuccaaauaaccagguuaugcugugugaaccgacuauaaucgagagaaauauuaccgaaaucguguauuugacaaacaccacuauugagaaggaaaucugccccaaauuagcugaguacaggaauuggaguaagccucagugugacauaacaggguucgcaccauuuagcaaagauaacuccauucggcugucugccggaggugacaucuggguaacccgcgagcccuaugugucgugcgauccugacaaguguuaccaauucgcgcuaggccaggggacgacucucaauaacguccauucaaauaacaccgugcgagaucguacaccauauagaacucugcuuaugaaugaacugggaguucccuuucacuugggcaccaaacaggugugcauugcuuggagcaguuccucuugucaugacgguaaggccuggcuccacgucugcaucacaggggaugacaagaacgcaaccgccagccugaucuacaauggaaggcugguggauuccguaguuucauggaguaaagagauucuccggacgcaggaaagcgagugugugugcauaaacggcacuuguacagucgugaugaccgacggcucugcuuccgggaaggcagauacuaaaaucuuauucauugaggaaggaaagaucgugcauacaucaacccugagcgguagugcccaacacgucgaggaaugcucuugcuauccucgcuacccaggcguuagaugugugugcagggacaacuggaagggguccaaucggccgauaguagauauuaacaucaaagaccacagcaucgugucgucuuacgucuguuccggacuugugggcgacacgccccgcaagaaugauucaaguagcuccucucauugcuuggacccuaacaaugaggaaggugggcacggaguuaaaggcugggcuuuugaugacggcaacgauguguggauggggcgaaccauuaaugagacaagcagacugggauaugagacuuucaaggucaucgaagguuggucaaacccaaaaaguaagcuacagauuaauaggcaagugauaguagaccggggcaaccguuccggguacagcggaaucuuuucuguugagggcaaaucauguauuaaucgcugcuucuauguggaacucaucagagguaggaaggaggaaaccgagguccuguggacaaguaacagcaucguggucuuuugugggacuuccggcaccuacggaacaggcucuuggcccgauggggccgaccuuaaucugaugccuauuuga

SEQ ID NO: 148675 - RNA, 1410 nt, Artificial Sequence
  derived and/or modified CDS sequence (opt3) from neuraminidase__InfluenzaA__AEG64848
augaaccccaaucagaagaucauuaccauaggcagcgugucccugacaaucucuacuauuugcuucuuuaugcaaaucgccauucucaucacgaccgucacacuucacuucaaacaguacgaguuuuauucaccuccaaacaaucagguuaugcugugugaaccgacuauaaucgagagaaacauuaccgaaaucguguacuugacaaauaccacuauugagaaggaaaucugccccaaauuagcugaguauaggaacuggcugaagccucagugugacauaacaggguucgcaccauuuaguaaagauaauagcauucggcuauccgccggaggugacaucuggguaacccgcgagcccuacgugucuugcgauccugacaaguguuaucaauucgcgcucggccaggggacgacucugaacaauguccauucgaacaauaccgugcgagaucguacaccauacagaacucuucugaugaacgaauugggaguucccuuucaccucggcaccaaacaggugugcauugcuuggucaagcaguuccugucaugacgguaaggccuggcugcacgucugcaucacaggggaugacaagaaugcaaccgccucuuucaucuauaacggaaggcugguggauagcguaguuuccuggucaaaagagauucuccggacgcaggaaagugagugugugugcauaaauggcacuuguacagucgugaugaccgacggcagcgcuucugggaaggcagauacuaaaaucuuauuuauugaggaaggaaagaucgugcauacauccacccugucagguagcgcccaacacgucgaggaaugcaguugcuacccucgcuacccaggcguuagaugugugugcagggacaacuggaaggggucuaaccggccgauaguagauauuaauaucaaagaccacuccaucgugagcucguaugucuguucuggacuugugggcgacacgccccgcaagaacgauuccucaaguagcucccauugcuuggacccuaauaacgaggaaggugggcacggaguuaaaggcugggcuuucgaugacggcaaugauguguggauggggcgaaccauuaacgagacaucuagacugggauacgagacuuuuaaggucaucgaagguuggagcaauccaaaaucaaagcuacagauuaacaaacaggugauaguagacaggggcaaucggaguggguauuccggaaucuucagcguugagggcaagucuuguauuaaccguugcuuuuacguggaacucauccgcgguagaaaggaggaaaccgagguccuguggacaucaaauaguaucguggucuucugugggacuagcggcaccuauggaacaggcuccuggcccgauggggccgaccuuaaccugaugccuauuuga

SEQ ID NO: 148676 - RNA, 1410 nt, Artificial Sequence; identical to SEQ ID NO: 142281
  derived and/or modified CDS sequence (opt3) from neuraminidase__InfluenzaA__AEG64859

SEQ ID NO: 148677 - RNA, 1410 nt, Artificial Sequence; identical to SEQ ID NO: 142109
  derived and/or modified CDS sequence (opt3) from neuraminidase__InfluenzaA__AEG64870

SEQ ID NO: 148678 - RNA, 1410 nt, Artificial Sequence; identical to SEQ ID NO: 142301
  derived and/or modified CDS sequence (opt3) from neuraminidase__InfluenzaA__AEG64881

SEQ ID NO: 148679 - RNA, 1410 nt, Artificial Sequence; identical to SEQ ID NO: 142109
  derived and/or modified CDS sequence (opt3) from neuraminidase__InfluenzaA__AEG64892

SEQ ID NO: 148680 - RNA, 1410 nt, Artificial Sequence; identical to SEQ ID NO: 142185
  derived and/or modified CDS sequence (opt3) from neuraminidase__InfluenzaA__AEG64914

SEQ ID NO: 148681 - RNA, 1410 nt, Artificial Sequence; identical to SEQ ID NO: 142185
  derived and/or modified CDS sequence (opt3) from neuraminidase__InfluenzaA__AEG64925

SEQ ID NO: 148682 - RNA, 1410 nt, Artificial Sequence
  derived and/or modified CDS sequence (opt3) from neuraminidase__InfluenzaA__AEG64936
augaaccccaaucagaagaucauuaccauaggcagcgugucccugacaaucgccacuauuugcuuccucaugcaaaucgcuauucuugucacgaccguuacacugcacuuuaaacagcaugaguguaacucuccuccaaauaaccaggugauguugugcgaaccgacuaucauagagagaaauaucaccgaaauuguauacuuaacaaacaccacuaucgagaaggaaauuugucccaaacuggcagaguauaggaauuggucaaagccucagugcaacaucacaggguucgccccauuuaguaaagacaauagcauacggcuauccgcgggaggugauauuugggugacccgcgagcccuacgucucuugugacccugauaagugcuaucaauucgcucucggccaggggacgacucugaacaauggacacucgaacgacaccgugcaugaucgaacaccauaccguacucuucugaugaaugaauugggcguucccuuucaccucgguaccagacagguguguaucgccuggucaagcaguuccugccaugacgggaaggcauggcugcacgucugugugacaggagaggauaaaaacgccaccgcuucuuucauuuauaauggcaggcugguagacagcaucggcuccuggucaaagaaaauccuccggacgcaggaaagugagugcguuuguauuaacgggacuugcacaguggucaugaccgauggaagcgcaucugguaaggccgacacuaaaauauuauuuaucgaggaaggcaagauugugcacaucuccacacugucagggagcgcucaacauguggaggaaugcaguuguuacccucgcuauccaggagucagaugcguuuguagggauaacuggaagggcucuaaucggccgauaguggacauuaacguaaaagauuacuccaucgugagcucguacgucugcucuggucuugugggggacacccccaggaagaaugacuccucaaguagcucccacuguuuggauccuaacaaugaggaaggaggccauggcguuaaagggugggccuucgacgauggaaacgacguguggaugggucgaacgaucucugagaagcugagaagcggcuaugagaccuuuaaagucauugaaggguggucaaagccaaauaguaaacuacagaucaaccgccaggugauuguagagcggggaaaucguuccggcuacagcgguauauucucuguugaagggaagucaugcaucaaccgcuguuuuuauguggagcucauuagaggcaggaaggaagagacagaggucugguggaccaguaauagcaucguggucuucugcggaacuuccggcacauacgggacuggaucuuggcccgauggugcggacaucaaccugaugccuauuuga

SEQ ID NO: 148683 - RNA, 1410 nt, Artificial Sequence; identical to SEQ ID NO: 142198
  derived and/or modified CDS sequence (opt3) from neuraminidase__InfluenzaA__AEG64947

SEQ ID NO: 148684 - RNA, 1410 nt, Artificial Sequence; identical to SEQ ID NO: 142185
  derived and/or modified CDS sequence (opt3) from neuraminidase__InfluenzaA__AEG64958

SEQ ID NO: 148685 - RNA, 1410 nt, Artificial Sequence; identical to SEQ ID NO: 142185
  derived and/or modified CDS sequence (opt3) from neuraminidase__InfluenzaA__AEG64969

SEQ ID NO: 148686 - RNA, 1410 nt, Artificial Sequence; identical to SEQ ID NO: 142185
  derived and/or modified CDS sequence (opt3) from neuraminidase__InfluenzaA__AEG64980

SEQ ID NO: 148687 - RNA, 1410 nt, Artificial Sequence
  derived and/or modified CDS sequence (opt3) from neuraminidase__InfluenzaA__AEG64991
augaaccccaaucagaagaucauuaccauaggcagcgugucccugacaaucucuacuauuugcuucuuuaugcaaaucgccauucucaucacgaccgucacacuucacuucaaacaguacgagucaaacaguccuccaaauaaccagguuaugcugugugaaccgacuauaaucgagagaaauauuaccgaaaucguguauuugacaaacaccacuauugagaaggaaaucugccccaaauuagcugaguacaggaauuggagcaagccucaguguaacauaacaggguuugcaccauucuccaaagacaauucuauucggcugucggccggaggugauaucuggguaacccgcgagcccuaugugucaugcgacccugauaaguguuaccaauuugcgcuaggccaggggacgacucucaacaauguccauagcaacgacaccgugcacgaucgaacaccauaucguacucugcuuaugaaugaacugggaguucccuuccauuugggcaccaaacaggugugcauugcuuggaguuccucuagcugucacgacgguaaggccuggcuccaugucugcgugacaggggaugacaagaacgcaaccgccuccuuuaucuacaauggaagacugguagauucaaucguuaguuggagcaaagagauucugaggacgcaggaaucugagugugugugcauaaacggcacuuguacagucgugaugaccgacggcuccgcuucagggaaggcagauacuaaaauccucuucauugaggaaggaaagaucgugcacacaagcaccuuaagugguucugcccaacacgucgaggaaugcuccugcuauccucgguacccaggcguucgcugugugugcagagacaacuggaaggggagcaauaggccgauaguagauauuaacaucaaagacuacucgaucgugucuuccuaugucuguucaggacuggugggcgacacgccccggaagaaugauaguagcuccucuagccauugccuugacccuaacaaugaggaaggugggcacggaguuaaaggcugggcuuuugaugacggcaacgauguguggauggggcgcaccauuucagagaaguugcgaaguggauacgagacauucaaagucaucgaagguugguccaauccaaacagcaagcugcagacuaauagacaggugauuguagacaggggcaaccggucuggguauucaggaauauuuaguguugagggcaaaagcuguaucaaucguugcuucuacguggaacuaauucgcgguagaaaggaggaaaccgagguccucuggacauccaacucuaucguggucuuuugugggacuucgggcaccuauggaacaggcagcuggcccgauggggccgacaucaaucugaugccuauuuga

SEQ ID NO: 148688 - RNA, 1410 nt, Artificial Sequence; identical to SEQ ID NO: 142375
  derived and/or modified CDS sequence (opt3) from neuraminidase__InfluenzaA__AEG65002

SEQ ID NO: 148689 - RNA, 1410 nt, Artificial Sequence
  derived and/or modified CDS sequence (opt3) from neuraminidase__InfluenzaA__AEG65013
augaaccccaaucagaagaucauuaccauaggcagcgugucccugacaaucucuacuauuugcuucuuuaugcaaaucgccauucucaucacgaccgucacacuucacuucaaacaguacgaguuuaacucaccuccaaauaaccagguuaugcugugugaaccgacuauaaucgagagaaauauuaccgaaaucguguauuugacaaacaccacuauugagaaggaaaucugccccaaauuagcugaguacaggaauuggaguaagccucagugugacauaacaggguucgcaccauuuagcaaagauaacuccauucggcugucugccggaggugacaucuggguaacccgcgagcccuaugugucgugcgauccugacaaguguuaccaauucgcgcuaggccaggggacgacucucaauaacguccauucaaaugauaccgugcacgaccgaacaccauaucguacucugcuuaugaacgaacugggaguucccuuucauuugggcaccaaacaggugugcauugcuuggagcaguuccucuugucacgaugguaaggccuggcuccaugucugcgugacaggggacgauaagaaugcaaccgccagcuucaucuacaacggaagacugguagacuccaucguuucauggaguaaagauauucugaggacgcaggagagcgaaugugugugcauaaauggcacuuguacagucgugaugaccgacggcucugcuuccgggaaggcagauacuaaaauccucuuuauugaggagggaaagaucgugcacacaucaaccuuaagcgguagugcccaacacgucgaagagugcucuugcuauccucgguacccaggcguucgcugugugugcagagacaacuggaagggguccaacaggccgauaguagacauuaauaucaaagauuacagcaucgugucgucuuaugucuguuccggacuggugggcgacacgccccggaagaacgauucaaguagcuccucucauugccuugacccuaauaacgaagagggugggcacggaguuaaaggcugggcuuucgaugacggcaaugauguguggauggggcgcaccauuagcgaaaaguugcgacugggauacgagacauuuaaagucaucgaggguuggucaaacccaaauaguaagcuacagacuaacagacaggugauuguagaaaggggcaaucgguccggguauagcggaauauucucuguugagggcaaaucauguaucaaccguugcuuuuacguggaacucauucgcgguagaaaggaggaaaccgagguccuguggacaaguaauagcaucguggucuucugugggacuuccggcaccuauggaacaggcucuuggcccgacggggccgauaucaaccuuaugccuauuuga

SEQ ID NO: 148690 - RNA, 1410 nt, Artificial Sequence
  derived and/or modified CDS sequence (opt3) from neuraminidase__InfluenzaA__AEG65024
augaaccccaaucagaagaucauuaccauaggcagcgugucccugacaaucucuacuauuugcuucuuuaugcaaaucgccauucucaucacgaccgucacacuucacuucaaacaguacgaguuuaacucaccuccaaauaaccauguuaugcugugugaaccgacuauaaucgagagaaauauuaccgaaaucguguauuugacaaacaccacuauugagaaggaaaucugccccaaauuagcugaguacaggaauuggaguaagccucagugugacauaacaggguucgcaccauuuagcaaagauaacuccauucggcugucugccggaggugacaucuggguaacccgcgagcccuaugugucgugcgauccugacaaguguuaccaguucgcgcuaggccaagggacgacucucaauaacguccacucaaaugauaccgugcaugaccgaacaccauaucguacucugcuuaugaacgaacugggaguucccuuucacuugggcaccaaacaggugugcauugcuuggagcaguuccucuugucaugaugguaaggccuggcuccacgucugcgugacaggggacgauaagaaugcaaccgccagcuucaucuacaacggaagacugguagacuccaucguuucauggaguaaagagauucugaggacgcaggaaagcgagugugugugcauaaauggcacuuguacagucgugaugaccgauggcucugcuuccgggaaggcagacacuaaaauccucuuuauugaggaaggaaagaucgugcacacaucaaccuuaagcgguagugcccagcaugucgaggaaugcucuugcuauccucgguacccaggcguucgcugugugugcagagauaacuggaagggguccaacaggccgauaguagacauuaauaucaaagacuacagcaucgugucgucuuaugucuguuccggacuggugggcgauacgccccggaagaacgacucaaguagcuccucucacugccuugauccuaauaacgaggaaggugggcauggaguuaaaggcugggcuuucgacgauggcaaugacguguggauggggcgcaccauuagcgagaaguugcgacugggauacgagacauuuaaagucaucgaagguuggucaaacccaaauaguaagcuacaaauuaacagacaggugauaguagauaggggcaaucgguccggguauagcggaaucuucucuguugagggcaaaucauguauuaaccguugcuuuuacguggaacucauccgcgguagaaaggaggaaacugagguccuguggaccaguaauagcaucguggucuucugugggacauccggcacuuauggaaccggcucuuggcccgacggggccgauauuaaccuuaugccuauauga

SEQ ID NO: 148691 - RNA, 1410 nt, Artificial Sequence
  derived and/or modified CDS sequence (opt3) from neuraminidase__InfluenzaA__AEG65035
augaaccccaaucagaagaucauuaccauaggcagcgugucccugacaaucucuacuauuugcuucuuuaugcaaaucgccauucucaucacgaccgucacacuucacuucaaacaguacgaguuuaacucaccuccaaauaaccagguuaugcugugugaaccgacuauaaucgagagaaauauuaccgaaaucguguauuugacaaacaccacuauugagaaggaaguaugccccaaauuagcugaguacaggaauuggaguaagccucaguguaacaucacaggguucgcaccauuuagcaaagacaauuccauacggcugucugccggaggugauauuugggugacccgcgagcccuaugucucgugcgaccuagauaaguguuaccaauucgcgcucggccaggggacgacucugaacaaugugcauucaaacgacaccguucacgaucgaacaccuuaucguacucuucugaugaaugaauugggagugccauuucaucucggcaccaagcaggucugcaucgcuuggagcaguuccucuugucacgacgguaaagccuggcugcaugugugcguaacaggggaugacaagaacgcaaccgccagcuucauuuacaauggaagacugguugauuccaucgugucauggaguaaagagauccucaggacgcaggaaagcgagugugucugcauuaacggcacuuguacaguggugaugaccgacggcucugcuuccgggaaggcagauacuaaaauauuauuuaucgaggaaggaaagauuguccacacaucaacccugagcgguagugcccaacacguugaggaaugcucuugcuauccccgguacccuggcgugcgcuguguaugcagagacaacuggaagggguccaauaggccaaucguggauauaaacauuaaagacuacagcaucgucucgucuuauguguguuccggacuuguuggcgacacgccgcggaagaaugauucaaguagcuccucucauugcuuggaccccaacaaugaggaaggugggcacggagugaaaggcugggcuuucgaugacggcaacgaugucuggauggggcgcaccaucagcgagaagcugcgaucaggauacgagacauuuaaagugauugaagguuggaguaauccuaacuccaagcuacagaucaauagacagguaauuguugacaggggcaaccggagcggguauucuggaauauucucaguggagggcaaaaguuguaucaaucguugcuuuuacgucgaacucauucgcgguagaaaggaggaaaacgaggugcuguggacuagcaauuccaucgucguguucugugggaccucuggcacauauggaacuggcucguggccagauggggccgacaucaaccuuaugcccauuuga

SEQ ID NO: 148692 - RNA, 1410 nt, Artificial Sequence; identical to SEQ ID NO: 142760
  derived and/or modified CDS sequence (opt3) from neuraminidase__InfluenzaA__AEG65057

SEQ ID NO: 148693 - RNA, 1410 nt, Artificial Sequence; identical to SEQ ID NO: 143755
  derived and/or modified CDS sequence (opt3) from neuraminidase__InfluenzaA__AEG65068

SEQ ID NO: 148694 - RNA, 1410 nt, Artificial Sequence
  derived and/or modified CDS sequence (opt3) from neuraminidase__InfluenzaA__AEG65079
augaaccccaaucagaagaucauuaccauaggcagcgugucccugacaaucucuacuauuugcuucuuuaugcaaaucgccauucucaucacgaccgucacacuucacuucaaacaguacgaguuuaacucaccuccaaauaaccagguuaugcugugugaaccgacuauaaucgagagaaauauuaccgaaaucguguauuugacaaacaccacuauugagaaggaaaucugccccaaauuagcugaguacaggaauuggaguaagccucaguguaacauaacaggguucgcaccauuuagcaaagacaauuccauucggcugucugccggaggugauaucuggguaacccgcgagcccuaugugucgugcgacccugauaaguguuaccaauucgcgcuaggccaggggacgacucucaacaauguccauucaaacgacaccgugcacgaucgaacaccauaucguacucugcuuaugaaugaacugggaguucccuuucauuugggcaccaaacaggugugcauugcuuggagcaguuccucuugucacgacgguaaggccuggcuccaugucugcgugacaggggaugacaagaacgcaaccgccagcuucaucuacaauggaagacugguagauuccaucguuucauggaguaaagagauucugaggacgcaggaaagcgagugugugugcauaaacggcacuuguacagucgugaugaccgacggcucugcuuccgggaaggcagauacuaaaauccucuuuauugaggaaggaaagaucgugcacacaucaaccuuaagcgguagugccaagcacgucgaggaaugcucuugcuauccucgguacccaggcguucgcugugugugcagagacaacuggaaaggguccaauaggccgauaguagauauuaacaucaaggacuacagcaucgugucgucuuaugucuguuccggacuggugggcgacacgccccggaaaaaugauucaaguagcuccggucauugccuugacccuaacaaugaggaagggggacacggcguuaagggcugggcuuucgaugacgggaacgauguguggaugggacgcaccauuucugagaaauugcgaagcgguuacgagacauuuaaggucaucgaaggcuggucaaauccaaacaguaaacugcaaauuaauagacaggugauaguagacagggggaaccgguccggauauagcggcaucuucucuguugaggguaagucauguauuaaucguugcuuuuacguggaacuaauccgcgggagaaaggaggaaacugagguccucuggaccaguaacagcaucguggucuucuguggcacauccggaacuuauggcaccgggucuuggcccgauggagccgacauuaaucugaugccuauauga

SEQ ID NO: 148695 - RNA, 1410 nt, Artificial Sequence
  derived and/or modified CDS sequence (opt3) from neuraminidase__InfluenzaA__AEG65090
augaaccccaaucagaagaucauuaccauaggcagcgugucccugacaaucucuacuauuugcuucuuuaugcaaaucgccauucucaucacgaccgucacacuucacuucaaacaguacgaguuuaacucaccuccaaauaaccagguuaugcugugugaaccgacuauaaucgagagaaauauuaccgaaaucguguauuugacaaacaccacuauugagaaggaaaucugccccaaauuagcugaguacaggaauuggaguaagccucaguguaacauaacaggguucgcaccauuuagcaaagacaauuccauucggcugucugccggaggugauaucuggguaacccgcgagcccuaugugucgugcgacccugauaaguguuaccaauucgcgcuaggccaggggacgacucucaacaauguccauucaaacgacaccgugcacgaucgaacaccauaucguacucugcuuaugaaugaacugggaguucccuuucauuugggcaccaaacaggugugcauugcuuggagcaguuccucuugucacgacgguaaggccuggcuccaugucugcgugacaggggaugacaagaacgcaaccgccagcuucaucuacaauggaagacugguagauuccaucguuucauggaguaaagagauucugaggacgcaggaaagcgagugugugugcauaaacggcacuuguacagucgugaugaccgacggcucugcuuccgggaaggcagauacuaaaauccucuuuauugaggaaggaaagaucauacacacaucaaccuuaagcgguagugcccaacacguggaggaaugcucuugcuauccucgguacccaggcguccgcuguguuugcagagacaacuggaagggguccaauaggccgauuguggauaucaacaucaaagacuacagcauuguaucgucuuauguguguuccggacuggucggcgacacgccccggaagaaugauucaaguagcuccucucauugccuugacccuaacaaugaggaaggugggcacggagugaaaggcugggcuuucgaugacggcaacgauguuuggauggggcgcaccaucagcgagaaguugcgaucaggauacgagacauuuaaagugauugaagguuggaguaauccaaacuccaagcugcagauaaauagacaggucaucguggacaggggcaaccggagcggguauucuggaauuuucucaguagagggcaaaaguuguaucaaucguugcuuuuacguugaacuaauccgcgguagaaaggaggaaacugaggugcucuggaccagcaacuccauugucguguucugugggacaucuggcacuuauggaaccggcucguggcccgauggggccgacauaagccugaugccuaucuga

SEQ ID NO: 148696 - RNA, 1410 nt, Artificial Sequence
  derived and/or modified CDS sequence (opt3) from neuraminidase__InfluenzaA__AEG65101
augaaccccaaucagaagaucauuaccauaggcagcgugucccugacaaucucuacuauuugcuucuuuaugcaaaucgccauucucaucacgaccgucacacuucacuucaaacaguacgaguuuaacucaccuccagacaaucagguuaugcugugugaaccgacuauaaucgagagaaacauuaccgaaaucguguauuugacaaauaccacuauugagaaggaaaucugccccaaauuagcugaguacaggaacuggaguaagccucagugugauauaacaggguucgcaccauuuagcaaagacaauuccauucggcugucugccggaggugauaucuggguaacccgcgagcccuaugugucgugcgacccugauaaguguuaccaauucgcgcuaggccaggggacgacucucaacaauguccauucaaacgacaccgugcacgaucgaacaccauaucguacucugcuuaugaaugaacugggaguucccuuucauuugggcaccaaacaggugugcauugcuuggagcaguuccucuugucacgacgguaaggccuggcuccaugucugcgugacaggggaugacaagaacgcaaccgccagcuucaucuacaauggaagacugguagauuccguugugucauggaguaaagacauccugaggacgcaggagagcgaaugugucugcauuaacggcacuuguacaguggugaugaccgauggcucugcuuccgggaaggcagacacuaaaauacucuuuaucgaggagggaaagauuguccacacaucaaccuuaagcgguagugcccaacacguugaagagugcucuugcuauccucgguacccaggcgugcgcuguguaugcagagacaauuggaagggguccaacaggccgaucguggauauaaacauuaaaaauuacagcaucgucucgucuuauguguguuccggacugguuggcgacacgccccggaagaccgauucaaguagcuccucucauugccuugacccuaacaaugaagagggugggcacggagugaaaggcugggcuuucgaugacggcaacgaugucuggauggggcgcacaaucagcgaaaaguugcgacugggauacgagacuuuuaaagugauugaggguuggucaaauccaaacaguaagcuacagaucaauagacagguaauuguugacaggggcaaccgguccggguauagcggaauauucucuguggaaggcaaaucauguaucaaucguugcuuuuacgucgagcucauucgcgguagaaaggaagagaccgaagugcuguggacaaguaacagcaucgucguguucugugggacuuccggcaccuauggaacaggcucuuggcccgauggggccgacaucaaucuuaugccuauuuga

SEQ ID NO: 148697 - RNA, 1410 nt, Artificial Sequence
  derived and/or modified CDS sequence (opt3) from neuraminidase__InfluenzaA__AEG65123
augaaccccaaucagaagaucauuaccauaggcagcgugucccugacaaucucuacuauuugcuucuuuaugcaaaucgccauucucaucacgaccgucacacuucacuucaaacaguacgaguuuaacucaccuccaaauaaccagguuaugcugugugaaccgacuaccauagagagaaauaucacagaaauuguguauuugaccaacacuacaaucgagaaggaaauuugccccaaauuagcugaguacaggaauuggaguaagccucagugugacaucaccggguucgcaccauuuagcaaagauaacuccauacggcugucugccggaggugacauuuggguaacgcgcgagcccuaugugucgugcgauccugacaaguguuaccaauucgcgcuaggccaggggacuacccucaauaacguccauucaaaugauacagugcacgaccgaacuccauaucguacccugcuuaugaacgaacugggaguucccuuucauuugggcacaaaacaggugugcaucgcuuggagcaguuccucuugucacgaugguaaagccuggcuccaugucugcgugaccggggacgauaagaaugcaacggccagcuucauuuacaacggaagacugguagacuccguugugucauggaguaaagauauccugaggacucaggagagcgaaugugucugcaucaauggcacauguaccguggugaugacugacggcucugcuuccgggaaggcagauacaaaaauucucuuuauagaggagggaaagaucguccacaccucaacguuaagcgguagugcccaacacguugaagagugcucuugcuauccucgguacccaggcgugcgcuguguaugcagagacaacuggaagggguccaacaggccgauuguggacaucaauauaaagaacuacagcauugucucgucuuauguguguuccggacugguuggcgauacaccccggaagaccgacucaaguagcuccucucauugccuugauccuaauaacgaagagggugggcacggagugaaaggcugggcuuucgacgauggcaaugacgucuggauggggcgcacuaucagcgaaaaguugcgacugggauacgagaccuuuaaagugaucgaggguuggucaaacccaaauaguaagcuacagauuaacagacagguaaucguugauaggggcaaucgguccggguauagcggaauuuucucuguggaaggcaaaucauguauaaaccguugcuuuuacgucgagcucauccgcgguagaaaggaagagaaugaagugcuguggacaaguaacagcauugucguguucugugggacuuccggcaccuauggaacaggcucuuggcccgacggggccgauaucaaucuuaugccuaucuga

SEQ ID NO: 148698 - RNA, 1410 nt, Artificial Sequence; identical to SEQ ID NO: 143755
  derived and/or modified CDS sequence (opt3) from neuraminidase__InfluenzaA__AEG65134

SEQ ID NO: 148699 - RNA, 1410 nt, Artificial Sequence
  derived and/or modified CDS sequence (opt3) from neuraminidase__InfluenzaA__AEG65145
augaaccccaaucagaagaucauuaccauaggcagcgugucccugacaaucgccacuauuugcuuccucaugcaaaucgcuauucuugucacgaccguuacacugcacuuuaaacaguacgaguguaacucuccuccaaauaaccaggugauguugugcgaaccgacuaucauagagagaaauaucaccgaaauuguauauuuaacaaacaccacuaucgagaaggaaauuugucccaaacuggcagaguacaggaauuggucaaagccucagugcaacaucacaggguucgccccauuuaguaaagacaauagcauacggcuauccgcgggaggugauauuugggugacccgcgagcccuaugucucuugugacccugauaagugcuaccaauucgcucucggccaggggacgacucugaacaauggacauucgaacgacaccgugcacgaucgaacaccauaucguacucuucugaugaaugaauugggcguucccuuucaucucgguaccagacagguguguaucgccuggucaagcaguuccugccacgacgggaaggcauggcugcaugucugugugacaggagaugacgagaacgccaccgcuucuuucauuuacaauggcaggcugguagauagcaucggcuccuggaguaaaaagauccuccggacgcaggaaucagagugcguuuguauuaacgggacuugcacaguggucaugaccgacggaagcgcaucugguaaagccgauacuaagauauuauuuaucgaggaaggcaaaauugugcacaucuccacacugucagggagcgcucaacacguggaggaaugcaguuguuauccucgcuacccaggagucagaugcguuuguagggacaacuggaagggcucuaaucggccgauaguggauauuaacguaaaggacuacuccaucgugagcucguaugucugcucuggucuugugggggacacccccaggaaaaaugauuccuucucaaacagucauuguuuggacccuaauaacgaggaaggaggccacggcguuaaggggugggccuuugaugacggaaaugauguguggaugggucgaacgaucagcgagaaacugagauccggcuacgagaccuucaaggucauugaaggguggucuaaaccaaacagcaagcuacagaucaaucgccaggugauuguagagcggggaaaccguucaggcuauagugguauauuuuccguugaagggaaaagcugcaucaaucgcuguuucuacguggagcucauuagaggcaggaaggaagagacagaggucugguggacuucuaacucaaucguggucuuuugcggaaccaguggcacauaugggacuggaagcuggcccgacggugcggauaucaaucugaugccuauuuga

SEQ ID NO: 148700 - RNA, 1410 nt, Artificial Sequence
  derived and/or modified CDS sequence (opt3) from neuraminidase__InfluenzaA__AEG65156
augaaccccaaucagaagaucauuaccauaggcagcgugucccugacaaucgccacuauuugcuuccucaugcagaucgcuauucuugucacgaccguuacacugcacuuuaaacaguacgaguguaacucuccuccaaauaaccaggugauguugugcgaaccgacuaucauagagagaaauaucaccgaaauuguauauuuaacaaacaccacuaucgagaaggaaauuugucccaaacuggcagaguacaggaauuggucaaagccucagugcaacaucacaggguucgccccauuuaguaaagacaauagcauacggcuauccgcgggaggugauauuugggugacccgcgagcccuaugucucuugugacccugauaagugcuaccaauucgcucucggccaggggacgacucugaacaauggacauucgaacgacaccgugcacgaucgaacaccauaucguacucuucugaugaaugaauugggcguucccuuucaucucgguaccagacagguguguaucgccuggucaagcaguuccugccacgacgggaaggcauggcugcaugucugugugacaggagaugacgagaacgccaccgcuucuuucauuuacaauggcaggcugguagauagcaucggcuccuggaguaaaaagauccuccggacgcaggaaucagagugcguuuguauuaacgggacuugcacaguggucaugaccgacggaagcgcaucugguaaagccgauacuaagauauuauuuaucgaggaaggcaaaauugugcacacauccacccugucagggagcgcucaacacguggaggaaugcaguuguuauccucgcuacccaggagucagaugcguuuguagggacaacuggaagggcucuaaucggccgaucguggauauaaacguaaaggacuacuccauugugagcucguaugucugcucuggucuugugggggacacgccccgcaaaaaugauuccuucucaaguagccauuguuuggacccuaacaaugaggaaggaggccacggcguuaaggggugggccuuugaugacggaaacgauguguggaugggucgaaccaucuccgagaaacugagaucuggcuacgagacauucaaggucaucgaaggguggagcaaaccaaauucaaagcuacagauuaacaggcaagugaucguagagcggggaaaucguaguggcuauuccgguauuuuuagcguugaagggaaaucuugcauaaaccgcuguuucuacguggagcucaucagaggcaggaaggaagagacugaggucugguggaccucaaauaguauuguggucuuuugcggaacaagcggcacuuaugggaccggauccuggcccgacggugcggauaucaaccugaugccuaucuga

SEQ ID NO: 148701 - RNA, 1410 nt, Artificial Sequence
  derived and/or modified CDS sequence (opt3) from neuraminidase__InfluenzaA__AEG65167
augaaccccaaucagaagaucauuaccauaggcagcgugucccugacaaucgccacuauuugcuuccucaugcaaaucgcuauucuugucacgaccguuacacugcacuuuaaacaguacgaguguaacucuccuccaaauaaccaggugauguugugcgaaccgacuaucauagagagaaauaucaccgaaauuguauauuuaacaaacaccacuaucgagaaggaaauuugucccaaacuggcagaguacaggaauuggucaaagccucagugcaacaucacaggguucgccccauuuaguaaagacaauagcauacggcuauccgcgggaggugauauuugggugacccgcgagcccuaugucucuugugacccugauaagugcuaccaauucgcucucggccaggggacgacucugaacaauggacauucgaacgacaccgugcacgaucgaacaccauaucguacucuucugaugaaugaauugggcguucccuuucaucucgguaccagacagguguguaucgccuggucaagcaguuccugccacgacgggaaggcauggcugcaugucugugugacaggagaugacgagaacgccaccgcuucuuucauuuacaauggcaggcugguagauagcaucggcuccuggaguaaaaagauccuccggacgcaggaaucagagugcguuuguauuaacgggacuugcacaguggucaugaccgacggaagcgcaucugguaaagccgauacuaagauauuauuuaucgaggaaggcaaaauugugcacaucuccacacugucagggagcgcucgccacguggaggaaugcaguuguuauccuagauacccaggagucaggugcguuugucgggacaacuggaagggcucuaaucgcccgauaguggauauuaacguaaaggacuacuccaucgugagcucguaugucugcucuggucuugugggggacacgccccggaaaaaugauuccuucucaaguagccauuguuuggacccuaacaaugaggaaggaggccacggcguuaaggggugggccuuugaugacggaaacgauguguggauggguagaaccaucuccgagaaacugaggucuggcuacgagaccuucaaggucauugaaggguggagcaaaccaaauucaaagcuacaaaucaaccgacaggugauuguagagcguggaaaucgcaguggcuauuccgguauauuuagcguugaagggaaaucuugcaucaacagauguuucuacguggagcucauuaggggccggaaggaagagacagaggucugguggacuucaaauaguaucguggucuuuugcggaaccagcggcacauaugggacuggauccuggcccgacggugcggauaucaaccugaugccuauuuga

SEQ ID NO: 148702 - RNA, 1410 nt, Artificial Sequence
  derived and/or modified CDS sequence (opt3) from neuraminidase__InfluenzaA__AEG65178
augaaccccaaucagaagaucauuaccauaggcagcgugucccugacaaucgccacuauuugcuuccucaugcaaaucgcuauucuugucacgaccguuacacugcacuuuaaacagcaugaguguaacucuccuccaaauaaccaggugauguugugcgaaccgacuaucauagagagaaauaucaccgaaauuguauacuuaacaaacaccacuaucgagaaggaaauuugucccaaacuggcagaguauaggaauuggucaaagccucagugcaacaucacaggguucgccccauuuaguaaagacaauagcauacggcuauccgcgggaggugauauuugggugacccgcgagcccuacgucucuugugacccugauaagugcuaucaauucgcucucggccaggggacgacucugaacaauggacacucgaacaauaccgugcaugaccgaacaccauaccguacucuucugaugaacgaauugggcguucccuuucaccucgguaccagacagguguguaucgccuggucaagcaguuccugccaugaugggaaggcauggcugcacgucugugugacaggagacgauaaaaaugccaccgcuucuuucauuuauaacggcaggcugguagacagcaucggcuccuggucaaagaacauccuccggacgcaggagagugaaugcguuuguauuaaugggacuugcacaguggucaugaccgauggaagcgcaucugguaaagccgacacuaagauauuauuuaucgaggagggcaaaauugugcacaucuccacacugucagggagcgcucaacauguggaagagugcaguuguuacccucgcuauccaggagucagaugcguuuguagggauaacuggaagggcucuaaucggccgauaguggacauuaacguaaaggauuacuccaucgugagcucguacgucugcucuggucuugugggggacacccccaggaaaaaugacuccuucucaaguagccacuguuuggauccuaacaaugaagagggaggccauggcguuaaggggugggccuuugacgauggaaacgacguguggaugggucgaacgaucuccgaaaaacugagaucuggcuaugagaccuucaaggucauugagggguggagcaaaccaaauucaaagcuacagaucaaccgccaggugauuguagaacggggaaaucguaguggcuacuccgguauauuuagcguugaggggaaaucuugcaucaaccgcuguuucuauguggaacucauuagaggcaggaaggaggaaacagaggucugguggacuucaaauaguaucguggucuuuugcggaaccagcggcacauacgggacuggauccuggcccgauggugcggacaucaaccugaugccuauuuga

SEQ ID NO: 148703 - RNA, 1410 nt, Artificial Sequence
  derived and/or modified CDS sequence (opt3) from neuraminidase__InfluenzaA__AEG65189
augaaccccaaucagaagaucauuaccauaggcagcgugucccugacaaucucuacuauuugcuucuuuaugcaaaucgccauucucaucacgaccgucacacuucacuucaaacaguacgaguuuaacucaccuccaaauaaccagguuaugcugugugaaccgacuauaaucgagagaaauauuaccgaaaucguguauuugacaaacaccacuauugagaaggaaaucugccccaaauuagcugaguacaggaauuggaguaagccucagugugacauaacaggguucgcaccauuuagcaaagauaacuccauucggcugucugccggaggugacaucuggguaacccgcgagcccuaugugucgugcgauccugacaaguguuaccaauucgcgcuaggccaggggacgacucucaauaacguccauucaaaugauaccgugcacgaccgaacaccauaucguacucugcuuaugaacgaacugggaguucccuuucauuugggcaccaaacaggugugcauugcuuggagcaguuccucuugucacgaugguaaggccuggcuccaugucugcgugacaggggacgauaagaaugcaaccgccagcuucaucuacaacggaagacugguagacuccaucguuucauggaguaaagagauucugaggacgcaggaaagcgagugugugugcauaaauggcacuuguacagucgugaugaccgauggcucugcuuccgggaaggcagacacuaaaauccucuuuauugaggaaggaaagaucgugcacacaucaaccuuaagcgguagugcccaacacgucgaggaaugcucuugcuauccucgguacccaggcguucgcugugugugcagagauaacuggaagggguccaacaggccgauaguagacauuaauaucaacgacuacagcaucgugucgucuuaugucuguuccggacuggugggcgauacgccccggaaaaaugacucaaguagcuccucucauugccuugauccuaacaaugaggaaggugggcacggaguuaagggcugggcuuucgacgauggcaacgacguguggauggggcgcaccauuagcgagaaauugcgaucaggauacgagacauuuaaggucaucgaagguuggaguaauccaaacuccaaacugcagauuaauagacaggugauaguagauaggggcaaccggagcggguauucuggaaucuucucaguugagggcaagaguuguauuaaucguugcuuuuacguggaacuaauccgcgguagaaaagaggaaacugagguccucuggaccagcaacuccaucguggucuucugugggacaucuggcacuuauggaaccggcucguggcccgacggggccgauauuaaucugaugccuauauga

SEQ ID NO: 148704 - RNA, 1410 nt, Artificial Sequence
  derived and/or modified CDS sequence (opt3) from neuraminidase__InfluenzaA__AEG65200
augaaccccaaucagaagaucauuaccauaggcagcgugucccugacaaucucuacuauuugcuucuuuaugcaaaucgccauucucaucacgaccgucacacuucacuucaaacaguacgaguuuaacucaccuccaaauaaccagguuaugcugugugaaccgacuauaaucgagagaaauauuaccgaaaucguguauuugacaaacaccacuauugagaaggaaaucugccccaaauuagcugaguacaggaauuggaguaagccucagugugacauaacaggguucgcaccauuuagcaaagauaacuccauucggcugucugccggaggugacaucuggguaacccgcgagcccuaugugucgugcgauccugacaaguguuaccaauucgcgcuaggccaggggacgacucucaauaacguccauucaaaugauaccgugcacgaccgaacaccauaucguacucugcuuaugaacgaacugggaguucccuuucauuugggcaccaaacaggugugcauugcuuggagcaguuccucuugucacgaugguaaggccuggcuccaugucugcgugacaggggacgauaagaaugcaaccgccagcuucaucuacaacggaagacugguagacuccaucguuucauggaguaaagaggugcugaggacgcaggaaagcgagugugucugcauuaauggcacuuguacaguggugaugaccgauggcucugcuuccgggaaggcagacacuaaaauacucuuuaucgaggaaggaaagauuguccacacaucaaccuuaagcgguagugcccaacacguugaggaaugcucuugcuauccucgguacccaggcgugcgcuguguaugcagagauaacuggaagggguccaacaggccgaucguggacauaaauauuaaagacuacagcaucgucucgucuuauguguguuccggacugguuggcgauacgccccggaagaacgacucaaguagcuccucucauugccuugauccuaauaacgaggaaggugggcacggagugaaaggcugggcuuucgacgauggcaaugacgucuggauggggcgcaccaucagcgagaaguugcgaucaggauacgagacauuuaaagugauugaagguuggaguaacccaaauuccaagcugcagacuaacagacagguaaucguugauaggggcaaucggagcggguauucuggaauuuucucaguggagggcaaaaguuguauaaaccguugcuuuuacgucgaacuaauccgcgguagaaaggaggaaaccgaggugcucuggacaagcaauuccauugucguguucugugggacuucuggcaccuauggaacaggcucguggcccgacggggccgauaucaaccugaugccuaucuga

SEQ ID NO: 148705 - RNA, 1410 nt, Artificial Sequence; identical to SEQ ID NO: 142760
  derived and/or modified CDS sequence (opt3) from neuraminidase__InfluenzaA__AEG65211

SEQ ID NO: 148706 - RNA, 1410 nt, Artificial Sequence; identical to SEQ ID NO: 142762
  derived and/or modified CDS sequence (opt3) from neuraminidase__InfluenzaA__AEG65222

SEQ ID NO: 148707 - RNA, 1410 nt, Artificial Sequence
  derived and/or modified CDS sequence (opt3) from neuraminidase__InfluenzaA__AEG65233
augaaccccaaucagaagaucauuaccauaggcagcgugucccugacaaucucuacuauuugcuucuuuaugcaaaucgccauucucaucacgaccgucacacuucacuucaaacaguacgaguuuaacucaccuccaaauaaccagguuaugcugugugaaccgacuauaaucgagagaaauauuaccgaaaucguguauuugacaaacaccacuauugagaaggaaaucugccccaaauuagcugaguacaggaauuggaguaagccucagugugacauaacaggguucgcaccauuuagcaaagauaacuccauucggcugucugccggaggugacaucuggguaacccgcgagcccuaugugucgugcgauccugacaaguguuaccaauucgcgcuaggccaggggacgacucucaauaacguccauucaaaugauaccgugcacgaccgaacaccauaucguacucugcuuaugaacgaacugggaguucccuuucauuugggcaccaaacaggugugcauugcuuggagcaguuccucuugucacgaugguaaggccuggcuccaugucugcgugacaggggacgauaagaaugcaaccgccagcuucaucuacaacggaagacugguagacuccaucguuucauggaguaaaaagauucugaggacgcaggagagcgaaugugugugcauaaauggcacuuguacagucgugaugaccgauggcucugcuuccgggaaagcagacacuaagauccucuuuauugaggagggaaagaucgugcacacaucaaccuuaagcgguagugcccaacacgucgaagagugcucuugcuauccucgguacccaggcguucgcugugugugcagagauaacuggaaaggguccaacaggccgauaauugacaucaauaucaaggacuacagcauuguaucgucuuauguguguuccggacuggucggcgauacgccccggaaaaacgacucaaguagcuccucucauugccuugauccuaauaacgaagagggugggcacggagugaagggcugggcuuucgacgauggcaaugacguuuggauggggcgcaccaucagcgaaaaauugcgaucaggauacgagacauuuaaggugauugaggguuggaguaacccaaauuccaaacugcagauaaacagacaggucaucguggauaggggcaaucggagcggguauucuggaauuuucucaguagaaggcaagaguuguaucaaccguugcuuuuacguugagcuaauccgcgguagaaaggaagagacugaagugcucuggaccagcaauuccauugucguguucugugggacaucuggcacuuauggaaccggcucguggcccgacggggccgauauaaaccugaugccuaucuga

SEQ ID NO: 148708 - RNA, 1410 nt, Artificial Sequence
  derived and/or modified CDS sequence (opt3) from neuraminidase__InfluenzaA__AEG65244
augaaccccaaucagaagaucauuaccauaggcagcgugucccugacaaucucuacuauuugcuucuuuaugcaaaucgccauucucaucacgaccgucacacuucacuucaaacaguacgaguuuaacucaccuccaaauaaccagguuaugcugugugaaccgacuauaaucgagagaaauauuaccgaaaucguguauuugacaaacaccacuauugagaaggaaaucugccccaaauuagcugaguacaggaauuggaguaagccucaguguaacauaacaggguucgcaccauuuagcaaagacaauuccauucggcugucugccggaggugauaucuggguaacccgcgagcccuaugugucgugcgacccugauaaguguuaccaauucgcgcuaggccaggggacgacucucaacaauguccauucaaacgacaccgugcacgaucgaacaccauaucguacucugcuuaugaaugaacugggaguucccuuucauuugggcacccaacaggugugcauugcuuggagcaguuccucuugucacgacgguaaggccuggcuccaugucugcgugacaggggaugacgagaacgcaaccgccagcuucaucuacaauggaagacugguagauuccaucguuucauggaguaaaaagauucugaggacgcaggaaagcgagugugugugcauaaacggcacuuguacagucgugaugaccgacggcucugcuuccgggaaagcagauacuaagauccucuuuauugaggaaggaaaaaucgugcacacaucaaccuuaagcgguagugcccagcacgucgaggaaugcucuugcuauccucgguacccaggcguucgcugugugugcagagacaacuggaagggguccaauaggccgauaguagauauuaacaucaaggacuacagcaucgcuucgucuuauguguguuccggacuggucggcgacacgccccggaaaaaugauucaaguagcuccucucauugccuugacccuaacaaugaggaaggugggcacggagugaagggcugggccuucgaugacggcaacgauguuuggauggggcgcaccauuagcgagaaauugcgaucaggauacgagacauuuaaggugaucgaagguuggaguaauccaaacuccaaacugcagauuaauagacaggucauaguggacaggggcaaccggagcggguauucuggaaucuucucaguagagggcaagaguuguauuaaucguugcuuuuacguugaacuaauccgcgguagaaaccaagagacugaagugcucuggaccagcaauuccaucgucguguucugugggacaucuggcacuuauggaaccggcucguggcccgauggggcggacauuaaccugaugccuauauga

SEQ ID NO: 148709 - RNA, 1410 nt, Artificial Sequence; identical to SEQ ID NO: 142762
  derived and/or modified CDS sequence (opt3) from neuraminidase__InfluenzaA__AEG65255

SEQ ID NO: 148710 - RNA, 1410 nt, Artificial Sequence; identical to SEQ ID NO: 142639
  derived and/or modified CDS sequence (opt3) from neuraminidase__InfluenzaA__AEG65266

SEQ ID NO: 148711 - RNA, 1410 nt, Artificial Sequence; identical to SEQ ID NO: 142639
  derived and/or modified CDS sequence (opt3) from neuraminidase__InfluenzaA__AEG65277

SEQ ID NO: 148712 - RNA, 1410 nt, Artificial Sequence
  derived and/or modified CDS sequence (opt3) from neuraminidase__InfluenzaA__AEG65288
augaaccccaaucagaagaucauuaccauaggcagcgugucccugacaaucgccacuauuugcuuccucaugcaaaucgcuauucuugucacgaccguuacacugcacuuuaaacagcaugaguguaacucuccuccaaauaaccaggugauguugugcgaaccgacuaucauagagagaaauaucaccgaaauuguauacuuaacaaacaccacuaucgagaaggaaauuugucccaaacugguggaguauaggaauuggucaaagccucagugcaacaucacaggguucgcaccauuuaguaaagacaauagcauacggcuauccgccggaggugauauuugggucacccgcgagcccuacgugucuugugacccugauaagugcuaucaauucgcgcucggccaggggacgacucugaacaauggacacucgaacgacaccguucaugaucgaacaccauaccguacucuucugaugaaugaauugggcgugcccuuucaccucgguaccagacaggucuguaucgcuuggucaagcaguuccugccaugacgggaaggccuggcugcacguguguguaacaggagaugacaaaaacgcaaccgccucuuucauuuauaauggcaggcugguugauagcaucggcuccuggucaaagaaaauccuccggacgcaggagagugaaugcguguguauuaacgggacuugcacagucgugaugaccgacggaagcgcuucugguaaggcagauacuaaaauauuauuuaucgaggagggcaagauugugcacaucuccacacugucagggagcgcccaacaugucgaagagugcaguuguuacccucgcuauccaggaguuagaugcguguguagggacaacuggaagggcucuaaucggccgauaguagauauuaacgugaaagacuacuccaucgucagcucguacgugugcucuggucuuguuggggacacgccccgcaagaauaacuccuucucaaguagccacuguuuggauccuaauaacgaagagggaggccauggcgugaaagggugggcuuuugacgauggaaaugacgucuggaugggucgaaccaucuccgaaaagcugagaucuggcuaugagaccuucaaagugauugagggguggagcaagccaaacucaaaacuacagaucaauaggcagguaauuguugaacggggaaaccguaguggcuacuccgguauauuuagcguggaggggaagucuugcaucaaucgcuguuucuaugucgaacucauuagaggcaggaaggaggaaacagaggugugguggacuucaaacaguaucgucguguuuugcggaaccagcggcacauacgggacuggauccuggcccgauggugccgacaucaaucugaugccuauuuga

SEQ ID NO: 148713 - RNA, 1410 nt, Artificial Sequence; identical to SEQ ID NO: 142639
  derived and/or modified CDS sequence (opt3) from neuraminidase__InfluenzaA__AEG65299

SEQ ID NO: 148714 - RNA, 1410 nt, Artificial Sequence; identical to SEQ ID NO: 142762
  derived and/or modified CDS sequence (opt3) from neuraminidase__InfluenzaA__AEG65310

SEQ ID NO: 148715 - RNA, 1410 nt, Artificial Sequence; identical to SEQ ID NO: 142762
  derived and/or modified CDS sequence (opt3) from neuraminidase__InfluenzaA__AEG65321

SEQ ID NO: 148716 - RNA, 1410 nt, Artificial Sequence; identical to SEQ ID NO: 142762
  derived and/or modified CDS sequence (opt3) from neuraminidase__InfluenzaA__AEG65332

SEQ ID NO: 148717 - RNA, 1410 nt, Artificial Sequence; identical to SEQ ID NO: 142762
  derived and/or modified CDS sequence (opt3) from neuraminidase__InfluenzaA__AEG65354

SEQ ID NO: 148718 - RNA, 1410 nt, Artificial Sequence; identical to SEQ ID NO: 142762
  derived and/or modified CDS sequence (opt3) from neuraminidase__InfluenzaA__AEG65365

SEQ ID NO: 148719 - RNA, 1410 nt, Artificial Sequence
  derived and/or modified CDS sequence (opt3) from neuraminidase__InfluenzaA__AEG65376
augaaccccaaucagaagaucauuaccauaggcagcgugucccugacaaucucuacuauuugcuucuuuaugcaaaucgccauucucaucacgaccgucacacuucacuucaaacaguacgaguuuaacucaccuccaaauaaccagguuaugcugugugaaccgacuauaaucgagagaaauauuaccgaaaucguguauuugacaaacaccacuauugagaaggaaaucugccccaaauuagcugaguacaggaauuggaguaagccucaguguaacauaacaggguucgcaccauuuagcaaagacaauuccauucggcugucugccggaggugauaucuggguaacccgcgagcccuaugugucgugcgacccugauaaguguuaccaauucgcgcuaggccaggggacgacucucaacaauguccauucaaacgacaccgugcacgaucgaacaccauaucguacucugcuuaugaaugaacugggaguucccuuucauuugggcacccaacaggugugcauugcuuggagcaguuccucuugucacgacgguaaggccuggcuccaugucugcgugacaggggaugacgagaacgcaaccgccagcuucaucuacaauggaagacugguagauuccaucguuucauggaguaaaaagauucugaggacgcaggaaagcgagugugugugcauaaacggcacuuguacagucgugaugaccgacggcucugcuuccgggaaagcagauacuaagauccucuuuauugaggaaggaaaaaucgugcacacaucaaccuuaagcgguagugcccagcacgucgaggaaugcucuugcuauccucgguacccaggcguucgcugugugugcagagacaacuggaagggguccaauaggccgauaguagauauuaacaucaaggacuacagcaucgugucgucuuaugucuguuccggacuggugggcgacacgccccggaaaaaugauucaaguagcuccucucauugccuugacccuaacaaugaggaaggugggcacggaguuaagggcugggcuuucgaugacggcaacgauguguggauggggcgcaccauuagcgagaaauugcgaucaggauacgagacauuuaaggucaucgaagguuggaguaauccaaacuccaaacugcagauuaauagacaggugauaguagacaggggcaaccggagcggguauucuggaaucuucucaguugagggcaagaguuguauuaaucguugcuuuuacguggaacuaauccgcgguagaaaccaagagacugaaguccucuggaccagcaauuccaucguggucuucugugggacaucuggcacuuauggaaccggcucguggcccgauggggccgacauuaaccugaugccuauauga

SEQ ID NO: 148720 - RNA, 1410 nt, Artificial Sequence; identical to SEQ ID NO: 142639
  derived and/or modified CDS sequence (opt3) from neuraminidase__InfluenzaA__AEG65387

SEQ ID NO: 148721 - RNA, 1410 nt, Artificial Sequence; identical to SEQ ID NO: 142639
  derived and/or modified CDS sequence (opt3) from neuraminidase__InfluenzaA__AEG65398

SEQ ID NO: 148722 - RNA, 1410 nt, Artificial Sequence; identical to SEQ ID NO: 142639
  derived and/or modified CDS sequence (opt3) from neuraminidase__InfluenzaA__AEG65409

SEQ ID NO: 148723 - RNA, 1410 nt, Artificial Sequence; identical to SEQ ID NO: 142639
  derived and/or modified CDS sequence (opt3) from neuraminidase__InfluenzaA__AEG65420

SEQ ID NO: 148724 - RNA, 1410 nt, Artificial Sequence; identical to SEQ ID NO: 142639
  derived and/or modified CDS sequence (opt3) from neuraminidase__InfluenzaA__AEG65431

SEQ ID NO: 148725 - RNA, 1410 nt, Artificial Sequence; identical to SEQ ID NO: 142760
  derived and/or modified CDS sequence (opt3) from neuraminidase__InfluenzaA__AEG65442

SEQ ID NO: 148726 - RNA, 1410 nt, Artificial Sequence; identical to SEQ ID NO: 142762
  derived and/or modified CDS sequence (opt3) from neuraminidase__InfluenzaA__AEG65453

SEQ ID NO: 148727 - RNA, 1410 nt, Artificial Sequence; identical to SEQ ID NO: 142762
  derived and/or modified CDS sequence (opt3) from neuraminidase__InfluenzaA__AEG65464

SEQ ID NO: 148728 - RNA, 1410 nt, Artificial Sequence; identical to SEQ ID NO: 142762
  derived and/or modified CDS sequence (opt3) from neuraminidase__InfluenzaA__AEG65475

SEQ ID NO: 148729 - RNA, 1410 nt, Artificial Sequence
  derived and/or modified CDS sequence (opt3) from neuraminidase__InfluenzaA__AEG65486
augaaccccaaucagaagaucauuaccauaggcagcgugucccugacaaucucuacuauuugcuucuuuaugcaaaucgccauucucaucacgaccgucacacuucacuucaaacaguacgaguuuaacucaccuccaaauaaccagguuaugcugugugaaccgacuauaaucgagagaaauauuaccgaaaucguguauuugacaaacaccacuauugagaaggaaaucugccccaaauuagcugagcauaggaauuggaguaagccucagugugacauaacaggguucgcaccauuuagcaaagauaacuccauucggcugucugccggaggugacaucuggguaacccgcgagcccuacgugucgugcgauccugacaaguguuaucaauucgcgcuaggccaggggacgacucucaauaacguccacucaaaugauaccgugcaugaccgaacaccauaccguacucugcuuaugaacgaacugggaguucccuuucacuugggcaccaaacaggugugcauugcuuggagcaguuccucuugucaugaugguaaggccuggcuccacgucugcgugacaggggacgauaagaaugcaaccgccagcuucaucuauaacggaagacugguagacuccaucguuucauggaguaaaaagauucugaggacgcaggagagcgaaugugugugcauaaauggcacuuguacagucgugaugaccgauggcucugcuuccgggaaagcagacacuaagauccucuuuauugaggagggaaagaucgugcacacaucaaccuuaagcgguagugcccaacaugucgaagagugcucuugcuacccucgguauccaggcguucgcugugugugcagagauaacuggaaaggguccaacaggccgauaguagacauuaauaucaaggacuacagcaucgugucgucuuacgucuguuccggacuggugggcgauacgccccggaaaaacgacucaaguagcuccucucacugccuugauccuaauaacgaagagggugggcauggaguuaagggcugggcuuucgacgauggcaaugacguguggauggggcgcaccauuagcgaaaaauugcgaucaggauaugagacauuuaaggucaucgaggguuggaguaacccaaauuccaaacugcagauuaacagacaggugauaguagauaggggcaaucggagcggguacucuggaaucuucucaguugaaggcaagaguuguauuaaccguugcuuuuauguggagcuaauccgcgguagaaaggaagagacugaaguccucuggaccagcaauuccaucguggucuucugugggacaucuggcacuuacggaaccggcucguggcccgacggggccgauauuaaccugaugccuauauga

SEQ ID NO: 148730 - RNA, 1410 nt, Artificial Sequence; identical to SEQ ID NO: 142762
  derived and/or modified CDS sequence (opt3) from neuraminidase__InfluenzaA__AEG65497

SEQ ID NO: 148731 - RNA, 1410 nt, Artificial Sequence; identical to SEQ ID NO: 142762
  derived and/or modified CDS sequence (opt3) from neuraminidase__InfluenzaA__AEG65508

SEQ ID NO: 148732 - RNA, 1410 nt, Artificial Sequence; identical to SEQ ID NO: 142762
  derived and/or modified CDS sequence (opt3) from neuraminidase__InfluenzaA__AEG65519

SEQ ID NO: 148733 - RNA, 1410 nt, Artificial Sequence; identical to SEQ ID NO: 142762
  derived and/or modified CDS sequence (opt3) from neuraminidase__InfluenzaA__AEG65530

SEQ ID NO: 148734 - RNA, 1410 nt, Artificial Sequence; identical to SEQ ID NO: 142762
  derived and/or modified CDS sequence (opt3) from neuraminidase__InfluenzaA__AEG65541

SEQ ID NO: 148735 - RNA, 1410 nt, Artificial Sequence
  derived and/or modified CDS sequence (opt3) from neuraminidase__InfluenzaA__AEG65563
augaaccccaaucagaagaucauuaccauaggcagcgugucccugacaaucucuacuauuugcuucuuuaugcagaucgccauucucaucacgaccgucacacuucacuucaaacaguacgaguuuaacucaccuccaaauaaccagguuaugcugugugaaccgacuauaaucgagagaaauauuaccgaaaucguguauuugacaaacaccacuauugagaaggaaaucugccccaaauuagcugaguacaggaauuggaguaagccucagugugacauaacaggguucgcaccauuuagcaaagauaacuccauucggcugucugccggaggugacaucuggguaacccgcgagcccuaugugucgugcgauccugaccgauguuaccaauucgcgcuaggccaggggacgacucucaauaacguccauucaaaugauaccgugcacgaccguacaccauauagaacucugcuuaugaacgaacugggaguucccuuucauuugggcaccaaacaggugugcauugcuuggagcaguuccucuugucacgaugguaaggccuggcuccaugucugcgugacaggggacgauaagaaugcaaccgccagcuucaucuacaacggaaggcugguagacuccaucguuucauggaguaagaaaauucugcggacgcaggagagcgaaugugugugcauaaauggcacuuguacagucgugaugaccgauggcucugcuuccgggaaggcagacacuaaaauccucuuuauugaggagggaaagaucgugcacacaucaaccuuaagcgguagugcccaacacgucgaagagugcucuugcuauccucgcuacccaggcguuagaugugugugcagggauaacuggaagggguccaaccggccgauaguagacauuaauaucaaagacuacagcaucgugucgucuuaugucuguuccggacuggugggcgauacgccccgcaagaacgacucaaguagcuccucucauugccuugauccuaauaacgaagagggugggcacggaguuaaaggcugggcuuucgacgauggcaaugacguguggauggggcgaaccauuagcgaaaaguugagaucaggauacgagacauuuaaagucaucgaggguuggaguaacccaaauuccaagcugcagauuaacaggcaagugauaguagaucggggcaaucguagcggguauucuggaaucuucucaguugaaggcaaaaguuguauuaaccgcugcuuuuacguggagcuaaucagagguaggaaggaagagacugaaguccucuggaccagcaauuccaucguggucuucugugggacaucuggcacuuauggaaccggcucguggcccgacggggccgauauuaaccugaugccuauauga

SEQ ID NO: 148736 - RNA, 1410 nt, Artificial Sequence
  derived and/or modified CDS sequence (opt3) from neuraminidase__InfluenzaA__AEG65574
augaaccccaaucagaagaucauuaccauaggcagcgugucccugacaaucucuacuauuugcuucuuuaugcagaucgccauucucaucacgaccgucacacuucacuucaaacaguacgaguuuaacucaccuccaaauaaccagguuaugcugugugaaccgacuauaaucgagagaaauauuaccgaaaucguguauuugacaaacaccacuauugagaaggaaaucugccccaaauuagcugaguacaggaguuggagcaagccucagugugacauaacaggguucgcaccauuuuccaaagauaauucuauucggcugucggccggaggugacaucuggguaacccgcgagcccuaugugucaugcgauccugaccgauguuaccaauucgcgcuaggccaggggacgacucucaacaauguccauagcaacgauaccgugcacgaccguacaccauauagaacucugcuuaugaaugaacugggaguucccuuucauuugggcaccaaacaggugugcauugcuuggaguuccucuagcugucacgaugguaaggccuggcuccaugucugcgugacaggggacgauaagaacgcaaccgccuccuucaucuacaauggaaggcugguagacucaaucguuaguuggagcaagaaaauucugcggacgcaggagucugaaugugugugcauaaacggcacuuguacagucgugaugaccgauggcuccgcuucagggaaggcagacacuaaaauccucuuuauugaggagggaaagaucgugcacacaagcaccuuaagugguucugcccaacacgucgaagagugcuccugcuauccucgcuacccaggcguuagaugugugugcagggauaauuggaaggggagcaaccggccgauaguagacauuaacaucaaagacuacucgaucgugucuuccuaugucuguucaggacuggugggcgauacgccccgcaagaaugacaguagcuccucuagccauugccuugauccuaacaaugaagagggugggcacggaguuaaaggcugggcuuucgacgauggcaacgacguguggauggggcgaaccauuucagaaaaguugagaaguggauacgagacauuuaaagucaucgaggguugguccaauccaaacagcaagcugcagauuaauaggcaagugauaguagaucggggcaaccguucuggguauucaggaaucuucaguguugaaggcaaaagcuguauuaaucgcugcuuuuacguggagcuaaucagagguaggaaggaagagacugaaguccucuggaccuccaacucuaucguggucuucugugggacaucgggcacuuauggaaccggcagcuggcccgacggggccgauauuaaucugaugccuauauga

SEQ ID NO: 148737 - RNA, 1410 nt, Artificial Sequence; identical to SEQ ID NO: 148735
  derived and/or modified CDS sequence (opt3) from neuraminidase__InfluenzaA__AEG65585

SEQ ID NO: 148738 - RNA, 1410 nt, Artificial Sequence; identical to SEQ ID NO: 148735
  derived and/or modified CDS sequence (opt3) from neuraminidase__InfluenzaA__AEG65596

SEQ ID NO: 148739 - RNA, 1410 nt, Artificial Sequence
  derived and/or modified CDS sequence (opt3) from neuraminidase__InfluenzaA__AEG65607
augaaccccaaucagaagaucauuaccauaggcagcgugucccugacaaucucuacuauuugcuucuuuaugcaaaucgccauucucaucacgaccgucacacuucacuucaaacaguacgaguuuaacucaccuccaaauaaccagguuaugcugugugaaccgacuauaaucgagagaaauauuaccgaaaucguguauuugacaaacaccacuauugagaaggaaaucugccccaaauuagcugaguacaggaauuggaguaagccucagugugacauaacaggguucgcaccauuuagcaaagauaacuccauucggcugucugccggaggugacaucuggguaacccgcgagcccuaugugucgugcgauccugacaaguguuaccaauucgcgcuaggccaggggacgacucucaauaacguccauucaaaugauaccgugcacgaccgaacaccauaucguacucugcuuaugaacgaacugggaguucccuuucauuugggcaccaaacaggugugcauugcuuggagcaguuccucuugucacgaugguaaggccuggcuccaugucugcgugacaggggacgauaagaaugcaaccgccagcuucaucuacaacggaagacugguagacuccaucguuucauggaguaaaaagauucugaggacgcaggagagcgaaugugugugcauaaauggcacuuguacagucgugaugaccgauggcucugcuuccgggaaagcagacacuaagauccucuuuauugaggagggaaagaucgugcacacaucaaccuuaagcgguagugcccaacacgucgaagagugcucuugcuauccucgguacccaggcguucgcugugugugcagagauaacuggaaaggguccaacaggccgauaguagacauuaauaucaaggacuacagcaucgcuucgucuuauguguguuccggacuggucggcgauacgccccggaaaaacgacucaaguagcuccucucauugccuugauccuaauaacgaagagggugggcacggagugaagggcugggccuucgacgauggcaaugacguuuggauggggcgcaccauuagcgaaaaauugcgaucaggauacgagacauuuaaggugaucgaggguuggaguaacccaaauuccaaacugcagauuaacagacaggucauaguggauaggggcaaucggagcggguauucuggaaucuucucaguagaaggcaagaguuguauuaaccguugcuuuuacguugagcuaauccgcgguagaaaggaagagacugaagugcucuggaccagcaauuccaucgucguguucugugggacaucuggcacuuauggaaccggcucguggcccgacggggcggauauuaaccugaugccuauauga

SEQ ID NO: 148740 - RNA, 1410 nt, Artificial Sequence
  derived and/or modified CDS sequence (opt3) from neuraminidase__InfluenzaA__AEG65629
augaaccccaaucagaagaucauuaccauaggcagcgugucccugacaaucucuacuauuugcuucuuuaugcaaaucgccauucucaucacgaccgucacacuucacuucaaacaguacgaguuuaacucaccuccaaauaaccagguuaugcugugugaaccgacuauaaucgagagaaauauuaccgaaaucguguauuugacaaacaccacuauugagaaggaaaucugccccaaauuagcugaguacaggaauuggaguaagccucagugugacauaacaggguucgcaccauuuagcaaagauaacuccauucggcugucugccggaggugacaucuggguaacccgcgagcccuaugugucgugcgauccugacaaguguuaccaauucgcgcuaggccaggggacgacucucaauaacguccauucaaaugauaccgugcacgaccgaacaccauaucguacucugcuuaugaacgaacugggaguucccuuucauuugggcaccaaacaggugugcauugcuuggagcaguuccucuugucacgaugguaaggccuggcuccaugucugcgugacaggggacgauaagaaugcaaccgccagcuucaucuacaacggaagacugguagacuccaucguuucauggaguaaagagauucugaggacgcaggaaagcgagugugugugcauaaauggcacuuguacagucgugaugaccgauggcucugcuuccgggaaggcagacacuaaaauccucuuuauugaggaaggaaagaucgugcacacaucaaccuuaagcgguagugcccaacacgucgaggaaugcucuugcuauccucgguacccaggcguucgcugugugugcagagauaacuggaagggguccaacaggccgauaguagacauuaauaucaaagacuacagcaucgugucgucuuaugucuguuccggacuggugggcgauacgccccggaagaacgacucaaguagcuccucucauugccuugauccuaaugacgaggaaggugggcacggaguuaaaggcugggcuuucgaugacggcaacgauguguggauggggcgcaccauuagcgagaaguugcgaucaggauacgagacauuuaaagucaucgaagguuggaguaauccaaacuccaagcugcagauuaauagacaggugauaguagacaggggcaaccggagcggguauucuggaaucuucucaguugagggcaaaaguuguauuaaucguugcuuuuacguggaacuaauccgcgguagaaaggaggaaaucgagguccucuggacuagcaacuccauuguggucuucugugggaccucuggcacauauggaacuggcucguggcccgauggggccgacauaaaucugaugccuaucuga

SEQ ID NO: 148741 - RNA, 1410 nt, Artificial Sequence; identical to SEQ ID NO: 148740
  derived and/or modified CDS sequence (opt3) from neuraminidase__InfluenzaA__AEG65640

SEQ ID NO: 148742 - RNA, 1410 nt, Artificial Sequence; identical to SEQ ID NO: 142183
  derived and/or modified CDS sequence (opt3) from neuraminidase__InfluenzaA__AEG65651

SEQ ID NO: 148743 - RNA, 1410 nt, Artificial Sequence; identical to SEQ ID NO: 142762
  derived and/or modified CDS sequence (opt3) from neuraminidase__InfluenzaA__AEG65662

SEQ ID NO: 148744 - RNA, 1410 nt, Artificial Sequence; identical to SEQ ID NO: 142762
  derived and/or modified CDS sequence (opt3) from neuraminidase__InfluenzaA__AEG65673

SEQ ID NO: 148745 - RNA, 1410 nt, Artificial Sequence; identical to SEQ ID NO: 142762
  derived and/or modified CDS sequence (opt3) from neuraminidase__InfluenzaA__AEG65684

SEQ ID NO: 148746 - RNA, 1410 nt, Artificial Sequence; identical to SEQ ID NO: 148719
  derived and/or modified CDS sequence (opt3) from neuraminidase__InfluenzaA__AEG65695

SEQ ID NO: 148747 - RNA, 1410 nt, Artificial Sequence
  derived and/or modified CDS sequence (opt3) from neuraminidase__InfluenzaA__AEG65706
augaaccccaaucagaagaucauuaccauaggcagcgugucccugacaaucucuacuauuugcuucuuuaugcaaaucgccauucucaucacgaccgucacacuucacuucaaacaguacgaguuuaacucaccuccaaauaaccagguuaugcugugugaaccgacuauaaucgagagaaauauuaccgaaaucguguauuugacaaacaccacuauugagaaggaaaucugccccaaauuagcugaguacaggaauuggaguaagccucaguguaacauaacaggguucgcaccauuuagcaaagacaauuccauucggcugucugccggaggugauaucuggguaacccgcgagcccuaugugucgugcgacccugauaaguguuaccaauucgcgcuaggccaggggacgacucucaacaauguccauucaaacgacaccgugcacgaucgaacaccauaucguacucugcuuaugaaugaacugggaguucccuuucauuugggcaccaaacaggugugcauugcuuggagcaguuccucuugucacgacgguaaggccuggcuccaugucugcgugacaggggaugacaagaacgcaaccgccagcuucaucuacaauggaagacugguagauuccaucguuucauggaguaaagagauucugaggacgcaggaaagcgagugugugugcauaaacggcacuuguacagucgugaugaccgacggcucugcuuccgggaaggcagauacuaaaauccucuuuauugaggaaggaaagaucgugcacacaucaaccuuaagcgguagugcccaacacgucgaggaaugcucuugcuauccucgguacccaggcguucgcugugugugcagagacaacuggaagggguccaauaggccgauaguagauauuaacaucaaagacuacagcaucgugucgucuuaugucuguuccggacuggugggcgacacgccccggaagaaugauucaaguagcuccucucauugccuugacccuaacaaugaggaaggugggcacggaguuaaaggcugggcuuucgaugacggcaacgauguguggauggggcgcaccauuagcgagaaguugcgaucaggauacgagacauuuaaagucaucgaagguuggaguaauccaaacuccaagcugcagauuaauagacaggugauaguagacaggggcaaccggagcggguauucuggaaucuucucaguugagggcaaaaguuguauuaaucguugcuuuuacguggaacuaauccgcgguagaaaggaggaaaacgagguccucuggacuagcaauuccaucguggucuucugugggaccucuggcacauauggaacuggcucguggcccgauggggccgacauuaaccugaugccuauauga

SEQ ID NO: 148748 - RNA, 1410 nt, Artificial Sequence
  derived and/or modified CDS sequence (opt3) from neuraminidase__InfluenzaA__AEG65728
augaaccccaaucagaagaucauuaccauaggcagcgugucccugacaaucucuacuauuugcuucuuuaugcaaaucgccauucucaucacgaccgucacacuucacuucaaacaguacgaguuuaacucaccuccaaauaaccagguuaugcugugugaaccgacuauaaucgagagaaauauuaccgaaaucguguauuugacaaacaccacuauugagaaggaaaucugccccaaauuagcugaguacaggaauuggaguaagccucaguguaacauaacaggguucgcaccauuuagcaaagacaauuccauucggcugucugccggaggugauaucuggguaacccgcgagcccuaugugucgugcgacccugauaaguguuaccaauucgcgcuaggccaggggacgacucucaacaauguccauucaaacgacaccgugcacgaucgaacaccauaucguacucugcuuaugaaugaacugggaguucccuuucauuugggcaccaaacaggugugcauugcuuggagcaguuccucuugucacgacgguaaggccuggcuccaugucugcgugacaggggaugacaagaacgcaaccgccagcuucaucuacaauggaagacugguagauuccaucguuucauggaguaaagagauucugaggacgcaggaaagcgagugugugugcauaaacggcacuuguacagucgugaugaccgacggcucugcuuccgggaaggcagauacuaaaauccucuuuauugaggaaggaaagaucgugcacacaucaaccuuaagcgguagugcccaacacgucgaggaaugcucuugcuauccucgguacccaggcguucgcugugugugcagagacaacuggaagggguccaauaggccgauaguagauauuaacaucaaagacuacagcaucgugucgucuuaugucuguuccggacuggugggcgacacgccccggaagaaugauucaaguagcuccucucauugccuugacccuaacaaugaggaaggugggcacggaguuaaaggcugggcuuucgaugacggcaacgauguguggauggggcgcaccauuagcgagaaguugcgaucaggauacgagacauuuaaagucaucgaagguuggaguaauccaaacuccaagcugcagauuaauagacaggugauaguagacaggggcaaccggagcggguauucuggaaucuucucaguugagggcaaaaguuguauuaaucguugcuuuuacguggaacuaauccgcgguagaaaggaggaaacugagguccucuggaccagcaacuccaucguggucuucugugggacaucuggcacuuauggaaccggcucguggcccgauggggccgagauuaaucugaugccuauauga

SEQ ID NO: 148749 - RNA, 1410 nt, Artificial Sequence
  derived and/or modified CDS sequence (opt3) from neuraminidase__InfluenzaA__AEG65739
augaaccccaaucagaagaucauuaccauaggcagcgugucccugacaaucucuacuauuugcuucuuuaugcaaaucgccauucucaucacgaccgucacacuucacuucaaacaguacgaguuuucaaguccuccaaacaaucagguuaugccgugugaacccacuauaaucgagagaaacauuaccgaaaucguguaucugacaaauaccacuauugagaaggaaaucugcccuaaauuggcugaguacaggaacuggagcaagccacagugugacauaacaggguucgcacccuuuuccaaagauaauucuauucgguuaucggccggaggugacaucuggguaacccgcgagccuuaugugucaugcgauccagacaaguguuaccaauucgcgcugggccaggggacgacucuaaacaauguccauagcaacgauaccgugcacgaccgaacacccuaucguacucuccugaugaaugaacuuggaguuccuuuucaucugggcaccaaacaggugugcauugcuuggaguuccucuagcugucacgaugguaaggccugguugcaugucugcgugacaggggacgauaagaacgcaaccgccuccuucaucuacaauggaagacucguagacucaaucguuaguuggagcaaagagauucugaggacgcaggaaucugagugugugugcauaaacggcacuuguacagucgugaugaccgauggcuccgcuucagggaaggcagacacuaaaauccuguuuauugaggaaggaaagaucgugcacacaagcacccucagugguucugcccaacacgucgaggaaugcuccugcuauccacgguacccgggcguucgcugugugugcagagauaauuggaaggggagcaacaggcccauaguagacauuaacaugaaagacuacucgaucgugucuuccuaugucuguucaggauuagugggcgauacgccucggaagaaugacaguagcuccucuagccauugccuggauccaaacaaugaggaaggugggcacggaguuaaaggcugggcuuucgacgauggcaacgacguguggauggggcgcaccaucucagagaaacuucgaaguggauacgagacauuuaaggucauugaagguugguccaaucccaacagcaaguugcagaucaauagacaggugauuguagauaggggcaaccggucuggguauucaggaauauucaguguugagggcaaaagcuguaucaaucguugcuuuuacguggaacugauucgcgguagaaaggaggaaacugagguccuauggaccuccaacucuaucguggucuucugugggacaucgggcacuuauggaaccggcagcuggccugacggggccgauaucaaucucaugccaauuuga

SEQ ID NO: 148750 - RNA, 1410 nt, Artificial Sequence; identical to SEQ ID NO: 144612
  derived and/or modified CDS sequence (opt3) from neuraminidase__InfluenzaA__AEG65750

SEQ ID NO: 148751 - RNA, 1410 nt, Artificial Sequence; identical to SEQ ID NO: 148748
  derived and/or modified CDS sequence (opt3) from neuraminidase__InfluenzaA__AEG65761

SEQ ID NO: 148752 - RNA, 1410 nt, Artificial Sequence
  derived and/or modified CDS sequence (opt3) from neuraminidase__InfluenzaA__AEG65772
augaaccccaaucagaagaucauuaccauaggcagcgugucccugacaaucucuacuauuugcuucuuuaugcaaacggccauccucauuaccacagucacucuucacuucaaacaguacgaguuuaacucaccuccaaauaaccagguuaugcugugugaaccgaccaucauagagagaaauaucacagaaauuguguauuugaccaacacuacaaucgagaaggaaaugugccccaaauuagcugaguacaggaauuggaguaagccucagugugacauuaccggguucgcaccauuuagcaaagauaacuccauccggcugucugccggaggugacauauggguaacgcgcgagcccuaugugucgugcgauccugacaaguguuaccaauucgcgcuaggccaggggacuacccucaauaacguccauucaaaugauacagugcacgaccgaacuccauaucguacccugcuuaugaacgaacugggaguucccuuucauuugggcacaaaacaggugugcauugcuuggagcaguuccucuugucacgaugguaaggccuggcuccaugucugcgugaccggggacgauaagaaugcaacggccagcuucaucuacaacggaagacugguagacuccauuguuucauggaguaaaaagauccugaggacucaggagagcgaaugugugugcaucaauggcacauguaccgucgugaugacugauggcucugcuuccgggaaagcagacacaaagauucucuuuauagaggagggaaagaucauucacaccucaacguuaagcgguagugcccaacacguggaagagugcucuugcuauccucgguacccaggcguccgcuguguuugcagagauaacuggaaaggguccaacaggccgaucguggacauaaauauuaaggacuacagcaucguaucgucuuauguguguuccggacuggucggcgauacaccccggaaaaacgacucaaguagcuccucucauugccuugauccuaauaacgaagagggugggcacggagugaagggcugggcuuucgacgauggcaaugacguuuggauggggcgcaccaucagcgaaaaauugcgaucaggauacgagacuuuuaaggugauugaggguuggaguaaaccaaacuccaagcugcagaucaauagacaggucauuguggauaggggcaaccggagcggguauucuggaauauucucaguagaaggcaagaguuguaucaaucguugcuuuuacguugagcuaauucgcgguagaaaagaagagaccgaagugcucuggacaagcaacuccaucgucguguucugugggacuucuggcaccuauggaacaggcucguggcccgacggggccgauaucaaucugaugccuauuuga

SEQ ID NO: 148753 - RNA, 1410 nt, Artificial Sequence; identical to SEQ ID NO: 147566
  derived and/or modified CDS sequence (opt3) from neuraminidase__InfluenzaA__AEG65783

SEQ ID NO: 148754 - RNA, 1410 nt, Artificial Sequence
  derived and/or modified CDS sequence (opt3) from neuraminidase__InfluenzaA__AEG65794
augaaccccaaucagaagaucauuaccauaggcagcgugucccugacaaucucuacuauuugcuucuuuaugcaaaucgccauucucaucacgaccauaacacuucacuucaaacaguacgaguuuaacucaccuccaaauaaccaggucaugcugugugaaccgacuaucauugagagaaauaucaccgaaauuguuuauuugacaaacaccacuaucgagaaggaaauaugccccaaauuagcugaguacaggaauuggaguaagccucagugugacauuacaggguucgcaccauuuagcaaagauaacuccauccggcugucugccggaggugacauuugggugacccgcgagcccuauguaucgugcgauccugacaaguguuaccaauucgcgcuaggccaggggacgacucucaauaacgugcauucaaauaacaccguccgagaucguacaccauauagaacucugcuuaugaaugaacugggagugcccuuucacuugggcaccaagcagguuugcaucgcuuggagcaguuccucuugucaugacgguaaagccuggcuccacgugugcaucacaggggaugacaagaacgcaaccgccagcuucauuuacaauggaaggcuggucgauuccgugguaucauggaguaaagagauacugcggacgcaggaaagcgaguguguuugcaucaacggcacuuguacaguggucaugaccgacggcucugcuuccgggaaggcagauacuaaaauucucuuuaucgaggaaggaaagauagugcauacaucaaccuuaagcgguagugcccaacacguggaggaaugcucuugcuauccucgcuacccaggcgucagauguguuugcagggacaacuggaagggguccaaucggccgauuguggauaucaacaucaaagaccacagcauuguaucgucuuacguguguuccggacuggucggcgacacgccccgcaagaaugauucaaguagcuccucucauugccuugacccuaacaaugaggaaggugggcacggagugaaaggcugggcuuucgaugacggcaacgauguuuggauggggcgaaccaucaaugagacaagcagauugggauaugagacuuuuaaggugauugaagguuggucaaacccaaaaaguaagcugcagauaaauaggcaggucaucguggacaaaggcaaccgguccggguacagcggaauuuucucuguagagggcaagucauguaucaaucguugcuuuuauguugaacuaauccgcgguagaaaggaggaaaccgaggugcucuggacaaguaacagcauugucguguucugugggacuuccggcaccuacggaacaggcucuuggcccgauggggccgaccugaaucuuaugccuauauga

SEQ ID NO: 148755 - RNA, 1410 nt, Artificial Sequence; identical to SEQ ID NO: 147566
  derived and/or modified CDS sequence (opt3) from neuraminidase__InfluenzaA__AEG65805

SEQ ID NO: 148756 - RNA, 1410 nt, Artificial Sequence
  derived and/or modified CDS sequence (opt3) from neuraminidase__InfluenzaA__AEG65816
augaaccccaaucagaagaucauuaccauaggcagcgugucccugacaaucucuacuauuugcuucuuuaugcagaucgccauucucaucacgaccgucacacuucacuucaaacaguacgaguuuaacucaccuccaaauaaccagguuaugcugugugaaccgacuauaaucgagagaaauauuaccgaaaucguguauuugacaaacaccacuauugagaaggaaaucugccccaaauuagcugaguacaggaauuggaguaagccucagugugacauaacaggguucgcaccauuuagcaaagauaacuccauucggcugucugccggaggugacaucuggguaacccgcgagcccuaugugucgugcgauccugacaaguguuaccaauucgcgcuaggccaggggacgacucucaauaacguccauucaaauaacaccgugcgagaucguacaccauauagaacucugcuuaugaaugaacugggaguucccuuucacuugggcaccaaacaggugugcauugcuuggagcaguuccucuugucaugacgguaaggccuggcuccacgucugcaucacaggggaugacaagaacgcaaccgccagcuucaucuacaauggaaggcugguggauuccguaguuucauggaguaaagagauucugcggacgcaggaaagcgagugugugugcauaaacggcacuuguacagucgugaugaccgacggcucugcuuccggggaggcagauacuaagauccucuuuauugaagagggaaaaaucgugcauacaucaaccuuaagcgguagugcccaacacgucgaagagugcucuugcuauccucgcuacccaggcguuagaugugugugcagggacaacuggaagggguccaaucggccgauaguagauauuaacaucaaggaccacagcaucgugucgucuuacgucuguuccggacuggugggcgacacgccccgcaaaaaugauucaaguagcuccucucauugccuugacccuaacaaugaagagggugggcacggaguuaagggcugggcuuucgaugacggcaacgauguguggauggggcgaaccauuaaugagacaagcagauugggauaugaaacuuuuaaagucaucgaggguuggucaaacccaaagaguaaacugcagauuaauaggcaagugauaguagaccggggcaaccguuccggguacagcggaaucuucucuguugaaggcaagucauguauuaaucgcugcuuuuauguggagcuaaucagagguaggaaagaagagaccgagguccucuggacaaguaacagcaucguggucuucugugggacuuccggcaccuacggaacaggcucuuggcccgauggggccgaccugaaucuuaugccuauuuga

SEQ ID NO: 148757 - RNA, 1410 nt, Artificial Sequence
  derived and/or modified CDS sequence (opt3) from neuraminidase__InfluenzaA__AEG79808
augaaccccaaucagaagaucauuaccauaggcagcgugugcaugacaaucgggauggccaaccugauucuccaaaucggaaauauuaucuccauauggaucucucacucaauucagcuugguaaccagaaucagaucgagacuuguaaccaaagugucauuacguacgaaaauaacaccuggguuaaucagacauaugugaacaucagcaauacuaacuucgcugcaggccaguccguagugucugucaaacuggccggaaauucgucauugugcccugugagcggaugggcgauauacaguaaggacaacuccauuagaaucggcucuaaaggugauguuuuugugauuagggagccauucaucagcuguuccccguuagaaugccggaccuuuuuccugacacagggggcucuacucaaugacaagcauucaaacggaaccaucaaagaucgcagucccuaucgaacucugaugagcuguccuauuggcgaggucccaucucccuacaacucccguuuugaaucaguggccuggagcgcaagugccugccacgacggcauaaauuggcuuacaaucgggauuucuggaccugauaacggugcuguagcaguucugaaguauaauggcaucauaaccgacacgauuaaguccuggagaaacaauaucuugaggacucaagagagcgagugugccugcgugaacgggucguguuucaccaucaugacagauggaccaucugacggccaggcuuccuacaaaauuuuucggaucgaaaaggguaaaauugucaagucaguggagaugaaugcccccaacuaucauuacgaagagugcaguuguuacccugauagcuccgagauaacuugcgugugccgcgacaauuggcacgggucuaacagaccaugggucagcuucaaucagaaccucgaauaucagaucggauacauuuguucaggcaucuuuggcgauaauccgaggcccaacgacaaaaccgggaguugcggaccuguuuccagcaauggugcgaacggcgugaagggguucucuuuuaaguauggaaacggcguauggaucggucggacaaaaucaauuaguagccgcaagggguucgagaugauaugggauccaaauggcuggaccggaacggacaacaauuuuuccaucaaacaagacauugugggcaucaacgaauggucuggguacucggggagcuucguccagcaucccgagcugacuggucuggauuguauucgaccuugcuucuggguggaacucaucagaggcaggccaaaggagaauacaauauggaccuccgggucaaguaucucuuuuuguggaguuaacagcgacacugugggcugguccuggcccgauggugcagaguuaccguucacaauugacaaauga

SEQ ID NO: 148758 - RNA, 1410 nt, Artificial Sequence; identical to SEQ ID NO: 148757
  derived and/or modified CDS sequence (opt3) from neuraminidase__InfluenzaA__AEG79814

SEQ ID NO: 148759 - RNA, 1410 nt, Artificial Sequence
  derived and/or modified CDS sequence (opt3) from neuraminidase__InfluenzaA__AEG79826
augaaccccaaucagaagaucauuaccauaagcuccgugugcaugacaaucggcauggccaaccugauucuccaaaucgggaauauuaucucuauauggaucucacacaguauucagcuuggaaaccagaaucagaucgagacuuguaaccaaagcgucauuacguacgaaaauaacaccuggguuaaucagacauaugugaacaucuccaauacuaacuucgcugcaggucagucuguagugucggucaaacuggccggcaauagcucauugugcccugugagugggugggcgauauacuccaaggacaacucuauuagaaucggaagcaaaggcgauguuuuugugauuagggagccauucaucuccuguucaccguuagaaugccggaccuuuuuccugacacagggugcucuacucaaugacaagcauaguaacgggaccaucaaagaucgcagccccuaucgaacucugaugucuuguccuauuggagaggucccaucccccuacaacucacguuuugaaagcguggccuggagugcaucugccugccacgacggcauaaauuggcuuacaaucggcauuuccgggccugauaacggagcuguagcaguucugaaguauaaugguaucauaaccgacacgauuaagagcuggagaaacaauaucuugaggacucaagagucggagugugccugcgugaacggcucuuguuucaccaucaugacagaugggccauccgacggacaggcuucauacaaaauuuuucggaucgaaaagggcaaaauugucaagaguguggagaugaaugcccccaacuaucauuacgaagagugcagcuguuacccugauuccucugagauaacuugcgugugccgcgacaauuggcacgguagcaacagaccaugggucucauucaaucagaaccucgaauaucagaucggguacauuuguaguggaaucuuuggcgauaauccgaggcccaacgacaaaaccggcuccugcgggccuguuagcucuaauggagcgaacggugugaagggcuucucauuuaaguaugggaacggaguauggaucggccggacaaaaaguauuagcucccgcaaggguuucgagaugauaugggauccaaauggguggaccggcacggacaacaauuuuucuaucaaacaagacauugugggaaucaacgaauggucgggcuacagcggguccuucguccagcaucccgagcugacuggacuggauuguauucgaccuugcuucuggguggaacucaucagagguaggccaaaggagaauacaauauggaccucaggcaguucuaucagcuuuugugggguuaacuccgacacuaugggauggucauggcccgauggcgcagaguuaccguucacaauugacaaauga

SEQ ID NO: 148760 - RNA, 1410 nt, Artificial Sequence
  derived and/or modified CDS sequence (opt3) from neuraminidase__InfluenzaA__AEG79830
augaaccccaaucagaagaucauuaccauaagcuccgugugcaugacaaucggcauggccaaccugauucuccaaaucgggaauauuaucucuauauggaucucacacaguauucagcuuggaaaccagaaucagaucgagacuuguaaccaaagcgucauuacguacgaaaauaacaccuggguuaaucagacauaugugaacaucuccaauacuaacuucgcugcaggucagucuguagugucggucaaacuggccggcaauagcagcuugugcccugugagugggugggcgauauacuccaaggacaacucuauuagaaucggaagcaaaggcgauguuuuugugauuagggagccauucaucuccuguucaccguuagaaugccggaccuuuuuccugacacagggugcucuacucaaugacaagcauaguaacgggaccaucaaagaucgcagccccuaucgaacucugaugucuuguccuauuggagaggucccaucccccuacaacucacguuuugaaagcguggccuggagugcaucugccugccacgacggcauaaauuggcuuacaaucggcauuuccgggccugauaacggagcuguagcaguucugaaguauaaugguaucauaaccgacacgauuaagagcuggagaaacaauaucuugaggacucaagagucggagugugccugcgugaacggcucuuguuucaccgucaugacagaugggccauccgacggacaggcuucauacaaaaucuuucggauugaaaagggcaaaaucgugaagaguguggagaugaaugcccccaacuaucauuacgaagagugcagcuguuacccugauuccucugagauuacuugcgucugccgcgacaauuggcacgguagcaacagaccauggguuucauucaaucagaaccucgaauaucagauaggguacaucuguaguggaauuuuuggcgauaauccgaggcccaacgacaaaaccggcuccugcgggccugugagcucuaauggagcgaacgguguaaagggcuucucauuuaaguaugggaacggaguguggaucggccggacaaaaaguaucagcucccgcaaggguuucgagaugauuugggauccaaauggguggaccggcacggacaacaauuuuucuauaaaacaagacaucgucggaauuaacgaauggucgggcuacagcggguccuucgugcagcaucccgagcugacuggacuggauuguauccgaccuugcuucuggguugaacucauuagagguaggccaaaggagaauacaaucuggaccucaggcaguucuauaucauuuuguggggugaacuccgacacugucggauggucauggcccgauggcgcagaguuaccguucacaaucgacaaauga

SEQ ID NO: 148761 - RNA, 1410 nt, Artificial Sequence; identical to SEQ ID NO: 148305
  derived and/or modified CDS sequence (opt3) from neuraminidase__InfluenzaA__AEG79836

SEQ ID NO: 148762 - RNA, 1410 nt, Artificial Sequence
  derived and/or modified CDS sequence (opt3) from neuraminidase__InfluenzaA__AEH59356
augaaccccaaucagaagaucauuaccauaggcagcgugugcaugacaaucgggauggccaaccugauucuccaaaucggaaauauuaucuccauauggaucucucacucaauucagcuugguaaccagaaucagaucgagacuuguaaccaaagugucauuacguacgaaaauaacaccuggguuaaucagacauaugugaacaucagcaauacuaacuucgcugcaggccaguccguagugucugucaaacuggccggaaauucgucauugugcccugugagcggaugggcgauauacaguaaggacaacuccauuagaaucggcucuaaaggugauguuuuugugauuagggagccauucaucagcuguuccccguuagaaugccggaccuuuuuccugacacaggggacccuacucaaugacaagcauucaaacggaacuaucaaagaucgcagucccuaucgaacacugaugagcuguccuauuggcgaggucccaucucccuacaacucccguuuugaaucaguggcuuggagcgccagugcaugccacgacggcauaaauuggcuuaccaucgggauuucuggaccugauaacggugccguagcuguucugaaguauaauggcaucauaacggacacuauuaaguccuggagaaacaauaucuugaggacccaagagagcgagugugcaugcgugaacgggucguguuucacaaucaugacugauggaccaucugacggccaggccuccuacaaaauuuuucggaucgaaaaggguaaaauugucaagucaguggagaugaaugcucccaacuauuacuacgaagagugcaguuguuauccugauagcuccgagauaaccugcgugugccgcgacaauuggcaugggucuaacagaccaugggucagcuucaaucagaaccucgaauaccagaucggauauauuuguucaggcaucuuuggcgauaauccgaggcccaacgacaaaacagggaguugcggaccuguuuccagcaauggugccaacggcgugaagggguucucuuuuaaguacggaaacggcguauggaucggucggaccaaaucaauuaguagccgcaagggguucgagaugauaugggauccaaauggcuggacgggaacugacaacaauuuuuccaucaaacaagacauugugggcaucaacgaauggucuggguauucggggagcuucguccagcaccccgagcugacaggucuggauuguauucgaccuugcuucuggguggaacucaucagaggcaggccaaaggagaauaccguuuggacuuccgggucaaguauaucuuuuuguggagugaacagcgacacagucggcugguccuggcccgauggugcggaguuaccguucaccaucgacaaauga

SEQ ID NO: 148763 - RNA, 1410 nt, Artificial Sequence; identical to SEQ ID NO: 148757
  derived and/or modified CDS sequence (opt3) from neuraminidase__InfluenzaA__AEH59360

SEQ ID NO: 148764 - RNA, 1410 nt, Artificial Sequence
  derived and/or modified CDS sequence (opt3) from neuraminidase__InfluenzaA__AEH59364
augaaccccaaucagaagaucauuaccauaggcagcgugugcaugacaaucgggauggccaaccugauucuccaaaucggaaauauuaucuccauauggaucucucacucaauucagcuugguaaccagaaucagaucgagacuuguaaccaaagugucauuacguacgaaaauaacaccuggguuaaucagacauaugugaacaucagcaauacuaacuucgcugcaggccaguccguagugucugucaaacuggccggaaauucgucauugugcccugugagcgggugggcgauauacaguaaggacaacuccauuagaaucggcucuaaaggugauguuuuugugauuagggagccauucaucagcuguuccccguuagaaugccggaccuuuuuccugacacagggggcucuacucaaugacaagcauucaaacggaaccaucaaagaucgcagucccuaucgaacucugaugagcuguccuauuggcgaggucccaucucccuacaacucccguuuugaaucaguggccuggagcgcaagugccugccacgacggcauaaauuggcuuacaaucgggauuucuggaccugauaacggugcuguagcaguucugaaguauaauggcaucauaaccgacacgauuaaguccuggagaaacaauaucuugaggacucaagagagcgagugugccugcgugaacgggucguguuucaccgucaugacagauggaccaaaugacggccaggcuucuuacaaaaucuuucggauugaaaaggguaaaaucgugaaguccguggagaugaacgcccccaauuaucauuacgaagagugcucauguuacccugauaguagcgagauuacuugcgucugccgcgacaacuggcacggggcgaauagaccauggguuuccuucaaccagaaucucgaauaucagauaggauacaucuguucuggcauuuuuggcgauaacccgaggcccaaugacaaaaccgggagcugcggaccugugucaaguaacggugcaaacggcguaaagggguucuccuuuaaguauggaaauggcguguggaucggucggacaaaaagcaucucuucacgcaacggguucgagaugauuugggauccaaauggcuggaccggaacggacaacaauuuuaguauaaagcaagacaucgucggcauuaacgaauggagcggguacuccggaucuuucgugcagcaucccgagcugacuggucuggauuguauccgaccuugcuucuggguugaacucauuagaggcaggccaaaagagaauacaaucuggaccucggggagcuccauaucauuuuguggagugaacagugacacugucggcuggucuuggcccgauggugccgaguuaccguucacaaucgacaaguga

SEQ ID NO: 148765 - RNA, 1410 nt, Artificial Sequence
  derived and/or modified CDS sequence (opt3) from neuraminidase__InfluenzaA__AEH59366
augaaccccaaucagaagaucauuaccauaggcagcgugugcaugacaaucgggauggccaaccugauucuccaaaucggaaauauuaucuccauauggaucucucacucaauucagcuugguaaccagaaucagaucgagacuuguaaccaaagugucauuacguacgaaaauaacaccuggguuaaucagacauaugugaacaucagcaauacuaacuucgcugcaggccaguccguagugucugucaaacuggccggaaauucgucauugugcccugugagcgggugggcgauauacaguaaggacaacuccauuagaaucggcucuaaaggugauguuuuugugauuagggagccauucaucagcuguuccccguuagaaugccggaccuuuuuccugacacagggggcucuacucaaugacaagcauucaaacggaaccaucaaagaucgcagucccuaucgaacucugaugagcuguccuauuggcggcgucccaucucccuacaacucccguuuugagucaguggccuggagcgcaagugccugccacgacgggauaaauuggcuuacaaucggaauuucugguccugauaacggcgcuguagcaguucugaaguauaaugggaucauaaccgacacgauuaaguccuggagaaacaauaucuugaggacucaagaaagcgagugugccugcgugaacggaucguguuucaccaucaugacagauggcccaucugacggucaggcuuccuacaaaauuuuucggaucgagaaggggaaaauugucaagucaguggaaaugaaugcccccaacuaucauuacgaggaaugcaguuguuacccugauagcuccgagauaacuugcgugugccgcgacaauuggcacggaucuaacagaccaugggucagcuucaaucagaaccucgaguaucagaucggcuacauuuguucaggcaucuuuggggauaauccgaggcccaacgacaaaaccggaaguugcgguccuguuuccagcaauggcgcgaacggggugaagggauucucuuuuaaguauggcaacgguguauggaucgggcggacaaaaucaauuaguagccgcaagggcuucgaaaugauaugggauccaaauggauggaccggcacggacaacaauuuuuccaucaaacaagacauuguggggaucaacgaguggucuggauacucggguagcuucguccagcaucccgaacugacuggccuggauuguauucgaccuugcuucuggguggagcucaucagagggaggccaaaggaaaauacaauauggaccuccggaucaaguaucucuuuuuguggcguuaacagcgacacuguggguugguccuggcccgauggggcagaguuaccguucacaauugacaaauga

SEQ ID NO: 148766 - RNA, 1410 nt, Artificial Sequence; identical to SEQ ID NO: 148757
  derived and/or modified CDS sequence (opt3) from neuraminidase__InfluenzaA__AEH59368

SEQ ID NO: 148767 - RNA, 1410 nt, Artificial Sequence; identical to SEQ ID NO: 148305
  derived and/or modified CDS sequence (opt3) from neuraminidase__InfluenzaA__AEH59370

SEQ ID NO: 148768 - RNA, 1410 nt, Artificial Sequence; identical to SEQ ID NO: 148764
  derived and/or modified CDS sequence (opt3) from neuraminidase__InfluenzaA__AEH59372

SEQ ID NO: 148769 - RNA, 1410 nt, Artificial Sequence; identical to SEQ ID NO: 148764
  derived and/or modified CDS sequence (opt3) from neuraminidase__InfluenzaA__AEH59376

SEQ ID NO: 148770 - RNA, 1410 nt, Artificial Sequence; identical to SEQ ID NO: 148305
  derived and/or modified CDS sequence (opt3) from neuraminidase__InfluenzaA__AEH59378

SEQ ID NO: 148771 - RNA, 1410 nt, Artificial Sequence; identical to SEQ ID NO: 148764
  derived and/or modified CDS sequence (opt3) from neuraminidase__InfluenzaA__AEH59382

SEQ ID NO: 148772 - RNA, 1410 nt, Artificial Sequence
  derived and/or modified CDS sequence (opt3) from neuraminidase__InfluenzaA__AEH59384
augaaccccaaucagaagaucauuaccauaggcagcgugugcaugacaaucgggauggccaaccugauucuccaaaucggaaauauuaucuccauauggaucucucacucaauucagcuugguaaccagagucagaucgagacuuguaaucaaagcgucauuacguacgaaaacaauaccuggguuaaccagacauaugugaauaucuccaacacuaauuucgcugcaggccagucuguagugucggucaaacuggccgggaacagcucauugugcccugugaguggaugggcgauauacuccaaggacaauucuauuagaaucggcagcaaaggugauguuuuugugauuagggagccauucaucuccuguucaccguuagaaugccggaccuuuuuccugacacagggggcucuacucaacgacaagcauaguaauggaaccaucaaagaucgcagccccuaucgaacucugaugucuuguccuauuggcgaggucccaucccccuacaacucacguuuugaaagcguggccuggagugcaucugccugccacgacggcauaaacuggcuuacaaucgggauuuccggaccugauaauggugcuguagcaguucugaaguauaacggcaucauaaccgacacgauuaagagcuggagaaauaacaucuugaggacucaagagucggagugugccugcgugaaugggucuuguuucaccaucaugacagauggaccauccgacggccaggcuucauacaaaauuuuucggaucgaaaagggucgcauugucaaaaguguggagaugaacgcccccaauuaucauuacgaagagugcagcuguuacccugauuccucugagauaacuugcgugugcagagacaacuggcacgggagcaauaggccaugggucucauucaaccagaaucucgaauaucagaucggauacauuuguaguggcaucuuuggcgauaacccgcggcccaaugacaagaccggguccugcggaccuguuagcucuaacggugcgaauggcgugaaaggguucucauuuaaguauggaaacggcguauggaucggucgcacaaagaguauuagcucccgaaaaggguucgagaugauaugggauccaaacggcuggaccggaacggacaauaacuuuucuaucaagcaagacauugugggcaucaaugaauggucgggguacagcggauccuucguccagcaucccgagcugacuggucuggauuguauuagaccuugcuucuggguggaacucaucaggggccggccaaaagagaacacaauauggaccucagggaguucuaucagcuuuuguggaguuaauuccgacacugugggcuggucauggcccgauggugcagaguuaccguucacaauugacaaguga

SEQ ID NO: 148773 - RNA, 1410 nt, Artificial Sequence
  derived and/or modified CDS sequence (opt3) from neuraminidase__InfluenzaA__AEH59386
augaaccccaaucagaagaucauuaccauaggcagcgugugcaugacaaucgggauggccaaccugauucuccaaaucggaaauauuaucuccauauggaucucucacucaauucagaucgguaaccagaaucagauugagacuuguaaccaaagugucaucacguacgaaaauaacaccuggguuaaucagacauaugugaacauaagcaauacuaacuucgcugcaggccaguccguagugucugucaaacuugccggaaauucgucacugugcccugugagcggaugggcgauuuacaguaaggacaacuccaucagaauuggcucuaaaggugauguuuuugugaucagggagccauucaucagcuguuccccguuggaaugccggaccuuuuucuuaacacagggggcucugcuaaaugacaagcauucaaacggaaccauuaaagaucgcagucccuaucgaacucucaugagcuguccuauaggcgaggucccaucucccuacaacucccguuuugaaucaguggccuggagcgcaagugccugccacgacggcaucaauuggcugacaauugggaucucuggaccugauaacggugcuguagcaguucuuaaguauaauggcauaauuaccgacacgaucaaguccuggagaaacaauauccugaggacucaagagagcgagugugccugcgugaacgggucguguuucaccauuaugacagauggaccaucugacggccaggcuuccuacaaaaucuuucggauugaaaaggguaaaauagucaagucaguggagaugaaugcccccaacuaucauuacgaagagugcaguuguuacccugauagcuccgagaucacuugcgugugccgcgacaauuggcacgggucuaacagaccaugggucagcuucaaucagaacuuggaauaucagauuggauacaucuguucaggcaucuuuggcgauaauccgaggcccaacgacaaaaccgggaguugcggaccuguuuccagcaauggugcgaacggcgugaagggguucucuuuuaaguauggaaacggcguauggauuggucggacaaaaucaauaaguagccgcaagggguucgagaugaucugggauccaaauggcuggaccggaacggacaacaauuuuuccauuaaacaagacaucgugggcauuaacgaauggucuggguacucggggagcuucguccagcaucccgagcucacuggucuggauuguauccgaccuugcuucuggguggaacugauaagaggcaggccaaaggagaauacaaucuggaccuccgggucaaguauuucuuuuuguggaguuaacagcgacacugugggcugguccuggcccgauggugcagagcucccguucacaaucgacaaauga

SEQ ID NO: 148774 - RNA, 1410 nt, Artificial Sequence; identical to SEQ ID NO: 148764
  derived and/or modified CDS sequence (opt3) from neuraminidase__InfluenzaA__AEH59388

SEQ ID NO: 148775 - RNA, 1410 nt, Artificial Sequence
  derived and/or modified CDS sequence (opt3) from neuraminidase__InfluenzaA__AEH59390
augaaccccaaucagaagaucauuaccauaggcagcgugugcaugacaaucgggauggccaaccugauucuccaaaucggaaauauuaucuccauauggaucucucacucaauucagcuugguaaccagagucagaucgagacuuguaaucaaagcgucauuacguacgaaaacaauaccuggguuaaccagacauaugugaauaucuccaacacuaauuucgcugcaggccagucuguagugucggucaaacuggccgggaacagcagcuugugcccugugaguggaugggcgauauacuccaaggacaauucuauuagaaucggcagcaaaggugauguuuuugugauuagggagccauucaucuccuguucaccguuagaaugccggaccuuuuuccugacacagggggcucuacucaacgacaagcauaguaauggaaccaucaaagaucgcagccccuaucgaacucugaugucuuguccuauuggcgaggucccaucccccuacaacucacguuuugaaagcguggccuggagugcaucugccugccacgacggcauaaacuggcuuacaaucgggauuuccggaccugauaauggugcuguagcaguucugaaguauaacggcaucauaaccgacacgauuaagagcuggagaaauaacaucuugaggacucaagagucggagugugccugcgugaaugggucuuguuucaccaucaugacagauggaccauccgacggccaggcuucauacaaaauuuuucggaucgaaaaggguaaaauugucaagaguguggagaugaacgcccccaauuaucauuacgaagagugcagcuguuacccugauuccucugagauaacuugcgugugccgcgacaacuggcacgggagcaauagaccaugggucucauucaaccagaaucucgaauaucagaucggauacauuuguaguggcaucuuuggcgauaacccgaggcccaaugacaaaaccggguccugcggaccuguuagcucuaacggugcgaauggcgugaagggguucucauuuaaguauggaaacggcguauggaucggucggacaaaaaguauuagcucccgcaagggguucgagaugauaugggauccaaacggcuggaccggaacggacaauaacuuuucuaucaaacaagacauugugggccugaaugaauggucgggguacagcggauccuucguccagcaucccgagcugacuggucucgauuguauccgaccuugcuucuggguggaauuaauuagaggccugccaaaggagaacacaaucuggaccucagggaguucuauaucauuuuguggaguuaauuccgacacugugggcuggucauggcccgauggugcagagcuuccguucacaaucgacaaauga

SEQ ID NO: 148776 - RNA, 1410 nt, Artificial Sequence; identical to SEQ ID NO: 148764
  derived and/or modified CDS sequence (opt3) from neuraminidase__InfluenzaA__AEH59392

SEQ ID NO: 148777 - RNA, 1410 nt, Artificial Sequence; identical to SEQ ID NO: 148764
  derived and/or modified CDS sequence (opt3) from neuraminidase__InfluenzaA__AEH59396

SEQ ID NO: 148778 - RNA, 1410 nt, Artificial Sequence
  derived and/or modified CDS sequence (opt3) from neuraminidase__InfluenzaA__AEH59398
augaaccccaaucagaagaucauuaccauaggcagcgugugcaugacaaucggggucgccaaccugauucuccaaaucggaaauauuaucuccauauggaucucucacucaauucagcuugguaaccagaaucagaucgagacuuguaaccaaaguguuauuacguacgaaaauaacaccugggugaaucagacauauguaaacaucagcaauacuaacuucgcugcaggccaguccguggucucugugaaacuggccggaaauucgucauugugcccuguuagcggaugggcgauauacaguaaggacaacuccauuagaaucggcucuaaaggugauguguuugucauuagggagccauucaucagcuguuccccguuagaaugccggaccuuuuuccugacacagggggcucuacucaaugacaagcauucaaacggaaccaucaaagaucgcagucccuaucgaacucugaugagcuguccuauuggcgaggugccaucucccuacaacucccguuuugaaucaguagccuggagcgcaagugccugccacgacggcauaaauuggcuuacaaucgggauuucuggaccugauaacggugcuguugcagugcugaaguauaauggcaucauaaccgacacgauuaaguccuggagaaacuacaucuugaggacucaagagagcgagugugccugcgucaaugggucguguuucaccaucaugacagauggaccaucugacggccaggcuuccuauaaaauuuuucggaucgaaaaggguaaaguggugaagucagucgagaugaacgcccccaauuaccauuacgaagagugcaguuguuauccugauagcuccgagauuacuugcguuugccgcgacaacuggcacgggucuaauagaccaugggugagcuucaaccagaaucucgaauaccagauaggauauaucuguucaggcauuuuuggcgauaacccgaggcccaaugacaaaaccgggaguugcggaccuguauccagcaacggugcgaauggcgugaagggguucucuuuuaaguacggaaacggcgucuggaucggucggacaaaaucaaucaguagccgcaagggguucgagaugauuugggauccaaacggcuggaccggaacggacaauaacuuuuccauaaaacaagacaucauuggcaucaaugaauggucuggguauucggggagcuucgugcagcaucccgagcugacuggucuggauuguauucgaccuugcuucuggguugaacucaucagaggcaggccaaaggagaacacaauauggaccuccgggucaaguaucucuuuuuguggagugaauagcgacacugucggcugguccuggcccgauggugcagaguuaccguucacaauugacaaauga

SEQ ID NO: 148779 - RNA, 1410 nt, Artificial Sequence
  derived and/or modified CDS sequence (opt3) from neuraminidase__InfluenzaA__AEH59400
augaaccccaaucagaagaucauuaccauaggcagcgugugcaugacaaucgggauggccaaccugauucuccaaaucggaaauauuaucuccauauggaucucucacucaauucagcuugguaaccagagucagaucgagacuuguaaucaaagcgucauuacguacgaaaacaauaccuggguuaaccagacauaugugaauaucuccaacacuaauuucgcugcaggccagucuguagugucggucaaacuggccgggaacucaucuuugugcccugugaguggaugggcgauauacuccaaggacaauucuauuagaaucggcagcaaaggugauguuuuugugauuagggagccauucaucuccuguucaccguuagaaugccggaccuuuuuccugacacagggggcucuacucaacgacaagcauaguaauggaaccaucaaagaucgcagccccuaucgaacucugaugucuuguccuauuggcgaggucccaucccccuacaacucacguuuugaaagcguggccuggagugcaucugccugccacgacggcauaaacuggcuuacaaucgggauuuccggaccugauaauggugcuguagcaguucugaaguauaacggcaucauaaccgacacgauuaagagcuggagaaauaacaucuugaggacucaagagucggagugugccugcgugaaugggucuuguuucaccgucaugacagauggaccaaacgacggccaggcuuccuacaaaaucuuucggauugaaaaggguaaaaucgugaagucaguggagaugaaugcccccaacuaucauuacgaagagugcaguuguuacccugauagcuccgagauuacuugcgucugccgcgacaauuggcacggggcgaacagaccauggguuucuuucaaucagaaccucgaauaucagauaggauacaucuguagcggcauuuuuggcgauaauccgaggcccaacgacaaaaccgggucaugcggaccugugaguuccaauggugcaaacggcguaaagggguucagcuuuaaguauggaaacggcguguggaucggucggacaaaaucuaucucaagucgcaauggguucgagaugauuugggauccaaacggcuggaccggaacggacaauaacuuuagcauaaagcaagacaucgucggcauuaaugaaugguccggguacucuggaucguucgugcagcaucccgagcugacuggucuggauuguauccgaccuugcuucuggguugaacucauuagaggcaggccaaaagagaacacaaucuggaccagcggguccucaauaaguuuuuguggagugaauagcgacacugucggcuggagcuggcccgauggugccgaguuaccguucacaaucgacaaguga

SEQ ID NO: 148780 - RNA, 1410 nt, Artificial Sequence
  derived and/or modified CDS sequence (opt3) from neuraminidase__InfluenzaA__AEH59402
augaaccccaaucagaagaucauuaccauaggcagcgugugcaugacaaucgggauggccaaccugauucuccaaaucggaaauauuaucuccauauggaucucucacucaauucagcuugguaaccagaaucagaucgagacuuguaaccaaagugucauuacguacgaaaauaacaccuggguuaaucagacauaugugaacaucagcaauacuaacuucgcugcaggccaguccguagugucugucaaacuggccggaaauucgucauugugcccugugagcgggugggcgauauacaguaaggacaacuccauuagaaucggcucuaaaggugauguuuuugugauuagggagccauucaucagcuguuccccguuagaaugccggaccuuuuuccugacacagggggcucuacucaaugacaagcauucaaacggaaccaucaaagaucgcagucccuaucgaacucugaugagcuguccuauuggcgaggucccaucucccuacaacucccguuuugaaucaguggccuggagcgcaagugccugccacgacggcauaaauuggcuuacaaucgggauuucuggaccugauaacggugcuguagcaguucugaaguauaauggcaucauaaccgacacgauuaaguccuggagaaacaauaucuugaggacucaagagagcgagugugccugcgugaacgggucguguuucaccgucaugacagauggaccaaaugacggccaggcuucuuacaaaaucuuucggauugaaaaggguaaaaucgugaaguccguggagaugaacgcccccaauuaucauuacgaagagugcucauguuacccugauaguagcgagauuacuugcgucugccgcgacaacuggcacggggcgaauagaccauggguuuccuucaaccagaaucucgaauaucagauaggauacaucuguucuggcauuuuuggcgauaacccgaggcccaaugacaaaaccgggagcugcggaccugugucaaguaacggugcaaacggcguaaagggguucuccuuuaaguauggaaauggcguguggaucggucggacaaaaagcaucucuucacgcaacggguucgagaugauuugggauccaaauggcuggaccgaaacggacaacaauuuuaguauaaagcaagacaucgucggaauuaacgaguggagcggcuacuccgggucuuucgugcagcaucccgaacugacuggacuggauuguauccgaccuugcuucuggguugagcucauuagagguaggccaaaagagaauacaaucuggaccucgggcagcuccauaucauuuuguggggugaacagugacacugucggauggucuuggcccgauggcgccgaauuaccguucacaaucgacaaguga

SEQ ID NO: 148781 - RNA, 1410 nt, Artificial Sequence
  derived and/or modified CDS sequence (opt3) from neuraminidase__InfluenzaA__AEH59404
augaaccccaaucagaagaucauuaccauaggcagcgccugcaugacaaucgggauggcuaaccugauucuccaaaucggaaauauuaucuccauauggaucucucacucaauucagcuugguaaccagagucagaucgagacuuguaaucaaagcgugauuacguacgaaaacaauaccugggucaaccagacauauguuaauaucuccaacacuaauuucgcagccggccagccugugguaucugugaaacuggcggggaacucgucauugugcccagucagcggaugggcuauauacaguaaggacaauuccauuagaaucggcucuaaaggugauguguuuguuauuagggagccguucaucagcuguucccccuuagaaugccggaccuuuuuccugacacagggggcccuacucaacgacaagcauucaaauggaaccaucaaagaucgcaguccuuaucgaacucugaugagcuguccaauuggcgaggugcccucuccuuacaacucccguuuugaaucagucgcauggagcgccagugcuugccacgacggcauaaacuggcuuacaaucgggauuucuggaccagauaauggugcaguggccguacugaaguauaacggcaucauaaccgacacgauuaaguccuggagaaauaacaucuugaggacucaagagagcgagugugcuugcguuaaugggucguguuucaccaucaugacagauggacccucugacggccaggccuccuacaaaauuuuucggaucgaaaaggguaaaauugugaagucagucgagaugaacgcgccuaauuaucauuacgaagagugcaguuguuacccagauagcuccgagauaacuugcgugugccgcgacaacuggcacgggucuaauagaccgugggugagcuucaaccagaaucucgaauaucagaucggauacauuuguucaggcaucuuuggcgauaaccccaggccuaaugacaaaaccgggaguugcggaccagucuccagcaacggugcaaauggcguuaagggguucucuuuuaaguauggaaacggcguguggaucggucggacaaaaucaauuaguagccgcaagggguucgagaugauaugggaucccaacggcuggaccggaacggacaauaacuuuuccaucaaacaagacauuguaggcaucaaugaauggucuggguacucggguagcuucgugcagcauccugagcugacuggacuggauuguauucgaccaugcuucugggucgaacucaucagaggcaggcccaaggagaacacaauauggaccuccgggucaaguaucucuuuuuguggagugaauagcgacacuguuggcugguccuggccggauggugccgaguuaccuuucacaauugacaaauga

SEQ ID NO: 148782 - RNA, 1410 nt, Artificial Sequence
  derived and/or modified CDS sequence (opt3) from neuraminidase__InfluenzaA__AEH59406
augaaccccaaucagaagaucauuaccauaggcagcgugugcaugacaaucgggauggccaaccugauucuccaaaucggaaauauuaucuccauauggaucucucacucaauucagcuugguaaccagagucagaucgagacuuguaaucaaagcgucauuacguacgaaaacaauaccuggguuaaccagacauaugugaauaucuccaacacuaauuucgcugcaggccagucuguagugucggucaaacuggccgggaacagcagcuugugcccugugaguggaugggcgauauacuccaaggacaauucuauuagaaucggcagcaaaggugauguuuuugugauuagggagccauucaucuccuguucaccguuagaaugccggaccuuuuuccugacacagggggcucuacucaacgacaagcauaguaauggaaccaucaaagaucgcagccccuaucgaacucugaugucuuguccuauuggcgaggucccaucccccuacaacucacguuuugaaagcguggccuggagugcaucugccugccacgacggcauaaacuggcuuacaaucgggauuuccggaccugauaauggugcuguagcaguucugaaguauaacggcaucauaaccgacacgauuaagagcuggagaaauaacaucuugaggacucaagagucggagugugccugcgugaaugggucuuguuucaccaucaugacagauggaccauccgacggccaggcuucauacaaaauuuuucggaucgaaaaggguaaaauugucaagaguguggagaugaacgcccccacuuaucauuacgaagagugcagcuguuacccugauuccucugagauaaccugcgugugccgcgacaauuggcacgggagcaacagaccaugggucucauucaaucagaaccucgaauaucagaucggauacauuuguaguggcaucuuuggcgauaauccgaggcccaacgacaaaacaggguccugcggaccuguuagcuucaauggugcgaacggcgugaagggguuuucuuucaaguauggaaauggcguauggaucggucggaccaaaucaauuaguagccgcaagggguuugagaugauaugggauccaaacggcuggacgggaacugacaacaauuucuccaucaaacaagacauugugggcaucgaugaauggucuggguacucgggaucauucguccagcaucccgagcugacaggucuggacuguauucgaccuugcuuuuggguggaacucaucagaggcaggccaaaggagaacaccauauggacuuccgggucaaguaucucuuucuguggaguuaauagcgauacagugggcugguccuggcccgacggugcagaguuaccguuuaccauugauaaauga

SEQ ID NO: 148783 - RNA, 1410 nt, Artificial Sequence; identical to SEQ ID NO: 148305
  derived and/or modified CDS sequence (opt3) from neuraminidase__InfluenzaA__AEH59408

SEQ ID NO: 148784 - RNA, 1410 nt, Artificial Sequence
  derived and/or modified CDS sequence (opt3) from neuraminidase__InfluenzaA__AEH59412
augaaccccaaucagaagaucauuaccauaggcagcgugugcaugacaaucgggauggccaaccugauucuccaaaucggaaauauuaucuccauauggaucucucacucaauucagcuugguaaccagagucagaucgagacuuguaaucaaagcgucauuacguacgaaaacaauaccuggguuaaccagacauaugugaauaucuccaacacuaauuucgcugcaggccagucuguagugucggucaaacuggccgggaacagcagcuugugcccugugaguggaugggcgauauacuccaaggacaauucuauuagaaucggcagcaaaggugauguuuuugugauuagggagccauucaucuccuguucaccguuagaaugccggaccuuuuuccugacacagggggcucuacucaacgacaagcauaguaauggaaccaucaaagaucgcagccccuaucgaacucugaugucuuguccuauuggcgaggucccaucccccuacaacucacguuuugaaagcguggccuggagugcaucugccugccacgacggcauaaacuggcuuacaaucgggauuuccggaccugauaauggugcuguagcaguucugaaguauaacggcaucauaaccgacacgauuagaagcuggaggaauaacaucuugcggacucaagagucggagugugccugcgugaaugggucuuguuucaccaucaugacagauggaccauccgacggccaggcuucauacaagauuuuucgcaucgaaaaagguaagauuauaaaaagugucgagaugaacgcccccaauuaucauuacgaagagugcagcuguuacccugauuccucugagaucacuugcgugugcagagacaacuggcacgggagcaauaggccaugggugucauucaaccagaaucucgaauaucagauuggauacaucuguaguggcaucuuuggcgauaacccgcggcccaaugacaagaccggguccugcggaccuguccugagcaacggugcgaauggcguuaaaggguucucuuuuaaguauggaaacggcguguggauuggucgcacaaagucaauaaguagccgaaaaggguucgagaugaucugggauccaaacggcuggaccggaacggacaauaacuuuuccauuaagcaagacaucguaggcauuaaugaauggucuggguacucgggaucauucgugcagcaucccgagcugacuggucucgauuguaucagaccuugcuucugggucgaauuaauaaggggccggccaaaagagaacacaaucuggaccuccgggucaaguauuucuuuuuguggagugaauagcgacacuguuggcugguccuggcccgauggugcagagcugccguucacaaucgacaaguga

SEQ ID NO: 148785 - RNA, 1410 nt, Artificial Sequence; identical to SEQ ID NO: 148757
  derived and/or modified CDS sequence (opt3) from neuraminidase__InfluenzaA__AEH59416

SEQ ID NO: 148786 - RNA, 1410 nt, Artificial Sequence; identical to SEQ ID NO: 144786
  derived and/or modified CDS sequence (opt3) from neuraminidase__InfluenzaA__AEH59584

SEQ ID NO: 148787 - RNA, 1410 nt, Artificial Sequence; identical to SEQ ID NO: 144786
  derived and/or modified CDS sequence (opt3) from neuraminidase__InfluenzaA__AEH59586

SEQ ID NO: 148788 - RNA, 1410 nt, Artificial Sequence; identical to SEQ ID NO: 144786
  derived and/or modified CDS sequence (opt3) from neuraminidase__InfluenzaA__AEH59588

SEQ ID NO: 148789 - RNA, 1410 nt, Artificial Sequence; identical to SEQ ID NO: 144786
  derived and/or modified CDS sequence (opt3) from neuraminidase__InfluenzaA__AEH59592

SEQ ID NO: 148790 - RNA, 1410 nt, Artificial Sequence; identical to SEQ ID NO: 144786
  derived and/or modified CDS sequence (opt3) from neuraminidase__InfluenzaA__AEH59594

SEQ ID NO: 148791 - RNA, 1410 nt, Artificial Sequence; identical to SEQ ID NO: 144786
  derived and/or modified CDS sequence (opt3) from neuraminidase__InfluenzaA__AEH59596

SEQ ID NO: 148792 - RNA, 1410 nt, Artificial Sequence; identical to SEQ ID NO: 144786
  derived and/or modified CDS sequence (opt3) from neuraminidase__InfluenzaA__AEH59598

SEQ ID NO: 148793 - RNA, 1410 nt, Artificial Sequence; identical to SEQ ID NO: 144786
  derived and/or modified CDS sequence (opt3) from neuraminidase__InfluenzaA__AEH59600

SEQ ID NO: 148794 - RNA, 1410 nt, Artificial Sequence
  derived and/or modified CDS sequence (opt3) from neuraminidase__InfluenzaA__AEH59602
augaaccccaaucagaagaucauuaccauaggcagcgugugcaugacaaucgggauggccaaccugauucuccaaaucggaaauauuaucuccauauggaucucucacucaauucagcuugguagucagaaccagaucgagacuuguaaucaaagcgucauuacguacgaaaacaauaccuggguuaaccagacauaugugaauaucuccaacacuaauuucgcugcaggccagucuguagugucggucaaacuggccgggaacagcagcuugugcccugugaguggaugggcgauauacuccaaggacaauucuauuagaaucggcagcaaaggugauguuuuugugauuagggagccauucaucuccuguucaccguuagaaugccggaccuuuuuccugacacagggggcucuacucaacgacaagcauaguaauggaaccaucaaagaucgcagccccuaucgaacucugaugucuuguccuauuggcgaggucccaucccccuacaacucacguuuugaaagcguggccuggagugcaucugccugccacgacggcauaaacuggcuuacaaucgggauuuccggaccugauaauggugcuguagcaguucugaaguauaacggcaucauaaccgacacgauuaagagcuggagaaauaacaucuugaggacucaagagucggagugugccugcgugaaugggucuuguuucaccgucaugacagauggaccauccgacggccaggcuucauacaaaaucuuucggauugaaaaggguaaaaucgugaagaguguggagaugaacgcccccaauuaucauuacgaagagugcagcuguuacccugauuccucugagauuacuugcgucugccgcgacaacuggcacgggagcaauagaccauggguuucauucaaccagaaucucgaauaucagauaggauacaucuguaguggcauuuuuggcgauaacccgaggcccaaugacaaaaccggguccugcggaccugugagcucuaacggugcgaauggcguaaagggguucucauuuaaguauggaaacggcguguggaucggucggacaaaaaguaucagcucccgcaacggguucgagaugauuugggauccaaauggcuggaccggaacggacaacaauuuuucuauaaagcaagacaucgucggcauuaacgaauggucgggguacagcggauccuucgugcagcaucccgagcugacuggucuggauuguauccgaccuugcuucuggguugaacucauuagaggcaggccaaaagagaauacaaucuggaccucagggaguucuauaucauuuuguggagugaacuccgacacugucggcuggucauggcccgauggugcagaguuaccguucacaaucgacaaguga

SEQ ID NO: 148795 - RNA, 1410 nt, Artificial Sequence; identical to SEQ ID NO: 144786
  derived and/or modified CDS sequence (opt3) from neuraminidase__InfluenzaA__AEH59606

SEQ ID NO: 148796 - RNA, 1410 nt, Artificial Sequence; identical to SEQ ID NO: 144786
  derived and/or modified CDS sequence (opt3) from neuraminidase__InfluenzaA__AEH59616

SEQ ID NO: 148797 - RNA, 1410 nt, Artificial Sequence; identical to SEQ ID NO: 144786
  derived and/or modified CDS sequence (opt3) from neuraminidase__InfluenzaA__AEH59626

SEQ ID NO: 148798 - RNA, 1413 nt, Artificial Sequence; identical to SEQ ID NO: 145509
  derived and/or modified CDS sequence (opt3) from neuraminidase__InfluenzaA__AEH77262

SEQ ID NO: 148799 - RNA, 1410 nt, Artificial Sequence
  derived and/or modified CDS sequence (opt3) from neuraminidase__InfluenzaA__AEH77273
augaaccccaaucagaagaucauuaccauaggcagcgugugcaugacaaucgggauggccaaccugauucuccaaaucggaaauauuacuuccaucuggauaucucacucaauccagcuugguaaccagaaucagauugagacguguaaccaaagugucaucaccuacgaaaauaacacauggguuaaucagacuuaugugaacauuagcaauaccaacuucgcugcaggccaguccguagugucugucaaacuggccggaaauucgucauugugcccugugagcggaugggcgaucuacaguaaggacaacuccauaagaauuggcucuaaaggugauguuuuugugaucagggagccauucauuagcuguuccccguuagaaugccggacauuuuuccugacccagggggcucuacucaaugacaagcauucaaacggaacuaucaaagaucgcagucccuaucgaacacugaugagcuguccuaucggcgaggucccaucucccuacaacucccguuuugaaucaguggccuggagcgcaagugccugccacgacggcauuaauuggcuuaccauagggaucucuggaccugauaacggugcuguagcaguucugaaguauaauggcauuaucacggacacuauaaaguccuggagaaacaauauuuugaggacccaagagagcgagugugccugcgugaacgggucguguuucacagucaugacugauggaccaucugacggccaggcuuccuacaaaaucuuucggaucgaaaaggguaaaauugugaagucaguggagaugaaugcccccaacuaucauuacgaagagugcaguuguuacccugauagcuccgagauuaccugcgucugccgcgacaauuggcacgggucuaacagaccauggguuagcuucaaucagaaccucgaauaucagaucggauacauauguucaggcaucuuuggcgauaauccgaggcccaacgacaaaacagggaguugcggaccuguguccagcaauggugcgaacggcguaaagggguucucuuuuaaguauggaaacggcguguggauuggucggaccaaaucaaucaguagccgcaauggguucgagaugaucugggauccaaacggcuggacgggaacugacaauaacuuuuccauuaagcaagacauagucggcaucaaugaauggucuggguacucggggagcuucgugcagcaucccgagcugacaggucuggauuguauucgaccuugcuucuggguugaacucaucagaggcaggccaaaagagaacaccauuuggacuuccgggucaaguaucucuuuuuguggagugaauagcgacacagucggcugguccuggcccgauggugcagaguuaccguucaccauagacaaguga

SEQ ID NO: 148800 - RNA, 1410 nt, Artificial Sequence
  derived and/or modified CDS sequence (opt3) from neuraminidase__InfluenzaA__AEH77282
augaaccccaaucagaagaucauuaccauaggcagcgugucccugacaaucgccacuauuugcuuccucaugcaaaucgcuauucuugucacgaccguuacacugcacuuuaaacagcaugaguguaacucuccuccaaauaaccaggugauguugugcgaaccgacuaucauagagagaaauaucaccgaaauuguauacuuaacaaacaccacuaucgagaaggaaauuugucccaaacuggcagaguauaggaauuggucaaagccucagugcaacaucacaggguucgccccauuuaguaaagacaauagcauacggcuauccgcgggaggugauauuugggugacccgcgagcccuacgucucuugugacccugauaagugcuaucaauucgcucucggccaggggacgacucugaacaauggacacucgaacgacaccgugcaugaucgaacaccauaccguacucuucugaugaaugaauugggcguucccuuucaccucgguaccagacagguguguaucgccuggucaagcaguuccugccaugacgggaaggcauggcugcacgucugugugacaggagaugacaaaaacgccaccgcuucuuucauuuauaauggcaggcugguagauagcaucggcuccuggucaaagaaaauccuccggacgcaggagagugaaugcguuuguauuaacgggacuugcacaguggucaugaccgacggaagcgcaucugguaaggccgauacuaaaauauuauuuguggaggagggcaagaucgugcacauuuccacacugucagggagcgcucaacaugucgaagagugcaguuguuacccucgcuauccaggaguuagaugcguguguagggacaacuggaagggcucuaaucggccgaucguagauauaaacgugaaagacuacuccauugucagcucguacgugugcucuggucuuguuggggacacuccccgcaagaaugauuccucaaguagcucccacuguuuggacccuaacaaugaagagggaggccauggcgugaaagggugggccuucgaugacggaaacgaugucuggaugggucgaacgaucucugaaaagcugagaagcggcuaugagaccuuuaaagugaucgagggguggucaaagccaaauaguaaacuacagauuaacaggcagguaaucguugaacggggaaaucguuccggcuacagcgguauuuucucuguggaggggaagucaugcauaaaccgcuguuuuuaugucgaacucaucagaggcaggaaggaggaaacagaggugugguggaccaguaauagcauugucguguucugcggaaccuccggcacauacgggacuggaucuuggcccgacggugcggauaucaaccugaugccuaucuga

SEQ ID NO: 148801 - RNA, 1410 nt, Artificial Sequence; identical to SEQ ID NO: 144786
  derived and/or modified CDS sequence (opt3) from neuraminidase__InfluenzaA__AEI29218

SEQ ID NO: 148802 - RNA, 1410 nt, Artificial Sequence; identical to SEQ ID NO: 146153
  derived and/or modified CDS sequence (opt3) from neuraminidase__InfluenzaA__AEI29228

SEQ ID NO: 148803 - RNA, 1410 nt, Artificial Sequence; identical to SEQ ID NO: 142185
  derived and/or modified CDS sequence (opt3) from neuraminidase__InfluenzaA__AEI54350

SEQ ID NO: 148804 - RNA, 1410 nt, Artificial Sequence; identical to SEQ ID NO: 142198
  derived and/or modified CDS sequence (opt3) from neuraminidase__InfluenzaA__AEI54361

SEQ ID NO: 148805 - RNA, 1410 nt, Artificial Sequence; identical to SEQ ID NO: 142762
  derived and/or modified CDS sequence (opt3) from neuraminidase__InfluenzaA__AEI54372

SEQ ID NO: 148806 - RNA, 1410 nt, Artificial Sequence; identical to SEQ ID NO: 142639
  derived and/or modified CDS sequence (opt3) from neuraminidase__InfluenzaA__AEI54383

SEQ ID NO: 148807 - RNA, 1410 nt, Artificial Sequence; identical to SEQ ID NO: 142762
  derived and/or modified CDS sequence (opt3) from neuraminidase__InfluenzaA__AEI54394

SEQ ID NO: 148808 - RNA, 1410 nt, Artificial Sequence; identical to SEQ ID NO: 143932
  derived and/or modified CDS sequence (opt3) from neuraminidase__InfluenzaA__AEI54416

SEQ ID NO: 148809 - RNA, 1410 nt, Artificial Sequence; identical to SEQ ID NO: 148752
  derived and/or modified CDS sequence (opt3) from neuraminidase__InfluenzaA__AEI54427

SEQ ID NO: 148810 - RNA, 1410 nt, Artificial Sequence; identical to SEQ ID NO: 147566
  derived and/or modified CDS sequence (opt3) from neuraminidase__InfluenzaA__AEI54438

SEQ ID NO: 148811 - RNA, 1410 nt, Artificial Sequence; identical to SEQ ID NO: 147566
  derived and/or modified CDS sequence (opt3) from neuraminidase__InfluenzaA__AEI54449

SEQ ID NO: 148812 - RNA, 1410 nt, Artificial Sequence; identical to SEQ ID NO: 147566
  derived and/or modified CDS sequence (opt3) from neuraminidase__InfluenzaA__AEI54460

SEQ ID NO: 148813 - RNA, 1410 nt, Artificial Sequence
  derived and/or modified CDS sequence (opt3) from neuraminidase__InfluenzaA__AEI54471
augaaccccaaucagaagaucauuaccauaggcagcgugucccugacaaucucuacuauuugcuucuuuaugcaaaucgccguccucauuacgaccguuacacuucacuucaaacaguacaaguuuaacucaccuccaaauaaccaggugaugcugugugagccgacuaucauagaaagaaauaucaccgagauuguauauuugacaaacaccacuaucgaaaaagagauuugccccaaguuagcugaauacaggaauuggaguaaaccucagugugacaucacaggguucgcaccauuuagcaaggauaacuccauacggcugucugccggaggugacauuugggugacccgcgagcccuaugucucgugcgauccugacaaguguuaccaauucgcgcuaggccaggggacgacucucaauaacgugcauucaaauaacaccguucgagaucguacaccauauagaacucugcuuaugaaugagcugggagugcccuuucacuugggcaccaaacaggucugcaucgcuuggagcaguuccucuugucaugacgguaaggccuggcuccacgugugcauuacaggggaugacaaaaacgcaaccgccagcuucaucuacaauggaaggcugguagauuccguugugucauggaguaaggaaauccugcggacgcaggagagcgaaugugucugcauuaacggcacuuguacaguggugaugaccgacggcucugcuuccgggaaagcagauacuaagauacucuuuaucgaggagggaaagauuguccauacaucaaccuuaagcgguagugcccaacacguugaagagugcucuugcuauccucgcuacccaggcgugagauguguaugcagggacaacuggaaaggguccaaucggccgaucguggauauaaacauuaaggaccacagcaucgucucgucuuacguguguuccggacugguuggcgacacgccccgcaaaaaugauucaaguagcuccucucauugccuugacccuaacaaugaagagggugggcacggagugaagggcugggcuuucgaugacggcaacgaugucuggauggggcgaaccaucaaugaaacaagcagauugggauaugagacuuuuaaagugauugaggguuggucaaacccaaagaguaaacugcagaucaauaggcagguaauuguugaccggggcaaccguuccggguacagcggaauauucucuguggaaggcaagucauguaucaaucgcugcuuuuaugucgagcuaauuagagguaggaaggaagagaccgaagugcucuggacaaguaacagcaucgucguguucugugggacuuccggcaccuacggaacaggcucuuggcccgauggggccgaccugaaucuuaugccuaucuga

SEQ ID NO: 148814 - RNA, 1410 nt, Artificial Sequence; identical to SEQ ID NO: 147458
  derived and/or modified CDS sequence (opt3) from neuraminidase__InfluenzaA__AEI54482

SEQ ID NO: 148815 - RNA, 1410 nt, Artificial Sequence
  derived and/or modified CDS sequence (opt3) from neuraminidase__InfluenzaA__AEI54493
augaaccccaaucagaagaucauuaccauaggcagcgugucccugacaaucucuacuauuugcuucuuuaugcagaucgccauucucaucacgaccgucacacuucacuucaaacaguacgaguuuaacucaccuccaaauaaccagguuaugcugugugaaccgacuauaaucgagagaaauauuaccgaaaucguguauuugacaaacaccacuauugagaaggaaaucugccccaaauuagcugaguacaggaauuggaguaagccucagugugacauaacaggguucgcaccauuuagcaaagauaacuccauucggcugucugccggaggugacaucuggguaacccgcgagcccuaugugucgugcgauccugacaaguguuaccaauucgcgcuaggccaggggacgacucucaauaacguccauucaaauaacaccgugcgagaucguacaccauauagaacucugcuuaugaaugaacugggaguucccuuucacuugggcaccaaacaggugugcauugcuuggagcaguuccucuugucaugacgguaaggccuggcuccacgucugcaucacaggggaugacaagaacgcaaccgccagcuucaucuacaauggaaggcugguggauuccguaguuucauggaguaaagagauucugcggacgcaggaaagcgagugugugugcauaaacggcacuuguacagucgugaugaccgacggcucugcuuccgggaaggcagauacuaaaauccucuuuauugaggaaggaaagaucgugcauacaucaaccuuaagcgguagugcccaacacgucgaggaaugcucuugcuauccucgcuacccaggcguuagaugugugugcagggacaacuggaagggguccaaucggccgauaguagauauuaacaucaaagaccacagcaucgugucgucuuacgucuguuccggacuggugggcgacacgccccgcaagaaugauucaaguagcuccucucauugccuugacccuaacaaugaggaaggugggcacggaguuaaaggcugggcuuucgaugacggcaacgauguguggauggggcgaaccauuaaugagacaagcagauugggauaugagacuuuuaaggucaucgaagguuggucaaacccaaaaaguaagcugcagauuaauaggcaagugauaguagaccggggcaaccguuccggguacagcggaaucuucucuguugagggcaaaucauguauuaaucgcugcuuuuauguggaacuaaucagagguaggaaggaggaaaccgagguccucuggacaaguaacagcaucguggucuucugugggacuuccggcaccuacggaacaggcucuuggcccgauggggccgaccugaaucuuaugucgauuuga

SEQ ID NO: 148816 - RNA, 1410 nt, Artificial Sequence; identical to SEQ ID NO: 147566
  derived and/or modified CDS sequence (opt3) from neuraminidase__InfluenzaA__AEI54504

SEQ ID NO: 148817 - RNA, 1410 nt, Artificial Sequence; identical to SEQ ID NO: 147086
  derived and/or modified CDS sequence (opt3) from neuraminidase__InfluenzaA__AEI59982

SEQ ID NO: 148818 - RNA, 1413 nt, Artificial Sequence; identical to SEQ ID NO: 147984
  derived and/or modified CDS sequence (opt3) from neuraminidase__InfluenzaA__AEI59993

SEQ ID NO: 148819 - RNA, 1413 nt, Artificial Sequence; identical to SEQ ID NO: 147980
  derived and/or modified CDS sequence (opt3) from neuraminidase__InfluenzaA__AEI60004

SEQ ID NO: 148820 - RNA, 1410 nt, Artificial Sequence
  derived and/or modified CDS sequence (opt3) from neuraminidase__InfluenzaA__AEI60015
augaaccccaaucagaagaucauuaccauaggcagcgugucccugacaaucucuacuauuugcuucuuuaugcagaucgccauucucaucacgaccgucacacuucacuucaaacaguacgaguuuaacucaccuccaaauaaccagguuaugcugugugaaccgacuauaaucgagagaaauauuaccgaaaucguguauuugacaaacaccacuauugagaaggaaaucugccccaaauuagcugaguacaggaauuggaguaagccucagugugacauaacaggguucgcaccauuuagcaaagauaacuccauucggcugucugccggaggugacaucuggguaacccgcgagcccuaugugucgugcgauccugacaaguguuaccaauucgcgcuaggccaggggacgacucucaauaacguccauucaaauaacaccgugcgagaucguacaccauauagaacucugcuuaugaaugaacugggaguucccuuucacuugggcaccaaacaggugugcauugcuuggagcaguuccucuugucaugacgguaaggccuggcuccacgucugcaucacaggggaugacaagaacgcaaccgccagcuucaucuacaauggaaggcugguggauuccguaguuucauggaguaaagagauucugcggacgcaggaaagcgagugugugugcauaaacggcacuuguacagucgugaugaccgacggcucugcuuccgggaaggcagauacuaaaauccucuuuauugaggaaggaaagaucgugcauacaucaaccuuaagcgguagugcccaacacgucgaggaaugcucuugcuauccucgcuacccaggcguuagaugugugugcagggacaacuggaagggguccaaucggccgauaguagauauuaacaucaaagaccacagcaucgugucgucuuacgucuguuccggacuggugggcgacacgccccgcaagaaugauucaaguagcuccggucauugccuugacccuaacaaugaggaagggggaaacggcguuaaaggcugggcuuucgaugacgggaaugauguguggaugggacgaaccauuucugaaaagagcagauuggguuaugagacauuuaaagucaucgagggcuggucaaaccacaagaguaaacugcagauuaauaggcaagugauaguagaccgggggaaccguuccggauacagcggcaucuucucuguugaggguaagucauguauuaaucgcugcuuuuauguggaacuaaucagagggaggaaggaggaaacugagguccucuggaccaguaacagcaucguggucuucuguggcacauccggaacuuacggcaccgggucuuggccagauggagccgaccugaaucuuaugcccauuuga

SEQ ID NO: 148821 - RNA, 1410 nt, Artificial Sequence; identical to SEQ ID NO: 146532
  derived and/or modified CDS sequence (opt3) from neuraminidase__InfluenzaA__AEI60026

SEQ ID NO: 148822 - RNA, 1410 nt, Artificial Sequence
  derived and/or modified CDS sequence (opt3) from neuraminidase__InfluenzaA__AEI60037
augaaccccaaucagaagaucauuaccauaggcagcgugucccugacaaucucuacuauuugcuucuuuaugcaaaucgccauucucaucacgaccgucacacuucacuucaaacaguacgaguuuaacucaccuccaaauaaccagguuaugcugugugaaccgacuauaaucgagagaaauauuaccgaaaucguguauuugacaaacaccacuauugagaaggaaaucugccccaaauuagcugaguacaggaauuggaguaagccucagugugacauaacaggguucgcaccauuuagcaaagauaacuccauucggcugucugccggaggugacaucuggguaacccgcgagcccuaugugucgugcgauccugacaaguguuaccaauucgcgcuaggccaggggacgacucucaauaacguccauucaaauaacaccgugcgagaucguacaccauauagaacucugcuuaugaaugaacugggaguucccuuucacuugggcaccaaacaggugugcauugcuuggagcaguuccucuugucaugacgguaaggccuggcuccacgucugcaucacaggggaugacaagaacgcaaccgccagcuucaucuacaauggaaggcugguggauuccguaguuucauggaguaaagagauucugcggacgcaggaaagcgagugugugugcauaaacggcacuuguacagucgugaugaccgacggcucugcuuccgggaaggcagauacuaaaauccucuuuauugaggaaggaaagaucgugcauacaucaaccuuaagcgguagugcccaacacgucgaggaaugcucuugcuauccucgcuacccaggcguuagaugugugugcagggacaacuggaagggguccaaucggccgauaguagauauuaacaucaaagaccacagcaucgugucgucuuacgucuguuccggacuggugggcgacacgccccgccgaaaugauucaaguagcuccucucauugccuugacccuaacaaugaggaaggugggcacggaguuaagggcugggcuuucgaugacggcaacgauguguggauggggagaaccauuagcgagaaaucaagguugggauaugagacauuuaaggucaucgaagguuggaguaaucauaaauccaagcugcagauuaaccgucaggugauaguagaccggggcaaucgcagcggguacucuggaaucuucucaguugagggcaaaaguuguauuaacagaugcuuuuauguggaacuaaucaggggucggaaggaggaaacugagguccucuggaccagcaauuccaucguggucuucugugggacaucuggcacuuacggaaccggcucguggccagauggggccgaccugaaccuuaugcccauuuga

SEQ ID NO: 148823 - RNA, 1410 nt, Artificial Sequence
  derived and/or modified CDS sequence (opt3) from neuraminidase__InfluenzaA__AEI60048
augaaccccaaucagaagaucauuaccauaggcagcgugucccugacaaucucuacuauuugcuucuuuaugcagaucgccauucucaucacgaccgucacacuucacuucaaacaguacgaguuuaacucaccuccaaauaaccagguuaugcugugugcuccgacuauaaucgaaagaaauauuaccgagaucguguauuugacaaacaccacuauugaaaaggagaucugccccaaauuagcagaauacaggaauuggaguaagccucagugugacauaacaggguucgccccauuuagcaaagauaacuccauucggcugucugcgggaggugacaucuggguaacccgcgagcccuaugugucgugcgauccugacaaguguuaccaauucgcucuaggccaggggacgacucucaauaacguccauucaaauaacaccgugcgagaucguacaccauauagaacucugcuuaugaaugagcugggaguucccuuucacuugggcaccaaacaggugugcauugccuggagcaguuccucuugucaugacgguaaggcauggcuccacgucugcaucacaggggaugacaagaacgccaccgcuagcuucaucuacaauggaaggcugguggauuccguaguuucauggaguaaagaaauucugcggacgcaggagagcgaaugugugugcauaaacggcacuuguacagucgugaugaccgacggcucugcauccgggaaggccgauacuaaaauccucuuuauugaggagggaaagaucgugcauacaucaaccuuaagcgguagugcucaacacgucgaagagugcucuugcuauccucgcuacccaggcguuagaugugugugcagggacaacuggaagggguccaaucggccgauaguagauauuaacaucaaagaccacagcaucgugucgucuuacgucuguuccggacuggugggcgacacgccccgcaagaaugauucaaguagcuccucucauugccuugacccuaacaaugaagagggugggcacggaguuaaaggcugggccuucgaugacggcaacgauguguggauggggcgaaccauuagcgaaaagucaagauugggauaugagacauuuaaagucaucgaggguuggaguaauccaaaguccaaacugcagauuaacaggcaagugauaguagaccggggcaaucguagcggguacucuggaaucuucucaguugaaggcaagaguuguauuaaccgcugcuuuuauguggagcuaaucagagguaggaaggaagagacugaaguccucuggaccagcaauuccaucguggucuucugugggacaucuggcacuuacggaaccggcucguggcccgauggggcggacauuaaccugaugccuauauga

SEQ ID NO: 148824 - RNA, 1410 nt, Artificial Sequence
  derived and/or modified CDS sequence (opt3) from neuraminidase__InfluenzaA__AEI60089
augaaccccaaucagaagaucauuaccauaggcagcgugugcaugacaaucgggauggccaaccugauucuccaaaucggaaauauuaucuccauauggaucucucacucaauucagcuugguaaccagaaucagaucgagacuuguaaccaaagugucauuacguacgaaaauaacaccuggguuaaucagacauaugugaacaucagcaauacuaacuucgcugcaggccaguccguagugucugucaaacuggccggaaauucgucauugugcccugugagcggaugggcgauauacaguaaggacaacuccauuagaaucggcucuaaaggugauguuuuugugauuagggagccauucaucagcuguuccccguuagaaugccggaccuuuuuccugacacagggggcucuacucaaugacaagcauucaaacggaaccaucaaagaucgcagucccuaucgaacucugaugagcuguccuauuggcgaggucccaucucccuacaacucccguuuugaaucaguggccuggagcgcaagugccugccacgacggcauaaauuggcuuacaaucgggauuucuggaccugauaacggugcuguagcaguucugaaguauaauggcaucauaaccgacacgauuaaguccuggagaaacaauaucuugaggacucaagagagcgagugugccugcgugaacgggucguguuucaccaucaugacagauggaccaucugacggccaggcuuccuacaaaauuuuucggaucgaaaaggguaaaauugucaagucaguggagaugaaugcccccaacuauuacuacgaagagugcaguuguuauccugauagcuccgagauaacuugcgugugccgcgacaauuggcaugggucuaacagaccaugggucagcuucaaucagaaccucgaauaccagaucggauauauuuguucaggcaucuuuggcgauaauccgaggcccaacgacaaaaccgggaguugcggaccuguuuccagcaauggugcgaacggcgugaagggguucucuuuuaaguacggaaacggcguauggaucggucggacaaaaucaauuaguagccgcaagggguucgagaugauaugggauccaaauggcuggaccggaacggacaacaauuuuuccaucaaacaagacauugugggcaucaacgaauggucuggguauucggggagcuucguccagcaccccgagcugacuggucuggauuguauucgaccuugcuucuggguggaacucaucagaggcaggccaaaggagaauacaauauggaccuccgggucaaguaucucuuuuuguggaguuaacagcgacacugugggcugguccuggcccgauggugcagaguuaccguucacaauugacaaauga

SEQ ID NO: 148825 - RNA, 1410 nt, Artificial Sequence; identical to SEQ ID NO: 148757
  derived and/or modified CDS sequence (opt3) from neuraminidase__InfluenzaA__AEI60099

SEQ ID NO: 148826 - RNA, 1410 nt, Artificial Sequence
  derived and/or modified CDS sequence (opt3) from neuraminidase__InfluenzaA__AEI60111
augaaccccaaucagaagaucauuaccauaggcagcaucucccugacaauugccacuaucugcuuccucaugcaaauugcuauccuugugacgaccgucacacugcacuuuaaacaguacaaguguaacucuccuccaaauaacagaguuauguugugcgagccgacuauaaucgaaaggaauauuaccgagaucguguauuuaacaaacaccacuauugaaaaagagaucugucccaagcuggcagaauaccggaauuggucaaaaccucagugcaacauaaagggguucgccccauuuaguaaggacaauagcauucgccuauccgcgggaggugauaucuggguaacacgagagcccuaugugucuugugacccugauaaaugcuaccaguucgcucucggccaagggaccacgcugaacaauggacauucgaacgacacuguccacgaucguaccccauauagaacacuucugaugaaugaguugggcgugcccuuucaucucgguacuaggcagguuuguauugccuggucaagcaguuccugccacgacgggaaggcauggcugcauguguguaucaccggagaugacgaaaacgccacagcuucuuucaucuacaauggccggcuggucgauagcauuggcuccuggaguaaaaagauacuccgcacccaggagucagaaugcguguguaucaacgggacgugcacuguaguuaugacagacggaagcgcaucugguaaagccgauaccaagauuuuauuuaucgaggagggcaagauagugcacauuuccacucugucagggagcgcucagcacgucgaagagugcaguuguuauccuagauacccaggagugaggugcgugugucgggacaacuggaaaggcucuaaucgcccgaucgucgauaucaacguucgagacuacuccauugugagcucguauguaugcucuggucuugugggggacacacccagaaagaaugauuccuucucaaguagccauuguuuggacccuaacaaugaagagggaggccacggcgucaaagggugggccuuugaugacggaaacgauguguggauggguaggaccaucuccgaaaagcugcggucuggcuacgagacguucaaaguuauugagggguggagcaagccaaauucaaaacuacaagugaaccgucaggucauaguggaacgcggaaauagaaguggcuauuccgguaucuuuagcguagaggggaagucuugcauuaacagguguuucuacguugaacucauccggggccgaaaggaggaaaccaaagugugguggacaucaaauaguaucgucguguuuugcggaacuagcggcaccuaugggacaggauccuggcccgacggugcggauauuaacauaaugccuaucuga

SEQ ID NO: 148827 - RNA, 1410 nt, Artificial Sequence; identical to SEQ ID NO: 144786
  derived and/or modified CDS sequence (opt3) from neuraminidase__InfluenzaA__AEI73669

SEQ ID NO: 148828 - RNA, 1410 nt, Artificial Sequence
  derived and/or modified CDS sequence (opt3) from neuraminidase__InfluenzaA__AEI86727
augaaccccaaucagaagaucauuaccauaggcagcgugugcaucacaauugggauggccaaccugauccuccaaauuggaaauaucauauccaucuggauuucucacucaauccagcuugguaaccagaaucagauugagacuuguaaccaaagugucaucacguacgaaaauaacaccuggguuaaucagacauaugugaacauaagcaauacuaacuucgcugcaggccaguccguagugucugucaaacuggccggaaauucgucauugugcccugugagcgggugggcgauuuacaguaaggacaacuccaucagaauuggcucuaaaggugauguuuuugugaucagggagccauucaucagcuguuccccguuagaaugccggaccuuuuuccugacacagggggcucuacucaaugacaagcauucaaacggaaccauuaaagaucgcagucccuaucgaacucugaugagcuguccuauaggcgaggucccaucucccuacaacuccaaguuugaaucaguggccuggagcgcaagugccugccacgacggcaucucuuggcuuacaauugggaucuccggaccugauaauggugcuguagcaguucugaaguauaacggcauaauuaccgacacgaucaaaagcuggcguaauaacaucuugagaacucaagagucggagugugccugcgugaaugggucuuguuucaccgucaugacagauggaccauccgacggccaggcuucauacaagauuuuuaggaucgaaaaagguaagauugugaaaaguguggagaugaacgcccccaauuaucauuacgaagagugcagcuguuacccugauuccucugagauaacuugcgucugccgggacaacuggcacgggagcaaucgcccauggguuucauucaaccagaaucucgaauaucagaucggauacauuuguaguggcaucuuuggcgauaacccgagacccaaugacaagaccggguccugcggaccugugagcucuaacggugcgaauggcguaaagggguucucauuuaaauauggaaacggcguguggaucgguaggacaaagaguauuagcucccggaacggguucgagaugauaugggauccaaauggcuggaccggaacggacaacaauuuuucuaucaaacaagacauugucggcaucaacgaauggucgggguacagcggauccuucgugcagcaucccgagcugacuggucuggauuguauucgcccuugcuucuggguugaacucauccgaggcagaccaaaggagaauacaauauggaccucagggaguucuaucagcuuuuguggagugaacuccgacacugucggcuggucauggcccgauggugcagaguuaccguucacaauugacaaauga

SEQ ID NO: 148829 - RNA, 1410 nt, Artificial Sequence
  derived and/or modified CDS sequence (opt3) from neuraminidase__InfluenzaA__AEI86737
augaaccccaaucagaagaucauuaccauaggcagcgugugcaugacaaucgggauggccaaccugauucuccaaaucggaaauauuaucuccauauggaucucucacucaauucagcuugguaaccagaaucagaucgagacuuguaaccaaagugucauuacguacgaaaauaaaaccuggguuaaccagacauaugugaauaucagcaacacuaauuucgcugcaggccaguccguagugucugucaagcuggccgggaacucgucauugugcccugugagcggaugggcgauauacaguaaagacaauuccauuagaaucggcucuaagggugauguuuuugugauuagggagccauucaucagcuguuccccguuagaaugccggaccuuuuuccugacacagggggcucuacucaacgacaaacauucaaauggaaccaucaaggaucgcagucccuaucgaacucugaugagcuguccuauuggcgaggucccaucucccuacaacucccguuuugaaucaguggccuggagcgcaagugccugccacgacggcauaaacuggcuuacaaucgggauuucuggaccugauaauggugcuguagcaguucugaaguauaacggcaucauaaccgacacgauuaaauccuggagaaauaacaucuugaggacucaagagagcgagugugccugcgugaaugggucguguuucaccgucaugacagauggaccaucugacggccaggcuuccuacaagaucuuucggauugaaaaagguaagguggugaaaucagucgagaugaacgcccccaauuaucauuacgaagagugcaguuguuacccugauagcuccgagaucacuugcguuugccgcgacaacuggcacgggucuaauagaccaugggugagcuucaaccagaaucucgaauaucagauuggauacauauguucaggcaucuuuggcgauaacccgaggcccaaugacaagaccgggaguugcggaccuguauccagcaacggugcgaauggcgugaagggguucucuuuuaaauauggaaacggcgucuggauuggucggacaaagucaaucaguagccgcaacggguucgagaugaucugggauccaaauggcuggaccggaacggacaacaauuuuuccauuaaacaagacauagugggcaucaacgaauggucuggguacucggguagcuucguucagcaucccgagcugacuggacuggauuguauucgaccuugcuucuggguggaacucaucagaggcaggccaaaggagaauacaauuuggaccuccgggucaaguaucucuuuuuguggagucaacagcgacacugugggcugguccuggcccgauggugcagaguuaccguucacaauagacaaauga

SEQ ID NO: 148830 - RNA, 1410 nt, Artificial Sequence
  derived and/or modified CDS sequence (opt3) from neuraminidase__InfluenzaA__AEI86757
augaaccccaaucagaagaucauuaccauaggcagcgugugcaucacaauugggauggccaaccugauccuccaaauuggaaauaucauauccaucuggauuucucacucaauccagcuugguaaccagaaucagauugagacuuguaaccaaagugucaucacguacgaaaauaacaccuggguuaaucagacauaugugaacauaagcaauacuaacuucgcugcaggccaguccguagugucugucaaacuggccggaaauucgucauugugcccugugagcggaugggcgauuuacaguaaggacaacuccaucagaauuggcucuaaaggugauguuuuugugaucagggagccauucaucagcuguuccccguuagaaugccggaccuuuuuccugacacagggggcucuacucaaugacaagcauucaaacggaaccauuaaagaucgcagucccuaucgaacucugaugagcuguccuauaggcgaggucccaucucccuacaacucccguuuugaaucaguggccuggagcgcaagugccugccacgacggcaucucuuggcuuacaauugggaucuccggaccugauaauggugcuguagcaguucugaaguauaacggcauaauuaccgacacgaucaagagcuggagaaauaacaucuugaggacucaagagucggagugugccugcgugaaugggucuuguuucaccgucaugacagauggaccauccgacggccaggcuucauacaaaauuuuucggaucgaaaaggguaaaauugugaagaguguggagaugaacgcccccaauuaucauuacgaagagugcagcuguuacccugauuccucugagauaacuugcgucugccgcgacaacuggcacgggagcaauagaccauggguuucauucaaccagaaucucgaauaucagaucggauacauuuguaguggcaucuuuggcgauaacccgaggcccaaugacaaaaccggguccugcggaccugugagcucuaacggugcgaauggcguaaagggguucucauuuaaguauggaaacggcguguggaucggucggacaaaaaguauuauaagccgcaacggguucgagaugaucugggauccaaauggcuggaccggaacggacaacaauuuuuccauuaagcaagacaucgucggcauuaacgaauggucuggguacucggggagcuucgugcagcaucccgagcugacuggucuggauuguauccgaccuugcuucuggguugaacucauaagaggcaggccaaaagagaauacaaucuggaccuccgggucaaguauuucuuuuuguggagugaacagcgacacugucggcugguccuggcccgauggugcagaguuaccguucacaaucgacaaguga

SEQ ID NO: 148831 - RNA, 1410 nt, Artificial Sequence
  derived and/or modified CDS sequence (opt3) from neuraminidase__InfluenzaA__AEI86767
augaaccccaaucagaagaucauuaccauaggcagcgugugcaucacaauugggauggccaaccugauccuccaaauuggaaauaucauauccaucuggauuucucacucaauccagcuugguaaccagaaucagauugagacuuguaaccaaagugucaucacguacgaaaauaacaccuggguuaaucagacauaugugaacauaagcaauacuaacuucgcugcaggccaguccguagugucugucaaacuggccggaaauucgucauugugcccugugagcgggugggcgauuuacaguaaggacaacuccaucagaauuggcucuaaaggugauguuuuugugaucagggagccauucaucagcuguuccccguuagaaugccggaccuuuuuccugacacagggggcucuacucaaugacaagcauucaaacggaaccauuaaagaucgcagucccuaucgaacucugaugagcuguccuauaggcgaggucccaucucccuacaacucccguuuugaaucaguggccuggagcgcaagugccugccacgacggcaucucuuggcuuacaauugggaucuccggaccugauaauggugcuguagcaguucugaaguauaacggcauaauuaccgacacgaucaagagcuggagaaauaacaucuugaggacucaagagucggagugugccugcgugaaugggucuuguuucaccgucaugacagauggaccauccgacggccaggcuucauacaaaauuuuucggaucgaaaaggguaaaauugugaagaguguggagaugaacgcccccaauuaucauuacgaagagugcagcuguuacccugauuccucugagauaacuugcgucugccgcgacaacuggcacgggagcaauagaccauggguuucauucaaccauaaucucgaauaucagaucggauacauuuguaguggcaucuuuggcgauaacccgaggcccaaugacaaaaccggguccugcggaccugugagcucuaacggugcgaauggcguaaagggguucucauuuaaguauggaaacggcguguggaucggucggacaaaaaguauuagcucccgcaacggguucgagaugauaugggauccaaauggcuggaccggaacggacaacaauuuuucuaucaagcaggacauugucggcaucaacgaauggucgggguacagcggauccuucgugcaacaccccgagcugacuggucuggauuguauucgaccuugcuucuggguugaacucaucagaggcaggccaaaagagaauacaauauggaccucagggaguucuaucagcuuuuguggagugaacuccgacacugucggcuggucauggcccgauggugcagaguuaccguucacaauugacaaguga

SEQ ID NO: 148832 - RNA, 1410 nt, Artificial Sequence; identical to SEQ ID NO: 148831
  derived and/or modified CDS sequence (opt3) from neuraminidase__InfluenzaA__AEI86777

SEQ ID NO: 148833 - RNA, 1410 nt, Artificial Sequence
  derived and/or modified CDS sequence (opt3) from neuraminidase__InfluenzaA__AEI86787
augaaccccaaucagaagaucauuaccauaggcagcgugugcaugacaaucgggauggccaaccugaugcuccaaauuggaaauaucauuuccaucuggauaucucacucaauccagcuugguaaccagaaucagauugagacuuguaaccaaagugucaucacguacgaaaauaacaccuggguuaaucagacauaugugaacauuagcaauacuaacuucgcugcaggccaguccguagugucugucaaacuggccggaaauucgucauugugcccugugagcggaugggcgaucuacaguaaggacaacuccauaagaauuggcucuaaaggugauguuuuugugaucagggagccauucauuagcuguuccccguuagaaugccggaccuuuuuccugacacagggggcucuacucaaugacaagcauucaaacggaaccaucaaagaucgcagucccuaucgaacucugaugagcuguccuaucggcgaggucccaucucccuacaacucccguuuugaaucaguggccuggagcgcaagugccugccacgacggcauuaauuggcuuacaauagggaucucuggaccugauaacggugcuguagcaguucugaaguauaauggcauuaucaccgacacgauaaaguccuggagaaacaauauuuugaggacucaagagagcgagugugccugcgugaacgggucguguuucaccgucaugacagauggaccaucugacggccaggcuuccuacaaaaucuuucggaucgaaaaggguaaaauugugaagucaguggagaugaaugcccccaacuaucauuacgaagagugcaguuguuacccugauagcuccgagaucacuugcgucugccgcgacaauuggcacgggucuaacagaccauggguuagcuucaaucagaaccucgaauaucagauuggauacauauguucaggcaucuuuggcgauaauccgaggcccaacgacaaaaccgggaguugcggaccuguguccagcaauggugcgaacggcguaaagggguucucuuuuaaguauggaaacggcguguggauuggucggacaaaaucaaucaguagccgcaauggguucgagaugaucugggauccaaacggcuggaccggaacggacaauaacuuuuccauuaagcaagacauagucggcaucaaugaauggucuggguacucggggagcuucgugcagcaucccgagcugacuggucuggauuguauucgaccuugcuucuggguugaacucaucagaggcaggccaaaagagaacacaauuuggaccuccgggucaaguaucucuuuuuguggagugaauagcgacacugucggcugguccuggcccgauggugcagaguuaccguucacaauagacaaguga

SEQ ID NO: 148834 - RNA, 1410 nt, Artificial Sequence
  derived and/or modified CDS sequence (opt3) from neuraminidase__InfluenzaA__AEI86797
augaaccccaaucagaagaucauuaccauaggcagcgugugcaucacaauugggauggccaaccugauccuccaaauuggaaauaucauauccaucuggauuucucacucaauccagcuugguaaccagaaucagauugagacuuguaaccaaagugucaucacguacgaaaauaacaccuggguuaaucagacauaugugaacauaagcaauacuaacuucgcugcaggccaguccguagugucugucaaacuggccggaaauucgucauugugcccugugagcgggugggcgauuuacaguaaggacaacuccaucagaauuggcucuaaaggugauguuuuugugaucagggagccauucaucagcuguuccccguuagaaugccggaccuuuuuccugacacagggggcucuacucaaugacaagcauucaaacggaaccauuaaagaucgcagucccuaucgaacucugaugagcuguccuauaggcgaggucccaucucccuacaacucccguuuugaaucaguggccuggagcgcaagugccugccacgacggcaucucuuggcuuacaauugggaucuccggaccugauaauggugcuguagcaguucugaaguauaacggcauaauuaccgacacgaucaagagcuggagaaauaacaucuugaggacucaagagucggagugugccugcgugaaugggucuuguuucaccgucaugacagauggaccauccgacggccaggcuucauacaaaauuuuucggaucgaaaaggguaaaauugugaagaguguggagaugaacgcccccaauuaucauuacgaagagugcagcuguuacccugauuccucugagauaacuugcgucugccgcgacaacuggcacgggagcaauagaccauggguuucauucaaccagaaucucgaauaucagaucggauacauuuguaguggcaucuuuggcgauaacccgaggcccaaugacaaaaccggguccugcggaccugugagcucuaacggugcgaauggcguaaagggguucucauuuaaguauggaaacggcguguggaucggucggacaaaaaguauuagcucccgcaacggguucgagaugauaugggauccaaauggcuggaccggaacggacaacaauuuuucuaucaagcaagacauugucggcaucaacgaauggucgggguacagcggauccuucgugcagcaucccgagcugacuggucuggauuguauucgaccuugcuucuggguugaacucaucagaggcaggccaaaagagaauacaauauggaccucagggaguucuaucagcuuuuguggagugaacuccgacacugucggcuggucauggcccgauggugcagaguuaccguucacaauugacaaguga

SEQ ID NO: 148835 - RNA, 1410 nt, Artificial Sequence
  derived and/or modified CDS sequence (opt3) from neuraminidase__InfluenzaA__AEI86807
augaaccccaaucagaagaucauuaccauaggcagcgugugcaugacaaucgggauggccaaccugauucuccaaaucggaaauauuaucuccauauggaucucucacucaauucagcuugguaaccagaaucagaucgagacuuguaaccaaagugucauuacguacgaaaauaacaccuggguuaaucagacauaugugaacaucagcaauacuaacuucgcugcaggccaguccguagugucugucaaacuggccggaaauucgucauugugcccugugagcggaugggcgauauacaguaaggacaacuccauuagaaucggcucuaaaggugauguuuuugugauuagggagccauucaucagcuguuccccguuagaaugccggaccuuuuuccugacacagggggcucuacucaaugacaagcauucaaacggaaccaucaaagaucgcagucccuaucgaacucugaugagcuguccuauuggcgaggucccaucucccuacaacucccguuuugaaucaguggccuggagcgcaagugccugccacgacggcauaaauuggcuuacaaucgggauuucuggaccugauaacggugcuguagcaguucugaaguauaauggcaucauaaccgacacgauuaaguccuggagaaacaauaucuugaggacucaagagagcgagugugccugcgugaacgggucguguuucaccgucaugacagauggaccaucugacggccaggcuuccuacaaaaucuuucggauugaaaaggguaaaaucgugaagucaguggagaugaaugcccccaacuaucauuacgaagagugcaguuguuacccugauagcuccaaaauuacuugcgucugccgcgacaauuggcacgggucuaacagaccauggguuagcuucaaucagaaccucgaguaucagauaggauacaucuguucaggcauuuuuggcgauaauccgaggcccaacgacaagaccgggaguugcggaccuguguccagcaauggugcgaacggcguaaagggguucucuuuuaaauauggaaacggcguguggaucggucggacaaagucaaucaguagccgcaauggguucgaaaugauuugggauccaaacggcuggaccggaacggacaauaacuuuuccauaaaacaagacaucgucggcauuaaugaguggucuggguacucggggagcuucgugcagcaucccgaacugacuggucuggauuguauccgaccuugcuucuggguugagcucauuagaggcaggccaaaggaaaacacaaucuggaccuccgggucaaguauaucuuuuuguggagugaauagcgacacugucggcugguccuggcccgauggugcagaguuaccguucaucauugacaaauga

SEQ ID NO: 148836 - RNA, 1410 nt, Artificial Sequence; identical to SEQ ID NO: 148831
  derived and/or modified CDS sequence (opt3) from neuraminidase__InfluenzaA__AEI86817

SEQ ID NO: 148837 - RNA, 1410 nt, Artificial Sequence
  derived and/or modified CDS sequence (opt3) from neuraminidase__InfluenzaA__AEI86827
augaaccccaaucagaagaucauuaccauaggcagcgugugcaucacaauugggauggccaaccugauccuccaaauuggaaauaucauauccaucuggauuucucacucaauccagcuugguaaccagaaucagauugagacuuguaaccaaagugucaucacguacgaaaauaacaccuggguuaaucagacauaugugaacauaagcaauacuaacuucgcugcaggccaguccguagugucugucaaacuggccgggaauagcucauugugcccugugagcggaugggcgauuuacaguaaggacaacuccaucagaauuggcucuaaaggugauguuuuugugaucagggagccauucaucagcuguuccccguuagaaugccggaccuuuuuccugacacagggggcucuacucaaugacaagcauucaaacggaaccauuaaagaucgcagucccuaucgaacucugaugagcuguccuauaggcgaggucccaucucccuacaacucccguuuugaaucaguggccuggagcgcaagugccugccacgacggcaucucuuggcuuacaauugggaucuccggaccugauaauggugcuguagcaguucugaaguauaacggcauaauuaccgacacgaucaagagcuggagaaauaacaucuugaggacucaagagucggagugugccugcgugaaugggucuuguuucaccgucaugacagauggaccauccgacggccaggcuucauacaaaauuuuucggaucgaaaaggguaaaauugugaagaguguggagaugaacgcccccaauuaucauuacgaagagugcagcuguuacccugauuccucugagauaacuugcgucugccgcgacaacuggcacgggagcaauagaccauggguuucauucaaccauaaucucgaauaucagaucggauacauuuguaguggcaucuuuggcgauaacccgaggcccaaugacaaaaccggguccugcggaccugugagcucuaacggugcgaauggcguaaagggguucucauuuaaguauggaaacggcguguggaucggucggacaaaaaguaccagcucccgcaacggguucgagaugauuugggauccaaauggcuggacgggaacugacaacaauuuuucuauaaagcaggacaucgucggcauuaacgaauggucgggguacagcggauccuucgugcaacaccccgagcugacaggucugaauuguauccgaccuugcuucuggguugaacucauuagaggcaggccaaaagagaacaccaucuggacuucagggaguucuauaucguuuuguggagucaauuccgauacagugggcuggucauggcccgacggugcagaguuaccguucaccaucgauaaguga

SEQ ID NO: 148838 - RNA, 1410 nt, Artificial Sequence; identical to SEQ ID NO: 148834
  derived and/or modified CDS sequence (opt3) from neuraminidase__InfluenzaA__AEI86837

SEQ ID NO: 148839 - RNA, 1410 nt, Artificial Sequence; identical to SEQ ID NO: 148305
  derived and/or modified CDS sequence (opt3) from neuraminidase__InfluenzaA__AEI86847

SEQ ID NO: 148840 - RNA, 1410 nt, Artificial Sequence
  derived and/or modified CDS sequence (opt3) from neuraminidase__InfluenzaA__AEI86867
augaaccccaaucagaagaucauuaccauaggcagcgugugcaugacaaucgggauggccaaccugauucuccaaaucggaaauauuaucuccauauggaucucucacucaauucagcuugguaaccagaaucagaucgagacuuguaaccaaagugucauuacguacgaaaauaacaccuggguuaaucagacauaugugaacaucagcaauacuaaccuggcugcaggccaguccguagugucugucaaauuggccggaaauucgucauuaugcccugugagcggaugggcgauauacaguaaggacaacuccauuagaaucggcucuaaaggugauguuuucgugauuagggagccauuuaucagcuguuccccgcuggaaugccggaccuucuuucuaacacagggggcucuccugaaugacaagcauucaaacggaaccaucaaagaucgcagucccuaucgaacucuuaugagcuguccuauuggcgaggucccaucucccuacaacuccaaguucgaaucaguggccuggagcgcaagugccugccacgacggcauaaauuggcugacaaucgggauuucuggaccugauaacggugcuguagcaguuuugaaguauaauggcaucauaaccgacacgauuaaauccuggcguaacaauauccucagaacucaagagagcgagugugccugcgugaacgggucguguuuuaccaucaugacagauggaccaucugacggccaggcuuccuacaagauuuucaggaucgaaaaagguaagauugucaaaucaguggagaugaaugcccccaacuaucauuacgaagagugcaguuguuacccugauagcuccgagauaacuugcgugugccgggacaauuggcacgggucuaaccgcccaugggucagcuuuaaucagaaccuggaauaucagaucggauacauuuguucaggcaucuucggcgauaauccgagacccaacgacaagaccgggaguugcggaccuguuuccagcaauggugcgaacggcgugaagggguuuucuuucaaauauggaaacggcguauggaucgguaggacaaagucaauuaguagccggaaaggguuugagaugauaugggauccaaauggcuggaccggaacggacaacaauuucuccaucaagcaagacauugugggcaucaacgaauggucuggguacucggggagcuuuguccagcaucccgagcugacuggucucgauuguauucgcccuugcuucuggguggaauuaauccgaggcagaccaaaagagaauacaauauggaccuccgggucaaguaucucuuucuguggaguuaacagcgacacugugggcugguccuggcccgauggugcagagcugccguuuacaauugacaaguga

SEQ ID NO: 148841 - RNA, 1410 nt, Artificial Sequence; identical to SEQ ID NO: 148834
  derived and/or modified CDS sequence (opt3) from neuraminidase__InfluenzaA__AEI86887

SEQ ID NO: 148842 - RNA, 1410 nt, Artificial Sequence; identical to SEQ ID NO: 148834
  derived and/or modified CDS sequence (opt3) from neuraminidase__InfluenzaA__AEI86897

SEQ ID NO: 148843 - RNA, 1410 nt, Artificial Sequence
  derived and/or modified CDS sequence (opt3) from neuraminidase__InfluenzaA__AEI86907
augaaccccaaucagaagaucauuaccauaggcagcgugugcaugacaaucgggauggccaaccugauucuccaaaucggaaauauuaucuccauauggaucucucacucaauucagcuugguaaccagaaucagaucgagacuuguaaccaaagugucauuacguacgaaaauaacaccuggguuaaucagacauaugugaacaucagcaauacuaacuucgcugcaggccaguccguagugucugucaaacuggccggaaauucgucauugugcccugugagcggaugggcgauauacaguaaggacaacuccauuagaaucggcucuaaaggugauguuuuugugauuagggagccauucaucagcuguuccccguuagaaugccggaccuuuuuccugacacagggggcucuacucaaugacauccauucaaacggaaccauuaaggaucgcagucccuaucgaacucugaugagcuguccuauaggcgaggucccaucucccuacaacucccguuuugaaucaguggccuggagcgcaagugccugccacgacggcaucaauuggcuuacaauugggaucucuggaccugauaacggugcuguagcaguucugaaauauaauggcauaauuaccgacacgaucaaguccuggagaaacaauaucuugaggacucaagagagcgagugugccugcgugaacgggucguguuucaccauuaugacagauggaccaucugacggccaggcuuccuacaagaucuuucggauugaaaaagguaagauagucaaaucaguggagaugaaugcccccaacuaucauuacgaagagugcaguuguuacccugauagcuccgagaucacuugcgugugccgcgacaauuggcacgggucuaacagaccaugggucagcuucaaucagaaccucgaauaucagauuggauacaucuguucaggcaucuuuggcgauaauccgaggcccaacgacaagaccgggaguugcggaccuguuuccagcaauggugcgaacggcgugaaaggguucucuuuuaaguauggaaacggcguauggauuggucggacaaagucaauaaguagccgcaaaggguucgagaugaucugggauccaaauggcuggaccggaacggacaacaauuuuuccauuaagcaagacaucgugggcauuaacgaauggucuggguacucggggagcuucguccagcaucccgagcugacuggucuggauuguauccgaccuugcuucuggguggaacucauaagaggcaggccaaaagagaauacaaucuggaccuccgggucaaguauuucuuuuuguggaguuaacagcgacacugugggcugguccuggcccgauggugcagaguuaccguucacaaucgacaaguga

SEQ ID NO: 148844 - RNA, 1410 nt, Artificial Sequence
  derived and/or modified CDS sequence (opt3) from neuraminidase__InfluenzaA__AEI86917
augaaccccaaucagaagaucauuaccauaggcagcaucugcaugacaauugggauggccaaccugauccuccaaauuggaaauaucauauccaucuggauuucucacucaauccagcuugguaaccagaaucagauugagacuuguaaccaaagugugaucacguacgaaaauaacaccugggucaaucagacauauguuaacauaagcaauacuaacuucgcugcaggccaguccgugguaucugugaaacuggccggaaauucgucauugugcccugucagcggaugggcgauuuacaguaaggacaacuccaucagaauuggcucuaaaggugauguguuuguuaucagggagccauucaucagcuguuccccguuagaaugccggaccuuuuuccugacacagggggcucuacucaaugacaagcauucaaacggaaccauuaaagaucgcagucccuaucgaacucugaugagcuguccuauaggcgaggugccaucucccuacaacucccguuuugaaucagucgccuggagcgcaagugccugccacgacggcaucaauuggcuuacaauugggaucucuggaccugauaacggugcuguggcaguacugaaguauaauggcauaauuaccgacacgaucaaguccuggagaaacaauaucuugaggacucaagagagcgagugugccugcguuaacgggucguguuucaccauuaugacagauggaccaucugacggccaggcuuccuacaaaaucuuucggauugaaaaggguaaaauagugaagucagucgagaugaaugcccccaacuaucauuacgaagagugcaguuguuacccugauagcuccgagaucacuugcgugugccgcgacaauuggcacgggucuaacagaccaugggugagcuucaaucagaaccucgaauaucagauuggauacaucuguucaggcaucuuuggcgauaauccgaggcccaacgacaaaaccgggaguugcggaccugucuccagcaauggugcgaacggcguuaagggguucucuuuuaaguauggaaacggcguguggauuggucggacaaaaucaauaaguagccgcaagggguucgagaugaucugggauccaaauggcuggaccggaacggacaacaauuuuuccauuaaacaagacaucguaggcauuaacgaauggucuggguacucggggagcuucgugcagcaucccgagcugacuggucuggauuguauccgaccuugcuucugggucgaacucauaagaggcaggccaaaggagaauacaaucuggaccuccgggucaaguauuucuuuuuguggagugaacagcgacacuguuggcugguccuggcccgauggugcagaguuaccguucacaaucgacaaauga

SEQ ID NO: 148845 - RNA, 1410 nt, Artificial Sequence; identical to SEQ ID NO: 148757
  derived and/or modified CDS sequence (opt3) from neuraminidase__InfluenzaA__AEI86927

SEQ ID NO: 148846 - RNA, 1410 nt, Artificial Sequence; identical to SEQ ID NO: 148831
  derived and/or modified CDS sequence (opt3) from neuraminidase__InfluenzaA__AEI86937

SEQ ID NO: 148847 - RNA, 1410 nt, Artificial Sequence
  derived and/or modified CDS sequence (opt3) from neuraminidase__InfluenzaA__AEI86947
augaaccccaaucagaagaucauuaccauaggcagcgugugcaugacaaucgggauggccaaccugauucuccaaaucggaaauauuaucuccauauggaucucucacucaauucagcuugguaacaaaaaucagaucgagacuuguaaccagagugucauuacguacgaaaauaacaccuggguuaaucaaacauaugugaacaucagcaauacuaacuucgcugcaggccaguccguagugucugucaagcuggccggaaauucgucauugugcccugugagcggaugggcgauauacaguaaagacaacuccauuagaaucggcucuaagggugauguuuuugugauuagggagccauucaucagcuguuccccguuagaaugccggaccuuuuuccugacacagggggcucuacucaaugacaaacauucaaacggaaccaucaaggaucgcagucccuaucgaacucugaugagcuguccuauuggcgaggucccaucucccuacaacucccguuuugaaucaguggccuggagcgcaagugccugccacgacggcauaaauuggcuuacaaucgggauuucuggaccugauaacggugcuguagcaguucugaaguauaauggcaucauaaccgacacgauuaaauccuggagaaacaauaucuugaggacucaggagagcgagugugccugcgugaacgggucguguuucaccgucaugacagauggaccaucugacggccaggcuuccuacaagaucuuucggauugaaaaagguaagaucgugaaaucaguggagaugaaugcccccaacuaucauuacgaagagugcaguuguuacccugauagcuccgagauuacuugcgucugccgcgacaauuggcacgggucuaacagaccauggguuagcuucaaucaaaaccucgaauaucagauaggauacaucuguucaggcauuuuuggcgauaauccgaggcccaacgacaagaccgggaguugcggaccuguguccagcaauggugcgaacggcguaaagggguucucuuuuaaauauggaaacggcguguggaucggucggacaaagucaaucaguagccgcaauggguucgagaugauuugggauccaaacggcuggaccggaacggacaauaacuuuuccauaaaacaggacaucgucggcauuaaggaauggucuggguacucggggagcuucgugcaacaucccgagcugacuggucuggauuguauccgaccuugcuucuggguugaacucauuagaggcaggccaaaagagaauacaaucuggaccuccgggucaaguauaucuuuuuguggagugaacagcgacacugucggcugguccuggcccgauggugcagaguuaccguucacaaucgacaaguga

SEQ ID NO: 148848 - RNA, 1410 nt, Artificial Sequence
  derived and/or modified CDS sequence (opt3) from neuraminidase__InfluenzaA__AEI86967
augaaccccaaucagaagaucauuaccauaggcagcgugugcaugacaaucgggauggccaaccugauucuccaaaucggaaauauuaucuccauauggaucucucacucaauucagcuugguaaccagaaucagaucgagacuuguaaccaaagugucauuacguacgaaaauaacaccuggguuaaucagacauaugugaacaucagcaauacuaacuucgcugcaggccaguccguagugucugucaaacuggccggaaauucgucauugugcccugugagcggaugggcgauauacaguaaggacaacuccauuagaaucggcucuaaaggugaugcuuuuguuauuagggagccauucaucagcuguuccccguuagaaugccggaccuuuuuccugacacagggggcccuacucaaugacaagcauucaaacggaaccaucaaagaucgcagucccuaucgaacucugaugagcuguccuauuggcgaggugccaucucccuacaacucccguuuugaaucagucgcauggagcgccagugcuugccacgacggcauaaauuggcuuacaaucgggauuucuggaccugauaacggugcaguggccguacugaaguauaauggcaucauaaccgacacgauuaaguccuggagaaacaauaucuugaggacucaagagagcgagugugcuugcguuaacgggucguguuucaccaucaugacagauggaccaucugacggccaggccuccuacaaaauuuuucggaucgaaaaggguaaaauugugaagucagucgagaugaaugcgcccaacuaucauuacgaagagugcaguuguuacccugauagcuccgagauaacuugcgugugccgcgacaauuggcacgggucuaacagaccaugggugagcuucaaucagaaccucgaauaucagaucggauacauuuguucaggcaucuuuggcgauaauccgaggcccaacgacaaaaccgggaguugcggaccugucuccagcaauggugcaaacggcguuaagggguucucuuuuaaguauggaaacggcguguggaucggucggacaaaaucaauuaguagccgcaagggguucgagaugauaugggauccaaauggcuggaccggaacggacaacaauuuuuccaucaaacaagacauuguaggcaucaacgaauggucuggguacucggggagcuucgugcagcaucccgagcugacuggucuggauuguauucgaccuugcuucugggucgaacucaucagaggcaggccaaaggagaauacaauauggaccuccgggucaaguaucucuuuuuguggagugaacagcgacacuguuggcugguccuggcccgauggugccgaguuaccguucacaauugacaaauga

SEQ ID NO: 148849 - RNA, 1410 nt, Artificial Sequence
  derived and/or modified CDS sequence (opt3) from neuraminidase__InfluenzaA__AEI86977
augaaccccaaucagaagaucauuaccauaggcagcgugugcaugacaaucgggauggccaaccugauucuccaaaucggaaauauuaucuccauauggaucucucacucaauucagcuugguaaccagaaucagaucggcacuuguaaccaaagugucauuacguacgagaauaacaccuggguuaaucagacauaugugaacaucagcaauacuaacuucgcugcagggcaguccguagugucugucaaacuggccggaaauucgucauugugcccugugagcggcugggcgauauacaguaaggacaacuccauuagaaucgguucuaaaggggauguuuuugugauuagggaaccauucaucagcuguuccccguuagagugccggaccuuuuuccugacacagggagcucuacucaaugacaagcauucaaacggcaccaucaaagaucgcagucccuaucgaacucugaugagcuguccuauuggcgaagucccaucucccuacaacucccguuuugagucaguggccuggagcgcaagugccugccacgacgggauaaauuggcuuacaaucggaauuucugguccugauaacggcgcuguagcaguucugaaguauaaugggaucauaaccgacacgauuaaguccuggagaaacaauaucuugaggacucaagaaagcgaguguaccugcgugaacggaucguguuucacagucaugacugauggcccaucugacggucaggccuccuacaaaaucuuuaagauugagaaagggaagaucgugaaaucaguggaaaugaaugcucccaacuaucauuacgaggaaugcaguuguuacccugauagcuccgagauuaccugcgucugccgggacaauuggcacggaucuaaccgcccauggguuagcuucaaucagaaccucgaguaucagauaggcuacaucuguucaggcauuuuuggggauaauccgagacccaacgacaagacaggaaguugcgguccuguguccagcaauggcgccaacgggguaaagggauucucuuuuaaauauggcaacgguguguggaucgggaggaccaagucaaucaguagccggaauggcuucgaaaugauuugggauccaaacggauggacgggcacugacaauaacuuuuccauaaaacaagacaucgucgggauuaaugaguggucuggauacucggguagcuucgugcagcaucccgaacugacaggccuggauuguauccgcccuugcuucuggguugagcucauucgagggagaccaaaggaaaacaccaucuggacuuccggaucaaguauaucuuuuuguggcgugaauagcgacacagucgguugguccuggcccgauggggcggaguuaccguucaccaucgacaaauga

SEQ ID NO: 148850 - RNA, 1410 nt, Artificial Sequence
  derived and/or modified CDS sequence (opt3) from neuraminidase__InfluenzaA__AEI86997
augaaccccaaucagaagaucauuaccauaggcagcgugugcaugacaaucgggauggccaaccugauucuccaaaucggaaauauuaucuccauauggaucucucacucaauucagcuugguaaccagaaucagaucgagacuuguaaccaaagugucauuacguacgaaaauaacaccuggguuaaucagacauaugugaacaucagcaauacuaacuucgcugcaggccaguccguagugucugucaaacuggccggaaauucgucauugugcccugugagcggaugggcgauauacaguaaggacaacuccauuagaaucggcucuaaaggugauguuuuugugauuagggagccauucaucagcuguuccccguuagaaugccggaccuuuuuccugacacagggggcucuacucaaugacaagcauucaaacggaaccaucaaagaucgcagucccuaucgaacucugaugagcuguccuauuggcgaggucccaucucccuacaacucccguuuugaaucaguggccuggagcgcaagugccugccacgacggcauaaauuggcuuacaaucgggauuucuggaccugauaacggugcuguagcaguucugaaguauaauggcaucauaaccgacacgauuaaguccuggagaaacaauaucuugaggacucaagagagcgagugugccugcgugaacgggucguguuucaccgucaugacagauggaccaucugacggccaggcuuccuacaaaaucuuucggauugaaaaggguaaaaucgugaagucaguggagaugaaugcccccaacuaucauuacgaagagugcaguuguuacccugauagcuccgagauuacuugcgucugccgcgacaauuggcacgggucuaacagaccauggguuagcuucaaucagaaccucgaauaucagauaggauacaucuguucaggcauuuuuggcgauaauccgaggcccaacgacaaaaccgggaguugcggaccuguguccagcaauggugcgaacggcguaaagggguucucuuuuaaguauggaaacggcguguggaucggucggacaaaaucaaucaguagccgcaauggguucgagaugauuugggauccaaacggcuggaccggaacggacaauaacuuuuccauaaagcaagacaucgucggcauuaaagaauggucuggguacucggggagcuucgugcagcaucccgagcugacuggucuggauuguauccgaccuugcuucuggguugaacucauuagaggcaggccaaaggagaauacaaucuggaccuccgggucaauaaucaguuuuuguggagugaacucugacacugucggcuggagcuggcccgauggugcagaguuaccguucacaauugacaaauga

SEQ ID NO: 148851 - RNA, 1410 nt, Artificial Sequence
  derived and/or modified CDS sequence (opt3) from neuraminidase__InfluenzaA__AEI87007
augaaccccaaucagaagaucauuaccauaggcagcgugugcaucacaauugggauggccaaccugauccuccaaauuggaaauaucauauccaucuggauuucucacucaauccagcuugguaaccagaaucagauugagacuuguaaccaaagugucaucacguacgaaaauaacaccuggguuaaucagacauaugugaacauaagcaauacuaacuucgcugcaggccaguccguagugucugucaaacuggccgggaauagcucauugugcccugugagcggaugggcgauuuacaguaaggacaacuccaucagaauuggcucuaaaggugauguuuuugugaucagggagccauucaucagcuguuccucauuagaaugccggaccuuuuuccugacacagggggcucuacucaaugacaagcauaguaacggaaccauuaaagaucgcagcccguaucgaacucugaugucuugucccauaggcgaggucccuuccccauacaacucacguuuugaaagcguggccuggagugcaucugccugccacgacggcaucuccuggcuuacaauugggaucagcggacccgauaauggugcuguagcaguucugaaguauaacggcauaauuaccgacacgaucaagucguggagaaauaacaucuugaggacucaagagucugagugugccugcgugaauggguccuguuucaccgucaugacagauggaccuucagacggccaggcuaguuacaaaauuuuucggaucgaaaaggguaaaauugugaagucgguggagaugaacgccccaaauuaucauuacgaagagugcuccuguuaccccgauucuagcgagauaacuugcgucugccgcgacaacuggcacgggucaaauagaccuuggguuaguuucaaccagaaucucgaauaucagaucggauacauuuguuccggcaucuuuggcgauaacccaaggccgaaugacaaaaccgggagcugcggacccgugucuucaaacggugcgaauggcguaaagggguucaguuuuaaguauggaaacggcguguggaucggucggacaaaaagcauuuccucucgcaacggguucgagaugauaugggauccuaauggcuggaccggaacggacaacaauuuuucgaucaagcaagacauugucggcaucaacgaauggagcggguacuccggaucauucgugcagcauccagagcugacuggucuggauuguauucgacccugcuucuggguugaacucaucagaggcaggccuaaagagaauacaauauggaccagugggucuagcaucuccuuuuguggagugaacucagacacugucggcuggagcuggccagauggugcagaguuacccuucacaauugacaaguga

SEQ ID NO: 148852 - RNA, 1410 nt, Artificial Sequence
  derived and/or modified CDS sequence (opt3) from neuraminidase__InfluenzaA__AEI87017
augaaccccaaucagaagaucauuaccauaggcagcgugugcaugacaaucgggauggccaaccugauucuccaaaucggaaauauuaucuccauauggaucucucacucaauucagcuugguaaccagaaucagaucgagacuuguaaccaaagugucauuacguacgaaaauaacaccuggguuaaucagacauaugugaacaucagcaauacuaacuucgcugcaggccaguccguagugucugucaaacuggccggaaauucgucauugugcccugugagcggaugggcgauauacaguaaggacaacuccauuagaaucggcucuaaaggugauguuuuugugauuagggagccauucaucagcuguuccccguuagaaugccggaccuuuuuccugacacagggggcucuacucaaugacaagcauucaaacggaaccaucaaagaucgcagucccuaucgaacucugaugagcuguccuauuggcgaggucccaucucccuacaacucccguuuugaaucaguggccuggagcgcaagugccugccacgacggcauaaauuggcuuacaaucgggauuucuggaccugauaacggugcuguagcaguucugaaguauaauggcaucauaaccgacacgauuaaguccuggagaaacaauaucuugaggacucaagagagcgagugugccugcgugaacgggucguguuucaccgucaugacagauggaccaucugacggccaggcuuccuacaaaaucuuucggauugaaaaggguaaaaucgugaagucaguggagaugaaugcccccaacuaucauuacgaagagugcaguuguuacccugauagcuccgagauuacuugcgucugccgcgacaauuggcacgggucuaacagaccauggguuagcuucaaucagaaccucgaauaucagauaggauacaucuguucaggcauuuuuggcgauaauccgaggcccaacgacaaaaccgggaguugcggaccuguguccagcaauggugcgaacggcguaaagggguucucuuuuaaguauggaaacggcguguggaucggucggacaaaaucaaucaguagccgcaauggguucgagaugauuugggauccaaacggcuggaccggaacggacaauaacuuuuccauaaagcaagacaucgucggcauuaaugaauggucuggguacucggggagcuucgugcagcaucccgagcugacuggucuggauuguauccgaccuugcuucuggguugaacucauuagaggcaggccaaaagagaacacaaucuggaccuccgggucaaguauaucuuuuuguggagugaauggcgacacugguggguggagcuggcccgauggcgcagaguuaccguucacaaucgacaaguga

SEQ ID NO: 148853 - RNA, 1410 nt, Artificial Sequence; identical to SEQ ID NO: 148757
  derived and/or modified CDS sequence (opt3) from neuraminidase__InfluenzaA__AEI87027

SEQ ID NO: 148854 - RNA, 1410 nt, Artificial Sequence; identical to SEQ ID NO: 148850
  derived and/or modified CDS sequence (opt3) from neuraminidase__InfluenzaA__AEI87037

SEQ ID NO: 148855 - RNA, 1410 nt, Artificial Sequence; identical to SEQ ID NO: 148834
  derived and/or modified CDS sequence (opt3) from neuraminidase__InfluenzaA__AEI87047

SEQ ID NO: 148856 - RNA, 1410 nt, Artificial Sequence
  derived and/or modified CDS sequence (opt3) from neuraminidase__InfluenzaA__AEI87057
augaaccccaaucagaagaucauuaccauaggcagcgugugcaugacaaucgggauggccaaccugauucuccaaaucggaaauauuaucuccauauggaucucucacucaauucagcuugguaaccagaaucagaucgagacuuguaaccaaagugucauuacguacgaaaauaacaccuggguuaaucagacauaugugaacaucagcaauacuaacuucgcugcaggccaguccguagugucugucaaacuggccggaaauucgucauugugcccugugagcggaugggcgauauacaguaaggacaacuccauuagaaucggcucuaaaggugauguuuuugugauuagggagccauucaucagcuguuccccguuagaaugccggaccuuuuuccugacacagggggcucuacucaaugacaagcauucaaacggaaccaucaaagaucgcagucccuaucgaacucugaugagcuguccuauuggcgaggucccaucucccuacaacucccguuuugaaucaguggccuggagcgcaagugccugccacgacggcauaaauuggcuuacaaucgggauuucuggaccugauaacggugcuguagcaguucugaaguauaauggcaucauaaccgacacgauuaaguccuggagaaacaauaucuugaggacucaagagagcgagugugccugcgugaacgggucguguuucaccgucaugacagauggaccaucugacggccaggcuuccuacaaaaucuuucggauugaaaaggguaaaaucgugaagucaguggagaugaaugcccccaacuaucauuacgaagagugcaguuguuacccugauagcuccgagauuacuugcgucugccgcgacaauuggcacgggucuaacagaccauggguuagcuucaaucagaaccucgaauaucagauaggauacaucuguucaggcauuuuuggcgauaauccgaggcccaacgacaaaaccgggaguugcggaccuguguccagcaauggugcgaacggcguaaagggguucucuuuuaaguauggaaacggcguguggaucggucggacaaaaucaaucaguagccgcaauggguucgagaugauuugggauccaaacggcuggaccggaacggacaauaacuuuuccauaaagcaagacaucgucggcauuaaagaauggucuggguacucggggagcuucgugcagcaucccgagcugacuggucuggauuguauccgaccuugcuucuggguugaacucauuagaggcaggccaaaggagaauacaaucuggaccuccgggucaaguauaucuuuuuguggagugaacagcgacacugucggcugguccuggcccgauggugcagaguuaccguucacaaucgacaaauga

SEQ ID NO: 148857 - RNA, 1410 nt, Artificial Sequence; identical to SEQ ID NO: 148305
  derived and/or modified CDS sequence (opt3) from neuraminidase__InfluenzaA__AEI87067

SEQ ID NO: 148858 - RNA, 1410 nt, Artificial Sequence
  derived and/or modified CDS sequence (opt3) from neuraminidase__InfluenzaA__AEI87077
augaaccccaaucagaagaucauuaccauaggcagcaucugcaugacaauugggauggccaaccugauccuccaaauuggaaauaucauauccaucuggauuucucacucaauccaguucgguaaccagaaucagauuggcacuuguaaccaaagugugaucacguacgagaauaacaccugggucaaucagacauauguuaacauaagcaauacuaacuuugcugcagggcaguccgugguaucugugaaacuugccggaaauucgucacugugcccugucagcggcugggcgauuuacaguaaggacaacuccaucagaauugguucuaaaggggauguguucguuaucagggaaccauuuaucagcuguuccccguuggagugccggaccuucuuuuuaacacagggagcucugcuaaaugacaagcauucaaacggcaccauuaaagaucgcagucccuaucgaacucucaugagcuguccuauaggcgaagugccaucucccuacaacucccguuucgagucagucgccuggagcgcaagugccugccacgacgggaucaauuggcugacaauuggaaucucugguccugauaacggcgcuguggcaguacuuaaguauaaugggauaauuaccgacacgaucaaguccuggagaaacaauauccugaggacucaagaaagcgagugugccugcguuaacggaucguguuuuaccauuaugacagauggcccaucugacggucaggcuuccuacaaaaucuuccggauugagaaggggaaaauagugaagucagucgaaaugaaugcccccaacuaucauuacgaggaaugcaguuguuacccugauagcuccgagaucacuugcgugugccgcgacaauuggcacggaucuaacagaccaugggugagcuuuaaucagaacuuggaguaucagauuggcuacaucuguucaggcaucuucggggauaauccgaggcccaacgacaaaaccggaaguugcgguccugucuccagcaauggcgcgaacgggguuaagggauuuucuuucaaguauggcaacgguguguggauugggcggacaaaaucaauaaguagccgcaagggcuuugaaaugaucugggauccaaauggauggaccggcacggacaacaauuucuccauuaaacaagacaucguagggauuaacgaguggucuggauacucggguagcuucgugcagcaucccgaacucacuggccuggauuguauccgaccuugcuuuugggucgagcugauaagagggaggccaaaggaaaauacaaucuggaccuccggaucaaguauuucuuucuguggcgugaacagcgacacuguugguugguccuggcccgauggggcagagcucccguuuacaaucgacaaauga

SEQ ID NO: 148859 - RNA, 1410 nt, Artificial Sequence
  derived and/or modified CDS sequence (opt3) from neuraminidase__InfluenzaA__AEI87087
augaaccccaaucagaagaucauuaccauaggcagcgugugcaugacaaucgggauggccaaccugauucuccaaaucggaaauauuaucuccauauggaucucucacucaauucagcuugguaaccagaaucagaucgagacuuguaaccaaagugucauuacguacgaaaauaacaccuggguuaaucagacauaugugaacaucagcaauacuaacuucgcugcaggccaguccguagugucugucaaacuggccggaaauucgucauugugcccuauaagcggaugggcgauuuacaguaaggacaacuccaucagaauuggcucuaaaggugauguguuuguuaucagggagccauucaucagcuguuccccguuagaaugccggaccuuuuuccugacacagggggcucuacucaaugacaagcauucaaacggaaccauuaaagaucgcagucccuaucgaacucugaugagcuguccuauaggcgaggugccaucucccuacaacucccguuuugaaucagucgccuggagcgcaagugccugccacgacggcaucaauuggcuuacaauugggaucucuggaccugauaacggugcuguggcaguacugaaguauaauggcauaauuaccgacacgaucaaguccuggagaaacaauaucuugaggacucaagagagcgagugugccugcguuaacgggucguguuucaccgugaugacagauggaccaucugacggccaggcuuccuacaaaauuuuucggaucgaaaaggguaaaauugucaagucaguggagaugaaugcccccaacuaucauuacgaagagugcaguuguuacccugauagcuccgagauaacuugcgugugccgcgacaauuggcacgggucuaacagaccaugggucagcuucaaucagaaccucgaauaucagaucggauacauuuguucaggcaucuuuggcgauaauccgaggcccaacgacaaaaccgggaguugcggaccuguuuccagcaauggugcgaacggcgugaagggguucucuuuuaaguauggaaacggcguauggaucggucggacaaaaucaauuaguagccgcaauggguucgagaugauaugggauccaaacggcuggaccggaacggacaauaacuuuuccaucaagcaagacauugugggcaucaaagaauggucuggguacucggggagcuucguccagcaucccgagcugacuggucuggauuguauucgaccuugcuucuggguggaacucaucagaggcaggccaaaggagaauacaauauggaccuccgggucaaucauuaguuuuuguucuguuaacagcgacacugugggaugguccuggcccgauggcgcagaguuaccguucacaaucgacaaauga

SEQ ID NO: 148860 - RNA, 1410 nt, Artificial Sequence; identical to SEQ ID NO: 148831
  derived and/or modified CDS sequence (opt3) from neuraminidase__InfluenzaA__AEI87097

SEQ ID NO: 148861 - RNA, 1410 nt, Artificial Sequence; identical to SEQ ID NO: 148831
  derived and/or modified CDS sequence (opt3) from neuraminidase__InfluenzaA__AEI87107

SEQ ID NO: 148862 - RNA, 1413 nt, Artificial Sequence
  derived and/or modified CDS sequence (opt3) from neuraminidase__InfluenzaA__AEI91968
augaaccccaaucagaagaucauuaccauaggcagcaucuccauugccaucgggauuaucucucugaugcuccaaauaggaaacaucauuucaaucugggcuagucacagcauucagacagguucccagaauaacacuggcaucugcaaucagagaauaauuacguacgagaacucuaccugggugaaucauacauaugucaacaucaauaacacuaauguuguggcaggggaagacaaaaccucgguaacacuugccggaaacucaagccuguguaguauuuccggcugggcgaucuacaccaaggauaauucuaucaggauugguagcaaaggggacguguucgucauacgggagccuuuuaucuccugcucacacuuggaaugucgcacuuucuuuuuaacacaaggagcucugcuaaacgauaagcauaguaauggcaccgugaaagaccgaagcccauaucgugcccucaugucuugcccgcugggcgaggcacccuccccuuacaacucaaaguucgaaagcguugccuggagugcuucugcaugucacgaugggaugggauggcuuacgauugguaucuccggcccagacaacggggccguggcuguccugaaguauaauggaauaauuacuggcaccaucaaaagcuggaagaaacagaucuugagaacacaggagucggagugcguguguaugaacgguucuugcuuuacuauuaugaccgaugggcccuccaauaaggccgcgucauacaaaaucuucaagauugaaaagggaaaaguaacaaagaguauagagcucaacgcaccuaauuuuuauuacgaagaguguagcugcuacccagacaccggcaucguuaugugugugugcagggauaacuggcauggcuccaaucggcccugggucucuuucaaccagaaucuggacuaucaaauuggguacaucugcagcggaguguuuggugauaacccucgcccagaggacggcgaagggucauguaauccggugacggucgauggagccaacggcguuaaagguuucaguuauaaguacgggaauggcguguggaucggaagaacuaaauccaacaggcugcggaagggcuuugagaugauuugggaccccaauggguggacaaacaccgacagcgauuucucuguaaaacaggacguggucgcuauaacugauuggucaggauauagugguagcuuugugcagcacccugaacucacaggcuuagacugcaucaagccauguuucuggguugagcuggugcgcgggcuuccccgagaaaacaccacgauuuggaccuccggaucuucgaucagcuucugcggcgucaauuccgauacagccaacuggucauggccugacggugcagaguugccauuuacuauugauaaguga

SEQ ID NO: 148863 - RNA, 1410 nt, Artificial Sequence; identical to SEQ ID NO: 144786
  derived and/or modified CDS sequence (opt3) from neuraminidase__InfluenzaA__AEI91983

SEQ ID NO: 148864 - RNA, 1410 nt, Artificial Sequence; identical to SEQ ID NO: 147272
  derived and/or modified CDS sequence (opt3) from neuraminidase__InfluenzaA__AEI91984

SEQ ID NO: 148865 - RNA, 1410 nt, Artificial Sequence
  derived and/or modified CDS sequence (opt3) from neuraminidase__InfluenzaA__AEI92004
augaaccccaaucagaagaucauuaccauaggcagcgugugcaugacaaucgggauggccaaccugauucuccaaaucggaaauauuaucuccauauggaucucucacucaauucagcuugguaaccagaaucagaucgagacuuguaaccaaagugucauuacguacgaaaauaacaccuggguuaaucagacauaugugaacaucagcaauacuaacuucgcugcaggccaguccguagugucugucaaacuggccggaaauucgucauugugcccugugagcggaugggcgauauacaguaaggacaacuccauuagaaucggcucuaaaggugauguuuuugugauuagggagccauucaucagcuguuccccguuagaaugccggaccuuuuuccugacacagggggcucuacucaaugacaagcauucaaacggaaccaucaaagaucgcagucccuaucgaacucugaugagcuguccuauuggcgaggucccaucucccuacaacucccguuuugaaucaguggccuggagcgcaagugccugccacgacggcauaaauuggcuuacaaucgggauuucuggaccugauaacggugcuguagcaguucugaaguauaauggcaucauaaccgacacgauuaaguccuggagaaacaauaucuugaggacucaagagagcgagugugccugcgugaacgggucguguuucaccgucaugacagauggaccaucugacggccaggcuuccuacaaaaucuuucggauugaaaaggguaaaaucgugaagucaguggagaugaaugcccccaacuaucauuacgaagagugcaguuguuacccugauagcuccgagauuacuugcgucugccgcgacaauuggcacgggucuaacagaccauggguuagcuucaaucagaaccucgaauaucagauaggauacaucuguucaggcauuuuuggcgauaauccgaggcccaacgacaaaaccgggaguugcggaccuguguccagcaauggugcguauggcguaaagggguucucuuuuaaguacggaaacggcguguggaucggucggacaaaaucaaucaguagccgcaacggguucgagaugauuugggauccaaauggcuggaccggaacggacaacaauuuuuccauaaagcaagacaucgucggcauuaacgaauggucuggguauucggggagcuucgugcagcaucccgagcugacuggucuggauuguauccgaccuugcuucuggguugaacucauuagaggcaggccaaaagagaauacaaucuggaccuccgggucaaguauaucuuuuuguggagugaacagcgacacugucggcugguccuggcccgauggugcagaguuaccguucacaaucgacaaguga

SEQ ID NO: 148866 - RNA, 1413 nt, Artificial Sequence
  derived and/or modified CDS sequence (opt3) from neuraminidase__InfluenzaA__AEI92023
augaaccccaaucagaagaucauuaccauaggcagcaucuccauugccaucgggauuaucucucugaugcuccaaauaggaaacaucauuucaaucugggcuagucacagcauucagacagguucccagaauaacacuggcaucugcaaucagaaaauaauuacguacgagaacucuaccugggugaaucauacauaugucaacaucaauaacacuaauguuguggcaggggaagacaagaccucgguaacacuugccggaaacucaagccuguguaguauuuccggcugggcgaucuacaccaaagauaauucuaucagaauugguagcaagggggacguguucgucauaagggagccuuuuaucuccugcucacacuuggaaugucggacuuucuuuuuaacacaaggagcucugcuaaacgauaaacauaguaauggcaccgugaaggaccgcagcccauaucgagcccucaugucuugcccgcugggcgaggcacccuccccuuacaacucaaaguucgaaagcguugccuggagugcuucugcaugucacgaugggaugggauggcuuacgauugguaucuccggcccagacaacggggccguggcuguccugaaauauaauggaauaauuacuggcaccaucaagagcuggaaaaagcagaucuugcguacacaggagucggagugcguguguaugaacgguucuugcuuuacuauuaugaccgaugggcccuccaauaaagccgcgucauacaagaucuucaagauugaaaaaggaaagguaacaaaaaguauagagcucaacgcaccuaauuuuuauuacgaagaguguagcugcuacccagacaccggcaucguuaugugugugugcagagauaacuggcauggcuccaauaggcccugggucucuuucaaccagaaucuggacuaucaaauuggguacaucugcagcggaguguuuggugauaacccucggccagaggacggcgaagggucauguaauccggugacggucgauggaacuaacggcguuaaggguuucaguuauaaauacgggaauggcguguggaucggacgcacaaaguccaacagacugaggaaaggcuuugagaugauuugggaccccaauggguggaccaacacugacagcgauuucucuguaaagcaggacguggucgccauaacagauuggucaggauauagugguagcuuugugcagcacccugaacucaccggcuuagacugcauccggccauguuucuggguugagcuggugcgcgggcuuccccgagaaaacacgaccauuuggacauccggaucuucgaucagcuucugcggcgucaauuccgauacugcuaacuggucauggccugacggugccgaguugccauuuaccauugauaaguga

SEQ ID NO: 148867 - RNA, 1410 nt, Artificial Sequence
  derived and/or modified CDS sequence (opt3) from neuraminidase__InfluenzaA__AEJ10403
augaaccccaaucagaagaucauuaccauaggcagcgugugcaucacaauugggauggccaaccugauccuccaaauuggaaauaucauauccaucuggauuucucacucaauccagcuugguaaccagaaucagauugagacuuguaaccaaagugucaucacguacgaaaauaacaccuggguuaaucagacauaugugaacauaagcaauacuaacuucgcugcaggccaguccguagugucugucaaacuggccggaaauucgucauugugcccugugagcggaugggcgauuuacaguaaggacaacuccaucagaauuggcucuaaaggugauguuuuugugaucagggagccauucaucagcuguuccccguuagaaugccggaccuuuuuccugacacagggggcucuacucaaugacaagcauucaaacggaaccauuaaagaucgcagucccuaucgaacucugaugagcuguccuauaggcgaggucccaucucccuacaacucccguuuugaaucaguggccuggagcgcaagugccugccacgacggcaucucuuggcuuacaauugggaucuccggaccugauaauggugcuguagcaguucugaaguauaacggcauaauuaccgacacgaucaagagcuggagaaauaacaucuugaggacucaagagucggagugugccugcgugaaugggucuuguuucaccgucaugacagauggaccauccgacggccaggcuucauacaaaauuuuucggaucgaaaaggguaaaauugugaagaguguggagaugaacgcccccaauuaucauuacgaagagugcagcuguuacccugauuccucugagauaacuugcgucugccgcgacaacuggcacgggagcaauagaccauggguuucauucaaccagaaucucgaauaucagaucggauacauuuguaguggcaucuuuggcgauaacccgaggcccaaugacaaaaccggguccugcggaccugugagcgcgaacggugcaaauggcguaaagggguucucuuuuaaguauggaaacggcguguggaucggucggacaaaaucaauuaguagccgcaacggguucgagaugauaugggauccaaauggcuggaccggaacggacaacaauuuuuccaucaagcaagacauugucggcaucaacgaauggucuggguacucggggagcuucgugcagcaucccgagcugacuggucuggauuguauucgaccuugcuucuggguugaacucaucagaggcaggccaaaagagaauacaauauggaccuccgggucaaguaucucuuuuuguggagugaacagcgacacugucggcugguccuggcccgauggugccgaguuaccguucacaauugacaaguga

SEQ ID NO: 148868 - RNA, 1410 nt, Artificial Sequence; identical to SEQ ID NO: 148834
  derived and/or modified CDS sequence (opt3) from neuraminidase__InfluenzaA__AEJ10413

SEQ ID NO: 148869 - RNA, 1410 nt, Artificial Sequence; identical to SEQ ID NO: 148856
  derived and/or modified CDS sequence (opt3) from neuraminidase__InfluenzaA__AEJ10423

SEQ ID NO: 148870 - RNA, 1410 nt, Artificial Sequence
  derived and/or modified CDS sequence (opt3) from neuraminidase__InfluenzaA__AEJ10433
augaaccccaaucagaagaucauuaccauaggcagcgugugcaugacaaucgggauggccaaccugauucuccaaaucggaaauauuaucuccauauggaucucucacucaauucagcuugguaaccagaaucagaucgagacuuguaaccaaagugucauuacguacgaaaauaacaccuggguuaaucagacauaugugaacaucagcaauacuaacuucgcugcaggccaguccguagugucugucaaacuggccggaaauucgucauugugcccugugagcggaugggcgauauacaguaaggacaacuccauuagaaucggcucuaaaggugauguuuuugugauuagggagccauucaucagcuguuccccguuagaaugccggaccuuuuuccugacacagggggcucuacucaaugacaagcauucaaacggaaccaucaaagaucgcagucccuaucgaacucugaugagcuguccuauuggcgaggucccaucucccuacaacucccguuuugaaucaguggccuggagcgcaagugccugccacgacggcauaaauuggcuuacaaucgggauuucuggaccugauaacggugcuguagcaguucugaaguauaauggcaucauaaccgacacgauuaaguccuggagaaacaauaucuugaggacucaagagagcgagugugccugcgugaacgggucguguuucaccgucaugacagauggaccaucugacggccaggcuuccuacaaaaucuuucggauugaaaaggguaaaaucgugaagucaguggagaugaaugcccccaacuaucauuacgaagagugcaguuguuacccugauagcuccgagauuacuugcgucugccgcgacaauuggcacgggucuaacagaccauggguuagcuucaaucagaaccucgaauauaggauaggauacaucuguucaggcauuuuuggcgauaauccgcggcccaacgacaaaaccgggaguugcggaccuguguccagcaauggugcgaacggcguaaagggguucucuuuuaaguauggaaacggcguguggaucggucgcacaaaaucaaucaguagccgaaauggguucgagaugauuugggauccaaacggcuggaccggaacggacaauaacuuuuccauaaagcaggacaucauuggcaucaaugaauggucuggguacucggggagcuucguccaacaucccgagcugacuggucuggauuguauuagaccuugcuucuggguggaacucaucaggggccggccaaaagagaacacaauauggaccuccgggucaaguaucucuuuuuguggaguuaauagcggcacuguggguugguccuggcccgacggggcagaguuaccguucacaauugauaaguga

SEQ ID NO: 148871 - RNA, 1410 nt, Artificial Sequence; identical to SEQ ID NO: 148305
  derived and/or modified CDS sequence (opt3) from neuraminidase__InfluenzaA__AEJ10443

SEQ ID NO: 148872 - RNA, 1410 nt, Artificial Sequence; identical to SEQ ID NO: 148305
  derived and/or modified CDS sequence (opt3) from neuraminidase__InfluenzaA__AEJ10453

SEQ ID NO: 148873 - RNA, 1410 nt, Artificial Sequence; identical to SEQ ID NO: 148757
  derived and/or modified CDS sequence (opt3) from neuraminidase__InfluenzaA__AEJ10463

SEQ ID NO: 148874 - RNA, 1410 nt, Artificial Sequence
  derived and/or modified CDS sequence (opt3) from neuraminidase__InfluenzaA__AEJ10473
augaaccccaaucagaagaucauuaccauaggcagcgugugcaugacaaucgggauggccaaccugauucuccaaaucggaaauauuaucuccauauggaucucucacucaauucagcuugguaaccagaaucagaucgagacuuguaaccaaagugucauuacguacgaaaauaaaaccuggguuaaccagacauaugugaauaucagcaacacuaauuucgcugcaggccaguccguagugucugucaagcuggccgggaacucgucauugugcccugugagcggaugggcgauauacaguaaagacaauuccauuagaaucggcucuaagggugauguuuuugugauuagggagccauucaucagcuguuccccguuagaaugccggaccuuuuuccugacacagggggcucuacucaacgacaaacauucaaauggaaccaucaaggaucgcagucccuaucgaacucugaugagcuguccuauuggcgaggucccaucucccuacaacucccguuuugaaucaguggccuggagcgcaagugccugccacgacggcauaaacuggcuuacaaucgggauuucuggaccugauaauggugcuguagcaguucugaaguauaacggcaucauaaccgacacgauuaaauccuggagaaauaacaucuugaggacucaagagagcgagugugccugcgugaaugggucguguuucaccgucaugacagauggaccaucugacggccaggcuuccuacaagaucuuucggauugaaaaagguaagaucgugaaaucaguggagaugaacgcccccaauuaucauuacgaagagugcaguuguuacccugauagcuccgagauuacuugcgucugccgcgacaacuggcacgggucuaauagaccauggguuagcuucaaccagaaucucgaauaucagauaggauacaucuguucaggcauuuuuggcgauaacccgaggcccaaugacaagaccgggaguugcggaccuguguccagcaacggugcgaauggcguaaagggguucucuuuuaaauauggaaacggcguguggaucggucggacaaagucaaucaguagccgcaacggguucgagaugauuugggauccaaauggcuggaccggaacggacaacaaauuuuccauaaagcaagacaucgucggcauuaaugaauggucuggguacucggguagcuucgugcagcaucccgagcugacuggacugaacuguauccgaccuugcuucuggguugaacucauuagaggcaggccaaaagagaauacaaucuggaccuccgggucaaguauaucuuuuuguggagugaacagcgauacugucggcugguccuggcccgacggugcagaguuaccguucacaaucgauaaguga

SEQ ID NO: 148875 - RNA, 1410 nt, Artificial Sequence; identical to SEQ ID NO: 148305
  derived and/or modified CDS sequence (opt3) from neuraminidase__InfluenzaA__AEJ10503

SEQ ID NO: 148876 - RNA, 1410 nt, Artificial Sequence; identical to SEQ ID NO: 144786
  derived and/or modified CDS sequence (opt3) from neuraminidase__InfluenzaA__AEJ10523

SEQ ID NO: 148877 - RNA, 1410 nt, Artificial Sequence; identical to SEQ ID NO: 144786
  derived and/or modified CDS sequence (opt3) from neuraminidase__InfluenzaA__AEJ10533

SEQ ID NO: 148878 - RNA, 1410 nt, Artificial Sequence; identical to SEQ ID NO: 144786
  derived and/or modified CDS sequence (opt3) from neuraminidase__InfluenzaA__AEJ10543

SEQ ID NO: 148879 - RNA, 1410 nt, Artificial Sequence; identical to SEQ ID NO: 144786
  derived and/or modified CDS sequence (opt3) from neuraminidase__InfluenzaA__AEJ10553

SEQ ID NO: 148880 - RNA, 1410 nt, Artificial Sequence; identical to SEQ ID NO: 147061
  derived and/or modified CDS sequence (opt3) from neuraminidase__InfluenzaA__AEJ10563

SEQ ID NO: 148881 - RNA, 1410 nt, Artificial Sequence; identical to SEQ ID NO: 147061
  derived and/or modified CDS sequence (opt3) from neuraminidase__InfluenzaA__AEJ10573

SEQ ID NO: 148882 - RNA, 1410 nt, Artificial Sequence; identical to SEQ ID NO: 147061
  derived and/or modified CDS sequence (opt3) from neuraminidase__InfluenzaA__AEJ10583

SEQ ID NO: 148883 - RNA, 1410 nt, Artificial Sequence
  derived and/or modified CDS sequence (opt3) from neuraminidase__InfluenzaA__AEJ36305
augaaccccaaucagaagaucauuaccauaggcagcgugugcaugacaaucgggauggccaaccugauucuccaaaucggaaauauuaucuccauauggaucucucacucaauucagcuugguaaccagaaucagaucgagacuuguaaccaaagugucauuacguacgaaaauaacaccuggguuaaucagacauaugugaacaucagcaauacuaacuucgcugcaggccaguccguagugucugucaaacuggccggaaauucgucauugugcccugugagcgggugggcgauauacaguaaggacaacuccauuagaaucggcucuaaaggugauguuuuugugauuagggagccauucaucagcuguuccccguuagaaugccggaccuuuuuccugacacagggggcucuacucaaugacaagcauucaaacggaaccaucaaagaucgcagucccuaucgaacucugaugagcuguccuauuggcgaggucccaucucccuacaacucccguuuugaaucaguggccuggagcgcaagugccugccacgacggcauaaauuggcuuacaaucgggauuucuggaccugauaacggugcuguagcaguucugaaguauaauggcaucauaaccgacacgauuaaguccuggagaaacaauaucuugaggacucaagagagcgagugugccugcgugaacgggucguguuucaccgucaugacagauggaccaucugacggccaggcuuccuacaaaaucuuucggauugaaaaggguaaaaucgugaagucaguggagaugaaugcccccaacuaucauuacgaagagugcaguuguuacccugauagcuccgagauuacuugcgucugccgcgacaauuggcacgggucuaacagaccauggguuagcuucaaucagaaccucgaauaucagauaggauacaucuguucaggcauuuuuggcgauaauccgaggcccaacgacaaaaccgggaguugcggaccuguguccagcaauggugcgaacggcguaaagggguucucuuuuaaguauggaaacggcguguggaucggucggacaaaaucaaccaguagccgcaauggguucgagaugaucugggauccaaacggcuggacgggaacugacaauuccuuuucuauuaagcaagacauagucggcaucaacgaauggucgggguacagcggauccuucgugcagcaucccgagcugacaggucuggauuguauucgaccuugcuucuggguugaacucaucagaggcaggccaaaagagaauaccauuuggacuucagggaguucuaucagcuuuuguggagugaacuccgacacagucggcuggucauggcccgauggugcagaguuaccguucaccauagacaaguga

SEQ ID NO: 148884 - RNA, 1410 nt, Artificial Sequence; identical to SEQ ID NO: 144786
  derived and/or modified CDS sequence (opt3) from neuraminidase__InfluenzaA__AEJ37856

SEQ ID NO: 148885 - RNA, 1410 nt, Artificial Sequence; identical to SEQ ID NO: 144786
  derived and/or modified CDS sequence (opt3) from neuraminidase__InfluenzaA__AEJ37866

SEQ ID NO: 148886 - RNA, 1410 nt, Artificial Sequence; identical to SEQ ID NO: 144786
  derived and/or modified CDS sequence (opt3) from neuraminidase__InfluenzaA__AEJ37876

SEQ ID NO: 148887 - RNA, 1410 nt, Artificial Sequence; identical to SEQ ID NO: 148834
  derived and/or modified CDS sequence (opt3) from neuraminidase__InfluenzaA__AEJ37886

SEQ ID NO: 148888 - RNA, 1410 nt, Artificial Sequence
  derived and/or modified CDS sequence (opt3) from neuraminidase__InfluenzaA__AEJ37896
augaaccccaaucagaagaucauuaccauaggcagcgugugcaucacaauugggauggccaaccugauccuccaaauuggaaauaucauauccaucuggauuucucacucaauccagcuugguaaccagaaucagauugagacuuguaaccaaagugucaucacguacgaaaauaacaccuggguuaaucagacauaugugaacauaagcaauacuaacuucgcugcaggccaguccguagugucugucaaacuggccggaaauucgucauugugcccugugagcgggugggcgauuuacaguaaggacaacuccaucagaauuggcucuaaaggugauguuuuugugaucagggagccauucaucagcuguuccccguuagaaugccggaccuuuuuccugacacagggggcucuacucaaugacaagcauucaaacggaaccauuaaagaucgcagucccuaucgaacucugaugagcuguccuauaggcgaggucccaucucccuacaacucccguuuugaaucaguggccuggagcgcaagugccugccacgacggcaucucuuggcuuacaauugggaucuccggaccugauaauggugcuguagcaguucugaaguauaacggcauaauuaccgacacgaucaagagcuggagaaauaacaucuugaggacucaagagucggagugugccugcgugaaugggucuuguuucaccgucaugacagauggaccauccgacggccaggcuucauacaaaauuuuucggaucgaaaagggucgcauugugaaaaguguggagaugaacgcccccaauuaucauuacgaagagugcagcuguuacccugauuccucugagauaacuugcgucugcagagacaacuggcacgggagcaauaggccauggguuucauucaaccagaaucucgaauaucagaucggauacauuuguaguggcaucuuuggcgauaacccgcggcccaaugacaagaccggguccugcggaccugugagcucuaacggugcgaauggcguaaaaggguucucauuuaaguauggaaacggcguguggaucggucgcacaaagaguauuagcucccgaaacggguucgagaugauaugggauccaaauggcuggaccggaacggacaacaauuuuucuaucaaacaagacauugucggcaucaacgaauggucgggguacagcggauccuucgugcagcaucccgagcugacuggucuggauuguauuagaccuugcuucuggguugaacucaucaggggccggccaaaggagaauacaauauggaccucagggaguucuaucagcuuuuguggagugaacuccgacacugucggcuggucauggcccgauggugcagaguuaccguucacaauugacaaauga

SEQ ID NO: 148889 - RNA, 1410 nt, Artificial Sequence; identical to SEQ ID NO: 148834
  derived and/or modified CDS sequence (opt3) from neuraminidase__InfluenzaA__AEJ37906

SEQ ID NO: 148890 - RNA, 1410 nt, Artificial Sequence; identical to SEQ ID NO: 148834
  derived and/or modified CDS sequence (opt3) from neuraminidase__InfluenzaA__AEJ37916

SEQ ID NO: 148891 - RNA, 1410 nt, Artificial Sequence; identical to SEQ ID NO: 148834
  derived and/or modified CDS sequence (opt3) from neuraminidase__InfluenzaA__AEJ37926

SEQ ID NO: 148892 - RNA, 1410 nt, Artificial Sequence; identical to SEQ ID NO: 146688
  derived and/or modified CDS sequence (opt3) from neuraminidase__InfluenzaA__AEJ37936

SEQ ID NO: 148893 - RNA, 1410 nt, Artificial Sequence; identical to SEQ ID NO: 144786
  derived and/or modified CDS sequence (opt3) from neuraminidase__InfluenzaA__AEJ37946

SEQ ID NO: 148894 - RNA, 1410 nt, Artificial Sequence; identical to SEQ ID NO: 148834
  derived and/or modified CDS sequence (opt3) from neuraminidase__InfluenzaA__AEJ37956

SEQ ID NO: 148895 - RNA, 1410 nt, Artificial Sequence; identical to SEQ ID NO: 148834
  derived and/or modified CDS sequence (opt3) from neuraminidase__InfluenzaA__AEJ37966

SEQ ID NO: 148896 - RNA, 1410 nt, Artificial Sequence; identical to SEQ ID NO: 144786
  derived and/or modified CDS sequence (opt3) from neuraminidase__InfluenzaA__AEJ37976

SEQ ID NO: 148897 - RNA, 1410 nt, Artificial Sequence; identical to SEQ ID NO: 148834
  derived and/or modified CDS sequence (opt3) from neuraminidase__InfluenzaA__AEJ37986

SEQ ID NO: 148898 - RNA, 1410 nt, Artificial Sequence; identical to SEQ ID NO: 147458
  derived and/or modified CDS sequence (opt3) from neuraminidase__InfluenzaA__AEK21372

SEQ ID NO: 148899 - RNA, 1413 nt, Artificial Sequence; identical to SEQ ID NO: 148252
  derived and/or modified CDS sequence (opt3) from neuraminidase__InfluenzaA__AEK21383

SEQ ID NO: 148900 - RNA, 1410 nt, Artificial Sequence; identical to SEQ ID NO: 146688
  derived and/or modified CDS sequence (opt3) from neuraminidase__InfluenzaA__AEK21399

SEQ ID NO: 148901 - RNA, 1410 nt, Artificial Sequence; identical to SEQ ID NO: 144786
  derived and/or modified CDS sequence (opt3) from neuraminidase__InfluenzaA__AEK21409

SEQ ID NO: 148902 - RNA, 1410 nt, Artificial Sequence; identical to SEQ ID NO: 148757
  derived and/or modified CDS sequence (opt3) from neuraminidase__InfluenzaA__AEK21419

SEQ ID NO: 148903 - RNA, 1410 nt, Artificial Sequence; identical to SEQ ID NO: 148834
  derived and/or modified CDS sequence (opt3) from neuraminidase__InfluenzaA__AEK21429

SEQ ID NO: 148904 - RNA, 1410 nt, Artificial Sequence
  derived and/or modified CDS sequence (opt3) from neuraminidase__InfluenzaA__AEK21439
augaaccccaaucagaagaucauuaccauaggcagcgugugcaugacaaucgggauggccaaccugauucuccaaaucggaaauauuaucuccauauggaucucucacucaauucagcuugguaaccagaaucagaucgagacuuguaaccaaagugucauuacguacgaaaauaacaccuggguuaaucagacauaugugaacaucagcaauacuaacuucgcugcaggccaguccguagugucugucaaacuggccggaaauucgucauugugcccugugagcggaugggcgauauacaguaaggacaacuccauuagaaucggcucuaaaggugauguuuuugugauuagggagccauucaucagcuguuccccguuagaaugccggaccuuuuuccugacacagggggcucuacucaaugacaagcauucaaacggaaccaucaaagaucgcagucccuaucgaacucugaugagcuguccuauuggcgaggucccaucucccuacaacucccguuuugaaucaguggccuggagcgcaagugccugccacgacggcauaaauuggcuuacaaucgggauuucuggaccugauaacggugcuguagcaguucugaaguauaauggcaucauaaccgacacgauuaaguccuggagaaacaauaucuugaggacucaagagagcgagugugccugcgugaacgggucguguuucaccgucaugacagauggaccaucugacggccaggcuuccuacaaaaucuuucggauugaaaaggguaaaaucgugaagucaguggagaugaaugcccccaacuaucauuacgaagagugcaguuguuacccugauagcuccgagauuacuugcgucugccgcgacaauuggcacgggucuaacagaccauggguuagcuucaaucagaaccucgaauaucagauaggauacaucuguucaggcauuuuuggcgauaauccgaggcccaacgacaaaaccgggaguugcggaccuguguccagcaauggugcgaacggcguaaagggguucucuuuuaaguauggaaacggcguguggaucggucggacaaaaucaaucaguagccgcaauggguucgagaugauuugggauccaaacggcuggaccggaacggacaauaacuuuuccaagaaacaagacauagucggcaucaaugaauggucuggguacucggggagcuucgugcagcaucccgagcugacuggucuggauuguauucgaccuugcuucuggguugaacucaucagaggcaggccaaaggagaacacaauuuggaccuccgggucaaguaucucuuuuuguggagugaauagcgacacugucggcugguccuggcccgauggugcagaguuaccguucacaauagacaaauga

SEQ ID NO: 148905 - RNA, 1410 nt, Artificial Sequence; identical to SEQ ID NO: 148834
  derived and/or modified CDS sequence (opt3) from neuraminidase__InfluenzaA__AEK21449

SEQ ID NO: 148906 - RNA, 1410 nt, Artificial Sequence; identical to SEQ ID NO: 146688
  derived and/or modified CDS sequence (opt3) from neuraminidase__InfluenzaA__AEK21459

SEQ ID NO: 148907 - RNA, 1410 nt, Artificial Sequence; identical to SEQ ID NO: 148834
  derived and/or modified CDS sequence (opt3) from neuraminidase__InfluenzaA__AEK21469

SEQ ID NO: 148908 - RNA, 1410 nt, Artificial Sequence; identical to SEQ ID NO: 148834
  derived and/or modified CDS sequence (opt3) from neuraminidase__InfluenzaA__AEK21479

SEQ ID NO: 148909 - RNA, 1410 nt, Artificial Sequence; identical to SEQ ID NO: 144786
  derived and/or modified CDS sequence (opt3) from neuraminidase__InfluenzaA__AEK21489

SEQ ID NO: 148910 - RNA, 1410 nt, Artificial Sequence; identical to SEQ ID NO: 148502
  derived and/or modified CDS sequence (opt3) from neuraminidase__InfluenzaA__AEK28776

SEQ ID NO: 148911 - RNA, 1410 nt, Artificial Sequence
  derived and/or modified CDS sequence (opt3) from neuraminidase__InfluenzaA__AEK28787
augaaccccaaucagaagaucauuaccauaggcagcgugucccugacaaucucuacuauuugcuucuuuaugcagaucgccauucucaucacgaccgucacacuucacuucaaacaguacgaguuuuauucaccuccaaacaaucagguuaugcugugugaaccgacuauaaucgagagaaacauuaccgaaaucguguacuugacaaauaccacuauugagaaggaaaucugccccaaauuagcugaguauaggaacuggaguaagccucagugugacauaacaggguucgcaccauuuagcaaagauaauuccauucggcugucugccggaggugacaucuggguaacccgcgagcccuacgugucgugcgauccugacaaguguuaucaauucgcgcuaggccaggggacgacucucaacaauguccauucaaacaauaccgugcgagaucguacaccauacagaacucugcuuaugaacgaacugggaguucccuuucacuugggcaccaaacaggugugcauugcuuggagcaguuccucuugucaugacgguaaggccuggcuccacgucugcaucacaggggaugacaagaaugcaaccgccagcuucaucuauaacggaaggcugguggauuccguaguuucauggaguaaagagauucugcggacgcaggaaagcgagugugugugcauaaauggcacuuguacagucgugaugaccgacggcucugcuuccgggaaggcagauacuaaaauccucuuuauugaggaaggaaagaucgugcauacaucaaccuuaagcgguagugcccaacacgucgaggaaugcucuugcuacccucgcuacccaggcguuagaugugugugcagggacaacuggaagggguccaaccggccgauaguagauauuaauaucaaagaccacagcaucgugucgucuuaugucuguuccggacuggugggcgacacgccccgcaagaacgauucaaguagcuccucucauugccuugacccuaauaacgaggaaggugggcacggaguuaaaggcugggcuuucgaugacggcaaugauguguggauggggcgaaccauuaacgagacaagcagauugggauacgagacuuuuaaggucaucgaagguuggucaaauccaaaaaguaagcugcagauuaacaggcaagugauaguagaccggggcaaucguuccggguauagcggaaucuucucuguugagggccgcucauguauuaacagaugcuuuuacguggaacuaaucaggggucggaaagaggaaaccgagguccucuggacaaguaauagcaucguggucuucugugggacuuccggcaccuauggaacaggcucuuggcccgauggggccgaccugaaccuuaugccuauuuga

SEQ ID NO: 148912 - RNA, 1410 nt, Artificial Sequence
  derived and/or modified CDS sequence (opt3) from neuraminidase__InfluenzaA__AEK28798
augaaccccaaucagaagaucauuaccauaggcagcgugucccugacaaucucuacuauuugcuucuuuaugcagaucgccauucucaucacgaccgucacacuucacuucaaacaguacgaguuuaacucaccuccaaauaaccagguuaugcugugugaaccgacuauaaucgagagaaauauuaccgaaaucguguauuugacaaacaccacuauugagaaggaaaucugccccaaauuagcugaguacaggaauuggaguaagccucagugugacauaacaggguucgcaccauuuagcaaagauaacuccauucggcugucugccggaggugacaucuggguaacccgcgagcccuaugugucgugcgauccugacaaguguuaccaauucgcgcuaggccaggggacgacucucaauaacguccauucaaauaacaccgugcgagaucguacaccauauagaacucugcuuaugaaugaacugggaguucccuuucacuugggcaccaaacaggugugcauugcuuggagcaguuccucuugucaugacgguaaggccuggcuccacgucugcaucacaggggaugacaagaacgcaaccgccagcuucaucuacaauggaaggcugguggauuccguaguuucauggaguaaagagauucugcggacgcaggaaagcgagugugugugcauaaacggcacuuguacagucgugaugaccgacggcaacgcuucugggaaggcagauacuaaaauccucuuuauugaggaaggaaagaucgugcauacauccaccuuaucagguagcgcccaacacgucgaggaaugcaguugcuauccucgcuacccaggcguuagaugugugugcagggacaauuggaaggggucuaaccggccgauaguagauauuaauaucaaagaccacuccaucgugagcucguacgucuguucuggacuggugggcgacacgccccgcaagaacgauuccucaaguagcucccauugcucugacccuaauaacgaggaaggugggcacggaguuaaaggcugggcuuucgaugacggcaaugauguguggauggggcgaaccauuagcgagaagucaagacuuggauaugagacauuuaaagucaucgaagguuggaguaacccaaaguccaaauugcagauuaauaggcaagugauaguagaccggggcaaccguagcggguacucuggaaucuucucaguugagggcaagaguuguauuaaucgcugcuuuuauguggaacugaucagagguaggaaggaggaaacugagguccuauggaccagcaacuccaucguggucuucugugggacaucuggcacuuacggaaccggcucguggcccgauggggccgacauuaaucucaugccuauauga

SEQ ID NO: 148913 - RNA, 1410 nt, Artificial Sequence
  derived and/or modified CDS sequence (opt3) from neuraminidase__InfluenzaA__AEK28809
augaaccccaaucagaagaucauuaccauaggcagcgugucccugacaaucucuacuauuugcuucuuuaugcaaaucgccauucucaucacgaccgucacaguucacuucaaacaguacgaguuuaacucaccuccaaauaaccaggugaugcuuugugaaccgacuauaaucgagagaaauauuaccgaaaucguauaucugacaaacaccacuauugagaaggaaaucugccccaaauuggcugaguacaggaauuggaguaagccucagugugacauaacaggguucgcaccauuuagcaaagauaacuccauucgguuaucugccggaggugacaucugggugacccgcgagcccuaugucucgugcgauccugacaaguguuaccaauucgcgcugggccaggggacgacucuaaauaacgugcauucaaauaacaagguucgagaucguaccccauauagaacacuccugaugaaugaacuuggagugcccuuucaccugggcacuaaacaggucugcauugcuuggagcaguuccucuugucaugacgguaaggccugguugcacgugugcaucaccggggaugacaaaaacgcaacagccagcuucaucuacaauggaaggcucguagauuccguugugucauggaguaaggagauucugcggacccaggaaagcgagugugucugcauaaacggcacguguacuguggugaugacagacggcucugcuuccgggaaagcagauaccaagauccuguuuauugaggaaggaaagaucguccauacuucaacacucagcgguagugcccaacacguugaggaaugcucuugcuauccucgcuacccaggcgugagauguguaugcagggacaacuggaaaggguccaaucggccgauaguggauauuaacaucaaggaccacagcaucgucucgucuuacguguguuccggauuaguuggcgacacgccccgcaaaaaugauucaaguagcuccucucauugccuggacccuaacaaugaggaaggugggcacggagugaagggcugggcuuucgaugacggcaacgaugucuggauggggcgaaccauuagcgagaaaucaagacuuggauaugagaccuuuaaggugaucgaagguuggaguaauccaaaauccaaguugcagauuaacaggcagguaauaguugaccggggcaaucguagcggguacucuggaaucuucucaguggagggcaagaguuguauuaaccgcugcuuuuaugucgaacugaucagagguaggaaagaggaaacagaggugcuauggacuagcaauuccaucgucguguucugugggaccucuggcacauacggaacuggcucguggcccgauggggccgacauuaaccucaugccuauauga

SEQ ID NO: 148914 - RNA, 1410 nt, Artificial Sequence
  derived and/or modified CDS sequence (opt3) from neuraminidase__InfluenzaA__AEK28819
augaaccccaaucagaagaucauuaccauaggcagcgugucccugacaaucucuacuauuugcuucuuuaugcagaucgccauucucaucacgaccgucacacuucacuucaaacaguacgaguuuaacuauccuccaaauaaccagguuaugcugugugaaccgacuauaaucgagagaaauauuaccgaaaucguguacuugacaaacaccacuauugagaaggaaaucugccccaaauuagcugaguauaggaauuggucaaagccucagugugacauaacaggguucgcaccauuuaguaaagauaacagcauucggcuguccgccggaggugacaucuggguaacccgcgagcccuacgugucuugcgauccugacaaguguuaucaauucgcgcuaggccaggggacgacucucaauaacguccauucgaauaacaccgugcgagaacguacaccauacagaacucugcuuaugaaugagcugggaguucccuuucacuugggcaccaaacaggugugcauugcuuggucaagcaguuccugucaugaugguaaggccuggcuccacgucugcaucacaggggacgauaagaacgcaaccgccucuuucaucuauaauggaaggcugguggacagcguaguuuccuggucaaaagaaauucugcggacgcaggagagugagugugugugcauaaacggcacuuguacagucgugaugaccgauggcagcgcuucugggaaggcagacacuaaaauccucuuuauugaagagggaaagaucgugcauacauccaccuuaucagguagcgcccaacacgucgaagagugcaguugcuacccucgcuacccaggcguuagaugugugugcagggauaacuggaaggggucuaaucggccgauaguagacauuaacaucaaagaucacuccaucgugagcucguaugucuguucuggacuggugggcgacacgccccgcaagaaugacuccucaaguagcucccauugccuugauccuaacaaugaagagggugggcacggaguuaaaggcugggcuuucgacgauggcaacgacguguggauggggcgaaccauuucugaaaagagcagauugggauacgagacauuuaaagucaucgaggguuggucaaauccaaagaguaaacugcagauuaacaggcaagugauaguagaucggggcaaucguuccggguauagcggaaucuucucuguugaaggcaagucauguauuaaccgcugcuuuuacguggagcuaaucagagguaggaaggaagagacugagguccucuggaccaguaauagcaucguggucuucugugggacauccggcacuuauggaaccggcucuuggcccgacggggccgauauuaaccugaugccuauauga

SEQ ID NO: 148915 - RNA, 1410 nt, Artificial Sequence
  derived and/or modified CDS sequence (opt3) from neuraminidase__InfluenzaA__AEK28830
augaaccccaaucagaagaucauuaccauaggcagcgugucccugacaaucucuacuauuugcuucuuuaugcagaucgccauucucaucacgaccgucacacuucacuucaaacaguacgaguuuaacucaccuccaaauaaccagguuaugcugugugaaccgacuauaaucgagagaaauauuaccgaaaucguguauuugacaaacaccacuauugagaaggaaaucugccccaauuuagcugaguacaggaacuggaguaaaccucagugugacauaacaggguucgcaccauuuagcaaggauaauuccauucggcugucugccggaggugacaucuggguaacccgcgagcccuaugugucgugcgauccugacaaauguuaccaauucgcgcuaggccaggggacgacucucaacaauguccauucaaacaauaccgugcgaggacguacaccauauagaacucugcuuaugaacgaacugggcguucccuuucacuuggguaccaaacaggugugcauugcuuggagcaguuccucuugucaugaugggaaggccuggcuccacgucugcaucacaggagacgauaagaaugcaaccgccagcuucaucuacaacggcaggcugguggacuccguaguuucauggaguaaggagauucugcggacgcaggaaagcgagugugugugcauaaacggcacuuguacagucgugaugaccgaugggucugcuuccggaaaagcagacacuaagauccucuuuauugaggaagguaaaaucgugcauacaucaaccuuaagcggcagugcccaacacgucgaggaaugcucuugcuauccucgcuacccagggguuagaugugugugcagggauaauuggaagggauccaaccggccgauaguagacauuaauaucaaggaucacagcaucgugucgucuuacgucuguuccggccuggugggugacacgccccgcaaaaacgacucaaguagcuccucucauugccuugauccuaauaacgaggaagggggacacggcguuaagggcugggcuuucgacgaugggaaugacguguggaugggacgaaccauuagcgagaaaucaagauuggguuaugagacauuuaaggucaucgaaggcuggaguaacccaaaauccaagcugcagauuaauaggcaagugauaguagaucgggggaaccguagcggauacucuggcaucuucucaguugaggguaaaaguuguauuaaucgcugcuuuuauguggaacuaaucagagggaggaaggaggaaacugagguccucuggaccagcaacuccaucguggucuucuguggcacaucuggaacuuacggcaccgggucguggcccgacggagccgauauuaaucugaugccuauauga

SEQ ID NO: 148916 - RNA, 1410 nt, Artificial Sequence
  derived and/or modified CDS sequence (opt3) from neuraminidase__InfluenzaA__AEK28841
augaaccccaaucagaagaucauuaccauaggcagcgugucccugacaaucucuacuauuugcuucuuuaugcaaaucgccauucucaucacgaccgucacacuucacuucaaacaguacgaguuuaacucaccuccaaauaaccagguuaugcugugugaaccgacuauaaucgagagaaauauuaccgaaaucguguauuugacaaacaccacuauugagaaggaaaucugccccaaauuagcugaguacaggaauuggaguaagccucagugugacauaacaggguucgcaccauuuagcaaagauaacuccauucggcugucugccggaggugacaucuggguaacccgcgagcccuaugugucgugcgauccugacaaguguuaccaauucgcgcuaggccaggggacgacugucaauaacgugcauucaaauaacaccguucgaggacguacaccauauagaacucuccugaugaaugaacuuggcgugcccuuucaccuggguaccaagcaggucugcauugcuuggagcaguuccucuugucaugaugggaaagccugguugcacgugugcaucacaggagacgauaagaacgcaaccgccagcuucaucuacaauggcaggcucguagacuccguugugucauggaguaaagagauucugcggacgcaggaaagcgagugugucugcauaaacggcacuuguacaguggugaugaccgaugggucugcuuccggaaaggcagacacuaaaauccuguuuauugaggaagguaagaucguccauacaucaacccucagcggcagugcccaacacguugaggaaugcucuugcuauccucgcuacccaggggugagauguguaugcagggauaacuggaagggauccaaucggccgauaguggacauuaacaucaaagaucacagcaucgucucgucuuacguguguuccggcuuaguuggugacacgccccgcaagaaugacucaaguagcuccucucauugccuggauccuaacaaugaggaagggggacacggcgugaaaggcugggcuuucgacgaugggaacgacgucuggaugggacgaaccauuagcgagaagucaagacuugguuaugagacauuuaaagugaucgaaggcuggaguaaucauaaguccaaauugcagauuaacaggcagguaauaguugaucgggggaaucguagcggauacucuggcaucuucucaguggaggguaagaguuguauuaaccgcugcuuuuaugucgaacugaucagagggaggaaggaggaaacugaggugcuauggaccagcaauuccaucgucguguucuguggcacaucuggaacuuacggcaccgggucguggccagacggagccgaucucaaccugaugcccauuuga

SEQ ID NO: 148917 - RNA, 1410 nt, Artificial Sequence
  derived and/or modified CDS sequence (opt3) from neuraminidase__InfluenzaA__AEK28852
augaaccccaaucagaagaucauuaccauaggcagcgugucccugacaaucucuacuauuugcuucuuuaugcaaaucgccauucucaucacgaccgucacacuucacuucaaacaguacgaguuuaacucaccuccaaauaaccagguuaugcugugugaaccgacuauaaucgagaagaauauuaccgaaaucguguauuugacaaacaccacuauugagaaagaaaucugccccaaguuagcugaguacagaaauuggaguaaaccucagugugacauaacaggguucgcaccauuuagcaaggauaacuccauuaggcugucugccggaggugacaucuggguaacccgggagcccuaugugucgugcgauccugacaaguguuaccaauucgcgcuaggccaggggacgacucucaauaacguccauucaaauaaccgcgugcgagaucguaccccauauagaacacugcuuaugaaugaacugggaguucccuuucacuugggcacuaaacaggugugcauugcuuggagcaguuccucuugucaugacgguaaggccuggcuccacgucugcaucaccggggaugacaaaaacgcaacagccagcuucaucuacaauggaaggcugguggauuccguaguuucauggaguaaggagauucugcggacccaggaaagcgagugugugugcauaaacggcacguguacugucgugaugacagacggcucugcuuccgggaaagcagauaccaagauccucuuuauugaggaaggaaagaucgugcauacuucaacauuaagcgguagugcccaacacgucgaggaaugcucuugcuauccucgcuacccaggcguuagaugugugugcagggacaacuggaaaggguccaaucggccgauaguagauauuaacaucaaggaccacagcaucgugucgucuuacgucuguuccggacuggugggcgacacccccaggaaaaaugauucaaguagcuccucucauugccuugacccuaacaaugaggaaggugggcacggaguuaagggcugggcuuucgaugacggcaacgauguguggauggggcgaacgauuagcgagaaaucaagauugggauaugagaccuuuaaggucaucgaagguuggaguaauccaaaauccaagcugcagauuaaccgccaggugauaguagaccggggcaaucguagcggguacucuggaaucuucucaguugagggcaagaguuguauuaaccgcugcuuuuauguggaacuaaucagagguaggaaagaggaaacagagguccucuggacuagcaauuccaucguggucuucugugggaccucuggcacauacggaacuggcucguggcccgauggggccgacauuaaccugaugccuauauga

SEQ ID NO: 148918 - RNA, 1410 nt, Artificial Sequence; identical to SEQ ID NO: 146532
  derived and/or modified CDS sequence (opt3) from neuraminidase__InfluenzaA__AEK28863

SEQ ID NO: 148919 - RNA, 1410 nt, Artificial Sequence
  derived and/or modified CDS sequence (opt3) from neuraminidase__InfluenzaA__AEK28874
augaaccccaaucagaagaucauuaccauaggcagcgugucccugacaaucucuacuauuugcuucuuuaugcaaaucgccauucucaucacgaccgucacacuucacuucaaacaguacgaguuuaacucaccuccaaauaaccagguuaugcugugugaaccgacuauaaucgagagaaauauuaccgaaaucguguauuugacaaacaccacuauugagaaggaaaucugccccaaauuagcugaguacaggaauuggaguaagccucagugugacauaacaggguucgcaccauuuagcaaagauaacuccauucggcugucugccggaggugacaucuggguaacccgcgagcccuaugugucgugcgauccugacaaguguuaccaauucgcgcuaggccaggggacgacucucaauaacguccauucaaauaacaaggugcgagaucguaccccauauagaacacugcuuaugaaugaacugggaguucccuuucacuugggcacuaaacaggugugcauugcuuggagcaguuccucuugucaugacgguaaggccuggcuccacgucugcaucaccggggaugacaaaaacgcaacagccagcuucaucuacaauggaaggcugguggauuccguaguuucauggaguaaggagauucugcggacccaggaaagcgagugugugugcauaaacggcacguguacugucgugaugacagacggcucugcuuccgggaaagcagauaccaagauccucuuuauugaggaaggaaagaucgugcauacuucaacauuaagcgguagugcccaacacgucgaggaaugcucuugcuauccucgcuacccaggcguuagaugugugugcagggacaacuggaaaggguccaaucggccgauaguagauauuaacaucaaggaccacagcaucgugucgucuuacgucuguuccggacuggugggcgacacccccaggaaaaaugauucaaguagcuccucucauugccuugacccuaacaaugaggaaggugggcacggaguuaagggcugggcuuucgaugacggcaacgauguguggauggggcgaacgauuagcgagaaaucaagauugggauaugagaccuuuaaggucaucgaagguuggaguaaucauaaauccaagcugcagauuaaccgccaggugauaguagaccggggcaaucguagcggguacucuggaaucuucucaguugagggcaagaguuguauuaaccgcugcuuuuauguggaacuaaucagagguaggaaagaggaaacagagguccucuggacuagcaauuccaucguggucuucugugggaccucuggcacauacggaacuggcucguggccagauggggccgaccugaaccuuaugcccauuuga

SEQ ID NO: 148920 - RNA, 1410 nt, Artificial Sequence
  derived and/or modified CDS sequence (opt3) from neuraminidase__InfluenzaA__AEK28885
augaaccccaaucagaagaucauuaccauaggcagcgugucccugacaaucucuacuauuugcuucuuuaugcagaucgccauucucaucacgaccgucacacuucacuucaaacaguacgaguuuaaccugccuccaaauaaccagguuauguugugugaaccgacuauaaucgagagaaauauuaccgaaaucguguauuuaacaaacaccacuauugagaaggaaaucugccccaaacuggcugaguacaggaauuggucaaagccucagugugacauaacaggguucgcaccauuuaguaaagauaacagcauucggcuauccgccggaggugacaucuggguaacccgcgagcccuaugugucuugcgauccugacaaguguuaccaauucgcgcucggccaggggacgacucugaauaacguccauucgaauaacaccgugcgagaucguacaccauauagaacucuucugaugaaugaauugggaguucccuuucaccucggcaccaaacaggugugcauugcuuggucaagcaguuccugucaugacgguaaggccuggcugcacgucugcaucacaggggaugacaagaacgcaaccgccucuuucaucuacaauggaaggcugguggauagcguaguuuccuggucaaaagagauucuccggacgcaggaaagugagugugugugcauaaacggcacuuguacagucgugaugaccgacggcagcgcuucugggaaggcagauacuaaaaucuuauuuauugaggaaggaaagaucgugcauacauccacccugucagguagcgcccaacacgucgaggaaugcaguugcuauccucgcuacccaggcguuagaugugugugcagggacaacuggaaggggucuaaucggccgauaguagauauuaacaucaaagaccacuccaucgugagcucguacgucuguucuggacuugugggcgacacgccccgcaagaaugauuccucaaguagcucccauugcuuggacccuaacaaugaggaaggugggcacggaguuaaaggcugggcuuucgaugacggcaacgauguguggauggggcgaaccauuucugaaaagagcagacugggauaugagacauuuaaagucaucgaggguuggucaaauccaaagaguaaacuacagauuaacaggcaagugauaguagaccggggcaaucguuccggguacagcggaaucuucucuguugagggcaagucauguauuaaccgcugcuuuuauguggaacucaucagagguaggaaggaggaaacugagguccuguggaccaguaauagcaucguggucuucugugggacauccggcacuuacggaaccggcucuuggcccgauggggccgacauuaaccuuaugccuauauga

SEQ ID NO: 148921 - RNA, 1410 nt, Artificial Sequence; identical to SEQ ID NO: 146657
  derived and/or modified CDS sequence (opt3) from neuraminidase__InfluenzaA__AEK28896

SEQ ID NO: 148922 - RNA, 1410 nt, Artificial Sequence
  derived and/or modified CDS sequence (opt3) from neuraminidase__InfluenzaA__AEK28907
augaaccccaaucagaagaucauuaccauaggcagcgugucccugacaaucucuacuauuugcuucuuuaugcagaucgccauucucaucacgaccgucacacuucacuucaaacaguacgaguuuaacucaccuccaaauaaccagguuaugcugugugaaccgacuauaaucgagaagaauauuaccgaaaucguguauuugacaaacaccacuauugagaaagaaaucugccccagauuagcugaguacaggaauuggaguaagccucagugugacauaacaggguucgcaccauuuagcaaagauaacuccauucggcugucugccggaggugacaucuggguaacccgcgagcccuaugugucgugcgauccugacaaguguuaccaauucgcgcuaggccaggggacgacucucaauaacguccauucaaauaacaccgugcgagaucguacaccauauagaacucugcuuaugaaugaacugggaguucccuuucacuugggcaccaaacaggugugcauugcuuggagcaguuccucuugucaugacgguaaggccuggcuccacgucugcaucacaggggaugacaagaacgcaaccgccagcuucaucuacaauggaaggcugguggauuccguaguuucauggaguaaagagauucugcggacgcaggaaagcgagugugugugcauaaacggcacuuguacagucgugaugaccgacggcucugcuuccgggaaggcagauacuaaaauccucuuuauugaggaaggaaagaucgugcauacaucaaccuuaagcgguagugcccaacacgucgaggaaugcucuugcuauccucgcuacccaggcguuagaugugugugcagggacaacuggaagggguccaaucggccgauaguagauauuaacaucaaagaccacagcaucgugucgucuuacgucuguuccggacuggugggcgacacgccccgcaagaaugauucaaguagcuccucucauugccuugacccuaacaaugaggaaggugggcacggaguuaaaggcugggcuuucgaugacggcaacgauguguggauggggcgaaccauuagcgagaagucaagauugggauaugagacauuuaaagucaucgaagguuggaguaauccaaaguccaaacugcagauuaacaggcaagugauaguagaccggggcaaucguagcggguacucuggaaucuucucaguugagggcaagaguuguauuaaccgcugcuuuuauguggaacuaaucagagguaggaaggaggaaacugagguccucuggaccagcaauuccaucguggucuucugugggacaucuggcacuuacggaaccggcucguggcccgauggggccgacauuaaccugaugccuauauga

SEQ ID NO: 148923 - RNA, 1410 nt, Artificial Sequence; identical to SEQ ID NO: 144647
  derived and/or modified CDS sequence (opt3) from neuraminidase__InfluenzaA__AEK28918

SEQ ID NO: 148924 - RNA, 1410 nt, Artificial Sequence; identical to SEQ ID NO: 145953
  derived and/or modified CDS sequence (opt3) from neuraminidase__InfluenzaA__AEK28929

SEQ ID NO: 148925 - RNA, 1410 nt, Artificial Sequence
  derived and/or modified CDS sequence (opt3) from neuraminidase__InfluenzaA__AEK28951
augaaccccaaucagaagaucauuaccauaggcagcgugucccugacaaucucuacuauuugcuucuuuaugcagaucgccauucucaucacgaccgucacacuucacuucaaacaguacgaguuuaacucaccuccaaauaaccagguuaugcugugugaaccgacuauaaucgagagaaauauuaccgaaaucguguauuugacaaacaccacuauugagaaggaaaucugccccaaauuagcugaguacaggaauuggaguaagccucagugugacauaacaggguucgcaccauuuagcaaagauaacuccauucggcugucugccggaggugacaucuggguaacccgcgagcccuaugugucgugcgauccugacaaguguuaccaauucgcgcuaggccaggggacgacucucaauaacguccauucaaauaacaccgugcgagaucguacaccauauagaacucugcuuaugaaugaacugggaguucccuuucacuugggcaccaaacaggugugcauugcuuggagcaguuccucuugucaugacgguaaggccuggcuccacgucugcaucacaggggaugacaagaacgcaaccgccagcuucaucuacaauggaaggcugguggauuccguaguuucauggaguaaagagauucugcggacgcaggaaagcgagugugugugcauaaacggcacuuguacagucgugaugaccgacggcucugcuuccgggaaggcagauacuaaaauccucuuuauugaggaaggaaagaucgugcauacaucaaccuuaagcgguagugcccaacacgucgaggaaugcucuugcuauccucgcuacccaggcguuagaugugugugcagggacaacuggaagggguccaaucggccgauaguagauauuaacaucaaagaccacagcaucgugucgucuuacgucuguuccggacuggugggcgacacgccccgcaagaaugauucaaguagcuccucucauugccuugacccuaacaaugaggaaggugggcacggaguuaaaggcugggcuuucgaugacggcaacgauguguggauggggcgaaccauuagcgagaagucaagaaguggauaugagacauuuaaagucaucgaagguugguccaaucauaagagcaaauugcagauuaacaggcaagugauaguagaccggggcaaucguucuggguacucaggaaucuucaguguugagggcaagagcuguauuaaccgcugcuuuuauguggaacugaucagagguaggaaggaggaaacugaggcccuauggaccuccaauucuaucgucguguucugugggacaucgggcacuuacggaaccggcagcuggccagauggggcggaccucaaccugaugcccauuuga

SEQ ID NO: 148926 - RNA, 1410 nt, Artificial Sequence
  derived and/or modified CDS sequence (opt3) from neuraminidase__InfluenzaA__AEK28962
augaaccccaaucagaagaucauuaccauaggcagcgugucccugacaaucucuacuauuugcuucuuuaugcagaucgccauucucaucacgaccgucacacuucacuucaaacaguacgaguuuaacucaccuccaaauaaccagguuaugcugugugaaccgacuauaaucgagagaaauauuaccgaaaucguguaucccacaaacaccacuauugagaaggaaaucugcccuaaauuggcugaguacaggaauuggaguaagccacagugugacauaacaggguucgcacccuuuagcaaagauaacuccauucgguuaucugccggaggugacaucuggguaacccgcgagccuuaugugucgugcgauccagacaaguguuaccaauucgcgcugggccaggggacgacucuaaauaacguccauucaaauaacaccgugcgagaucguacacccuauagaacucuccugaugaaugaacuuggaguuccuuuucaccugggcaccaaacaggugugcauugcuuggagcaguuccucuugucaugacgguaaggccugguugcacgucugcaucacaggggaugacaagaacgcaaccgccagcuucaucuacaauggaaggcucguggauuccguaguuucauggaguaaagagauucugcggacgcaggaaagcgagugugugugcauaaacggcacuuguacagucgugaugaccgacggcucugcuuccgggaaggcagauacuaaaauccuguuuauugaggaaggaaagaucgugcauacaucaacccucagcgguagugcccaacacgucgaggaaugcucuugcuauccacgcuacccgggcguuagaugugugugcagggacaacuggaagggguccaaucggcccauaguagauauuaacaucaaagaccacagcaucgugucgucuuacgucuguuccggauuagugggcgacacgccucgcaagaaugauucaaguagcuccucucauugccuggacccaaacaaugaggaaggugggcacggaguuaaaggcugggcuuucgaugacggcaacgauguguggauggggcgaaccauuagcgagaagucaagacuuggauaugagacauuuaaagucaucgaagguuggaguaaucccaaguccaaauugcagauuaacaggcaagugauaguagaccggggcaaucguagcggguacucuggaaucuucucaguugagggcaagaguuguauuaaccgcugcuuuuauguggaacugaucagagguaggaaggaggaaacugagguccuauggaccagcaauuccaucguggucuucugugggacaucuggcacuuacggaaccggcucguggccugauggggccgacauuaaccucaugccaauauga

SEQ ID NO: 148927 - RNA, 1410 nt, Artificial Sequence
  derived and/or modified CDS sequence (opt3) from neuraminidase__InfluenzaA__AEK28973
augaaccccaaucagaagaucauuaccauaggcagcgugucccugacaaucucuacuauuugcuucuuuaugcagaucgccauucucaucacgaccgucacacuucacuucaaacaguacgaguuuaacucaccuccaaauaaccagguuaugcugugugaaccgacuauaaucgagagaaauauuaccgaaaucguguauuugacaaacaccacuauugagaaggaaaucugccccaaauuagcugaguacaggaauuggaguaagccucagugugacauaacaggguucgcaccauuuagcaaagauaacuccauucggcugucugccggaggugacaucuggguaacccgcgagcccuaugugucgugcgauccugacaaguguuaccaauucgcgcuaggccaggggacgacucucaauaacguccauucaaauaacaccgugcgagaucguacaccauauagaacucugcuuaugaaugaacugggaguucccuuucacuugggcaccaaacaggugugcauugcuuggagcaguuccucuugucaugacgguaaggccuggcuccacgucugcaucacaggggaugacaagaacgcaaccgccagcuucaucuacaauggaaggcugguggauuccguaguuucauggaguaaagagauucugcggacgcaggaaagcgagugugugugcauaaacggcacuuguacagucgugaugaccgacggcucugcuuccgggaaggcagauacuaaaauccucuuuauugaggaaggaaagaucgugcauacaucaaccuuaagcgguagugcccaacacgucgaggaaugcucuugcuauccucgcuacccaggcguuagaugugugugcagggacaacuggaagggguccaaucggccgauaguagauauuaacaucaaagaccacagcaucgugucgucuuacgucuguuccggacuggugggcgacacgccccgcaagaaugauucaaguagcuccucucauugccuugacccuaacaaugaggaaggugggcacggaguuaaaggcugggcuuucgaugacggcaacgauguguggauggggcgaaccauuagcgagaagucaagauugggauaugagacauuuaaagucaucgaagguuggaguaaucauaaguccaaacugcagauuaacaggcaagugauaguagaccggggcaaucguagcggguacucuggaaucuucucaguugagggcaagaguuguauuaaccgcugcuuuuauguggaacuaaucagagguaggaaggaggaaacugagguccucuggaccagcaauuccaucguggucuucugugggacaucuggcacuuacggaaccggcucguggccagauggggccgaccugaacuucaugcccauuuga

SEQ ID NO: 148928 - RNA, 1410 nt, Artificial Sequence
  derived and/or modified CDS sequence (opt3) from neuraminidase__InfluenzaA__AEK28984
augaaccccaaucagaagaucauuaccauaggcagcgugucccugacaaucucuacuauuugcuucuuuaugcaaaucgccauucucaucacgaccgucacacuucacuucaaacaguacgaguuuaacucaccuccaaauaaccagguuaugcugugugaaccgacuauaaucgagagaaauauuaccgaaaucguguauuugacaaacaccacuauugagaaggaaaucugccccaaauuagcugaguacaggaauuggaguaagccucagugugacauaacaggguucgcaccauuuagcaaagauaacuccguacggcugucugccggaggugacauuugggugacccgcgagcccuaugucucgugcgauccugacaaguguuaccaauucgcgcuaggccaggggacgacucucaauaacgugcauucaaauaacaccguucgagaucguacaccauauagaacucugcuuaugaaugaacugggagugcccuuucacuugggcaccaagcaggucugcaucgcuuggagcaguuccucuugucaugacgguaaagccuggcuccacgugugcauuacaggggaugacaagaacgcaaccgccagcuucaucuacaauggaaggcugguagauuccguugugucauggaguaaagagauccugcggacgcaggaaagcgagugugucugcauuaacggcacuuguacaguggugaugaccgacggcucugcuuccgggaaggcagauacuaaaauacucuuuaucgaggaaggaaagauuguccauacaucaaccuuaagcgguagugcccaacacguugaggaaugcucuugcuauccucgcuacccaggcgugagauguguaugcagggacaacuggaagggguccaaucggccgaucguggauauaaacauuaaagaccacagcaucgucucgucuuacguguguuccggacugguuggcgacacgccccgcaagaaugauucaaguagcuccucucauugccuugacccuaacaaugaggaaggugggcacggagugaaaggcugggcuuucgaugacggcaacgaugucuggauggggcgaaccaucagcgagaagucaagauugggauaugagacauuuaaagugauugaagguuggaguaauccaaaguccaaacugcagaucaacaggcagguaauuguugaccggggcaaucguagcggguacucuggaauauucucaguggagggcaagaguuguaucaaccgcugcuuuuaugucgaacuaauuagagguaggaaggaggaaacugaggugcucuggaccagcaauuccaucgucguguucugugggacaucuggcacuuacggaaccggcucguggcccgauggggccgacaucaaccugaugccuauuuga

SEQ ID NO: 148929 - RNA, 1410 nt, Artificial Sequence; identical to SEQ ID NO: 148928
  derived and/or modified CDS sequence (opt3) from neuraminidase__InfluenzaA__AEK28995

SEQ ID NO: 148930 - RNA, 1410 nt, Artificial Sequence; identical to SEQ ID NO: 147566
  derived and/or modified CDS sequence (opt3) from neuraminidase__InfluenzaA__AEK29006

SEQ ID NO: 148931 - RNA, 1410 nt, Artificial Sequence
  derived and/or modified CDS sequence (opt3) from neuraminidase__InfluenzaA__AEK29028
augaaccccaaucagaagaucauuaccauaggcagcgugucccugacaaucucuacuauuugcuucuuuaugcagaucgccauucucaucacgaccgucacacuucacuucaaacaguacgaguuuaacucaccuccaaauaaccagguuaugcugugugaaccgacuauaaucgagagaaauauuaccgaaaucguguauuugacaaacaccacuauugagaaggaaaucugccccaaauuagcugaguacaggaauuggaguaagccucagugugacauaacaggguucgcaccauuuagcaaagauaacuccauucggcugucugccggaggugacaucuggguaacccgcgagcccuaugugucgugcgauccuaauaaguguuaccaauucgcgcuaggccaggggacgacucucaacaauguccauucaaacaauaccgugcgagaccguacaccauauagaacucugcuuaugaacgaacugggaguucccuuucacuugggcaccaaacaggugugcauugcuuggagcaguuccucuugucaugaugguaaggccuggcuccacgucugcaucacaggggacgauaagaaugcaaccgccagcuucaucuacaacggaaggcugguggacuccguaguuucauggaguaaagagauucugcggacgcaggaaagcgagugugugugcauaaacggcacuuguacagucgugaugaccgauggcucugcuuccgggaaggcagacacuaaaauccucuuuauugaggaaggaaagaucgugcauacaucaaccuuaagcgguagugcccaacacgucgaggaaugcucuugcuauccucgcuacccaggcguuagaugugugugcagggauaauuggaagggguccaaccggccgauaguagacauuaauaugaaagaucacagcaucgugucgucuuacgucuguuccggacuggugggcgacacgccccgcaagaacgacucaaguagcuccucucauugcuucgauccuaaugacgaggaaggugggcacggaguuaaaggcugggcuuuugaugacggcaacgauguguggauggggcgaaccaucagcgagaagucaagacuuggauaugagacauucaaagucauugaagguuggaguaauccaaaguccaaauugcagaucaacaggcaagugauuguagaccggggcaaucguagcggguacucuggaauauuuucaguugagggcaagaguuguaucaaccgcugcuucuauguggaacugauuagagguaggaaggaggaaacugagguccuauggaccagcaauuccaucguggucuucugugggacaucuggcacuuacggaaccggcucguggcccgauggggccgacaucaaccucaugccuauuuga

SEQ ID NO: 148932 - RNA, 1410 nt, Artificial Sequence
  derived and/or modified CDS sequence (opt3) from neuraminidase__InfluenzaA__AEK29050
augaaccccaaucagaagaucauuaccauaggcagcgugucccugacaaucucuacuauuugcuucuuuaugcagaucgccauucucaucacgaccgucacacuucacuucaaacaguacgaguuuaacccuccaccgaauaaccagguuaugcugugugaacccacuauaaucgagagaaauauuaccgaaaucguguauuugacaaacaccacuauugagaaggaaaucugcccuaaauuagcugaguacaggaauuggucaaagccacagugugacauaacaggguucgcacccuuuaguaaagauaacagcauucggcuguccgccggaggugacaucuggguaacccgcgagccuuaugugucuugcgauccagacaaguguuaccaauucgcgcuaggccaggggacgacucucaauaacguccauucgaauaacaccgugcgagaucguacacccuauagaacucugcuuaugaaugaacugggaguuccuuuucacuugggcaccaaacaggugugcauugcuuggucaagcaguuccugucaugacgguaaggccuggcuccacgucugcaucacaggggaugacaagaacgcaaccgccucuuucaucuacaauggaaggcugguggauagcguaguuuccuggucaaaagagauucugcggacgcaggaaagugagugugugugcauaaacggcacuuguacagucgugaugaccgacggcagcgcuucugggaaggcagauacuaaaauccucuuuauugaggaaggaaagaucgugcauacauccaccuuaucagguagcgcccaacacgucgaggaaugcaguugcuauccacgcuacccgggcguuagaugugugugcagggacaacuggaaggggucuaaucggcccauaguagauauuaacaucaaagaccacuccaucgugagcucguacgucuguucuggacuggugggcgacacgccucgcaagaaugauuccucaaguagcucccauugccuugacccaaacaaugaggaaggugggcacggaguuaaaggcugggcuuucgaugacggcaacgauguguggauggggcgaaccauuaaugagacaucuagauugggauaugagacuuuuaaggucaucgaagguuggagcaaccccaaaucaaagcugcagauuaauaggcaagugauaguagaccggggcaaccguaguggguacuccggaaucuucagcguugagggcaaaucuuguauuaaucgcugcuuuuauguggaacuaaucagagguaggaaggaggaaaccgagguccucuggacaucaaacaguaucguggucuucugugggacuagcggcaccuacggaacaggcuccuggccugauggggccgaccugaaucuuaugccaauuuga

SEQ ID NO: 148933 - RNA, 1410 nt, Artificial Sequence
  derived and/or modified CDS sequence (opt3) from neuraminidase__InfluenzaA__AEK29061
augaaccccaaucagaagaucauuaccauaggcagcgugucccugacaaucucuacuauuugcuucuuuauccaaauugccauccucauaacgaccgucacacuucacuucaaacaguacgaguuuaacucaccuccaaauaaccagguuaugcugugugaaccgacuaucauugagaagaauaucaccgaaauuguguauuugacaaacaccacuaucgagaaagaaauaugccccaaguuagcugaguacagaaauuggaguaaaccucagugugacauuacaggguucgcaccauuuagcaaggauaacuccaucaggcugucugccggaggugacauuuggguaacccgggagcccuaugugucgugcgauccugacaaguguuaccaauucgcgcuaggccaggggacgacucucaauaacguccauucaaauaacaucgugcgcgaucgaaccccauaucguacacugcuuaugaaugaacugggaguucccuuucacuugggcacuaaacaggugugcaucgcuuggagcaguuccucuugucaugacgguaaggccuggcuccacgucugcauuaccggggaugacaaaaacgcaacagccagcuucauauacaauggaagacugguggauuccguaguuucauggaguaaggagauccugaggacccaggaaagcgagugugugugcauuaacggcacguguacugucgugaugacagacggcucugcuuccgggaaagcagauaccaagauccucuuuauagaggaaggaaagauugugcauacuucaacauuaagcgguagugcccaacacgucgaggaaugcucuugcuauccucgguacccaggcguucgcugugugugcagagacaacuggaaaggguccaauaggccgaucguagauaucaacauuaaggaccacagcaucgugucgucuuacgucuguuccggacuggugggcgacacgccccggaaaaaugauucaaguagcuccucucauugccuugacccuaacaaugaggaaggugggcacggaguuaagggcugggcuuucgaugacggcaacgauguguggauggggcgcaccauuaaugagaccagccgauugggauaugagacauuuaaagucauagaagguuggucaaacccaaagaguaaacugcagaucaauagacaggugauuguagacaggggcaaccgguccggguacagcggaaucuucucuguugagggcaagucauguaucaaucguugcuuuuauguggaacuaauucgcgguagaaaggaggaaacugagguccucuggaccaguaacagcauaguggucuucugugggacauccggcacuuacggaaccggcucuuggcccgauggggccgaccugaaucuuaugccuaucuga

SEQ ID NO: 148934 - RNA, 1410 nt, Artificial Sequence
  derived and/or modified CDS sequence (opt3) from neuraminidase__InfluenzaA__AEK29083
augaaccccaaucagaagaucauuaccauaggcagcgugucccugacaaucucuacuauuugcuucuuuauccaaauugccauccucauaacgaccgucacacuucacuucaaacaguacgaguuuaacucaccuccaaauaaccagguuaugcugugugaaccgacuaucauugagaagaauaucaccgaaauuguguauuugacaaacaccacuaucgagaaagaaauaugccccaaguuagcugaguacagaaauuggaguaaaccucagugugacauuacaggguucgcaccauuuagcaaggauaacuccaucaggcugucugccggaggugacauuuggguaacccgggagcccuaugugucgugcgauccugacaaguguuaccaauucgcgcuaggccaggggacgacucucaauaacguccauucaaauaacaccgugcgcgaucgaacaccauaucguacucugcuuaugaaugaacugggaguucccuuucacuugggcaccaaacaggugugcaucgcuuggagcaguuccucuugucaugacgguaaggccuggcuccacgucugcaucacaggggaugacaaaaacgcaaccgccagcuucauuuacaauggaagacugguggauuccguaguuucauggaguaaggagauacugaggacgcaggaaagcgagugugugugcaucaacggcacuuguacagucgugaugaccgacggcucugcuuccgggaaagcagauacuaagauucucuuuaucgaggaaggaaagauagugcauacaucaaccuuaagcgguagugcccaacacgucgaggaaugcucuugcuauccucgguacccaggcguucgcugugugugcagagacaacuggaaaggguccaauaggccgauuguagauaucaacaucaaggaccacagcauugugucgucuuacgucuguuccggacuggugggcgacacgccccggaaaaaugauucaaguagcuccucucauugccuugacccuaacaaugaggaaggugggcacggaguuaagggcugggcuuucgaugacggcaacgauguguggauggggcgcaccaucaaugagacaagccgauugggauaugagacuuuuaaagucauugaagguuggucaaacccaaagaguaaacugcagauaaauagacaggugaucguagacaggggcaaccgguccggguacagcggaauuuucucuguugagggcaagucauguaucaaucguugcuuuuauguggaacuaauccgcgguagaaaggaggaaaccgagguccucuggacaaguaacagcauuguggucuucugugggacuuccggcaccuacggaacaggcucuuggcccgauggggccgaccugaaucuuaugccuauauga

SEQ ID NO: 148935 - RNA, 1410 nt, Artificial Sequence; identical to SEQ ID NO: 147458
  derived and/or modified CDS sequence (opt3) from neuraminidase__InfluenzaA__AEK29094

SEQ ID NO: 148936 - RNA, 1410 nt, Artificial Sequence; identical to SEQ ID NO: 147566
  derived and/or modified CDS sequence (opt3) from neuraminidase__InfluenzaA__AEK29127

SEQ ID NO: 148937 - RNA, 1410 nt, Artificial Sequence; identical to SEQ ID NO: 147566
  derived and/or modified CDS sequence (opt3) from neuraminidase__InfluenzaA__AEK29138

SEQ ID NO: 148938 - RNA, 1410 nt, Artificial Sequence
  derived and/or modified CDS sequence (opt3) from neuraminidase__InfluenzaA__AEK29182
augaaccccaaucagaagaucauuaccauaggcagcgugucccugacaaucucuacuauuugcuucuuuaugcaaaucgccauucucaucacgaccgucacacuucacuucaaacaguacgaguuuaacucaccuccaaauaaccagguuaugcugugugaaccgacuauaaucgagagaaauauuaccgaaaucguguauuugacaaacaccacuauugagaaggaaaucugccccaaauuagcugaguacaggaauuggaguaagccucagugugacauaacaggguucgcaccauuuagcaaagauaacuccauucggcugucugccggaggugacaucuggguaacccgcgagcccuaugugucgugcgauccugacaaguguuaccaauucgcgcuaggccaggggacgacucucaauaacguccauucaaauaacaccgugcgagaucguacaccauauagaacucugcuuaugaaugaacugggaguucccuuucacuugggcaccaaacaggugugcauugcuuggagcaguuccucuugucaugacgguaaggccuggcuccacgucugcaucacaggggaugacaagaacgcaaccgccagcuucaucuacaauggaaggcugguggauuccguaguuucauggaguaaagagauucugcggacgcaggaaagcgagugugugugcauaaacggcacuuguacagucgugaugaccgacggcucugcuuccgggaaggcagauacuaaaauccucuuuauugaggaaggaaagaucgugcauacaucaaccuuaagcgguagugcccaacacgucgaggaaugcucuugcuauccucgcuacccaggcguuagaugugugugcagggacaacuggaagggguccaaucggccgauaguagauauuaacaucaaagaccacagcaucgugucgucuuacgucuguuccggacuggugggcgacacgccccgcaagaaugauucaaguagcuccucucauugccuugacccuaacaaugaggaaggugggcacggaguuaaaggcugggcuuucgaugacggcaacgauguguggauggggcgaaccauuaaugagacaagcagauugggauaugagacuuuuaaggucaucgaagguuggucaaacccaaaaaguaagcuacaggugaauaggcagguaauuguugaccggggcaaccguuccggguacagcggaauauucucuguggagggcaaaucauguaucaaucgcugcuuuuaugucgaacugauuagagguaggaaggaggaaaccgaggugcucuggacaaguaacagcaucgucguguucugugggacuuccggcaccuacggaacaggcucuuggcccgauggggccgaccugaaucuuaugccuaucuga

SEQ ID NO: 148939 - RNA, 1410 nt, Artificial Sequence
  derived and/or modified CDS sequence (opt3) from neuraminidase__InfluenzaA__AEK29204
augaaccccaaucagaagaucauuaccauaggcagcgugucccugacaaucucuacuauuugcuucuuuaugcaaaucgccauucucaucacgaccgucacacuucacuucaaacaguacgaguuuaacucaccuccaaauaaccagguuaugcugugugaaccgacuauaaucgagagaaauauuaccgaaaucguguauuugacaaacaccacuauugagaaggaaaucugccccaaauuagcugaguacaggaauuggaguaagccucagugugacauaacaggguucgcaccauuuagcaaagauaacuccauucggcugucugccggaggugacaucuggguaacccgcgagcccuaugugucgugcgauccugacaaguguuaccaauucgcgcuaggccaggggacgacucucaauaacguccauucaaauaacaccgugcgagaucguacaccauauagaacucugcuuaugaaugaacugggaguucccuuucacuugggcaccaaacaggugugcauugcuuggagcaguuccucuugucaugacgguaaggccuggcuccacgucugcaucacaggggaugacaagaacgcaaccgccagcuucaucuacaauggaaggcugguggauuccguaguuucauggaguaaagagauucugcggacgcaggaaagcgagugugugugcauaaacggcacuuguacagucgugaugaccgacggcucugcuuccgggaaggcaaacacuaaagugcucuuuaucgaggaaggaaagauuguccauacaucaaccuuaagcgguagugcccaacacguugaggaaugcucuugcuauccucgcuacccaggcgugagauguguaugcagggauaauuggaagggguccaaccggccgaucguggacauaaauauuaaagaucacagcaucgucucgucuuacguguguuccggacugguuggcgacacgccccgcaagaacgacucaaguagcuccucucauugccuugauccuaauaacgaggaaggugggcacggagugaaaggcugggcuuucgacgauggcaaugacgucuggauggggcgaaccaucaacgagacaagcagauugggauaugagacuuuuaaggugauugaagguuggucaaauccaaaaaguaagcugcagaucaacaggcagguaauuguugaucggggcaaucguuccggguacagcggaauauucucuguggagggcaaaucauguaucaaccgcugcuuuuaugucgaacuaauuagagguaggaaggaggaaaccgaggugcucuggacaaguaauagcaucgucguguucugugggacuuccggcaccuacggaacaggcucuuggcccgacggggccgaucugaaccuuaugccuaucuga

SEQ ID NO: 148940 - RNA, 1410 nt, Artificial Sequence
  derived and/or modified CDS sequence (opt3) from neuraminidase__InfluenzaA__AEK29215
augaaccccaaucagaagaucauuaccauaggcagcgugucccugacaaucucuacuauuugcuucuuuaugcagaucgccauucucaucacgaccgucacacuucacuucaaacaguacgaguuuaacucaccuccaaauaaccagguuaugcugugugaaccgacuauaaucgagagaaauauuaccgaaaucguguauuugacaaacaccacuauugagaaggaaaucugccccaaauuagcugaguacaggaauuggaguaagccucagugugacauaacaggguucgcaccauuuagcaaagauaacuccauucggcugucugccggaggugacaucuggguaacccgcgagcccuaugugucgugcgauccugacaaguguuaccaauucgcgcuaggccaggggacgacucucaauaacguccauucaaauaacaccgugcgaaaucguacaccauauagaacucugcuuaugaacgaacugggaguucccuuucacuugggcaccaaacaggugugcauugcuuggagcaguuccucuugucaugaugguaaggccuggcuccacgucugcaucacaggggacgauaagaaugcaaccgccagcuucaucuacaacggaaggcugguggacuccguaguuucauggaguaaagagauucugcggacgcaggaaagcgagugugugugcauaaacggcacuuguacagucgugaugaccgauggcucugcuuccgggaaggcagacacuaaaauccucuuuauugaggaaggaaagaucgugcauacaucaaccuuaagcgguagugcccaacacgucgaggaaugcucuugcuauccucgcuacccaggcguuagaugugugugcagggauaauuggaagggguccaaccggccgauaguagacauuaauaucaaagaucacagcaucgugucgucuuacgucuguuccggacuggugggcgacacgccccgcaagaacgacucaaguagcuccucucauugccuugauccuaauaacgaggaaggugggcacggaguuaaaggcugggcuuucgacgauggcaaugacguguggauggggcgaaccauuaacgagacaagcagauugggauaugagacuuuuaaggucaucgaagguuggucaaauccaaaaaguaagcugcagauuaacaggcaagugauaguagaucggggcgaccguuccggguacagcggaaucuucucuguugagggcaaaucauguauuaaucgcugcuuuuauguggaacuaaucagagguaggaaggaggaaaccgagguccucuggacaaguaacagcaucguggucuucugugggacuuccggcaccuacggaacaggcucuuggcccgauggggccgaccugaaucuuaugccuauuuga

SEQ ID NO: 148941 - RNA, 1410 nt, Artificial Sequence; identical to SEQ ID NO: 148939
  derived and/or modified CDS sequence (opt3) from neuraminidase__InfluenzaA__AEK29237

SEQ ID NO: 148942 - RNA, 1410 nt, Artificial Sequence; identical to SEQ ID NO: 147566
  derived and/or modified CDS sequence (opt3) from neuraminidase__InfluenzaA__AEK29248

SEQ ID NO: 148943 - RNA, 1410 nt, Artificial Sequence; identical to SEQ ID NO: 147566
  derived and/or modified CDS sequence (opt3) from neuraminidase__InfluenzaA__AEK29259

SEQ ID NO: 148944 - RNA, 1410 nt, Artificial Sequence; identical to SEQ ID NO: 147566
  derived and/or modified CDS sequence (opt3) from neuraminidase__InfluenzaA__AEK29270

SEQ ID NO: 148945 - RNA, 1413 nt, Artificial Sequence
  derived and/or modified CDS sequence (opt3) from neuraminidase__InfluenzaA__AEK59839
augaaccccaaucagaagaucauuaccauaggcagcaucuccauugccaucgggauuaucucucugaugcuccaaauaggaaacaucauuucaaucugggcuagucacagcauucagacagguucccagaaucauacuggcaucugcaaccagagaauaauuacguacgaaaauucuaccugggugaaccacacauaugucaauaucaacaauacuaacguuguggcagggaaagacaagaccucgguaacacuugccggaaauucaagccuguguaguauuuccggcugggcgaucuacaccaaagauaacucuaucaggauugguagcaagggggacguguucgucauacgggagccuuuuaucuccugcucacauuuggagugucgcacuuucuuuuuaacacaaggagcucugcuaaaugauaaacacaguaacggcaccgugaaggaccgaagcccauaucgugcccucaugucuugcccgcugggcgaagcacccuccccuuacaauucaaaguucgagagcguugccuggagugcuucugcaugucaugaugggcuuggauggcugacgauugguaucuccggcccagacaacggggccguggcugucuugaaauauaacggaauaauuacuggcaccaucaagagcuggaaaaagcagauccucagaacacaggaaucggagugcguguguaugaaugguucuugcuuuacuauuaugaccgaugggcccuccaacggagccgcgucauacaaaaucuucaagauugagaagggcaaaguaacaaagaguauagaacugaaugcaccuaacuuucacuaugaggaauguagcugcuacccagacaccggcaucguuaugugugugugcagggauaauuggcacggguccaaccggcccugggucucuuucaaucagaaccuggacuaccaaauuggauauaucugcagcgguguguuuggcgauaauccucgcccaaaagacggggagggaucauguaacccggugacggucgauggcgccgacgguguuaagggguucaguuacaaauaugacaauggcguguggaucggaagaacuaaguccaacaggcuccggaaaggcuuugagaugauuugggaucccaauggguggacaaacaccgacagcgauuucucuguaaagcaggacguggucgcuauaacugauuggucaggauacagugguagcuuugugcagcauccugaauuaacaggccuggacugcauccgcccauguuucuggguugagcuugugcgaggguugcccagagaaaauaccacgauuuggaccuccggaucuucgaucagcuucugcggcgucaacuccgauacagccaacuggucauggccugacggugcagagcugccauuuacuauugauaaguga

SEQ ID NO: 148946 - RNA, 1410 nt, Artificial Sequence
  derived and/or modified CDS sequence (opt3) from neuraminidase__InfluenzaA__AEK98375
augaaccccaaucagaagaucauuaccauaggcagcgugucccugacaaucucuacuauuugcuucuuuaugcaaaucgccauucucaucacgaccgucacacuucacuucaaacaguacgaguuuaacucaccuccaaauaaccagguuaugcugugugaaccgacuauaaucgagagaaauauuaccgaaaucguguauuugacaaacaccacuauugagaaggaaaucugccccaaauuagcugaguacaggaauuggaguaagccucagugugacauaacaggguucgcaccauuuagcaaagauaacuccauucggcugucugccggaggugacaucuggguaacccgcgagcccuaugugucgugcgauccugacaaguguuaccaauucgcgcuaggccaggggacgacucucaauaacguccauucaaaugauaccgugcgagaccguacaccauauagaacucugcuuaugaacgaacugggaguucccuuucacuugggcaccaaacaggugugcauugcuuggagcaguuccucuugucaugaugguaaggccuggcuccacgucugcaucacaggggacgauaagaaugcaaccgccagcuucaucuacaacggaaggcugguggacuccauuguaucauggaguaaagagauacugcggacgcaggaaagcgaguguguuugcaucaauggcacuuguacaguggucaugaccgauggcucugcuuccggggaggcagacacuaagauucucuuuaucgaagagggaaaaauagugcauacaucaaccuuaagcgguagugcccaacacguggaagagugcucuugcuauccucgcuacccaggcgucagauguguuugcagggauaacuggaagggguccaaccggccgauuguggacaucaauaucaaggaccacagcauuguaucgucuuacguguguuccggacuggucggcgauacgccccgcaaaaacgacucaaguagcuccucucauugccuugauccuaauaacgaagagggugggcacggagugaagggcugggcuuucgacgauggcaaugacguuuggauggggcgaaccaucagcgagaaaucaagauugggauaugaaacauuuaaggugauugaggguuggaguaacccaaaauccaagcugcagacuaauaggcaggucauaguggaucggggcaaccguagcggguacucuggaaucuucucaguagaaggcaaaaguuguauuaaucgcugcuuuuauguugagcuaaucagagguaggaaggaagagaccgaggugcucuggacaagcaacuccaucgucguguucugugggacuucuggcaccuacggaacaggcucguggcccgacggggccgauauuaaucugaugccuauauga

SEQ ID NO: 148947 - RNA, 1410 nt, Artificial Sequence; identical to SEQ ID NO: 144647
  derived and/or modified CDS sequence (opt3) from neuraminidase__InfluenzaA__AEK98377

SEQ ID NO: 148948 - RNA, 1410 nt, Artificial Sequence; identical to SEQ ID NO: 144089
  derived and/or modified CDS sequence (opt3) from neuraminidase__InfluenzaA__AEK98379

SEQ ID NO: 148949 - RNA, 1410 nt, Artificial Sequence
  derived and/or modified CDS sequence (opt3) from neuraminidase__InfluenzaA__AEK98381
augaaccccaaucagaagaucauuaccauaggcagcgugucccugacaaucucuacuauuugcuucuuuaugcaaaucgccauucucaucacgaccgucacacuucacuucaaacaguacgaguuuaacucaccuccaaauaaccagguuaugcugugugaaccgacuauaaucgagagaaauauuaccgaaaucguguauuugacaaacaccacuauugagaaggaaaucugccccaaauuagcugaguacaggaauuggaguaagccucagugugacauaacaggguucgcaccauuuagcaaagauaacuccauucggcugucugccggaggugacaucuggguaacccgcgagcccuaugugucgugcgauccugacaaguguuaccaauucgcgcuaggccaggggacgacucucaauaacguccauucaaaugauaccgugcgagaccguacaccauauagaacucugcuuaugaacgaacugggaguucccuuucacuugggcaccaaacaggugugcauugcuuggagcaguuccucuugucaugauggugaggccuggcuccacgucugcaucacaggggacgauaagaaugcaaccgccagcuucaucuacaacggaaggcugguggacuccauuguaucauggaguaaggaaauacugcggacgcaggagagcgaguguguuugcaucaauggcacuuguacaguggucaugaccgauggcucugcuuccggggaagcagacacuaaaauucucuuuaucgaggaaggaaagauagugcauacaucaaccuuaagcgguagugcccaacacguggaggaaugcucuugcuauccucgcuacccaggcgucagauguguuugcagggauaacuggaaaggguccaaccggccgauuguggacaucaauaucaaggaccacagcauuguaucgucuuacguguguuccggacuggucggcgauacgccccgcaagaacgacucaaguagcuccucucauugccuugauccuaauaacgaggagggugggcacggagugaaaggcugggcuuucgacgauggcaaugacguuuggauggggcgaaccaucagcgaaaagucaagauugggauaugagacauuuaaagugauugaagguuggaguaacccaaaguccaaacugcagauaaauaggcaggucaucguggaucggggcaaccguagcggguacucuggaauuuucucaguagagggcaagaguuguaucaaucgcugcuuuuauguugaacuaaucagagguaggaaagaggagacugaagugcucuggaccagcaacuccauugucguguucugugggacaucuggcacuuacggaaccggcucguggcccgacggggccgauauaaaucugaugccuaucuga

SEQ ID NO: 148950 - RNA, 1410 nt, Artificial Sequence; identical to SEQ ID NO: 144089
  derived and/or modified CDS sequence (opt3) from neuraminidase__InfluenzaA__AEK98383

SEQ ID NO: 148951 - RNA, 1410 nt, Artificial Sequence; identical to SEQ ID NO: 144647
  derived and/or modified CDS sequence (opt3) from neuraminidase__InfluenzaA__AEK98385

SEQ ID NO: 148952 - RNA, 1410 nt, Artificial Sequence
  derived and/or modified CDS sequence (opt3) from neuraminidase__InfluenzaA__AEK98387
augaaccccaaucagaagaucauuaccauaggcagcgugucccugacaaucucuacuauuugcuucuuuaugcaaaucgccauucucaucacgaccgucacacuucacuucaaacaguacgaguuuaacucaccuccaaauaaccagguuaugcugugugaaccgacuauaaucgagagaaauauuaccgaaaucguguauuugacaaacaccacuauugagaaggaaaucugccccaaauuagcugaguacaggaauuggaguaagccucagugugacauaacaggguucgcaccauuuagcaaagauaacuccauucggcugucugccggaggugacaucuggguaacccgcgagcccuaugugucgugcgauccugacaaguguuaccaauucgcgcuaggccaggggacgacucucaauaacguccauucaaauaacaccgugcgagaucguacaccauauagaacucugcuuaugaaugaacugggaguucccuuucacuugggcaccaaacaggugugcauugcuuggagcaguuccucuugucaugacgguaaggccuggcuccacgucugcaucacaggggaugacaagaacgcaaccgccagcuucaucuacaauggaaggcugauugauuccgugguaucauggaguaaagagauacugcggacgcaggaaagcgaguguguuugcaucaacggcacuuguacaguggucaugaccgacggcucugcuuccgggaaggcagauacuaaaauucucuuuaucgaggaaggaaagauagugcauacaucaaccuuaagcgguagugcccaacacguggaggaaugcucuugcuauccucgcuacccaggcgucagauguguuugcagggacaacuggaagggguccaaucggccgauuguggauaucaacaucaaagaccacagcauuguaucgucuuacguguguuccggacuggucggcgacacgccccgcaagaaugauucaaguagcuccucucauugccuugacccuaacaaugaggaaggugggcacggagugaaaggcugggcuuucgaugacggcaacgauguuuggauggggcgaaccaucaaugagacaagcagauugggauaugagacuuuuaaggugauugaagguuggucaaacccaaaaaguaagcugcagauaaauaggcaggucaucguggaccggggcaaccguuccggguacagcggaauuuucucuguagagggcaaaucauguaucaaucgcugcuuuuauguugaacuaaucagagguaggaaggaggaaaccgaggugcucuggacaaguaacagcauugucguguucugugggacuuccggcaccuacggaacaggcucuuggcccgauggggccgaccugaaucuuaugccuauauga

SEQ ID NO: 148953 - RNA, 1410 nt, Artificial Sequence; identical to SEQ ID NO: 144647
  derived and/or modified CDS sequence (opt3) from neuraminidase__InfluenzaA__AEK98389

SEQ ID NO: 148954 - RNA, 1410 nt, Artificial Sequence
  derived and/or modified CDS sequence (opt3) from neuraminidase__InfluenzaA__AEK98393
augaaccccaaucagaagaucauuaccauaggcagcgugucccugacaaucucuacuauuugcuucuuuaugcaaaucgccauucucaucacgaccgucacacuucacuucaaacaguacgaguuuaacucaccuccaaauaaccagguuaugcugugugaaccgacuauaaucgagagaaauauuaccgaaaucguguauuugacaaacaccacuauugagaaggaaaucugccccaaauuagcugaguacaggaauuggaguaagccucagugugacauaacaggguucgcaccauuuagcaaagauaacuccauucggcugucugccggaggugacaucuggguaacccgcgagcccuaugugucgugcgauccugacaaguguuaccaauucgcgcuaggccaggggacgacucucaauaacguccauucaaauaacaccgugcgagaucguacaccauauagaacucugcuuaugaaugaacugggaguucccuuucacuugggcaccaaacaggugugcauugcuuggagcaguuccucuugucaugacgguaaggccuggcuccacgucugcaucacaggggaugacaagaacgcaaccgccagcuucaucuacaauggaaggcugguggauuccguaguuucauggaguaaagagauucugcggacgcaggaaagcgagugugugugcauaaacggcacuuguacagucgugaugaccgacggcucugcuuccgggaaggcagauacuaaaauccucuuuauugaggaaggaaagaucgugcauacaucaaccuuaagcgguagugcccaacacgucgaggaaugcucuugcuauccucgcuacccaggcguuagaugugugugcagggacaacuggaagggguccaaucggccgauaguagauauuaacaucaaagaccacagcaucgcuucgucuuacguguguuccggacuggucggcgacacgccccgcaagaaugauucaaguagcuccucucauugccuugacccuaacaaugaggaaggugggcacggagugaaaggcugggccuucgaugacggcaacgauguuuggauggggcgaaccauuaaugagacaagcagauugggauaugagacuuuuaaggugaucgaagguuggucaaacccaaaaaguaagcugcagauuaauaggcaggucauaguggaccggggcaaccguuccggguacagcggaaucuucucuguagagggcaaaucauguauuaaucgcugcuuuuauguugaacuaaucagagguaggaaggaggaaaccgaggugcucuggacaaguaacagcaucgucguguucugugggacuuccggcaccuacggaacaggcucuuggcccgauggggcggaccugaaucuuaugccuauuuga

SEQ ID NO: 148955 - RNA, 1410 nt, Artificial Sequence; identical to SEQ ID NO: 147566
  derived and/or modified CDS sequence (opt3) from neuraminidase__InfluenzaA__AEK98395

SEQ ID NO: 148956 - RNA, 1410 nt, Artificial Sequence
  derived and/or modified CDS sequence (opt3) from neuraminidase__InfluenzaA__AEK98397
augaaccccaaucagaagaucauuaccauaggcagcgugucccugacaaucucuacuauuugcuucuuuaugcagaucgccauucucaucacgaccgucacacuucacuucaaacaguacgaguuuaacucaccuccaaauaaccagguuaugcugugugaaccgacuauaaucgagagaaauauuaccgaaaucguguauuugacaaacaccacuauugagaaggaaaucugccccaaauuagcugaguacaggaauuggaguaagccucagugugacauaacaggguucgcaccauuuagcaaagauaacuccauucggcugucugccggaggugacaucuggguaacccgcgagcccuaugugucgugcgauccuaauaaguguuaccaauucgcgcuaggccaggggacgacucucaacaauguccauucaaacaauaccgugcgagaccguacaccauauagaacucugcuuaugaacgaacugggaguucccuuucacuugggcaccaaacaggugugcauugcuuggagcaguuccucuugucaugaugguaaggccuggcuccacgucugcaucacaggggacgauaagaaugcaaccgccagcuucaucuacaacggaaggcugguggacuccguaguuucauggaguaaagagauucugcggacgcaggaaagcgagugugugugcauaaacggcacuuguacagucgugaugaccgauggcucugcuuccgggaaggcagacacuaaaauccucuuuauugaggaaggaaagaucgugcauacaucaaccuuaagcgguagugcccaacacgucgaggaaugcucuugcuauccucgcuacccaggcguuagaugugugugcagggauaauuggaagggguccaaccggccgauaguagacauuaauaugaaagaucacagcaucgugucgucuuacgucuguuccggacuggugggcgacacgccccgcaagaacgacucaaguagcuccucucauugccuugauccuaauaacgaggaaggugggcacggaguuaaaggcugggcuuucgacgauggcaaugacguguggauggggcgaaccaucagcgagaagucaagauugggauaugagacauuuaaagucauugaagguuggaguaacccaaaguccaaacugcagaucaauaggcaagugauuguagaucggggcaaccguagcggguacucuggaauauucucaguugagggcaagaguuguaucaaucgcugcuuuuauguggaacuaauuagagguaggaaggaggaaacugagguccucuggaccagcaacuccaucguggucuucugugggacaucuggcacuuacggaaccggcucguggcccgacggggccgauaucaauuucaugccuauuuga

SEQ ID NO: 148957 - RNA, 1410 nt, Artificial Sequence; identical to SEQ ID NO: 144647
  derived and/or modified CDS sequence (opt3) from neuraminidase__InfluenzaA__AEK98399

SEQ ID NO: 148958 - RNA, 1410 nt, Artificial Sequence; identical to SEQ ID NO: 144560
  derived and/or modified CDS sequence (opt3) from neuraminidase__InfluenzaA__AEK98403

SEQ ID NO: 148959 - RNA, 1410 nt, Artificial Sequence
  derived and/or modified CDS sequence (opt3) from neuraminidase__InfluenzaA__AEK98405
augaaccccaaucagaagaucauuaccauaggcagcgugucccugacaaucucuacuauuugcuucuuuaugcaaaucgccauucucaucacgaccgucacacuucacuucaaacaguacgaguuuaacucaccuccaaauaaccagguuaugcugugugaaccgacuauaaucgagagaaauauuaccgaaaucguguauuugacaaacaccacuauugagaaggaaaucugccccaaauuagcugaguacaggaauuggaguaagccucagugugacauaacaggguucgcaccauuuagcaaagauaacuccauucggcugucugccggaggugacaucuggguaacccgcgagcccuaugugucgugcgauccugacaaguguuaccaauucgcgcuaggccaggggacgacucucaauaacguccauucaaauaacaccgugcgagaucguacaccauauagaacucugcuuaugaaugaacugggaguucccuuucacuugggcaccaaacaggugugcauugcuuggagcaguuccucuugucaugacgguaaggccuggcuccacgucugcaucacaggggaugacaagaacgcaaccgccagcuucaucuacaauggaaggcugguggauuccauuguaucauggaguaaagagauacugcggacgcaggaaagcgaguguguuugcaucaacggcacuuguacaguggucaugaccgacggcucugcuuccgggaaggcagauacuaaaauucucuuuaucgaggaaggaaagauagugcauacaucaaccuuaagcgguagugcccaacacguggaggaaugcucuugcuauccucgcuacccaggcgucagauguguuugcagggacaacuggaagggguccaaucggccgauuguggauaucaacaucaaagaccacagcauuguaucgucuuacguguguuccggacuggucggcgacacgccccgcaagaaugauucaaguagcuccucucauugccuugacccuaacaaugaggaaggugggcacggagugaaaggcugggcuuucgaugacggcaacgauguuuggauggggcgaaccaucagcgagaagucaagauugggauaugagacauuuaaagugauugaagguuggaguaauccaaaguccaaacugcagauaaacaggcaggucaucguggaccgggauaaucguagcggcuacucugggauuuucucaguagagggaaagaguuguaucaaccgcugcuuuuauguugaacuaaucagaggcaggaaggaggaaacugaggugcucuggaccagcaauuccauugucguguucugugguacaucugggacuuacggcaccggaucguggcccgacggcgccgauauaaaccugaugccuaucuga

SEQ ID NO: 148960 - RNA, 1410 nt, Artificial Sequence
  derived and/or modified CDS sequence (opt3) from neuraminidase__InfluenzaA__AEK98407
augaaccccaaucagaagaucauuaccauaggcagcgugucccugacaaucucuacuauuugcuucuuuaugcagaucgccauucucaucacgaccgucacacuucacuucaaacaguacgaguuuaacucaccuccaaauaaccagguuaugcugugugaaccgacuauaaucgagagaaauauuaccgaaaucguguauuugacaaacaccacuauugagaaggaaaucugccccaaauuagcugaguacaggaauuggaguaagccucagugugacauaacaggguucgcaccauuuagcaaagauaacuccauucggcugucugccggaggugacaucuggguaacccgcgagcccuaugugucgugcgauccugacaaguguuaccaauucgcgcuaggccaggggacgacucucaauaacguccauucaaauaacaccgugcgaguucguacaccauauagaacucugcuuaugaaugaacugggagugcccuuucacuugggcaccaagcaggucugcauugcuuggagcaguuccucuugucaugaugguaaagccuggcuccacgugugcaucacaggggacgauaagaacgcaaccgccagcuucaucuacaauggaaggcugguagacuccauuguuucauggaguaaagagauacugcggacgcaggaaagcgagugugugugcaucaacggcacuuguacagucgugaugaccgauggcucugcuuccgggaaggcagacacuaaaauucucuuuaucgaggaaggaaagauagugcauacaucaaccuuaagcgguagugcccaacacgucgaggaaugcucuugcuauccucgcuacccaggcguuagaugugugugcagggauaacuggaagggguccaaucggccgauuguagacaucaacaucaaagaucacagcauugugucgucuuacgucuguuccggacuggugggcgacacgccccgcaagaaugacucaaguagcuccucucauugccuugauccuaacaaugaggaaggugggcacggaguuaaaggcugggcuuucgacgauggcaacgacguguggauggggcgaaccaucagcgagaagucaagauugggauaugagacauuuaaagucauugaagguuggaguaauccaaaguccaaacugcagauaaacaggcaagugaucguagaucgggacaaucguagcggcuacucugggauuuucucaguugagggaaagaguuguaucaaccgcugcuuuuauguggaacuaaucagaggcaggaaggaggaaacugagguccucuggaccagcaauuccauuguggucuucugugguacaucugggacuuacggcaccggaucguggcccgauggcgccgacauaaaccugaugccuaucuga

SEQ ID NO: 148961 - RNA, 1410 nt, Artificial Sequence; identical to SEQ ID NO: 142375
  derived and/or modified CDS sequence (opt3) from neuraminidase__InfluenzaA__AEL11690

SEQ ID NO: 148962 - RNA, 1410 nt, Artificial Sequence; identical to SEQ ID NO: 147061
  derived and/or modified CDS sequence (opt3) from neuraminidase__InfluenzaA__AEL89300

SEQ ID NO: 148963 - RNA, 1410 nt, Artificial Sequence; identical to SEQ ID NO: 147061
  derived and/or modified CDS sequence (opt3) from neuraminidase__InfluenzaA__AEL89310

SEQ ID NO: 148964 - RNA, 1410 nt, Artificial Sequence; identical to SEQ ID NO: 147061
  derived and/or modified CDS sequence (opt3) from neuraminidase__InfluenzaA__AEL89320

SEQ ID NO: 148965 - RNA, 1410 nt, Artificial Sequence; identical to SEQ ID NO: 147061
  derived and/or modified CDS sequence (opt3) from neuraminidase__InfluenzaA__AEL89330

SEQ ID NO: 148966 - RNA, 1410 nt, Artificial Sequence; identical to SEQ ID NO: 147061
  derived and/or modified CDS sequence (opt3) from neuraminidase__InfluenzaA__AEL89340

SEQ ID NO: 148967 - RNA, 1410 nt, Artificial Sequence; identical to SEQ ID NO: 147061
  derived and/or modified CDS sequence (opt3) from neuraminidase__InfluenzaA__AEL89350

SEQ ID NO: 148968 - RNA, 1410 nt, Artificial Sequence; identical to SEQ ID NO: 147061
  derived and/or modified CDS sequence (opt3) from neuraminidase__InfluenzaA__AEL89360

SEQ ID NO: 148969 - RNA, 1410 nt, Artificial Sequence; identical to SEQ ID NO: 147061
  derived and/or modified CDS sequence (opt3) from neuraminidase__InfluenzaA__AEL89370

SEQ ID NO: 148970 - RNA, 1410 nt, Artificial Sequence; identical to SEQ ID NO: 147061
  derived and/or modified CDS sequence (opt3) from neuraminidase__InfluenzaA__AEL89394

SEQ ID NO: 148971 - RNA, 1410 nt, Artificial Sequence; identical to SEQ ID NO: 147061
  derived and/or modified CDS sequence (opt3) from neuraminidase__InfluenzaA__AEL89404

SEQ ID NO: 148972 - RNA, 1410 nt, Artificial Sequence; identical to SEQ ID NO: 147061
  derived and/or modified CDS sequence (opt3) from neuraminidase__InfluenzaA__AEL89414

SEQ ID NO: 148973 - RNA, 1410 nt, Artificial Sequence; identical to SEQ ID NO: 147061
  derived and/or modified CDS sequence (opt3) from neuraminidase__InfluenzaA__AEL89424

SEQ ID NO: 148974 - RNA, 1410 nt, Artificial Sequence; identical to SEQ ID NO: 147061
  derived and/or modified CDS sequence (opt3) from neuraminidase__InfluenzaA__AEL89434

SEQ ID NO: 148975 - RNA, 1410 nt, Artificial Sequence; identical to SEQ ID NO: 147061
  derived and/or modified CDS sequence (opt3) from neuraminidase__InfluenzaA__AEL89444

SEQ ID NO: 148976 - RNA, 1410 nt, Artificial Sequence; identical to SEQ ID NO: 147061
  derived and/or modified CDS sequence (opt3) from neuraminidase__InfluenzaA__AEL89454

SEQ ID NO: 148977 - RNA, 1410 nt, Artificial Sequence; identical to SEQ ID NO: 147061
  derived and/or modified CDS sequence (opt3) from neuraminidase__InfluenzaA__AEL89464

SEQ ID NO: 148978 - RNA, 1410 nt, Artificial Sequence; identical to SEQ ID NO: 147061
  derived and/or modified CDS sequence (opt3) from neuraminidase__InfluenzaA__AEL89474

SEQ ID NO: 148979 - RNA, 1410 nt, Artificial Sequence
  derived and/or modified CDS sequence (opt3) from neuraminidase__InfluenzaA__AEL89484
augaaccccaaucagaagaucauuaccauaggcagcgugugcaugacaaucgggauggccaaccugaugcuccaaauuggaaauaucauuuccaucuggauaucucacucaauccagcuugguaaccagaaucagauugagacuuguaaccaaagugucaucacguacgaaaauaacaccuggguuaaucagacauaugugaacauuagcaauacuaacuucgcugcaggccaguccguagugucugucaaacuggccggaaauucgucauugugcccugugagcggaugggcgaucuacaguaaggacaacuccauaagaauuggcucuaaaggugauguuuuugugaucagggagccauucauuagcuguuccccguuagaaugccggaccuuuuuccugacacagggggcucuacucaaugacaagcauucaaacggaaccaucaaagaucgcagucccuaucgaacucugaugagcuguccuaucggcgaggucccaucucccuacaacucccguuuugaaucaguggccuggagcgcaagugccugccacgacggcauuaauuggcuuacaauagggaucucuggaccugauaacggugcuguagcaguucugaaguauaauggcauuaucaccgacacgauaaaguccuggagaaacaauauuuugaggacucaagagagcgagugugccugcgugaacgggucguguuucaccgucaugacagauggaccaucugacggccaggcuuccuacaaaaucuuucggaucgaaaaggguaaaauugugaagucaguggagaucaaugcccccaacuaucauuacgaagagugcaguuguuacccugauagcuccgagauuacuugcgucugccgcgacaauuggcacgggucuaacagaccauggguuagcuucaaucagaaccucgaauaucagauaggauacaucuguucaggcauuuuuggcgauaauccgaggcccaacgacaaaaccgggaguugcggaccuguguccagcaauggugcgaacggcguaaagggguucucuuuuaaguauggaaacggcguguggaucggucggacaaaaucaaucaguagccgcaauggguucgagaugauuugggauccaaacggcuggaccggaacggacaauaacuuuuccauaaagcaagacaucgucggcauuaaugaauggucuggguacucggggagcuucgugcagcaucccgagcugacuggucuggauuguauccgaccuugcuucuggguugaacucauuagaggcaggccaaaagagaacacaaucuggaccuccgggucaaguauaucuuuuuguggagugaauagcgacacugucggcugguccuggcccgauggugcagaguuaccguucacaaucgacaaguga

SEQ ID NO: 148980 - RNA, 1410 nt, Artificial Sequence; identical to SEQ ID NO: 148850
  derived and/or modified CDS sequence (opt3) from neuraminidase__InfluenzaA__AEL89494

SEQ ID NO: 148981 - RNA, 1410 nt, Artificial Sequence; identical to SEQ ID NO: 148856
  derived and/or modified CDS sequence (opt3) from neuraminidase__InfluenzaA__AEL89514

SEQ ID NO: 148982 - RNA, 1410 nt, Artificial Sequence; identical to SEQ ID NO: 148834
  derived and/or modified CDS sequence (opt3) from neuraminidase__InfluenzaA__AEL89524

SEQ ID NO: 148983 - RNA, 1410 nt, Artificial Sequence
  derived and/or modified CDS sequence (opt3) from neuraminidase__InfluenzaA__AEL89534
augaaccccaaucagaagaucauuaccauaggcagcgugugcaugacaaucgggauggccaaccugauucuccaaaucggaaauauuaucuccauauggaucucucacucaauucagcuugguaaccagaaucagaucggcacuuguaaccaaagugucauuacguacgagaauaacaccuggguuaaucagacauaugugaacaucagcaauacuaacuucgcugcagggcaguccguagugucugucaaacuggccggaaauucgucauugugcccugugagcggcugggcgauauacaguaaggacaacuccauuagaaucgguucuaaaggggauguuuuugugauuagggaaccauucaucagcuguuccccguuagagugccggaccuuuuuccugacacagggagcucuacucaaugacaagcauucaaacggcaccaucaaagaucgcagucccuaucgaacucugaugagcuguccuauuggcgaagucccaucucccuacaacucccguuuugagucaguggccuggagcgcaagugccugccacgacgggauaaauuggcuuacaaucggaauuucugguccugauaacggcgcuguagcaguucugaaguauaaugggaucauaaccgacacgauuaaguccuggagaaacaauaucuugaggacucaagaaagcgagugugccugcgugaacggaucguguuucaccgucaugacagauggcccaucugacggucaggcuuccuacaaaaucuuucggauugagaaggggaaaaucgugaagucaguggaaauuaaugcccccaacuaucauuacgaggaaugcaguuguuacccugauagcuccgagauaacuugcgucugccgcgacaauuggcacggaucuaacagaccauggguuagcuucaaucagaaccucgaguaucagaucggcuacauuuguucaggcaucuuuggggauaauccgaggcccaacgacaaaaccggaaguugcgguccuguguccagcaauggcgcgaacgggguaaagggauucucuuuuaaguauggcaacgguguguggaucgggcggacaaaaucaauuaguagccgcaauggcuucgaaaugauaugggauccaaacggauggaccggcacggacaauaacuuuuccaagaaacaagacaucgucgggauuaaugaguggucuggauacucggguagcuucgugcagcaucccgaacugacuggccuggauuguauccgaccuugcuucuggguugagcucauuagagggaggccaaaggaaaacacaaucuggaccuccggaucaaguauaucuuuuuguggcgugaauagcgacacugucgguugguccuggcccgauggggcagaguuaccguucacaaucgacaaauga

SEQ ID NO: 148984 - RNA, 1410 nt, Artificial Sequence; identical to SEQ ID NO: 148856
  derived and/or modified CDS sequence (opt3) from neuraminidase__InfluenzaA__AEL89544

SEQ ID NO: 148985 - RNA, 1410 nt, Artificial Sequence; identical to SEQ ID NO: 148856
  derived and/or modified CDS sequence (opt3) from neuraminidase__InfluenzaA__AEL89554

SEQ ID NO: 148986 - RNA, 1410 nt, Artificial Sequence
  derived and/or modified CDS sequence (opt3) from neuraminidase__InfluenzaA__AEL89564
augaaccccaaucagaagaucauuaccauaggcagcgugugcaucacaauugggauggccaaccugauccuccaaauuggaaauaucauauccaucuggauuucucacucaauccagcuugguaaccagaaucagauugagacuuguaaccaaagugucguuacguacgaaaauaacaccugggugaaucagacauauguaaacaucagcaauacuaacuucgcugcaggccaguccguggucucugugaaacuggccgggaauagcucauugugcccuguuagcggaugggcgauauacaguaaggacaacuccauuagaaucggcucuaaaggugauguguuugucauuagggagccauucaucagcuguuccccguuagaaugccggaccuuuuuccugacacagggggcucuacucaaugacaagcauucaaacggaaccaucaaagaucgcagucccuaucgaacucugaugagcuguccuauuggcgaggugccaucucccuacaacucccguuuugaaucaguagccuggagcgcaagugccugccacgacggcauaucuuggcuuacaaucgggauuuccggaccugauaauggugcuguugcagugcugaaguauaacggcaucauaaccgacacgauuaagagcuggagaaauaacaucuugaggacucaagagucggagugugccugcgucaaugggucuuguuucaccgugaugacagauggaccauccgacggccaggcuucauacaaaaucuuucggauugaaaaggguaaaaucgugaagagugucgagaugaacgcccccaauuaucauuacgaagagugcagcuguuacccugauuccucugagauuacuugcguuugccgcgacaacuggcacgggagcaauagaccaugggugucauucaaccagaaucucgaauaucagauaggauacaucuguaguggcauuuuuggcgauaacccgaggcccaaugacaaaaccggguccugcggaccuguaagcucuaacggugcgaauggcgugaagggguucucauuuaaguauggaaacggcgucuggaucggucggacaaaaaguaucagcucccgcaacggguucgagaugauuugggauccaaauggcuggaccggaacggacaacaauuuuucuauaaagcaagacaucgugggcauuaacgaauggucgggguacagcggauccuucguucagcaucccgagcugacuggucuggauuguauccgaccuugcuucuggguggaacucauuagaggcaggccaaaagagaauacaaucuggaccucagggaguucuauaucguuuuguggagucaacuccgacacugugggcuggucauggcccgauggugcagaguuaccguucacaaucgacaaguga

SEQ ID NO: 148987 - RNA, 1410 nt, Artificial Sequence; identical to SEQ ID NO: 148856
  derived and/or modified CDS sequence (opt3) from neuraminidase__InfluenzaA__AEL89574

SEQ ID NO: 148988 - RNA, 1410 nt, Artificial Sequence; identical to SEQ ID NO: 148856
  derived and/or modified CDS sequence (opt3) from neuraminidase__InfluenzaA__AEL89584

SEQ ID NO: 148989 - RNA, 1410 nt, Artificial Sequence; identical to SEQ ID NO: 145803
  derived and/or modified CDS sequence (opt3) from neuraminidase__InfluenzaA__AEL89604

SEQ ID NO: 148990 - RNA, 1410 nt, Artificial Sequence; identical to SEQ ID NO: 148305
  derived and/or modified CDS sequence (opt3) from neuraminidase__InfluenzaA__AEL89624

SEQ ID NO: 148991 - RNA, 1410 nt, Artificial Sequence
  derived and/or modified CDS sequence (opt3) from neuraminidase__InfluenzaA__AEL89634
augaaccccaaucagaagaucauuaccauaggcagcgugugcaucacaauugggauggccaaccugauccuccaaauuggaaauaucauauccaucuggauuucucacucaauccagcuugguaaccagaaucagauugagacuuguaaccaaagugucaucacguacgaaaauaacaccuggguuaaucagacauaugugaacauaagcaauacuaacuucgcugcaggccaguccguagugucugucaaacuggccggaaauucgucauugugcccugugagcgggugggcgauuuacaguaaggacaacuccaucagaauuggcucuaaaggugauguuuuugugaucagggagccauucaucagcuguuccccguuagaaugccggaccuuuuuccugacacagggggcucuacucaaugacaagcauucaaacggaaccauuaaagaucgcagucccuaucgaacucugaugagcuguccuauaggcgaggucccaucucccuacaacucccguuuugaaucaguggccuggagcgcaagugccugccacgacggcaucucuuggcuuacaauugggaucuccggaccugauaauggugcuguagcaguucugaaguauaacggcauaauuaccgacacgaucaagagcuggagaaauaacaucuugaggacucaagagucggagugugccugcgugaaugggucuuguuucaccgucaugacagauggaccauccgacggccaggcuucauacaaaauuuuucggaucgaaaaggguaaaauugugaagaguguggagaugaacgcccccaauuaucauuacgaagagugcagcuguuacccugauuccucugagauaacuugcgucugccgcgacaacuggcacgggagcaauagaccauggguuucauucaaccagaaucucgaauaucagaucggauacauuuguaguggcaucuuuggcgauaacccgaggcccaaugacaaaaccggguccugcggaccugugagcucuaacggugcgaauggcguaaagggguucucauauaaguacggaaacggcguguggaucggucggacaaaaaguauuagcucccgcaacggguuugagaugauaugggauccaaauggcuggaccggaacggacaacaauuucucuaucaagcaagacauugucggcaucaacgaauggucgggguauagcggauccuuugugcagcaucccgagcugacuggucuggauuguauucgaccuugcuucuggguugaacucaucagaggcaggccaaaagagaauacaauauggaccucagggaguucuaucagcuucuguggagugaacuccgacacugucggcuggucauggcccgauggugcagaguuaccguuuacaauugacaaguga

SEQ ID NO: 148992 - RNA, 1410 nt, Artificial Sequence; identical to SEQ ID NO: 147061
  derived and/or modified CDS sequence (opt3) from neuraminidase__InfluenzaA__AEL89644

SEQ ID NO: 148993 - RNA, 1410 nt, Artificial Sequence; identical to SEQ ID NO: 148757
  derived and/or modified CDS sequence (opt3) from neuraminidase__InfluenzaA__AEL89654

SEQ ID NO: 148994 - RNA, 1410 nt, Artificial Sequence; identical to SEQ ID NO: 148305
  derived and/or modified CDS sequence (opt3) from neuraminidase__InfluenzaA__AEL89664

SEQ ID NO: 148995 - RNA, 1410 nt, Artificial Sequence; identical to SEQ ID NO: 148305
  derived and/or modified CDS sequence (opt3) from neuraminidase__InfluenzaA__AEL89674

SEQ ID NO: 148996 - RNA, 1410 nt, Artificial Sequence; identical to SEQ ID NO: 148305
  derived and/or modified CDS sequence (opt3) from neuraminidase__InfluenzaA__AEL89694

SEQ ID NO: 148997 - RNA, 1410 nt, Artificial Sequence
  derived and/or modified CDS sequence (opt3) from neuraminidase__InfluenzaA__AEL89704
augaaccccaaucagaagaucauuaccauaggcagcgugugcaugacaaucgggauggccaaccugauucuccaaaucggaaauauuauccuuauauggaucucccacucuauucagcuggguaaccagaaucagaucgagacuuguaaccaaucagucauuacguacgaaaauaacaccuggguuaaucagacauaugugaacaucaguaauacuaacuucgcugcaggccagagcguaguguccgucaaauuggccggaaauucuucguuaugcccugugucagggugggcgauauacagcaaggacaacaguauuagaaucggcuccaaaggugauguuuuugugauuagggagccauucaucucuuguagcccgcuggaaugccggaccuuuuuccuaacacagggggcucuccugaaugacaagcauuccaacggaaccaucaaagaucgcucacccuaucgaacucuuaugaguuguccuauuggcgaggucccaagccccuacaacucucguuuugaauccguggccuggucagcaagcgccugccacgacggcauaaauuggcugacaaucgggauuaguggaccugauaacggugcuguagcaguuuugaaguauaauggcaucauaaccgacacgauuaagucuuggagaaacaauauccucaggacucaagaguccgagugugccugcgugaacgggagcuguuucaccgucaugacagauggaccaaaugacggccaggcuucguacaaaaucuuucggauugaaaaggguaaaaucgugaagucuguggagaugaacgcccccaauuaucauuacgaagagugcuccuguuacccugauucaagugagauuacuugcgucugccgcgacaacuggcacgggagcaauagaccauggguuuccuucaaccagaaucuggaauaucagauaggauacaucuguucuggcauuuuuggcgauaacccgaggcccaaugacaaaaccgggagcugcggaccugugucaaguaacggugcgaacggcguaaagggguucuccuuuaaguauggaaauggcguguggaucggucggacaaaaagcaucucuucacgcaacggguucgagaugauuugggauccaaauggcuggaccggaacggacaacaauuuuagugucaagcaagacauaaucggcauuaacgaauggagcggguacuccggaucuuucgugcagcaucccgagcugacuggucucgauuguauccgaccuugcuucuggguugaauuaauuagaggcaggccaaaagagaauacaaucuggaccucggggagcuccauaucauuuuguggagugaacagugacacugucggcuggucuuggcccgauggugcagagcugccguucacaaucgacaaguga

SEQ ID NO: 148998 - RNA, 1410 nt, Artificial Sequence; identical to SEQ ID NO: 148997
  derived and/or modified CDS sequence (opt3) from neuraminidase__InfluenzaA__AEL89714

SEQ ID NO: 148999 - RNA, 1410 nt, Artificial Sequence; identical to SEQ ID NO: 148305
  derived and/or modified CDS sequence (opt3) from neuraminidase__InfluenzaA__AEL89744

SEQ ID NO: 149000 - RNA, 1410 nt, Artificial Sequence
  derived and/or modified CDS sequence (opt3) from neuraminidase__InfluenzaA__AEL89754
augaaccccaaucagaagaucauuaccauaggcagcgugugcaucacaauugggauggccaaccugauccuccaaauuggaaauaucauauccaucuggauuucucacucaauccagcuugguaaccagaaucagauugagacuuguaaccaaagugucaucacguacgaaaauaacaccuggguuaaucagacauaugugaacauaagcaauacuaacuucgcugcaggccaguccguagugucugucaaacuggccggaaauucgucauugugcccugugagcgggugggcgauuuacaguaaggacaacuccaucagaauuggcucuaaaggugauguuuuugugaucagggagccauucaucagcuguuccccguuagaaugccggaccuuuuuccugacacagggggcucuacucaaugacaagcauucaaacggaaccauuaaagaucgcagucccuaucgaacucugaugagcuguccuauaggcgaggucccaucucccuacaacucccguuuugaaucaguggccuggagcgcaagugccugccacgacggcaucucuuggcuuacaauugggaucuccggaccugauaauggugcuguagcaguucugaaguauaacggcauaauuaccgacacgaucaagagcuggagaaauaacaucuugaggacucaagagucggagugugccugcgugaaugggucuuguuucaccgucaugacagauggaccauccgacggccaggcuucauacaaaauuuuucggaucgaaaaggguaaaauugugaagaguguggagaugaacgcccccaauuaucauuacgaagagugcagcuguuacccugauuccucugagauaacuugcgucugccgcgacaacuggcacgggagcaauagaccauggguuucauucaaccagaaucucgaauaucagaucggauacauuuguaguggcaucuuuggcgauaacccgaggcccaaugacaaaaccggguccugcggaccugugagcucuaacggugcgaauggcguaaagggguucucauuuaaguauggaaacggcguguggaucggucggacaaaaaguauuagcucccgcaacggguucgagaugauaugggauccaaauggcuggaccggaacggacaacaauuuuucuaucaagcaagacauugucggcaucaacgaauggucgggguacagcggauccuucgugcagcaucccgagcugacuggucuggauuguauucgaccuugcuucuggguugaacucaucagaggcaggccaaaagagaauacaauauggaccucagggaguucuaucagcuuuuguggagugaacuccgacacugucggcuggucauggcccgauggugcagaguuaccguucauuaucgacaaguga

SEQ ID NO: 149001 - RNA, 1410 nt, Artificial Sequence; identical to SEQ ID NO: 147061
  derived and/or modified CDS sequence (opt3) from neuraminidase__InfluenzaA__AEL89774

SEQ ID NO: 149002 - RNA, 1410 nt, Artificial Sequence
  derived and/or modified CDS sequence (opt3) from neuraminidase__InfluenzaA__AEL89784
augaaccccaaucagaagaucauuaccauaggcagcgugugcaugacaaucgggauggccaaccugauucuccaaaucggaaauauuaucuccauauggaucucucacucaauucagcuugguaaccagaaucagaucgagacuuguaaccaaagugucauuacguacgaaaauaacaccuggguuaaucagacauaugugaacaucagcaauacuaacuucgcugcaggccaguccguagugucugucaaacuggccggaaauucgucauugugcccugugagcgggugggcgauauacaguaaggacaacuccauuagaaucggcucuaaaggugauguuuuugugauuagggagccauucaucagcuguuccccguuagaaugccggaccuuuuuccugacacagggggcucuacucaaugacaagcauucaaacggaaccaucaaagaucgcagucccuaucgaacucugaugagcuguccuauuggcgaggucccaucucccuacaacucccguuuugaaucaguggccuggagcgcaagugccugccacgacggcauaaauuggcuuacaaucgggauuucuggaccugauaacggugcuguagcaguucugaaguauaauggcaucauaaccgacacgauuaaguccuggagaaacaauaucuugaggacucaagagagcgagugugccugcgugaacgggucguguuucaccgucaugacagauggaccaucugacggccaggcuuccuacaaaaucuuucggauugaaaaggguaaaaucgugaagucaguggagaugaaugcccccaacuaucauuacgaagagugcaguuguuacccugauagcuccgagauuacuugcgucugccgcgacaauuggcacgggucuaacagaccauggguuagcuucaaucagaaccucgaauaucagauaggauacaucuguucaggcauuuuuggcgauaauccgaggcccaacgacaaaaccgggaguugcggaccuguguccagcaauggugcgaacggcguaaagggguucucuuuuaaguauggaaacggcguguggaucggucggacaaaaucaaucagucugcgcaauggguucgagaugauuugggauccaaacggcuggaccggaacggacaauaacuuuagcgucaagcaagacauaaucggcauuaaugaaugguccggguacucuggaucguucgugcagcaucccgagcugacuggucucgauuguauccgaccuugcuucuggguugaauuaauuagaggcaggccaaaagagaacacaaucuggaccagcggguccucaauaaguuuuuguggagucaauucugacacugugggcuggagcuggcccgauggugcagagcugccguucacaaucgacaaguga

SEQ ID NO: 149003 - RNA, 1410 nt, Artificial Sequence
  derived and/or modified CDS sequence (opt3) from neuraminidase__InfluenzaA__AEL89794
augaaccccaaucagaagaucauuaccauaggcagcgugugcaugacaaucgggauggccaaccugauucuccaaaucggaaauauuaucuccauauggaucucucacucaauucagcuugguaaccagagucagaucgagacuuguaaucaaagcgucauuacguacgaaaacaauaccuggguuaaccagacauaugugaauaucuccaacacuaauuucgcugcaggccagucuguagugucggucaaacuggccgggaacagcucauugugcccugugaguggaugggcgauauacuccaaggacaauucuauuagaaucggcagcaaaggugauguuuuugugauuagggagccauucaucuccuguucaccguuagaaugccggaccuuuuuccugacacagggggcucuacucaacgacaagcauaguaauggaaccaucaaagaucgcagccccuaucgaacucugaugucuuguccuauuggcgaggucccaucccccuacaacucacguuuugaaagcguggccuggagugcaucugccugccacgacggcauaaacuggcuuacaaucgggauuuccggaccugauaauggugcuguagcaguucugaaguauaacggcaucauaaccgacacgauuaagagcuggagaaauaacaucuugaggacucaagagucggagugugccugcgugaaugggucuuguuucaccaucaugacagauggaccauccgacggccaggcuucauacaaaauuuuucggaucgaaaaggguaaaauugucaagaguguggagaugaacgcccccaauuaucauuacgaagagugcagcuguuacccugauuccucugagauaacuugcgugugccgcgacaacuggcacgggagcaauagaccaugggucucauucaaccagaaucucgaauaucagaucggauacauuuguaguggcaucuuuggcgauaacccgaggcccaaugacaaaaccggguccugcggaccuguuagcucuaacggugcgaauggcgugaagggguucucauuuaaguauggaaacggcguauggaucggucggacaaaaaguauuagcucccgcaagggguucgagaugauaugggauccaaacggcuggaccggaacggacaauaacuuuucuaucaaacaagacauugugggcaucaaugaauggucgggguacagcggauccuucguccagcaucccgagcugacuggucuggauuguauucgaccuugcuucuggguggaacucaucagaggcaggccaaaggagaacacaauauggaccucagggaguucuaucagcuuuuguggaguuaauuccgacgcagugggcuggucauggcccgauggugccgaguuaccguucacuauugacaaauga

SEQ ID NO: 149004 - RNA, 1410 nt, Artificial Sequence; identical to SEQ ID NO: 148757
  derived and/or modified CDS sequence (opt3) from neuraminidase__InfluenzaA__AEL89804

SEQ ID NO: 149005 - RNA, 1410 nt, Artificial Sequence
  derived and/or modified CDS sequence (opt3) from neuraminidase__InfluenzaA__AEL89815
augaaccccaaucagaagaucauuaccauaggcagcgugugcaugacaaucgggauggccaaccugauucuccaaaucggaaauauuaucuccauauggaucucucacucaauucagcuugguaaccagaaucagaucgagacuuguaaccaaagugucauuacguacgaaaauaacaccuggguuaaucagacauaugugaacaucagcaauacuaacuucgcugcaggccaguccguagugucugucaaacuggccggaaauucgucauugugcccugugagcggaugggcgauauacaguaaggacaacuccauuagaaucggcucuaaaggugauguuuuugugauuagggagccauucaucagcuguuccccguuagaaugccggaccuuuuuccugacacagggggcucuacucaaugacaagcauucaaacggaaccaucaaagaucgcagucccuaucgaacucugaugagcuguccuauuggcgaggucccaucucccuacaacucccguuuugaaucaguggccuggagcgcaagugccugccacgacggcauaaauuggcuuacaaucgggauuucuggaccugauaacggugcuguagcaguucugaaguauaauggcaucauaaccgacacgauuaaguccuggagaaacaauaucuugaggacucaagagagcgagugugccugcgugaacgggucguguuucaccgucaugacagauggaccaucugacggccaggcuuccuacaaaaucuuucggauugaaaaggguaaaaucgugaagucaguggagaugaaugcccccaacuaucauuacgaagagugcaguuguuacccugauagcuccgagauuacuugcgucugccgcgacaauuggcacgggucuaacagaccauggguuagcuucaaucagaaccucgaauaucagauaggauacaucuguucaggcauuuuuggcgauaauccgaggcccaacgacaaaaccgggaguugcggaccuguguccagcaauggugcgaacggcguaaagggguucucuuuuaaguauggaaacggcguguggaucggucggacaaaaucaaucaguagccgcaauggguucgagaugauuugggauccaaacggcuggaccggaacggacaauaacuuuuccgucaagcaagacauaaucggcauuaaugaauggucuggguacucggggagcuucgugcagcaucccgagcugacuggucuggauuguauccgaccuugcuucuggguugaacucauuagaggcaggccaaaagagaacacaaucuggaccuccgggucaaguauaucuuuuuguggagugaauagcgacacugucggcugguccuggcccgauggugcagaguuaccguucacaaucgacaaguga

SEQ ID NO: 149006 - RNA, 1410 nt, Artificial Sequence
  derived and/or modified CDS sequence (opt3) from neuraminidase__InfluenzaA__AEL89825
augaaccccaaucagaagaucauuaccauaggcagcgugugcaugacaaucgggauggccaaccugauucuccaaaucggaaauauuaucuccauauggaucucucacucaauucagcuugguaaccagaaucagaucgagacuuguaaccaaagugucauuacguacgaaaauaacaccuggguuaaucagacauaugugaacaucagcaauacuaacuucgcugcaggccaguccguagugucugucaaacuggccggaaauucgucauugugcccugugagcgggugggcgauauacaguaaggacaacuccauuagaaucggcucuaaaggugauguuuuugugauuagggagccauucaucagcuguuccccguuagaaugccggaccuuuuuccugacacagggggcucuacucaaugacaagcauucaaacggaaccaucaaagaucgcagucccuaucgaacucugaugagcuguccuauuggcgaggucccaucucccuacaacucccguuuugaaucaguggccuggagcgcaagugccugccacgacggcauaaauuggcuuacaaucgggauuucuggaccugauaacggugcuguagcaguucugaaguauaauggcaucauaaccgacacgauuaaguccuggagaaacaauaucuugaggacucaagagagcgagugugccugcgugaacgggucguguuucaccgucaugacagauggaccaucugacggccaggcuuccuacaaaaucuuucggauugaaaaggguaaaaucgugaagucaguggagaugaaugcccccaacuaucauuacgaagagugcaguuguuacccugauagcuccgagauuacuugcgucugccgcgacaauuggcacggggcgaacagaccauggguuucuuucaaucagaaccucgaauaucagauaggauacaucuguagcggcauuuuuggcgauaauccgaggcccaacgacaaaaccgggucaugcggaccugugaguuccaauggugcaaacggcguaaagggguucagcuuuaaguauggaaacggcguguggaucggucggacaaaaucuaucucaagucgcaauggguucgagaugauuugggauccaaacggcuggaccggaacggacaauaacuuuagcauaaagcaagacaucgucggcauuaaugaaugguccggguacucuggaucguucgugcagcaucccgagcugacuggucuggauuguauccgaccuugcuucuggguugaacucauuagaggcaggccaaaagagaacacaaucuggaccagcggguccucaauaaguuuuuguggagucaauucugacacugugggcuggagcuggcccgauggugccgaguuaccguucacaaucgacaaguga

SEQ ID NO: 149007 - RNA, 1410 nt, Artificial Sequence
  derived and/or modified CDS sequence (opt3) from neuraminidase__InfluenzaA__AEL89835
augaaccccaaucagaagaucauuaccauaggcagcgugugcaugacaaucgggauggccaaccugauucuccaaaucggaaauauuaucuccauauggaucucucacucaauucagcuugguaaccagagucagaucgagacuuguaaucaaagcgucauuacguacgaaaacaauaccuggguuaaccagacauaugugaauaucuccaacacuaauuucgcugcaggccagucuguagugucggucaaacuggccgggaacucauccuugugcccugugaguggaugggcgauauacuccaaggacaauucuauuagaaucggcagcaaaggugauguuuuugugauuagggagccauucaucuccuguucaccguuagaaugccggaccuuuuuccugacacagggggcucuacucaacgacaagcauaguaauggaaccaucaaagaucgcagccccuaucgaacucugaugucuuguccuauuggcgaggucccaucccccuacaacucacguuuugaaagcguggccuggagugcaucugccugccacgacggcauaaacuggcuuacaaucgggauuuccggaccugauaauggugcuguagcaguucugaaguauaacggcaucauaaccgacacgauuaagagcuggagaaauaacaucuugaggacucaagagucggagugugugugcgucaaugggucuuguuucaccaucaugacagauggaccauccgacggccaggccucauacaaaauuuuucggaucgaaaaggguaaaauugugaagaguguggagaugaacgcucccaauuaucauuacgaagagugcagcuguuacccugauuccucugagauaacuugcgucugccgcgacaacuggcacgggagcaauagaccauggguuucauucaaccagaaucucgaauaucagaucggauacauuuguaguggcaucuuuggcgauaacccgaggcccaaugacaaaaccggguccugcggaccugugagcucuaacggugccaauggcguaaagggguucucauuuaaguauggaaacggcguguggaucggucggacaaaaaguauuagcucccgcaagggguucgagaugauaugggauccaaacggcuggaccggaacggacaauaacuuuucuaucaaacaagacauugucggcaucaaugaauggucgggguacagcggauccuucgugcagcaucccgagcugacuggucuggauuguauucgaccuugcuucuggguugaacucaucagaggcaggccaaaggagaacacaauauggaccucagggaguucuaucagcuuuuguggagugaauagcgacacugucggcuggucauggcccgauggugcggaguuaccguucacaauugacaaauga

SEQ ID NO: 149008 - RNA, 1410 nt, Artificial Sequence
  derived and/or modified CDS sequence (opt3) from neuraminidase__InfluenzaA__AEL89845
augaaccccaaucagaagaucauuaccauaggcagcgugugcaugacaaucgggauggccaaccugauucuccaaaucggaaauauuaucuccauauggaucucucacucaauucagcuugguaacaaaaaucagaucgagacuuguaaccagagugucauuacguacgaaaauaacaccuggguuaaucaaacauaugugaacaucagcaauacuaacuucgcuaccggccaguccguagugucugucaagcuggcaggaaauucgucauugugcccugugagcggaugggccauauacaguaaagacaacuccauuagaaucggcucuaagggugauguuuuugugauuagggagccauucaucagcuguuccccguuagaaugccggacauuuuuccugacccagggggcgcuacucaaugacaaacauucaaacggaacuaucaaggaucgcagucccuaucgaacacugaugagcuguccuauuggcgaggcuccaucucccuacaacucccguuuugaaucagucgccuggagcgcaagugccugccacgacggcauaaauuggcuuaccaucgggauuucuggaccugauaacggugcuguggcaguacugaaguauaauggcaucauaacggacacuauuaaauccuggagaaacaauaucuugaggacccaggagagcgagugugccugcguuaacgggucguguuucacagugaugacugauggaccaucugacggccaggcuuccuacaagaucuuucggauugaaaaagguaagaucgucaaaucaguggagaugaaugcccccaacuaucauuacgaagagugcaguuguuacccugauagcuccgagauuaccugcgugugccgcgacaauuggcacgggucuaacagaccaugggucagcuucaaucaaaaccucgaauaucagauaggauacaucuguucaggcauuuuuggcgauaauccgaggcccaacgacaagaaggggaguugcggaccuguuuccagcaauggugcgaacggcgugaaaggguucucuuuuaaguauggaaacggcguauggaucggucggacaaaaucaaucaguagccgcaauggguucgagaugauuugggauccaaacggcuggaccggaacggacaauaacuuuuccauaaagcaggacaucgugggcauuaaugaauggucuggguacucggggagcuucguccaacaucccgagcugacuggucuggauuguauccgaccuugcuucuggguggaacucauuagaggcaggccaaaagagaacacaaucuggaccuccgggucaaguauaucuuuuuguggaguuaauagcgacacugugggcugguccuggcccgauggugcagaguuaccguucacaaucgacaaguga

SEQ ID NO: 149009 - RNA, 1410 nt, Artificial Sequence; identical to SEQ ID NO: 149006
  derived and/or modified CDS sequence (opt3) from neuraminidase__InfluenzaA__AEL89855

SEQ ID NO: 149010 - RNA, 1410 nt, Artificial Sequence; identical to SEQ ID NO: 148305
  derived and/or modified CDS sequence (opt3) from neuraminidase__InfluenzaA__AEL93581

SEQ ID NO: 149011 - RNA, 1410 nt, Artificial Sequence
  derived and/or modified CDS sequence (opt3) from neuraminidase__InfluenzaA__AEL93591
augaaccccaaucagaagaucauuaccauaggcagcgugugcaugacaaucgggauggccaaccugauucuccaaaucggaaauauuaucuccauauggaucucucacucaauucagcuugguaaccagaaucagaucgagacuuguaaccaaagugucauuacguacgaaaauaacaccuggguuaaucagacauaugugaacaucagcaauacuaacuucgcugcaggccaguccguagugucugucaaucuggccgggaacucgucauugugcccugugagcggaugggcgauauacaguaaagacaauuccauuagaaucggcucuaagggugauguuuuugugauuagggagccauucaucagcuguuccccguuagaaugccggaccuuuuuccugacacagggggcucuacucaacgacaaacauucaaacggaaccaucaaggaucgcagucccuaucgaacucugaugagcuguccuauuggcgaggucccaucucccuacaauucccguuuugaaucaguggccuggagcgcaagugccugccacgacggcauaaacuggcuuacaaucgggauuucuggaccugauaauggugcuguagcaguucugaaauauaacggcaucauaaccgacacgauuaaguccuggagaaauaacaucuugaggacucaagagagcgagugugccugcgugaaugggucguguuucaccaucaugacagauggaccaucugacggccaggcuuccuacaagauuuuucggaucgaaaaagguaagauugucaaaucaguggagaugaacgcccccaauuaucauuacgaagagugcaguuguuacccugauagcuccgagauaacuugcgugugccgcgacaacuggcacgggucuaauagaccaugggucagcuucaaccagaaucucgaauaucagaucggauacauuuguucaggcaucuuuggcgauaacccgaggcccaaugacaagaccgggaguugcggaccuguuuccagcaacggugcgaacggcgugaaaggguucucuuuuaaguauggaaauggcguauggaucggucggacaaagucaauuaguagccgcaaaggguucgagaugauaugggauccaaacggcuggaccggaacggacaauaacuuuuccaucaagcaagacauugugggcaucaaugaauggucuggguacucggguagcuucguccagcaucccgagcugacuggacuggauuguauucgaccuugcuucuggguggaacucaucagaggcaggccaaaagagaacacaauauggaccuccgggucaaguaucucuuuuuguggaguuaauagcgacacugugggcugguccuggcccgauggugcagaguuaccguucacaauugacaaguga

SEQ ID NO: 149012 - RNA, 1410 nt, Artificial Sequence; identical to SEQ ID NO: 148757
  derived and/or modified CDS sequence (opt3) from neuraminidase__InfluenzaA__AEL93601

SEQ ID NO: 149013 - RNA, 1410 nt, Artificial Sequence; identical to SEQ ID NO: 148305
  derived and/or modified CDS sequence (opt3) from neuraminidase__InfluenzaA__AEL93611

SEQ ID NO: 149014 - RNA, 1410 nt, Artificial Sequence; identical to SEQ ID NO: 148305
  derived and/or modified CDS sequence (opt3) from neuraminidase__InfluenzaA__AEL93621

SEQ ID NO: 149015 - RNA, 1410 nt, Artificial Sequence; identical to SEQ ID NO: 148305
  derived and/or modified CDS sequence (opt3) from neuraminidase__InfluenzaA__AEL93631

SEQ ID NO: 149016 - RNA, 1410 nt, Artificial Sequence
  derived and/or modified CDS sequence (opt3) from neuraminidase__InfluenzaA__AEL93641
augaaccccaaucagaagaucauuaccauaggcagcgugugcaucacaauugggauggccaaccugauccuccaaauuggaaauaucauauccaucuggauuucucacucaauccagcuugguaaccagaaucagauugagacuuguaaccaaagugucaucacguacgaaaauaacaccuggguuaaucagacauaugugaacauaagcaauacuaacuucgcugcaggccaguccguagugucugucaaacuggccggaaauucgucauugugcccugugagcgggugggcgauuuacaguaaggacaacuccaucagaauuggcucuaaaggugauguuuuugugaucagggagccauucaucagcuguuccccguuagaaugccggaccuuuuuccugacacagggggcucuacucaaugacaagcauucaaacggaaccauuaaagaucgcagucccuaucgaacucugaugagcuguccuauaggcgaggucccaucucccuacaacucccguuuugaaucaguggccuggagcgcaagugccugccacgacggcaucucuuggcuuacaauugggaucuccggaccugauaauggugcuguagcaguucugaaguauaacggcauaauuaccgacacgaucaagagcuggagaaauaacaucuugaggacucaagagucggagugugccugcgugaaugggucuuguuucaccgucaugacagauggaccauccgacggccaggcuucauacaaaauuuuucggaucgaaaaggguaaaauugugaagaguguggagaugaacgcccccaauuaucauuacgaagagugcagcuguuacccugauuccucugagauaacuugcgucugccgcgacaacuggcacgggagcaauagaccauggguuucauucaaccauaaucucgaauaucagaucggauacauuuguaguggcaucuuuggcgauaacccgaggcccaaugacaaaaccggguccugcggaccugugagcucuaacggugcgaauggcguaaagggguucucauuuaaguauggaaacggcguguggaucggucggacaaaaaguauuagcucccgcaacggguucgagaugauaugggauccaaauggcuggaccggaacggacaacaauuuuucuaucaagcaggacauugucggcaucaacgaauggucgggguacagcggauccuucgugcaacaccccgagcugacuggucuggauuguauucgaccuugcuucuggguugaacucaucagaggccagccaaaagagaauacaauauggaccucagggaguucuaucagcuuuuguggagugaacuccgacacugucggcuggucauggcccgauggugcagaguuaccguucacaauugacaaguga

SEQ ID NO: 149017 - RNA, 1410 nt, Artificial Sequence; identical to SEQ ID NO: 148856
  derived and/or modified CDS sequence (opt3) from neuraminidase__InfluenzaA__AEL94890

SEQ ID NO: 149018 - RNA, 1410 nt, Artificial Sequence
  derived and/or modified CDS sequence (opt3) from neuraminidase__InfluenzaA__AEL95429
augaaccccaaucagaagaucauuaccauaggcagcgugugcaugacaaucgggauggccaaccugauucuccaaaucggaaauauuaucuccauauggaucucucacucaauucagcuugguaaccagagucagaucgagacuuguaaucaaagcgucauuacguacgaaaacaauaccuggguuaaccagacauaugugaauaucuccaacacuaauuucgcugcaggccagucuguagugucggucaaacuggccgggaacagcucauugugcccugugaguggaugggcgauauacuccaaggacaauucuauuagaaucggcagcaaaggugauguuuuugugauuagggagccauucaucuccuguucaccguuagaaugccggaccuuuuuccugacacagggggcucuacucaacgacaagcauaguaauggaaccaucaaagaucgcagcccccaccgaacucugaugucuuguccuauuggcgaggucccaucccccuauaacucacguuuugaaagcguggccuggagugcaucugccugccaugacggcauaaacuggcuuacaaucgggauuuccggaccugauaauggugcuguagcaguucugaaguacaacggcaucauaaccgacacgauuaagagcuggagaaauaacaucuugaggacucaagagucggagugugccugcgugaaugggucuuguuucaccaucaugacagauggaccauccgacggccaggcuucauauaaaauuuuucggaucgaaaaggguaaaauugucaagaguguggagaugaacgcccccaauuaccacuaugaagagugcagcuguuacccugauuccucugagauaacuugcgugugccgcgacaacuggcaugggagcaauagaccaugggucucauucaaccagaaucucgaauaccagaucggauauauuuguaguggcaucuuuggcgauaacccgaggcccaaugacaaaaccggguccugcggaccuguuagcucuaacggugcgaauggcgugaagggguucucauuuaaguacggaaacggcguauggaucggucggacaaaaaguauuagcucccgcaagggguucgagaugauaugggauccaaacggcuggaccggaacggacaauaacuuuucuaucaaacaagacauugugggcaucaaugaauggucgggguauagcggauccuucguccagcaccccgagcugacuggucuggauuguauucgaccuugcuucuggguggaacucaucagaggcaggccaaaggagaacacaauauggaccucagggaguucuaucagcuuuuguggaguuaauuccgacacugugggcuggucauggcccgauggugcagaguuaccguucacaauugacaaauga

SEQ ID NO: 149019 - RNA, 1410 nt, Artificial Sequence
  derived and/or modified CDS sequence (opt3) from neuraminidase__InfluenzaA__AEL97634
augaaccccaaucagaagaucauuaccauaggcagcgugugcaugacaaucgggauggccaaccugauucuccaaaucggaaauauuaucuccauaugggucucucacucaauccagcuugguaaccagaaucagauugagacuuguaaccaaaguguuaucacguacgaaaauaacaccugggugaaucagacauauguaaacauuagcaauacuaacuucgcugcaggccaguccguggucucugugaaacuggccggaaauucgucauugugcccuguuagcggaugggcgaucuacaguaaggacaacuccauaagaauuggcucuaaaggugauguguuugucaucagggagccauucauuagcuguuccccguuagaaugccggaccuuuuuccugacacagggggcucuacucaaugacaagcauucaaacggaaccaucaaagaucgcagucccuaucgaacucugaugagcuguccuaucggcgaggugccaucucccuacaacucccguuuugaaucaguagccuggagcgcaagugccugccacgacggcauuaauuggcuuacaauagggaucucuggaccugauaacggugcuguugcagugcugaaguauaauggcauuaucaccgacacgauaaaguccuggagaaacaauauuuugaggacucaagagagcgagugugccugcgucaacgggucguguuucaccgugaugacagauggaccaucugacggccaggcuuccuacaaaaucuuucggaucgaaaaggguaaaauugugaagucagucgagaugaaugcccccaacuaucauuacgaagagugcaguuguuacccugauagcuccgagaucacuugcguuugccgcgacaauuggcacgggucuaacagaccaugggugagcuucaaucagaaccucgaauaucagauuggauacauauguucaggcaucuuuggcgauaauccgaggcccaacgacaaaaccgggaguugcggaccuguauccagcaauggugcgaacggcgugaagggguucucuuuuaaguauggaaacggcgucuggauuggucggacaaaaucaaucaguagccgcaauggguucgagaugaucugggauccaaacggcuggaccggaacggacaauaacuuuuccauuaagcaagacauagugggcguuaaugaauggucuggguacucggggagcuucgugcagcaucccgagcugacuggucuggauuguauccgaccuugcuucugggucgaacucauuagaggcaggccaaaagagaacacaaucuggaccuccgggucaaguauuucuuuuuguggagugaauagcgacacuguaggcugguccuggcccgauggugcagaguuaccguucacaaucgacaaguga

SEQ ID NO: 149020 - RNA, 1410 nt, Artificial Sequence; identical to SEQ ID NO: 144786
  derived and/or modified CDS sequence (opt3) from neuraminidase__InfluenzaA__AEL99667

SEQ ID NO: 149021 - RNA, 1410 nt, Artificial Sequence; identical to SEQ ID NO: 144786
  derived and/or modified CDS sequence (opt3) from neuraminidase__InfluenzaA__AEL99677

SEQ ID NO: 149022 - RNA, 1410 nt, Artificial Sequence; identical to SEQ ID NO: 143824
  derived and/or modified CDS sequence (opt3) from neuraminidase__InfluenzaA__AEM53471

SEQ ID NO: 149023 - RNA, 1413 nt, Artificial Sequence; identical to SEQ ID NO: 144501
  derived and/or modified CDS sequence (opt3) from neuraminidase__InfluenzaA__AEM60040

SEQ ID NO: 149024 - RNA, 1413 nt, Artificial Sequence; identical to SEQ ID NO: 144091
  derived and/or modified CDS sequence (opt3) from neuraminidase__InfluenzaA__AEM60061

SEQ ID NO: 149025 - RNA, 1410 nt, Artificial Sequence
  derived and/or modified CDS sequence (opt3) from neuraminidase__InfluenzaA__AEM60072
augaaccccaaucagaagaucauuaccauaggcagcgugucccugacaaucgccacuauuugcuuccucaugcaaaucgcuauucuugucacgaccguuacacugcacuuuaaacaguacgaguguucuucaccuccaaacaaucaggugaugccgugcgaacccacuaucauagagagaaacaucaccgaaauuguauauuugacaaauaccacuaucgagaaggaaauuuguccuaaauuaguggaguacaggaacuggaguaagccacagugcaaaaucacaggguucgcacccuuuagcaaggacaauuccauacggcugucugccggaggugauauuugggucacccgcgagccuuaugugucgugugacccaggcaagugcuaccaauucgcgcuagggcagggaacgacucucaacaaucgacauucaaacgauaccguucacgaccguacacccuauagaacucugcuuaugaaugaacugggcgugccuuuucauuuggguaccaaacaggucuguaucgcuuggagcaguuccucuugccacgaugggaaggccuggcuccauguguguguaacaggacacgacgagaacgcaaccgccagcuucauuuacgauggcaggcugguugacuccaucggcucauggaguaaaaauauccugcggacgcaggaaagcgagugcguguguauuaacgggacuugcacagucgugaugaccgauggaucugcuuccgagcgcgcagacacuaagauacucuuuaucgaagaggguaaaauugugcacaucucaccauuaagcggcagugcccaacaugucgaagagugcucuuguuauccgagauaccccgggguuaggugcgugugucgggauaauuggaagggauccaaccgcccuauaguagacauuaacgugaaggauuacagcaucgucucgucuuaugugugcuccggccugguuggugacacaccacgaaagaaugacagaucaaguagcuccuacuguaggaaccccaauaacgaaaaagggucucacggagugaaaggcugggcuuucgaugacggcaaugaugucuggauggggcggaccaucggagaggagcuucguagcgguuaugaaacguuuaaggugauuggcggguggucaaccccuaacaguaaauugcagaucaaucgccagguaauuguugacuccggaaacagaagcggcuacucugguauauucucaguggaggggaagaguugcaucaauagguguuuuuaugucgaacugauucggggccgagagcaggaaacacgcgugugguggacuagcaacuccaucgucguguucugcggaaccucuggcacauacgggacuggaucguggccagauggugccgacaucaaucuaaugcccauuuga

SEQ ID NO: 149026 - RNA, 1410 nt, Artificial Sequence; identical to SEQ ID NO: 144786
  derived and/or modified CDS sequence (opt3) from neuraminidase__InfluenzaA__AEM62774

SEQ ID NO: 149027 - RNA, 1410 nt, Artificial Sequence; identical to SEQ ID NO: 144786
  derived and/or modified CDS sequence (opt3) from neuraminidase__InfluenzaA__AEM62783

SEQ ID NO: 149028 - RNA, 1410 nt, Artificial Sequence
  derived and/or modified CDS sequence (opt3) from neuraminidase__InfluenzaA__AEM62792
augaaccccaaucagaagaucauuaccauaggcagcgugugcaugacaaucgggauggccaaccugauucuccaaaucggaaauauuaucuccauauggaucucucacucaauucagcuugguagucagaaccagaucgagacuuguaaucaaagcgucauuacguacgaaaacaauaccuggguuaaccagacauaugugaauaucuccaacacuaauuucgcugcaggccagucuguaauaucggugagacuggccgggaacagcucauugugcccugucaguggaugggcgauuuacuccaaagacaauucuaucaggauuggcagcaagggugauguguuuguuauccgggagccauucaucuccuguucaccguuagaaugccgcaccuuuuuccugacacagggggcucuacucaacgacaaacauaguaauggaaccauuaaggaucgaagccccuaucguacucugaugucuuguccuauaggcgaggugccaucccccuacaacucaagauuugaaagcgucgccuggagugcaucugccugccacgacggcaucaacuggcuuacaauugggaucuccggaccugauaauggugcuguggcaguacugaaauauaacggcauaauuaccgacacgaucaagagcuggaggaauaacaucuugcggacucaagagucggagugugccugcguuaaugggucuuguuucaccgugaugacagauggaccauccgacggccaggcuucauacaagauuuuucgcaucgaaaaagguaagauugucaaaaguguggagaugaacgcccccaauuaucauuacgaagagugcagcuguuacccugauuccucugagauaacuugcgugugcagagacaacuggcacgggagcaauaggccaugggucucauucaaccagaaucucgaauaucagaucggauacauuuguaguggcaucuuuggcgauaacccgcggcccaaugacaagaccggguccugcggaccuguuagcucuaacggugcgaauggcgugaaaggguucucauuuaaguauggaaacggcguauggaucggucgcacaaagaguauuagcucccgaaacggguucgagaugauaugggauccaaauggcuggaccggaacggacaacaauuuuucuaucaaacaagacauuaucggcauuaacgaauggucgggguacagcggauccuucgugcagcaucccgagcugacuggucuggauuguaucagaccuugcuucugggucgaacucauaaggggccggccaaaggagaauacaaucuggaccucagggaguucuauuagcuuuuguggagugaacuccgacacuguuggcuggucauggcccgauggugcagaguuaccguucacaaucgacaaauga

SEQ ID NO: 149029 - RNA, 1410 nt, Artificial Sequence; identical to SEQ ID NO: 144786
  derived and/or modified CDS sequence (opt3) from neuraminidase__InfluenzaA__AEM62801

SEQ ID NO: 149030 - RNA, 1410 nt, Artificial Sequence
  derived and/or modified CDS sequence (opt3) from neuraminidase__InfluenzaA__AEM62810
augaaccccaaucagaagaucauuaccauaggcagcgugugcaugacaaucgggaugggaaaccugauucuccaaaucgguaauauuaucuccauauggaucucucacucaauucagcuuggcaaccagaaucagaucgagacuuguaaccaaagugucauuacguacgaaaauaacaccuggguuaaucagacauaugugaacaucagcaauacuaacuucgccgcugggcaguccguagugucugucaaacuggcaggaaauucgucauugugcccugugagcggcugggccauauacaguaaggacaacuccauuagaaucgguucuaaaggggauguuuuugugauuagggagccauucaucagcuguuccccguuagaaugccggaccuuuuuccugacacagggagcgcuacucaaugacaagcauucaaacggcaccaucaaagaucgcagucccuaucgaacucugaugagcuguccuauuggcgaggucccaucucccuacaacucccguuuugaaucaguggcuuggagcgccagugcaugccacgacgggauaaauuggcuuacaaucggaauuucugguccugauaacggcgccguagcuguucugaaguauaaugggaucauaaccgacacgauuaaguccuggagaaacaauaucuugaggacucaagagagcgagugugcaugcgugaacggaucguguuucaccgucaugacagauggcccaucugacggucaggccuccuacaaaaucuuucggauugaaaaggggaaaaucgugaagucaguggagaugaaugcucccaacuaucauuacgaagagugcaguuguuacccugauagcuccgagauuacuugcgucugccgcgacaauuggcacggaucuaacagaccauggguuagcuucaaucagaaccucgaauaucagauaggcuacaucuguucaggcauuuuuggggauaauccgaggcccaacgacaaaaccggaaguugcgguccuguguccagcaauggcgccaacgggguaaagggauucucuuuuaaguauggcaacgguguguggaucgggcggacaaaaucaaucaguagccgcaauggcuucgagaugauuugggauccaaacggauggaccggcacggacaauaacuuuuccauaaagcaagacaucgucgggauuaaugaauggucuggauacucggguagcuucgugcagcaucccgagcugacuggccuggauuguauccgaccuugcuucuggguugaacucauuagagggaggccaaaagagaacacaaucuggaccuccggaucaaguauaucuuuuuguggcgugaauagcgacacugucgguugguccuggcccgauggggcggaguuaccguucacaaucgacaaguga

SEQ ID NO: 149031 - RNA, 1410 nt, Artificial Sequence
  derived and/or modified CDS sequence (opt3) from neuraminidase__InfluenzaA__AEM62819
augaaccccaaucagaagaucauuaccauaggcagcgugugcaugacaaucgggauggccaaccugauucuccaaaucggaaauauuaucuccauauggaucucucacucaauucagcuugguaaccagaaucagaucgagacuuguaaccaaagugucauuacguacgaaaaugacaccuggguuaaccagacauaugugaauaucagcaacacuaauuucgcugcaggccaguccguagugucugucaaacuggccgggaacucgucauugugcccugugagcggaugggcgauauacaguaaggauaauuccauuagaaucggcucuaaaggugacguuuuugugauuagggagccauucaucagcuguuccccguuagaaugccggaccuuuuuccugacacagggggcucuacucaacgauaagcauucaaauggaaccaucaaagaccgcagucccuaucgaacucugaugagcuguccuauuggcgaggucccaucucccuacaacucccguuuugaaucaguggccuggagcgcaagugccugccacgauggcauaaacuggcuuacaaucgggauuucuggaccugacaauggugcuguagcaguucugaaguauaacggcaucauaaccgauacgauuaaguccuggagaaauaacaucuugaggacucaagagagcgagugugccugcgugaaugggucguguuucaccgucaugacagacggaccaucugauggccaggcuuccuacaaaaucuuucggauugaaaaggguaaaaucgugaagucaguggagaugaacgcccccaauuaucauuacgaagagugcaguuguuacccugacagcuccgagauuacuugcgucugccgcgauaacuggcacgggucuaauagaccauggguuagcuucaaccagaaucucgaauaucagauaggauacaucuguucaggcauuuuuggcgacaacccgaggcccaaugauaaaaccgggaguugcggaccuguguccagcaacggugcgaauggcguaaagggguucucuuuuaaguauggaaacggcguguggaucggucggacaaaaucaaucaguagccgcaacggguucgagaugauuugggacccaaauggcuggaccggaacggacaacaauuuuuccauaaagcaagauaucgucggcauuaacgaauggucuggguacucggguagcuucgugcagcaucccgagcugacuggacuggacuguauccgaccuugcuucuggguugaacucauuagaggcaggccaaaagagaauacaaucuggaccuccgggucaaguauaucuuuuuguggagugaacagcgauacugucggcugguccuggcccgacggugcagaguuaccguucacaaucgauaaguga

SEQ ID NO: 149032 - RNA, 1410 nt, Artificial Sequence; identical to SEQ ID NO: 144786
  derived and/or modified CDS sequence (opt3) from neuraminidase__InfluenzaA__AEM62828

SEQ ID NO: 149033 - RNA, 1410 nt, Artificial Sequence; identical to SEQ ID NO: 145369
  derived and/or modified CDS sequence (opt3) from neuraminidase__InfluenzaA__AEM62837

SEQ ID NO: 149034 - RNA, 1410 nt, Artificial Sequence; identical to SEQ ID NO: 144786
  derived and/or modified CDS sequence (opt3) from neuraminidase__InfluenzaA__AEM62846

SEQ ID NO: 149035 - RNA, 1410 nt, Artificial Sequence
  derived and/or modified CDS sequence (opt3) from neuraminidase__InfluenzaA__AEM62855
augaaccccaaucagaagaucauuaccauaggcagcgugugcaucacaauugggauggccaaccugauccuccaaauuggaaauaucauauccaucuggauuucucacucaauccagcuugguaaccagaaucagauugagacuuguaaccaaagugucaucacguacgaaaauaacaccuggguuaaucagacauaugugaacauaagcaauacuaacuucgcugcaggccaguccguagugucugucaaacuggccggaaauucgucauugugcccugugagcgggugggcgauuuacaguaaggacaacuccguuagaaucggcucuaaaggugauguguuugucauuagggagccauucaucagcuguuccccguuagaaugccggaccuuuuuccugacacagggggcucuacucaaugacaagcauucaaacggaaccaucaaagaucgcagucccuaucgaacucugaugagcuguccuauuggcgaggugccaucucccuacaacucccguuuugaaucaguagccuggagcgcaagugccugccacgacggcauaaauuggcuuacaaucgggauuucuggaccugauaacggugcuguugcagugcugaaguauaauggcaucauaaccgacacgauuaaguccuggagaaacaauaucuugaggacucaagagagcgagugugccugcgucaacgggucguguuucaccgugaugacagauggaccaucuaauggccaggcuuccuacaaaaucuuucggauugaaaaggguaaaaucgugaagucagucgagaugaacgcccccaauuaucauuacgaagagugcaguuguuacccugacagcggggagauuacuugcguuugccgcgauaacuggcacggauccaauagaccaugggugucuuucaaccagaaucucgaauaucagauaggcuacaucuguagcggcauuuuuggggacaacccgaggcccaaugauaaaaccggaucaugcgguccuguaaguuccaacggcgcgaacggggugaagggauucagcuuuaaguauggcaauggugucuggaucgggcggacaaaaucuaucucaagucgcaacggcuucgagaugauuugggacccaaauggauggaccggcacggauaacaauuuuagcauaaagcaagacaucguggggauuaacgaaugguccggauacucugguucguucguucagcaucccgagcugacuggccuggacuguauccgaccuugcuucuggguggaacucauuagagggaggccaaaagagaauacaaucuggaccagcggauccucaauaaguuuuuguggcgucaacucugauacuguggguuggagcuggcccgacggggcagaguuaccguucacaaucgauaaguga

SEQ ID NO: 149036 - RNA, 1410 nt, Artificial Sequence
  derived and/or modified CDS sequence (opt3) from neuraminidase__InfluenzaA__AEM62864
augaaccccaaucagaagaucauuaccauaggcagcgugugcaugacaaucgggauggccaaccugauucuccaaaucggaaauauuaucuccauauggaucucucacucaauucagcuugguaaccagaaucagaucgagacuuguaaccaaagugucauuacguacgaaaauaacaccuggguuaaucagacauaugugaacaucagcaauacuaacuucgcugcaggccaguccguagugucugucaaacuggccggaaauucgucauugugcccugugagcgggugggcgauauacaguaaggacaacuccauuagaaucggcucuaaaggugauguuuuugugauuagggagccauucaucagcuguuccccguuagaaugccggaccuuuuuccugacacagggggcucuacucaaugacaagcauucaaacggaaccaucaaagaucgcagucccuaucgaacucugaugagcuguccuauuggcgaggucccaucucccuacaacucccguuuugaaucaguggccuggagcgcaagugccugccacgacggcauaaauuggcuuacaaucgggauuuucggaccugauaacggugcuguagcaguucugaaguauaauggcaucauaaccgacacgauuaagucuuggagaaacaauaucuugaggacucaagaguccgagugugccugcgugaacgggagcuguuuuaccgucaugacagauggaccaucggacggccaggcuucuuacaaaaucuuccggauugaaaaggguaaaaucgugaaguccguggagaugaaugcccccaacuaucauuacgaagagugcucauguuacccugauaguagcgagauuacuugcgucugccgcgacaauuggcacggguccaacagaccauggguuucuuuuaaucagaaccucgaauaucagauaggauacaucuguagcggcauuuucggcgauaauccgaggcccaacgacaaaaccgggucaugcggaccugugaguuccaauggugcgaacggcguaaagggguuuagcuucaaguauggaaacggcguguggaucggucggacaaaaucuaucucaagucgcaauggguuugagaugauuugggauccaaacggcuggaccggaacggacaauaacuucagcauaaagcaagacaucgucggcauuaaugaaugguccggguacucuggaucguucgugcagcaucccgagcugacuggucuggauuguauccgaccuugcuuuuggguugaacucauuagaggcaggccaaaagagaacacaaucuggaccagcggguccucaauaaguuucuguggagucaauucugacacugugggcuggagcuggcccgauggugcagaguuaccguuuacaaucgacaaguga

SEQ ID NO: 149037 - RNA, 1410 nt, Artificial Sequence
  derived and/or modified CDS sequence (opt3) from neuraminidase__InfluenzaA__AEM62872
augaaccccaaucagaagaucauuaccauaggcagcgugugcaugacaaucgggauggccaaccugauucuccaaaucggaaauauuaucuccauauggaucucucacucaauucagcuugguaaccagaaucagaucgagacuuguaaccaaagugucauuacguacgaaaauaacaccuggguuaaucagacauaugugaacaucagcaauacuaacuucgcugcaggccaguccguagugucugucaaacuggccggaaauucgucauugugcccugugagcgggugggcgauauacaguaaggacaacuccauuagaaucggcucuaaaggugauguuuuugugauuagggagccauucaucagcuguuccccguuagaaugccggaccuuuuuccugacacagggggcucuacucaaugacaagcauucaaacggaaccaucaaagaucgcagucccuaucgaacucugaugagcuguccuauuggcgaggucccaucucccuacaacucccguuuugaaucaguggccuggagcgcaagugccugccacgacggcauaaauuggcuuacaaucgggauuucuggaccugauaacggugcuguagcaguucugaaguauaauggcaucauaaccgacacgauuaaguccuggagaaacaauaucuugaggacucaagagagcgagugugccugcgugaacgggucguguuucaccgucaugacagauggaccaucugacggccaggcuuccuacaaaaucuuucggauugaaaaggguaaaaucgugaagucaguggagaugaaugcccccaacuaucauuacgaagagugcaguuguuacccugauagcuccgagauuacuugcgucugccgcgacaauuggcacgggucuaacagaccauggguuagcuucaaucagaaccucgaauaucagauaggauacaucuguucaggcauuuuuggcgauaauccgaggcccaacgacaaaaccgggaguugcggaccuguguccuucaauggugcgaacggcguaaagggguuuagcuucaaguauggaaacggcguguggaucggucggacaaaaucuaucucaagucgcaauggguuugagaugauuugggauccaaacggcuggaccggaacggacaauaacuucagcauaaagcaagacaucgucggcauuaaugaaugguccggguacucuggaucguucgugcagcaucccgagcugacuggucuggauuguauccgaccuugcuuuuggguugaacucauuagaggcaggccaaaagagaacacaaucuggaccagcggguccucaauaaguuucuguggagucaauucugacacugugggcuggagcuggcccgauggugcagaguuaccguuuacaaucgacaaguga

SEQ ID NO: 149038 - RNA, 1410 nt, Artificial Sequence; identical to SEQ ID NO: 144786
  derived and/or modified CDS sequence (opt3) from neuraminidase__InfluenzaA__AEM92310

SEQ ID NO: 149039 - RNA, 1410 nt, Artificial Sequence; identical to SEQ ID NO: 146248
  derived and/or modified CDS sequence (opt3) from neuraminidase__InfluenzaA__AEM92320

SEQ ID NO: 149040 - RNA, 1410 nt, Artificial Sequence
  derived and/or modified CDS sequence (opt3) from neuraminidase__InfluenzaA__AEM92340
augaaccccaaucagaagaucauuaccauaggcagcgugugcaugacaaucgggauggccaaccugauucuccaaaucggaaauauuaucuccauauggaucucucacucaauucagcuugguaaccagaaucagaucgagacuuguaaccaaagugucauuacguacgaaaauaacaccuggguuaaucagacauaugugaacaucagcaauacuaacuucgcugcaggccaguccguagugucugucaaacuggccggaaauucgucauugugcccugugagcgggugggcgauauacaguaaggacaacuccauuagaaucggcucuaaaggugauguuuuugugauuagggagccauucaucagcuguuccccguuagaaugccggaccuuuuuccugacacagggggcucuacucaaugacaagcauucaaacggaaccaucaaagaucgcagucccuaucgaacucugaugagcuguccuauuggcgaggucccaucucccuacaacucccguuuugaaucaguggccuggagcgcaagugccugccacgacggcauaaauuggcuuacaaucgggauuucuggaccugauaacggugcuguagcaguucugaaguauaauggcaucauaaccgacacgauuaaguccuggagaaacaauaucuugaggacucaagagagcgagugugccugcgugaacgggucguguuucaccaucaugacagauggaccaucugacggccaggcuuccuacaaaauuuuucggaucgaaaaggguaaaauugucaagucaguggagaugaaugcccccaacuaucauuacgaagagugcaguuguuacccugauagcuccgagauaacuugcgugugccgcgacaauuggcacgggucuaacagaccaugggucagcuucaaucagaaccucgaauaucagaucggauacauuuguucaggcaucuuuggcgauaauccgaggcccaacgacaaaaccgggaguugcggaccuguuuccagcaauggugcgaacggcgugaagggguucucuuuuaaguauggaaacggcguauggaucggucggacaaaaucaauuaguagccgcaagggguucgagaugauaugggauccaaauggcuggacccgaacggacaacaauuuuuccaucaaacaagacauugugggaaucaacgaauggucuggcuacucggggagcuucguccagcaucccgagcugacuggacuggauuguauuagaccuugcuucuggguggaacucaucaggggucggccaaaggagaauacaauauggaccuccggcucaaguaucucuuuuugugggguuaacagcgacacugugggaugguccuggcccgauggcgcagaguuaccguucacaauugacaaauga

SEQ ID NO: 149041 - RNA, 1410 nt, Artificial Sequence; identical to SEQ ID NO: 146248
  derived and/or modified CDS sequence (opt3) from neuraminidase__InfluenzaA__AEM92350

SEQ ID NO: 149042 - RNA, 1410 nt, Artificial Sequence
  derived and/or modified CDS sequence (opt3) from neuraminidase__InfluenzaA__AEM92360
augaaccccaaucagaagaucauuaccauaggcagcgugugcaugacaaucgggauggccaaccugauucuccaaaucggaaauauuaucuccauauggaucucucacucaauucagcuugguaaccagaaucagaucgagacuuguaaccaaagugucauuacguacgaaaauaacaccuggguuaaucagacauaugugaacaucagcaauacuaacuucgcugcagagcaguccguagugucugucaaacuggccggcaauucgucauugugcccugugagcgggugggcgauauacaguaaggacaacuccauuagaaucggaucuaaaggcgauguuuuugugauuagggaaccauucaucagcuguuccccguuagagugccggaccuuuuuccugacacagggugcucuacucaaugacaagcauucaaacgggaccaucaaagaucgcagucccuaucgaacucugaugagcuguccuauuggagaagucccaucucccuacaacucccguuuugagucaguggccuggagcgcaagugccugccacgacggcauaaauuggcuuacaaucggcauuucugggccugauaacggagcuguagcaguucugaaguauaaugguaucauaaccgacacgauuaaguccuggagaaacaauaucuugaggacucaagagagcgaaugugccugcgugaacggcucguguuucaccaucaugacagaugggccaucugacggacaggcuuccuacaaaauuuuucggaucgagaagggcaaaauugucaagucaguggaaaugaaugcccccaacuaucauuacgaggagugcaguuguuacccugauagcuccgaaauaacuugcgugugccgcgacaauuggcacgguucuaacagaccaugggucagcuucaaucagaaccucgaguaucagaucggguacauuuguucaggaaucuuuggcgauaauccgaggcccaacgacaaaaccggcaguugcgggccuguuuccagcaauggagcgaacggugugaagggcuucucuuuuaaguaugggaacggaguauggaucggccggacaaaaucaauuaguagccgcaaggguuucgaaaugauaugggauccaaauggguggaccggcacggacaacaauuuuuccaucaaacaagacauugugggaaucaacgaguggucuggcuacucggggagcuucguccagcaucccgaacugacuggacuggauuguauucgaccuugcuucuggguggagcucaucagagguaggccaaaggagaauacaauauggaccuccggcucaaguaucucuuuuugugggguuaacagcgacacugugggaugguccuggcccgauggcgcagaauuaccguucacaauugacaaauga

SEQ ID NO: 149043 - RNA, 1410 nt, Artificial Sequence; identical to SEQ ID NO: 149040
  derived and/or modified CDS sequence (opt3) from neuraminidase__InfluenzaA__AEM92370

SEQ ID NO: 149044 - RNA, 1410 nt, Artificial Sequence; identical to SEQ ID NO: 149040
  derived and/or modified CDS sequence (opt3) from neuraminidase__InfluenzaA__AEM92380

SEQ ID NO: 149045 - RNA, 1410 nt, Artificial Sequence
  derived and/or modified CDS sequence (opt3) from neuraminidase__InfluenzaA__AEM92399
augaaccccaaucagaagaucauuaccauaggcagcgugugcaugacaaucgggauggccaaccugauucuccaaaucggaaauauuaucuccauauggaucucucacucaauucagcuugguaaccagaaucagaucgagacuuguaaccaaagugucauuacguacgaaaauaacaccuggguuaaucagacauaugugaacaucagcaauacuaacuucgcugcaggccaguccguagugucugucaaacuggccggaaauucgucauugugcccugugagcgggugggcgauauacaguaaggacaacuccauuagaaucggcucuaaaggugauguuuuugugauuagggagccauucaucagcuguuccccguuagaaugccggaccuuuuuccugacacagggggcucuacucaaugacaagcauucaaacggaaccaucaaagaucgcagucccuaucgaacucugaugagcuguccuauuggcgaggucccaucucccuacaacucccguuuugaaucaguggccuggagcgcaagugccugccacgacggcacaaauuggcuuaccauagggaucucuggaccugauaacggugcuguagcaguucugaaguauaauggcauuaucacggacacuauaaaguccuggagaaacaauauuuugaggacccaagagagcgagugugccugcgugaacgggucguguuucacagucaugacugauggaccaucugacggccaggcuuccuacaaaaucuuucggaucgaaaaggguaaaauugugaagucaguggagaugaaugcccccaacuaucauuacgaagagugcaguuguuacccugauagcuccgagauuaccugcgucugccgcgacaauuggcacgggucuaacagaccauggguuagcuucaaucagaaccucgaauaucagaucggauacauauguucaggcaucuuuggcgauaauccgaggcccaacgacaaaacagggaguugcggaccugugcuguccaauggugcgaacggcguaaagggguucagcuuuaaguauggaaacggcguguggauuggucggaccaaaucuaucucaagucgcaauggguucgagaugaucugggauccaaacggcuggacgggaacugacaauaacuuuagcauuaagcaagacauagucggcaucaaugaaugguccggguacucuggaucguucgugcagcaucccgagcugacaggucucgauuguauucgaccuugcuucuggguugaauuaaucagaggcaggccaaaagagaacaccauuuggacuagcggguccucaaucaguuuuuguggagucaauucugacacagugggcuggagcuggcccgauggugcagagcugccguucaccauagacaaguga

SEQ ID NO: 149046 - RNA, 1410 nt, Artificial Sequence; identical to SEQ ID NO: 149045
  derived and/or modified CDS sequence (opt3) from neuraminidase__InfluenzaA__AEM92409

SEQ ID NO: 149047 - RNA, 1410 nt, Artificial Sequence; identical to SEQ ID NO: 145210
  derived and/or modified CDS sequence (opt3) from neuraminidase__InfluenzaA__AEM92419

SEQ ID NO: 149048 - RNA, 1410 nt, Artificial Sequence
  derived and/or modified CDS sequence (opt3) from neuraminidase__InfluenzaA__AEM92430
augaaccccaaucagaagaucaugaccauuggcagcgugugcaugacaauagggauggccaaccugauccuccaaauuggaaauaucauuuccaucuggauaucucacucaauccagcuugguaaccagaaucagauugagacuuguaaccaaagugucaucacguacgaaaauaacaccuggguuaaucagacauaugugaacauuagcaauacuaacuucgcugcaggccaguccguagugucugucaaacuggccggaaauucgucauugugcccugugagcggaugggcgaucuacaguaaggacaacuccauaagaauuggcucuaaaggugauguuuuugugaucagggagccauucauuagcuguuccccguuagaaugccggaccuuuuuccugacacagggggcucuacucaaugacaagcauucaaacggaaccaucaaagaucgcagucccuaucgaacucugaugagcuguccuaucggcgaggucccaucucccuacaacucccguuuugaaucaguggccuggagcgcaagugccugccacgacggcauuaauuggcuuacaauagggaucucuggaccugauaacggugcuguagcaguucugaaguauaauggcauuaucaccgacacgauaaaguccuggagaaacaauauuuugaggacucaagagagcgagugugccugcgugaacgggucguguuucaccgucaugacagauggaccaucugacggccaggcuuccuacaaaaucuuucggaucgaaaaggguaaaauugugaagucaguggagaugaaugcccccaacuaucauuacgaagagugcaguuguuacccugauagcuccgagaucacuugcgucugccgcgacaauuggcacgggucuaacagaccauggguuagcuucaaucagaaccucgaauaucagauuggauacauauguucaggcaucuuuggcgauaauccgaggcccaacgacaaaaccgggaguugcggaccuguguccagcaauggugcgaacggcguaaagggguucucuuuuaaguauggaaacggcguguggauuggucggacaaaaucaaucaguagccgcaauggguucgagaugaucugggauccaaacggcuggaccggaacggacaauaacuuuuccauuaagcaagacauagucggcaucaaugaauggucuggguacucggggagcuucgugcagcaucccgagcugacuggucuggauuguauucgaccuugcuucuggguugaacucaucagaggcaggccaaaagagaacacaauuuggaccuccgggucaaguaucucuuuuuguggagugaauagcgacacugucggcugguccuggcccgauggugcagaguuaccguucacaauagacaaguga

SEQ ID NO: 149049 - RNA, 1410 nt, Artificial Sequence
  derived and/or modified CDS sequence (opt3) from neuraminidase__InfluenzaA__AEM92440
augaaccccaaucagaagaucauuaccauaggcagcgugugcaucacaauugggauggccaaccugauccuccaaauuggaaauaucauauccaucuggauuucucacucaauccagcuugguaaccagagucagauugagacuuguaaucaaagcgucaucacguacgaaaacaauaccuggguuaaccagacauaugugaauauauccaacacuaauuucgcugcaggccagucuguagugucggucaaacuggccgggaacagcucauugugcccugugaguggaugggcgauuuacuccaaggacaauucuaucagaauuggcagcaaaggugauguuuuugugaucagggagccauucaucuccuguucaccguuagaaugccggaccuuuuuccugacacagggggcucuacucaacgacaagcauaguaauggaaccauuaaagaucgcagccccuaucgaacucugaugucuuguccuauaggcgaggucccaucccccuacaacucacguuuugaaagcguggccuggagugcaucugccugccacgacggcaucaacuggcuuacaauugggaucuccggaccugauaauggugcuguagcaguucugaaguauaacggcauaauuaccgacacgaucaagagcuggagaaauaacaucuugaggacucaagagucggagugugccugcgugaaugggucuuguuucaccauuaugacagauggaccauccgacggccaggcuucauacaaaaucuuucggauugaaaaggguaaaauagucaagaguguggagaugaucgcccccaacuaucauuacgaagagugcagcuguuacccugauuccucugagauuacuugcgugugccgcgacaauuggcacgggagcaacagaccaugggucucauucaaucagaaccucgaauaucagaucggauacaucuguaguggcauuuuuggcgauaauccgaggcccaacgacaaaaccggguccugcggaccuguuagcucuaauggugcgaacggcgugaagggguucucauuuaaguauggaaauggcguauggauaggucggacaaaaaguaucagcucccgcaagggguucgagaugauuugggauccaaacggcuggaccggaacggacaacaauuuuucuaucaaacaagacauugugggcaucaacgaauggucgggguacagcggauccuucguccagcaucccgagcugacuggucuggauuguauacgaccuugcuucuggguggaacucaucagaggcaggccaaaggagaauacaauuuggaccucagggaguucuaucagcuuuuguggaguuaacuccgacacugugggcuggucauggcccgauggugcagaguuaccguucacaauugacaaauga

SEQ ID NO: 149050 - RNA, 1410 nt, Artificial Sequence; identical to SEQ ID NO: 149006
  derived and/or modified CDS sequence (opt3) from neuraminidase__InfluenzaA__AEM92450

SEQ ID NO: 149051 - RNA, 1410 nt, Artificial Sequence; identical to SEQ ID NO: 149006
  derived and/or modified CDS sequence (opt3) from neuraminidase__InfluenzaA__AEM92460

SEQ ID NO: 149052 - RNA, 1410 nt, Artificial Sequence; identical to SEQ ID NO: 148757
  derived and/or modified CDS sequence (opt3) from neuraminidase__InfluenzaA__AEM92470

SEQ ID NO: 149053 - RNA, 1410 nt, Artificial Sequence; identical to SEQ ID NO: 148757
  derived and/or modified CDS sequence (opt3) from neuraminidase__InfluenzaA__AEM92480

SEQ ID NO: 149054 - RNA, 1410 nt, Artificial Sequence
  derived and/or modified CDS sequence (opt3) from neuraminidase__InfluenzaA__AEM92490
augaaccccaaucagaagaucauuaccauaggcagcgugugcaugaucauugggauggccaaccugaugcuccaaaucggaaauauuaucuccauauggaucucucacucaauucagcuugguaaccagaaucagaucgagacauguaaccaaagugucauuacuuacgaaaauaacacguggguuaaucagaccuaugugaacaucagcaauacaaacuucgcugcaggccaguccguagugucugucaaacuggccggaaauucgucauugugcccugugagcggaugggcgauauacaguaaggacaacuccauuagaaucggcucuaaaggugauguuuuugugauuagggagccauucaucagcuguuccccguuagaaugccggaccuuuuuccugacucagggggcucuacucaaugacaagcauucaaacggaacaaucaaagaucgcagucccuaucgaacccugaugagcuguccuauuggcgaggucccaucucccuacaacucccguuuugaaucaguggccuggagcgcaagugccugccacgacggcauaaauuggcuuacuaucgggauuucuggaccugauaacggugcuguagcaguucugaaguauaauggcaucauaacagacaccauuaaguccuggagaaacaauaucuugaggacgcaagagagcgagugugccugcgugaacgggucguguuucacuaucaugaccgauggaccaucugacggccaggcuuccuacaaaauuuuucggaucgaaaaggguaaaauugucaagucaguggagaugaaugcccccaacuaucauuacgaagagugcaguuguuacccugauagcuccgagauaacaugcgugugccgcgacaauuggcacgggucuaacagaccaugggucagcuucaaucagaaccucgaauaucagaucggauacauuuguucaggcaucuuuggcgauaauccgaggcccaacgacaaaacugggaguugcggaccuguuuccagcaauggugcgaacggcgugaagggguucucuuuuaaguauggaaacggcguauggaucggucggaccaaaucaauuaguagccgcaauggguucgagaugauaugggauccaaacggcuggacaggaaccgacaauaacuuuuccaucaagcaagacauugugggcaucaaugaauggucuggguacucggggagcuucguccagcaucccgagcugacgggucuggauuguauucgaccuugcuucuggguggaacucaucagaggcaggccaaaagagaacacuauauggacauccgggucaaguaucucuuuuuguggaguuaauagcgacaccgugggcugguccuggcccgauggugcagaguuaccguucacuauugacaaguga

SEQ ID NO: 149055 - RNA, 1410 nt, Artificial Sequence
  derived and/or modified CDS sequence (opt3) from neuraminidase__InfluenzaA__AEM92500
augaaccccaaucagaagaucauuaccauaggcagcgugugcaugaucauugggauggccaaccugaugcuccaaaucggaaauauuaucuccauauggaucucucacucaauucagcuugguaaccagaaucagaucgagacauguaaccaaagugucauuacuuacgaaaauaacacguggguuaaucagaccuaugugaacaucagcaauacaaacuucgcugcaggccaguccguagugucugucaaacuggccggaaauucgucauugugcccugugagcggaugggcgauauacaguaaggacaacuccauuagaaucggcucuaaaggugauguuuuugugauuagggagccauucaucagcuguuccccguuagaaugccggaccuuuuuccugacucagggggcucuacucaaugacaagcauucaaacggaacaaucaaagaucgcagucccuaucgaacccugaugagcuguccuauuggcgaggucccaucucccuacaacucccguuuugaaucaguggccuggagcgcaagugccugccacgacggcauaaauuggcuuacuaucgggauuucuggaccugauaacggugcuguagcaguucugaaguauaauggcaucauaacagacaccauuaaguccuggagaaacaauaucuugaggacgcaagagagcgagugugccugcgugaacgggucguguuucacuaucaugaccgauggaccaucugacggccaggcuuccuacaaaauuuuucggaucgaaaaggguaaaauugucaagucaguggagaugaaugcccccaacuaucauuacgaagagugcaguuguuacccugauagcuccgagauaacaugcgugugccgcgacaauuggcacgggucuaacagaccaugggucagcuucaaucagaaccucgaauaucagaugggauacaucuguucaggcauuuuuggcgauaauccgaggcccaacgacaaaacugggaguugcggaccuguuuccagcaauggugcgaacggcgugaagggguucucuuuuaaguauggaaacggcguauggaucggucggaccaaaucaaucaguagccgcaauggguucgagaugauuugggauccaaacggcuggacaggaaccgacaauaaguuuuccauaaaacaagacaucgugggcauuaacgaauggucuggguacucggggagcuucguccagcaucccgagcugacgggucuggauuguauccgaccuugcuucuggguggaacucauuagaggcaggccaaaggagaauacuaucuggacauccgggucaaguauaucuuuuuguggaguuaacagcgacaccgugggcugguccuggcccgauggugcagaguuaccguucacuaucgacaaauga

SEQ ID NO: 149056 - RNA, 1410 nt, Artificial Sequence
  derived and/or modified CDS sequence (opt3) from neuraminidase__InfluenzaA__AEM92520
augaaccccaaucagaagaucauuaccauaggcagcgugugcaugacaaucgggauggccaaccugaugcuccaaauuggaaauaucauuuccaucuggauaucucacucaauccagcuugguaaccagaaucagauugagacuuguaaccaaagugucaucacguacgaaaauaacaccuggguuaaucagacauaugugaacauuagcaauacuaacuucgcugcaggccaguccguagugucugucaaacuggccggaaauucgucauugugcccugugagcggaugggcgaucuacaguaaggacaacuccauaagaauuggcucuaaaggugauguuuuugugaucagggagccauucauuagcuguuccccguuagaaugccggaccuuuuuccugacacagggggcucuacucaaugacaagcauucaaacggaaccaucaaagaucgcagucccuaucgaacucugaugagcuguccuaucggcgaggucccaucucccuacaacucccguuuugaaucaguggccuggagcgcaagugccugccacgacggcauuaauuggcuuacaauagggaucucuggaccugauaacggugcuguagcaguucugaaguauaauggcauuaucaccgacacgauaaaguccuggagaaacaauauuuugaggacucaagagagcgagugugccugcgugaacgggucguguuucaccgucaugacagauggaccaucugacggccaggcuuccuacaaaaucuuucggaucgaaaaggguaaaauugugaagucaguggagaugaaugcccccaacuaucauuacgaagagugcaguuguuacccugauagcuccgagaucacuugcgucugccgcgacaauuggcacgggucuaacagaccauggguuagcuucaaucagaaccucgaauaucagauuggauacauauguucaggcaucuuuggcgauaauccgaggcccaacgacaaaaccgggaguugcggaccuguguccagcaauggugcgaacggcguaaagggguucucuuuuaaguauggaaacggcguguggauuggucggacaaaaucaaucaguagccgcaauggguucgagaugaucugggauccaaacggcuggaccggaacggacaauaacuuuuccauuaagcaagacauaaucggcauuaaugaauggucuggguacucggggagcuucguccagcaucccgagcugacuggucuggauuguauccgaccuugcuucuggguggaacucauuagaggcaggccaaaagagaacacaaucuggaccuccgggucaaguauaucuuuuuguggaguuaauagcgacacugugggcugguccuggcccgauggugcagaguuaccguucacaaucgacaaguga

SEQ ID NO: 149057 - RNA, 1410 nt, Artificial Sequence; identical to SEQ ID NO: 148757
  derived and/or modified CDS sequence (opt3) from neuraminidase__InfluenzaA__AEM92550

SEQ ID NO: 149058 - RNA, 1410 nt, Artificial Sequence
  derived and/or modified CDS sequence (opt3) from neuraminidase__InfluenzaA__AEM92570
augaaccccaaucagaagaucauuaccauaggcagcgugugcaugacaaucgggauggccaaccugauucuccaaaucggaaauauuaucuccauauggaucucucacucaauucagcuugguaaccagaaucagaucgagacuuguaaccaaagugucauuacguacgaaaauaacaccuggguuaaucagacauaugugaacaucagcaauacuaacuucgcugcaggccaguccguagugucugucaaacuggccggaaauucgucauugugcccugugagcggaugggcgauauacaguaaggacaacuccauuagaaucggcucuaaagguaauguuuuugugauuagggagccauucaucagcuguuccccguuagaaugccggaccuuuuuccugacacagggggcucuacucaacgauaagcauucaaacggaaccaucaaagaccgcagucccuaucgaacucugaugagcuguccuauuggcgaggucccaucucccuacaauucccguuuugaaucaguggccuggagcgcaagugccugccacgauggcauaaacuggcuuacaaucgggauuucuggaccugacaauggugcuguagcaguucugaaguauaacggcaucauaaccgauacgauuaaguccuggagaaauaacaucuugaggacucaagagagcgagugugccugcgugaaugggucguguuucaccaucaugacagacggaccaucugauggccaggcuuccuacaaaauuuuucggaucgaaaaggguaaaauugucaagucaguggagaugaacgcccccaauuaucauuacgaagagugcaguuguuacccugacagcuccgagauaacuugcgugugccgcgauaacuggcacgggucuaauagaccaugggucagcuucaaccagaaucucgaauaucagaucggauacauuuguucaggcaucuuuggcgacaacccgaggcccaaugauaaaaccgggaguugcggaccuguuuccagcaacggugcgaacggcgugaagggguucucuuuuaaguauggaaauggcguauggaucggucggacaaaaucaauuaguagccgcaagggguucgagaugauaugggacccaaacggcuggaccggaacggauaauaacuuuuccaucaaacaagacauugugggcaucaaugaauggucuggguacucggggagcuucguccagcaucccgagcugacuggucuggacuguauucgaccuugcuucuggguggaacucaucagaggcaggccaaaggagaacacaauauggaccuccgggucaaguaucucuuuuuguggaguuaauagcgauacugugggcugguccuggcccgacggugcagaguuaccguucacaauugauaaauga

SEQ ID NO: 149059 - RNA, 1410 nt, Artificial Sequence
  derived and/or modified CDS sequence (opt3) from neuraminidase__InfluenzaA__AEM92580
augaaccccaaucagaagaucauuaccauaggcagcgugugcaugacaaucgggauggccaaccugauucuccaaaucggaaauauuaucuccauauggaucucucacucaauucagcuugguaaccagaaucagaucgagacuuguaaccaaagugucauuacguacgaaaauaacaccuggguuaaucagacauaugugaacaucagcaauacuaacuucgcugcaggccaguccguagugucugucaaacuggccggaaauucgucauugugcccugugagcggaugggcgauauacaguaaggacaacuccauuagaaucggcucuaaaggugauguuuuugugauuagggagccauucaucagcuguuccccguuagaaugccggaccuuuuuccugacacagggggcucuacucaaugacaagcauucaaacggaaccaucaaagaucgcagucccuaucgaacucugaugagcuguccuauuggcgaggucccaucucccuacaacucccguuuugaaucaguggccuggagcgcaagugccugccacgacggcauaaauuggcuuacaaucgggauuucuggaccugauaacggugcuguagcaguucugaaguauaauggcaucauaaccgacacgauuaaguccuggagaaacaauaucuugaggacucaagagagcgagugugccugcgugaacgggucguguuucaccaucaugacagauggaccaucuaauggccaggcuuccuacaaaauuuuucggaucgaaaaggguaaaauugucaagucaguggagaugaacgcccccaauuaucauuacgaagagugcaguuguuacccugacagcuccgagauaacuugcgugugccgcgauaacuggcacgggucuaauagaccaugggucagcuucaaccagaaucucgaauaucagaucggauacauuuguucaggcaucuuuggcgacaacccgaggcccaaugauaaaaccgggaguugcggaccuguuuccagcaacggugcgaacggcgugaagggguucucuuuuaaguauggaaauggcguauggaucggucggacaaaaucaauuaguagccgcaagggguucgagaugauaugggacccaaacggcuggaccggaacggauaauaacuuuuccaucaaacaagacauugugggcaucaaugaauggucuggguacucggggagcuucguccagcaucccgagcugacuggucuggacuguauucgaccuugcuucuggguggaacucaucagaggcaggccaaaggagaacacaauauggaccuccgggucaaguaucucuuuuuguggaguuaauagcgauacugugggcugguccuggcccgacggugcagaguuaccguucacaauugauaaauga

SEQ ID NO: 149060 - RNA, 1410 nt, Artificial Sequence; identical to SEQ ID NO: 148757
  derived and/or modified CDS sequence (opt3) from neuraminidase__InfluenzaA__AEM92590

SEQ ID NO: 149061 - RNA, 1410 nt, Artificial Sequence; identical to SEQ ID NO: 148757
  derived and/or modified CDS sequence (opt3) from neuraminidase__InfluenzaA__AEM92600

SEQ ID NO: 149062 - RNA, 1410 nt, Artificial Sequence
  derived and/or modified CDS sequence (opt3) from neuraminidase__InfluenzaA__AEM92610
augaaccccaaucagaagaucauuaccauaggcagcgugugcaugacaaucgggauggccaaccugaugcuccaaauuggaaauaucauuuccaucuggauaucucacucaauccagcuugguaaccagaaucagauugagacuuguaaccaaagugucaucacguacgaaaauaacaccuggguuaaucagacauaugugaacauuagcaauacuaacuucgcugcaggccaguccguagugucugucaaacuggccggaaauucgucauugugcccugugagcggaugggcgaucuacaguaaggacaacuccauaagaauuggcucuaaaggugauguuuuugugaucagggagccauucauuagcuguuccccguuagaaugccggaccuuuuuccugacacagggggcucuacucaaugacaagcauucaaacggaaccaucaaagaucgcagucccuaucgaacucugaugagcuguccuaucggcgaggucccaucucccuacaacucccguuuugaaucaguggccuggagcgcaagugccugccacgacggcauuaauuggcuuacaauagggaucucuggaccugauaacggugcuguagcaguucugaaguauaauggcauuaucaccgacacgauaaaguccuggagaaacaauauuuugaggacucaagagagcgagugugccugcgugaacgggucguguuucaccgucaugacagauggaccaucugacggccaggcuuccuacaaaaucuuucggaucgaaaaggguaaaauugugaagucaguggagaugaaugcccccaacuaucauuacgaagagugcaguuguuacccugauagcuccgagaucacuugcgucugccgcgacaauuggcacgggucuaacagaccauggguuagcuucaaucagaaccucgaauaucagauuggauacauauguucaggcaucuuuggcgauaauccgaggcccaacgacaaaaccgggaguugcggaccuguguccagcaauggugcgaacggcguaaagggguucucuuuuaaguauggaaacggcguguggauuggucggacaaaaucaaucaguagccgcaauggguucgagaugaucugggauccaaacggcuggaccggaacggacaauaacuuuuccauuaagcaagacauagucggcaucaaugaauggucuggguacucggggagcuucgugcagcaucccgagcugacuggucuggauuguauucgaccuugcuucuggguugaacucaucagaggcaggccaaaagagaacacaauuuggaccuccgggucaaguaucucuuuuuguggagugaauagcgacacugucuccuggucauggcccgauggcgcagaguuaccguucacaauagacaaguga

SEQ ID NO: 149063 - RNA, 1410 nt, Artificial Sequence
  derived and/or modified CDS sequence (opt3) from neuraminidase__InfluenzaA__AEM92620
augaaccccaaucagaagaucauuaccauaggcagcgugugcaugaucauugggauggccaaccugaugcuccaaaucggaaauauuaucuccauauggaucucucacucaauucagcuugguaaccagaaucagaucgagacauguaaccaaagugucauuacuuacgaaaauaacacguggguuaaucagaccuaugugaacaucagcaauacaaacuucgcugcaggccaguccguagugucugucaaacuggccggaaauucgucauugugcccugugagcggaugggcgauauacaguaaggacaacuccauuagaaucggcucuaaaggugauguuuuugugauuagggagccauucaucagcuguuccccguuagaaugccggaccuuuuuccugacucagggggcucuacucgacgauaagcauucaaauggaacaaucaaagaccgcagucccuaucgaacccugaugagcuguccuauuggcgaggucccaucucccuacaacucccguuuugaaucaguggccuggagcgcaagugccugccacgauggcauaaacuggcuuacuaucgggauuucuggaccugacaauggugcuguagcaguucugaaguauaacggcaucauaacagauaccauuaaguccuggagaaauaacaucuugaggacgcaagagagcgagugugccugcgugaaugggucguguuucacuaucaugaccgacggaccaucugauggccaggcuuccuacaaaauuuuucggaucgaaaaggguaaaauugucaagucaguggagaugaacgcccccaauuaucauuacgaagagugcaguuguuacccugacagcuccgagauaacaugcgugugccgcgauaacuggcacgggucuaauagaccaugggucagcuucaaccagaaucucgaauaucagaugggauacaucuguucaggcauuuuuggcgacaacccgaggcccaaugauaaaacugggaguugcggaccuguuuccagcaacggugcgaauggcgugaagggguucucuuuuaaguauggaaacggcguauggaucggucggaccaaaucaaucaguagccgcaacggguucgagaugauuugggacccaaauggcuggacaggaaccgacaacaaguuuuccauaaaacaagauaucgugggcauuaaugaauggucuggguacucggggagcuucguccagcaucccgagcugacgggucuggacuguauccgaccuugcuucuggguggaacucauuagaggcaggccaaaggagaacacuaucuggacauccgggucaaguauaucuuuuuguggaguuaauagcgauaccgugggcugguccuggcccgacggugcagaguuaccguucacuaucgauaaauga

SEQ ID NO: 149064 - RNA, 1410 nt, Artificial Sequence
  derived and/or modified CDS sequence (opt3) from neuraminidase__InfluenzaA__AEM92650
augaaccccaaucagaagaucauuaccauaggcagcgugugcaugacaaucgggauggccaaccugauucuccaaaucggaaauauuaucuccauauggaucucucacucaauucagcuugguaaccagaaucagaucgagacuuguaaccaaagugucauuacguacgaaaauaacaccuggguuaaucagacauaugugaacaucagcaauacuaacuucgcugcaggccaguccguagugucugucaaacuggccggaaauucgucauugugcccugugagcggaugggcgauauacaguaaggacaacuccguuagaauuggcucuaaaggugauguguuugucaucagggagccauucauuagcuguuccccguuagaaugccggaccuuuuuccugacacagggggcucuacucaaugacaagcauucaaacggaaccaucaaagaucgcagucccuaucgaacucugaugagcuguccuaucggcgaggugccaucucccuacaacucccguuuugaaucaguagccuggagcgcaagugccugccacgacggcauuaauuggcuuacaauagggaucucuggaccugauaacggugcuguugcagugcugaaguauaauggcauuaucaccgacacgauaaaguccuggagaaacaauauuuugaggacucaagagagcgagugugccugcgucaacgggucguguuucaccgugaugacagauggaccaucugacggccaggcuuccuacaaaaucuuucggaucgaaaaggguaaaauugugaagucagucgagaugaaugcccccaacuaucauuacgaagagugcaguuguuacccugauagcuccgagaucacuugcguuugccgcgacaauuggcacgggucuaacagaccaugggugagcuucaaucagaaccucgaauaucagauuggauacauauguucaggcaucuuuggcgauaauccgaggcccaacgacaaaaccgggaguugcggaccuguauccagcaauggugcgaacggcgugaagggguucucuuuuaaguauggaaacggcgucuggauuggucggacaaaaucaaucaguagccgcaauggguucgagaugaucugggauccaaacggcuggaccggaacggacacuaaguuuuccauuaaacaagacauagugggcaucaaugaauggucuggguacucggggagcuucguucagcaucccgagcugacaggucuggauuguauucgaccuugcuucuggguggaacucaucagaggcaggccaaaggagaacaccauuuggacuuccgggucaaguaucucuuuuuguggagucaauagcgacacagugggcugguccuggcccgauggugcagaguuaccguucaccauagacaaauga

SEQ ID NO: 149065 - RNA, 1410 nt, Artificial Sequence; identical to SEQ ID NO: 147458
  derived and/or modified CDS sequence (opt3) from neuraminidase__InfluenzaA__AEM98410

SEQ ID NO: 149066 - RNA, 1410 nt, Artificial Sequence; identical to SEQ ID NO: 147458
  derived and/or modified CDS sequence (opt3) from neuraminidase__InfluenzaA__AEM98421

SEQ ID NO: 149067 - RNA, 1410 nt, Artificial Sequence; identical to SEQ ID NO: 147458
  derived and/or modified CDS sequence (opt3) from neuraminidase__InfluenzaA__AEM98432

SEQ ID NO: 149068 - RNA, 1410 nt, Artificial Sequence; identical to SEQ ID NO: 148834
  derived and/or modified CDS sequence (opt3) from neuraminidase__InfluenzaA__AEN55401

SEQ ID NO: 149069 - RNA, 1410 nt, Artificial Sequence; identical to SEQ ID NO: 147061
  derived and/or modified CDS sequence (opt3) from neuraminidase__InfluenzaA__AEN55411

SEQ ID NO: 149070 - RNA, 1410 nt, Artificial Sequence
  derived and/or modified CDS sequence (opt3) from neuraminidase__InfluenzaA__AEN55421
augaaccccaaucagaagaucauuaccauaggcagcgugugcaugacaaucgggauggccaaccugauucuccaaaucggaaauauuaucuccauauggaucucucacucaauucagcuugguaaccagagucagaucgagacuuguaaucaaagcgucauuacguacgaaaacaauaccuggguuaaccagacauaugugaauaucuccaacacuaauuucgcugcaagacagucuguagugucggucaaacuggccggcaacucauccuugugcccugugagugggugggcgauauacuccaaggacaauucuauuaggaucggaagcaaaggcgauguuuuugugauucgggagccauucaucuccuguucaccguuagaaugccgcaccuuuuuccugacacagggugcucuacucaacgacaagcauaguaaugggaccaucaaagaucgaagccccuaucguacucugaugucuuguccuauuggagaggucccaucccccuacaacucaagauuugaaagcguggccuggagugcaucugccugccacgacggcauaaacuggcuuacaaucggcauuuccgggccugauaauggagcuguagcaguucugaaguauaacgguaucauaaccgacacgauuaagagcuggaggaauaacaucuugcggacucaagagucggagugugugugcgucaauggcucuuguuucaccaucaugacagaugggccauccgacggacaggccucauacaaaauuuuucgcaucgaaaagggcaaaauugugaagaguguggagaugaacgcucccaauuaucauuacgaagagugcagcuguuacccugauuccucugagauaacuugcgucugcagagacaacuggcacgguagcaauaggccauggguuucauucaaccagaaucucgaauaucagaucggguacauuuguaguggaaucuuuggcgauaacccgcggcccaaugacaaaaccggcuccugcgggccugugagcucuaacggagccaaugguguaaagggcuucucauuuaaguaugggaacggaguguggaucggccgcacaaaaaguauuagcucccgaaaggguuucgagaugauaugggauccaaacggguggaccggcacggacaauaacuuuucuaucaaacaagacauugucggaaucaaugaauggucgggcuacagcggguccuucgugcagcaucccgagcugacuggacuggauuguauuagaccuugcuucuggguugaacucaucaggggucggccaaaggagaacacaauauggaccucaggcaguucuaucagcuuuuguggggugaauagcgacacugucggauggucauggcccgauggcgcggaguuaccguucacaauugacaaauga

SEQ ID NO: 149071 - RNA, 1410 nt, Artificial Sequence
  derived and/or modified CDS sequence (opt3) from neuraminidase__InfluenzaA__AEN55466
augaaccccaaucagaagaucauuaccauaggcagcgugugcaucacaauugggauggccaaccugauccuccaaauuggaaauacuaucuccauauggaucucucacucaauucagcuugguaaccagaaucagaucgagacguguaaccaaagugucauuaccuacgaaaauaacacauggguuaaucagacuuaugugaacaucagcaauaccaacuucgcugcaggccaguccguagugucugucaaacuggccgggaauagcucauugugcccugugagcggaugggcgauauacaguaaggacaacuccauuagaaucggcucuaaaggugauguuuuugugauuagggagccauucaucagcuguuccccguuagaaugccggacauuuuuccugacccagggggcucuacucaaugacaagcauucaaacggaacuaucaaagaucgcagucccuaucgaacacugaugagcuguccuauuggcgaggucccaucucccuacaacucccguuuugaaucaguggccuggagcgcaagugccugccacgacggcauaucuuggcuuaccaucgggauuuccggaccugauaauggugcuguagcaguucugaaguauaacggcaucauaacggacacuauuaagagcuggagaaauaacaucuugaggacccaagagucggagugugccugcgugaaugggucuuguuucacagucaugacugauggaccauccgacggccaggcuucauacaaaaucuuucggauugaaaaggguaaaaucgugaagaguguggagaugaacgcccccaauuaucauuacgaagagugcagcuguuacccugauuccucugagauuaccugcgucugccgcgacaacuggcacgggagcaauagaccauggguuucauucaaccagaaucucgaauaucagauaggauacaucuguaguggcauuuuuggcgauaacccgaggcccaaugacaaaacaggguccugcggaccugugagcucuaacggugcgaauggcguaaagggguucucauuuaaguauggaaacggcguguggaucggucggaccaaaaguaucagcucccgcaacggguucgagaugauuugggauccaaauggcuggacgggaacugacaacaauuuuucuauaaagcaagacaucgucggcauuaacgaauggucgggguacagcggauccuucgugcagcaucccgagcugacaggucuggauuguauccgaccuugcuucuggguugaacucauuagaggcaggccaaaagagaauaccaucuggacuucagggaguucuauaucguuuuguggagugaacuccgacacagucggcuggucauggcccgauggugcagaguuaccguucaccaucgacaaguga

SEQ ID NO: 149072 - RNA, 1410 nt, Artificial Sequence
  derived and/or modified CDS sequence (opt3) from neuraminidase__InfluenzaA__AEN55476
augaaccccaaucagaagaucauuaccauaggcagcgugugcaugacaaucgggauggccaaccugauucuccaaaucggaaauauuaucuccauauggaucucucacucaauucagcuugguaaccagagucagaucgagacuuguaaucaaagcgucauuacguacgaaaacaauaccuggguuaaccagacauaugugaauaucuccaacacuaauuucgcugcaggccagucuguagugucggucaaacuggccgggaacagcucauugugcccugugaguggaugggcgauauacuccaaggacaauucuauuagaaucggcagcaaaggugauguuuuugugauuagggagccauucaucuccuguucaccguuagaaugccggaccuuuuuccugacacagggggcucuacucaacgacaagcauaguaauggaaccaucaaagaucgcagccccuaucgaacucugaugucuuguccuauuggcgaggucccaucccccuacaacucacguuuugaaagcguggccuggagugcaucugccugccacgacggcauaaacuggcuuacaaucgggauuuccggaccugauaauggugcuguagcaguucugaaguauaacggcaucauaaccgacacgauuaagagcuggagaaauaacaucuugaggacucaagagucggagugugccugcgugaaugggucuuguuucaccaucaugacagauggaccauccgacggccaggcuucauacaaaauuuuucggaucgaaaaggguaaaauugucaagaguguggagaugaacgcccccaauuaucauuacgaagagugcagcuguuacccugauuccucugagauaacuugcgugugccgcgacaacuggcacgggagcaauagaccaugggucucauucaaccagaaucucgaauaucagaucggauacauuuguaguggcaucuuuggcgauaacccgaggcccaaugacaaaaccggguccugcggaccuguuagcucuaacggugcgaauggcgugaagggguucucauuuaaguauggaaacggcguauggaucggucggacaaaaaguauuagcucccgcaagggguucgagaugauaugggauccaaacggcuggaccggaacggacaauaacuuuucuaucaaacaagacauugugggcaucaaugaauggucgggguacagcggauccuucguccagcaucccgagcugacuggucuggauuguauucgaccuugcuucuggguggaacucaucagaggcaggccaaaggagaacacaauauggaccucagggaguucuaucagcuuuuguggaguuaauuccgacacugugucauggagcuggcccgauggcgcagaguuaccguucacaauugacaaauga

SEQ ID NO: 149073 - RNA, 1410 nt, Artificial Sequence; identical to SEQ ID NO: 148305
  derived and/or modified CDS sequence (opt3) from neuraminidase__InfluenzaA__AEN55486

SEQ ID NO: 149074 - RNA, 1410 nt, Artificial Sequence; identical to SEQ ID NO: 148305
  derived and/or modified CDS sequence (opt3) from neuraminidase__InfluenzaA__AEN55506

SEQ ID NO: 149075 - RNA, 1410 nt, Artificial Sequence
  derived and/or modified CDS sequence (opt3) from neuraminidase__InfluenzaA__AEN55516
augaaccccaaucagaagaucauuaccauaggcagcgugugcaugacaaucgggauggccaaccugauucuccaaaucggaaauauuaucuccauauggaucucucacucaauucagcuugguaaccagagucagaucgagacuuguaaucaaagcgucauuacguacgaaaacaauaccuggguuaaccagacauaugugaauaucuccaacacuaauuucgcugcaggccagucuguagugucggucaaacuggccgggaacagcucauugugcccugugaguggaugggcgauauacuccaaggacaauucuauuagaaucggcagcaggggugauguuuuugugauucgggagccauucaucuccuguucaccguuagaaugccgcaccuuuuuccugacacagggggcucuacucaacgacaaacauaguaauggaaccaucaaggaucgaagccccuaucguacucugaugucuuguccuauuggcgaggucccaucccccuacaacucaagauuugaaagcguggccuggagugcaucugccugccacgacggcauaaacuggcuuacaaucgggauuuccggaccugauaauggugcuguagcaguucugaaauauaacggcaucauaaccgacacgauuaagagcuggaggaauaacaucuugcggacucaagagucggagugugccugcgugaaugggucuuguuucaccaucaugacagauggaccauccgacggccaggcuucauacaagauuuuucgcaucgaaaaagguaagauugucaaaaguguggagaugaacgcccccaauuaucauuacgaagagugcagcuguuacccugauuccucugagauaacuugcgugugcagagacaacuggcacgggagcaauaggccaugggucucauucaaccagaaucucgaauaucagaucggauacauuuguaguggcaucuuuggcgauaacccgcggcccaaugacaagaccggguccugcggaccuguuagcucuaacggugcgaauggcgugaaaggguucucauuuaaguauggaaacggcguauggaucggucgcacaaagaguauuagcucccgaaaaggguucgagaugauaugggauccaaacggcuggaccggaacggacaauaacuuuucuaucaagcaagacauugugggcaucaaugaauggucgggguacagcggauccuucguccagcaucccgagcugacuggucuggauuguauuagaccuugcuucuggguggaacucaucaggggccggccaaaagagaacacaauauggaccucagggaguucuaucagcuuuuguggaguuaauuccgacacugugggcuggucauggcccgauggugcagaguuaccguucacaauugacaaguga

SEQ ID NO: 149076 - RNA, 1410 nt, Artificial Sequence; identical to SEQ ID NO: 148305
  derived and/or modified CDS sequence (opt3) from neuraminidase__InfluenzaA__AEN55526

SEQ ID NO: 149077 - RNA, 1410 nt, Artificial Sequence; identical to SEQ ID NO: 148834
  derived and/or modified CDS sequence (opt3) from neuraminidase__InfluenzaA__AEN69429

SEQ ID NO: 149078 - RNA, 1410 nt, Artificial Sequence; identical to SEQ ID NO: 148831
  derived and/or modified CDS sequence (opt3) from neuraminidase__InfluenzaA__AEN69438

SEQ ID NO: 149079 - RNA, 1410 nt, Artificial Sequence; identical to SEQ ID NO: 147061
  derived and/or modified CDS sequence (opt3) from neuraminidase__InfluenzaA__AEN69484

SEQ ID NO: 149080 - RNA, 1410 nt, Artificial Sequence; identical to SEQ ID NO: 144733
  derived and/or modified CDS sequence (opt3) from neuraminidase__InfluenzaA__AEO01627

SEQ ID NO: 149081 - RNA, 1410 nt, Artificial Sequence; identical to SEQ ID NO: 144733
  derived and/or modified CDS sequence (opt3) from neuraminidase__InfluenzaA__AEO01638

SEQ ID NO: 149082 - RNA, 1410 nt, Artificial Sequence
  derived and/or modified CDS sequence (opt3) from neuraminidase__InfluenzaA__AEO01644
augaaccccaaucagaagaucauuaccauaggcagcgugucccugacaaucucuacuauuugcuucuuuaugcaaaucgccauucucaucacgaccgucacacuucacuucaaacaguacgaguuuaacucaccuccaaauaaccagguuaugcugugugaaccgacuauaaucgagagaaauauuaccgaaaucguguauuugacaaacaccacuauugagaaggaaaucugccccaaauuagcugaguacaggaauuggaguaagccucagugugacauaacaggguucgcaccauuuagcaaagauaacuccauucggcugucugccggaggugacaucuggguaacccgcgagcccuaugugucgugcgauccugacaaguguuaccaauucgcgcuaggccaggggacgacucucaauaacguccauucaaaugauaccgugcgagaccguacaccauauagaacucugcuuaugaacgaacugggaguucccuuucacuugggcaccaaacaggugugcauugcuuggagcaguuccucuugucaugaugguaaggccuggcuccacgucugcaucacaggggacgauaagaaugcaaccgccagcuucaucuacaacggaaggcugguggacuccauuguaucauggaguaaagagauacugcggacgcaggaaagcgaguguguuugcaucaauggcacuuguacaguggucaugaccgauggcucugcuuccgggaaggcagacacuaaaauucucuuuaucgaggaaggaaagauagugcauacaucaaccuuaagcgguagugcccaacacguggaggaaugcucuugcuauccucgcuacccaggcgucagauguguuugcagggauaacuggaagggguccaaccggccgauuguggacaucaauaucaaagaccacagcauuguaucgucuuacguguguuccggacuggucggcgauacgccccgcaagaccgacucaaguagcuccggucauugccuugauccuaacaaugaggaagggggacacggcgugaaaggcugggcuuucgacgaugggaacgacguuuggaugggacgaacaaucucugaaaagagcagauuggguuaugagacuuuuaaagugauugagggcuggucaaauccaaagaguaaacugcagauaaacaggcaggucaucguggaucgggggaaucguuccggauacagcggcauuuucucuguagaggguaagucauguaucaaccgcugcuuuuauguugaacuaaucagagggaggaaggaggaaaccgaggugcucuggacaaguaauagcauugucguguucuguggcacuuccggaaccuacggcacagggucuuggcccgacggagccgauauaaaccugaugccuaucuga

SEQ ID NO: 149083 - RNA, 1410 nt, Artificial Sequence
  derived and/or modified CDS sequence (opt3) from neuraminidase__InfluenzaA__AEO01654
augaaccccaaucagaagaucauuaccauaggcagcgugucccugacaaucucuacuauuugcuucuuuaugcaaaucgccauucucaucacgaccgucacacuucacuucaaacaguacgaguuuaacucaccuccaaauaaccagguuaugcugugugaaccgacuauaaucgagagaaauauuaccgaaaucguguauuugacaaacaccacuauugagaaggaaaucugccccaaauuagcugaguacaggaauuggaguaagccucagugugacauaacaggguucgcaccauuuagcaaagauaacuccauucggcugucugccggaggugacaucuggguaacccgcgagcccuaugugucgugcgauccugacaaguguuaccaauucgcgcuaggccaggggacgacucucaauaacguccauucaaaugauaccgugcgagaccguacaccauauagaacucugcuuaugaacgaacugggaguucccuuucacuugggcaccaaacaggugugcauugcuuggagcaguuccucuugucaugaugguaaggccuggcuccacgucugcaucacaggggacgauaagaaugcaaccgccagcuucaucuacaacggaaggcugguggacuccauuguaucauggaguaaagauauacugcggacgcaggagagcgaauguguuugcaucaauggcacuuguacaguggucaugaccgacggcucugcuuccgggaaggcagauacuaaaauucucuuuaucgaggagggaaagauagugcauacaucaaccuuaagcgguagugcccaacacguggaagagugcucuugcuauccucgcuacccaggcgucagauguguuugcagggacaacuggaagggguccaaccggccgauuguggacaucaauaucaaagaucacagcauuguaucgucuuacguguguuccggacuggucggcgacacgccccgcaagaacgauucaaguagcuccggucauugccuugacccuaauaacgaagagggagggcacggcgugaaaggcugggcuuucgaugacgggaaugauguuuggaugggacgaaccaucucugaaaagagcagauuggguuaugagacauuuaaagugauugagggcuggucaaacccaaagaguaaacugcagauaaauaggcaggucaucguggaccgggggaaccguuccggauacagcggcauuuucucuguagaagguaagucauguaucaaucgcugcuuuuauguugagcuaaucagagggaggaaggaagagacuaaagugcucuggaccaguaacagcauugucguguucuguggcacauccggaacuuacggcaccgggucuuggcccgauggagccgaaauaaaucugaugccuaucuga

SEQ ID NO: 149084 - RNA, 1413 nt, Artificial Sequence; identical to SEQ ID NO: 144680
  derived and/or modified CDS sequence (opt3) from neuraminidase__InfluenzaA__AEO01665

SEQ ID NO: 149085 - RNA, 1413 nt, Artificial Sequence
  derived and/or modified CDS sequence (opt3) from neuraminidase__InfluenzaA__AEO01676
augaaccccaaucagaagaucauuaccauaggcagcaucuccauugccaucgggauuaucucucugaugcuccaaauaggaaacaucauuucaaucugggcuagucacagcauucagacagguucccagaauaacacuggcaucugcaaucagagaauaauuacguacgagaacucuaccugggugaaucauacauaugucaacaucaauaacacuaauguuguggcaggggaagacaaaaccucgguaacacuugccggaaacucaagccuguguaguauuuccggcugggcgaucuacaccaaggauaauucuaucaggauugguagcaaaggggacguguucgucauacgggagccuuuuaucuccugcucacacuuggaaugucgcacuuucuuuuuaacacaaggagcucugcuaaacgauaagcauaguaauggcaccgugaaagaccgaagcccauaucgugcccucaugucuugcccgcugggcgaggcacccuccccuuacaacucaaaguucgaaagcguugccuggagugcuucugcaugucacgaugggaugggauggcuuacgauugguaucuccggcccagacaacggggccguggcuguccugaaguauaauggaauaauuacuggcaccaucaaaagcuggaagaaacagaucuugagaacacaggagucggagugcguguguaugaacgguucuugcuuuacuauuaugaccgaugggcccuccaauaaggccgcgucauacaaaaucuucaagauugaaaagggaaaaguaacaaagaguauagagcucaacgcaccuaauuuucauuaugaagaguguagcugcuacccagacaccggcaucguuaugugugugugcagggauaacuggcacggcuccaaucggcccugggucucuuucaaccagaaucuggacuaccaaauuggguauaucugcagcggaguguuuggugauaacccucgcccagaggacggcgaagggucauguaauccggugacggucgauggagccaacggcguuaaagguuucaguuacaaguaugacaaugggguguggaucggcagaacuaaauccaacaggcugcggaagggauuugagaugauuugggaccccaauggcuggacaaacaccgauagcgacuucucuguaaaacaggauguggucgcuauaacugacuggucaggguacagugguagcuuugugcagcacccugaacucacaggauuagauugcauccgcccauguuucuggguugagcuggugcgaggccuucccagagaaaacaccacgauuuggaccuccgggucuucgaucuucuuuaggggagacaauagcgauacagccaacugguccuggccugacggcgcagagaugacuuucaccauugauaaguga

SEQ ID NO: 149086 - RNA, 1410 nt, Artificial Sequence; identical to SEQ ID NO: 144733
  derived and/or modified CDS sequence (opt3) from neuraminidase__InfluenzaA__AEO01693

SEQ ID NO: 149087 - RNA, 1413 nt, Artificial Sequence; identical to SEQ ID NO: 144680
  derived and/or modified CDS sequence (opt3) from neuraminidase__InfluenzaA__AEO01711

SEQ ID NO: 149088 - RNA, 1410 nt, Artificial Sequence; identical to SEQ ID NO: 148856
  derived and/or modified CDS sequence (opt3) from neuraminidase__InfluenzaA__AEO37533

SEQ ID NO: 149089 - RNA, 1410 nt, Artificial Sequence
  derived and/or modified CDS sequence (opt3) from neuraminidase__InfluenzaA__AEO37543
augaaccccaaucagaagaucauuaccauaggcagcgugugcaugacaaucgggauggccaaccugauucuccaaaucggaaauauuaucuccauauggaucucucacucaauucagcuugguaaccagaaucagaucgagccuuguaaccaaagugucauuacuuacgaaaauaacacguggguuaaucagaccuaugugaacaucagcaauacaaacuucgcugcaggccaguccguagugucugucaaacuggccggaaauucgucauugugcccagugagcggaugggcgauauacaguaaggacaacuccauuagaaucggcucuaaaggugauguuuuugugauuagggagccguucaucagcuguucccccuuagaaugccggaccuuuuuccugacucagggggcucuacucaaugacaagcauucaaacggaacaaucaaagaucgcaguccuuaucgaacccugaugagcuguccaauuggcgagguccccucuccuuacaacucccguuuugaaucaguggccuggagcgcaagugccugccacgacggcauaaauuggcuuacuaucgggauuucuggaccagauaacggugcuguagcaguucugaaguauaauggcaucauaacagacaccauuaaguccuggagaaacaauaucuugaggacgcaagagagcgagugugccugcgugaacgggucguguuucacugucaugaccgauggacccucugacggccaggcuuccuacaaaaucuuucggauugaaaaggguaaaaucgugaagucaguggagaugaaugccccuaacuaucauuacgaagagugcaguuguuacccagauagcuccgagauuacaugcgucugccgcgacaauuggcacgggucuaacagaccguggguuagcuucaaucagaaccucgaauaucagauaggauacaucuguucaggcauuuuuggcgauaaucccaggccuaacgacaaaacugggaguugcggaccaguguccagcaauggugcgaacggcguaaagggguucucuuuuaaguauggaaacggcguguggaucggucggaccaaaucaaucaguagccgcaauggguucgagaugauuugggaucccaacggcuggacaggaaccgacaauaacuuuuccgucaagcaagacauaaucggcauuaaugaauggucuggguacucggggagcuucgugcagcauccugagcugacgggucuggauuguauccgaccaugcuucuggguugaacucauuagaggcaggcccaaagagaacacuaucuggacauccgggucaaguauaucuuuuuguggagugaauagcgacaccgucggcugguccuggccggauggugcagaguuaccuuucacuaucgacaaguga

SEQ ID NO: 149090 - RNA, 1410 nt, Artificial Sequence; identical to SEQ ID NO: 148305
  derived and/or modified CDS sequence (opt3) from neuraminidase__InfluenzaA__AEO72179

SEQ ID NO: 149091 - RNA, 1350 nt, Artificial Sequence
  derived and/or modified CDS sequence (opt3) from neuraminidase__InfluenzaA__AEO88957
augaaccccaaucagaagaucauuaccauaggcagcaucugcauggugauugggaucgucucccugaugcuccaaauuggaaacaugaucucuauauggguuucacacaguacacagacugguaaucagcaucaggccgagccuaucagaaacacgaauuuccuuaccgaaaacgcuguggcaagcguaacacuggccggcaauuccucuuuguguccaauuagggggugggcggugcacucgaaagacaacucaauccggauuggaagcaagggcgaugucuuugugauccgcgagccguucauaaguugcucccauuuagaaugucgaaccuuuuuccugacucaaggugcucuacucaaugacaaacacucuaacgggacaguuaaggaucguagcccccauagaacccugauguccugcccugugggagaggccccaucacccuacaauaguagguuugaaagcgucgcauggucugccuccgcuugucacgacggcacuucauggcuuacaauuggcaucagcgggccugauaacggagcaguggccguacugaaauauaaugguauuaucaccgacacgaucaagaguuggcggaacaauauuuugcgcacucaggagucugagugcgcuuguguuaacggcuccugcuucaccgugaugacagaugggccaagcaacggacaggccucguacaagauauuuaaaauggaaaagggcaaagucgugaagucuguggagcucaaugcgcccaacuaucacuacgaagaguguuccugcuauccugacgcaggagagaucauuugugucugcagagauaauuggcaugggucaaacaggccauggguuaguuucaaucagaaccuggaauaccaaaucggauauauaugcagcggcguguuuggcgacaauccgcggcccaacgaugggacuggauccugugguccuguaucuccaaauggcgccuacgggauuaaaggauucagcuuuaaguacggcaacgguguguggaucgggcgcaccaagucaacaaauagucgauccggcuucgagaugaucugggaccccaacggauggaccggcacggauagcaauuuuucugucaaacaggacauuguggcuaucacugacuggucaggguauagugguagcuucguucagcacccugaacugacaggucucgauugcauuagaccauguuucuggguggaguuaauaaggggccggcccaaggaauccaccaucuggacuucugggucgagcauuuccuuuugcggagucaacucagacacagugaguuggucuuggccggauggcgccgagcugccuuucaccaucgacaaauga

SEQ ID NO: 149092 - RNA, 1350 nt, Artificial Sequence
  derived and/or modified CDS sequence (opt3) from neuraminidase__InfluenzaA__AEO88965
augaaccccaaucagaagaucauuaccauaggcagcaucugcauggugauugagaucgucucccugaugcuccaaauugggaacaugaucucuauauggguuucacacaguauccagacuaaaaaucagagacaggccgaaccuauuagcaacacaaaguuccuuacggagaaagcuguggcauccguaacccuggccggaaauucuucguuguguccaaucucagguugggcggugcauagcaaggacaacaguauuaggaucggcuccaaaggggaugucuuugugauacgggaaccguucauuucuugcagccacuuagagugucgcacauuuuuccugacucaaggagcucuacucaaugacaagcauuccaacggcaccguuaaggaucgaucaccccaccguacacugaugaguugcccugugggugaagccccaagccccuacaauucuagauuugaguccgucgcauggucagccagcgcuugucaugacgggaccaguuggcuuacuaucggaauuucuggcccugauaacggcgcaguggccguacugaaauauaaugggaucaucacagacaccauuaaguccuggaggaacaauauauugcggacgcaggagagcgaaugcgcuuguguuaacggaucgugcuucacugugaugaccgaugguccaucuaauggccaggccuccuacaaaaucuuuaagauggagaaagggaaggucgugaagucaguggaacucgacgcgcccaacuaucacuacgaggaguguaguugcuauccugaugcaggagaaauuacaugugucugccgcgacaacuggcacggcagcaauagaccauggguuuccuucaaccagaaucuggaguaccaaaucgguuauauaugcucugggguguuuggagauaacccgaggcccaaugacggcacuggcagcugugggccuguaucaccaaacggagccuacggugugaaaggcuucaguuuuaaguacgggaauggagucuggauuggccggaccaaauccacaaacagccgcucugguuucgaaaugaucugggaucccaauggguggaccggcacggacucaaguuuuagcgugaagcaggacaucguugcuauuacugauugguccggauauucuggcucguucgugcagcauccugagcugacagggcucaacugcauccgaccauguuucugggucgaauuagugagaggaaggcccaaagagagcaccauuuggacuuccgguucaaguauaucuuuuugcggcguaaauagcgacacaguugggugguccuggccggauggagccgagcugccuuucaccaucgacaaguga

SEQ ID NO: 149093 - RNA, 1350 nt, Artificial Sequence
  derived and/or modified CDS sequence (opt3) from neuraminidase__InfluenzaA__AEO88973
augaaccccaaucagaagaucauuaccauaggcagcaucugcauggugauugggaucgucucccugaugcuccaaauuggaaacaugaucucucuuuggguuucacacaguauacagacagguaaucagcaucagguggagccuaucagcaacacuaauuuccugacggaaaaagccguagcuuccgugaccuuggcaggcaacucuucguuauguccaauuagagggugggccguccacucaaaggacaauagcaucaggauuggaaguaaaggcgauguguuuguuauccgggagccguucauauccugcucucaucuggaaugucgcacauuuuuccuaacucaaggugcgcuccugaacgacaagcacagcaaugggaccgugaaagaucgaucaccccaucguacacuuauguccugcccugucggagaggcuccaagucccuacaacagcagauuugaaucuguggccugguccgcaucagccugucacgacggcaccagcuggcugacuauuggcaucagugggccugauaauggagcuguagcaguuuugaaguauaacgguaugauuacagacaccaucaagucuuggaggaauaacauccuccggacgcaggaguccgagugcgccugugugaauggcagcugcuucacugucaugaccgaugggccaucgaacggacaggcuucuuacaaaauuuuuaagauggaaaaaggccgcguggugaaguccgucgagcuggacgcccccaacuaucacuacgaagaguguucaugcuauccugaugcgggugagauaacauguguuugcagagacaauuggcaugggaguaacaggccaugggugagcuucaaucagaaccuggaauaccaaaucggauauauuugcuccggcguauuuggcgauaauccgcggcccaacgacgggacuggaucuugugguccugugagcccaaauggcgcauacggggucaaaggauucucauuuaaguacggcaacgguguguggaucgggcgcaccaagagucccaauucccgaagcggcuucgagaugauaugggauccuaacggauggauugaaacagacucuucauuuaguguuaaacaggacaucguggccaucaccgauuggagcggcuauuccgggucuuucguccagcacccagagcucacgggauuagacugcauuagacccuguuucuggguggaacugaucaggggucggccgaaggagucgacuauuuggacaagcggcuccucaauaaguuuuugcgggguaaauucugauaccguuagcugguccuggccugacggagcugagcuucccuucacuaucgauaaauga

SEQ ID NO: 149094 - RNA, 1350 nt, Artificial Sequence
  derived and/or modified CDS sequence (opt3) from neuraminidase__InfluenzaA__AEO88982
augaaccccaaucagaagaucauuaccauaggcagcaucugcauggugauugggaucgucucccugaugcuccaaauuggaaacaugaucucuauauggguuucacacaguauccagacagguaaucagcaucaggccgagccuauuagaaacacuaauuuccuuacggaaaacgcuguggcaagcguaacccuggccggcaauuccucuuuguguccagugagggggugggcgguccacucgaaagacaacucaauccggauuggaagcaagggcgauguguuuguuauccgcgagccguucauaaguugcucccauuuagaaugucgaacauuuuuccugacucaaggugcucuacucaaugacaaacacucuaacgggaccgugaaggaucguagcccccauagaacacugauguccugcccugucggagaggccccaucacccuacaauaguagguuugaaagcguggcauggucugccuccgcuugucacgacggcaccucauggcuuacuauuggcaucagcgggccugauaacggagcaguagccguucugaaauauaaugguauuaucacagacaccaucaagaguuggcggaacaauauuuugcgcacgcaggagucugagugcgcuugugugaacggcuccugcuucacugucaugaccgaugggccaagcaacggacaggccucguacaagauauuuaaaauggaaaagggcaaaguggugaagucugucgagcucaaugcgcccaacuaucacuacgaagaguguuccugcuauccugacgcaggagagaucacauguguuugcagagauaauuggcaugggucaaacaggccaugggugaguuucaaucagaaccuggaauaccaaauuggauauaucugcagcggcauauuuggcgacaauccgcggccccacgaugggacuggauccugugguccuguaucuccaaacggcgccuacgggauuaaaggauucagcuuuaaguacggcaaugguguguggaucgggcgcaccaagucaacaaacagucgauccggcuucgagaugaucugggaccccaauggauggaccggcacggauagcaacuuuucugucaaacaggacauuguggcuaucacugacuggucaggguauagugguagcuucguucagcauccugaacugacaggucucgauugcauuagaccauguuucuggguggaguuaauaaggggccggcccaaggaauccaccaucuggacuucugggucgagcauuuccuuuugcggagucaauucagacacagugaguuggucuuggccggaugacgccgagcugccuuucaccaucgauaaauga

SEQ ID NO: 149095 - RNA, 1350 nt, Artificial Sequence
  derived and/or modified CDS sequence (opt3) from neuraminidase__InfluenzaA__AEO88990
augaaccccaaucagaagaucauuaccauaggcagcaucugcauggugauugggaucgucucccugaugcuccaaauuggaaacaugaucucuauauggguuucacacaguauccagacagguaaucagcaucaggccgagccuauuagaaacacuaauuuccuuacggaaaacgcuguggcaagcguaacccuggccggcaauuccucuuuguguccagugagggggugggcgguccacucgaaagacaacucaauccggauuggaagcaagggcgauguguuuguuauccgcgagccguucauaaguugcucccauuuagaaugucgaacauuuuuccugacucaaggugcucuacucaaugacaaacacucuaacgggaccgugaaggaucguagcccccauagaacacugauguccugcccugucggagaggccccaucacccuacaauaguagguuugaaagcguggcauggucugccuccgcuugucacgacggcaccucauggcuuacuauuggcaucagcgggccugauaacggagcaguagccguucugaaauauaaugguauuaucacagacaccaucaagaguuggcggaacaauauuuugcgcacgcaggagucugagugcgcuugugugaacggcuccugcuucacugucaugaccgaugggccaagcaacggacaggccucguacaagauauuuaaaauggaaaagggcaaaguggugaagucugucgagcucaaugcgcccaacuaucacuacgaagaguguuccugcuauccugacgcaggagagaucacauguguuugcagagauaauuggcaugggucaaacaggccaugggugaguuucaaucagaaccuggaauaccaaauuggauauaucugcagcggcguauuuggcgacaauccgcggcccaacgaugggacuggauccugugguccugugucuccaaauggcgccuacgggauaaaaggauucagcuuuaaguacggcaacggugucuggauugggcgcaccaagucaacaaauagucgauccggcuucgagaugaucugggaccccaacggauggaccggcacggauagcaauuuuucugugaaacaggacaucguugcuauuacugacuggucaggguauagugguagcuucgugcagcacccugaacugacaggucucgauugcaucagaccauguuucugggucgaguuaauuaggggccggcccaaggaauccaccauauggacuucugggucgagcaucuccuuuugcggagugaacucagacacaguaaguuggucuuggccggaugacgccgagcugccuuucaccauugauaaauga

SEQ ID NO: 149096 - RNA, 1350 nt, Artificial Sequence
  derived and/or modified CDS sequence (opt3) from neuraminidase__InfluenzaA__AEO88998
augaaccccaaucagaagaucauuaccauaggcagcaucugcauggugauugggaucgucucccugaugcuccaaauuggaaacaugaucucuauauggguuucacacaguauccagacagguaaucagcaucaggccgagccuauuagaaacacuaauuuccuuacggaaaacgcuguggcaagcguaacccuggccggcaauuccucuuuguguccaaucagggggugggcggugcacucgaaagacaacucaauucggaucggaagcaagggcgaugucuuugugauacgcgagccguucauuaguugcucccauuuagaaugucgaacauuuuuccugacucaaggugcucuacucaaugacaaacacucuaacgggaccguuaaggaucguagcccccauagaacacugauguccugcccugugggagaggccccaucacccuacaauaguagguuugaaagcgucgcauggucugccuccgcuugucacgacggcaccucauggcuuacuaucggcauuagcgggccugauaacggagcaguggccguacugaaauauaaugguaucaucacagacaccauuaagaguuggcggaacaauauauugcgcacgcaggagucugagugcgcuuguguuaacggcuccugcuucacugugaugaccgaugggccaagcaacgaacaggccucguacaagaucuuuaaaauggagaagggaaaagucgugaagucuguggaacucaaugcgcccaacuaucacuacgaggaguguuccugcuauccugacgcaggcgaaauuaucugugucugcagagauaauuggcaugguucaaacaggccauggguuaguuucaaucagaaccuggaguaccaaauaggguauauuugcagcggaguguuuggcgacaauccgcggcccaacgauggcacaggguccuguggaccuguaucuccaaauggugccuacggcaucaaaggguucagcuuuaaguacggaaacggcguguggaucggucgcacuaagucaaccaauagucgauccggguucgaaaugauuugggaccccaacggcuggacaggaaccgauagcaauuuuucugucaaacaggacaucguggcuauuacggacuggucaggcuauagugggagcuucguucagcacccugagcugacuggacucgauugcauaagaccauguuucuggguggaauuaaucaggggucggcccaaggaguccacaauuuggaccucuggcucgagcaucuccuuuugcggggucaacucagacacugugaguuggucuuggccggauggagccgagcugccuuucacaaucgacaaauga

SEQ ID NO: 149097 - RNA, 1350 nt, Artificial Sequence
  derived and/or modified CDS sequence (opt3) from neuraminidase__InfluenzaA__AEO89006
augaaccccaaucagaagaucauuaccauaggcagcaucugcauggugauugggaucgucucccugaugcuccaaauuggaaacaugaucucuauauggguuucacacaguauccagacagguaaucagcaucaggccgagccuauuagaaacacuaauuuccuuacggaaaacgcuguggcaagcguaacccuggccggcaauuccucuuuguguccagugagggggugggcgguccacucgaaagacaacucaauccggauuggaagcaagggcgauguguuuguuauccgcgagccguucauaaguugcucccauuuagaaugucgaacauuuuuccugacucaaggugcucuacucaaugacaaacacucuaacgggaccgugaaggaucguagcccccauagaacacugauguccugcccugucggagaggccccaucacccuacaauaguagguuugaaagcguggcauggucugccuccgcuugucacgacggcaccucauggcuuacuauuggcaucagcgggccugauaacggagcaguagccguucugaaauauaaugguauuaucacagacaccaucaagaguuggcggaacaauauuuugcgcacgcaggagucugagugcgcuugugugaacggcuccugcuucacugucaugaccgaugggccaagcaacggacaggccucguacaagauauuuaaaauggaaaagggcaaaguggugaagucugucgagcucaaugcgcccaacuaucacuacgaagaguguuccugcuauccugacgcaggagagaucacauguguuugcagagauaauuggcaugggucaaacaggccaugggugaguuucaaucagaaccuggaauaccaaauuggauauaucugcagcggcguauuuggcgacaauccgcggcccaacgaugggacuggauccugugguccugugucuccaaauggcgccuacgggauaaaaggauucagcuuuaaguacggcaacggugucuggauugggcgcaccaagucaacaaauagucgauccggcuucgagaugaucugggaccccaacggauggaccggcacggauagcgacuuuucugugaaacaggacaucauugcuaucacugauuggucaggguauagugguagcuucguucagcacccugaacugacaggucucgacugcauuagaccauguuucuggguggaguuaauaaggggccggcccaaggaauccaccaucuggacuucugggucgagcauuuccuuuugcggagucaauucagauacagugaguuggucuuggccggacggcgccgagcugccuuucaccaucgauaaauga

SEQ ID NO: 149098 - RNA, 1350 nt, Artificial Sequence
  derived and/or modified CDS sequence (opt3) from neuraminidase__InfluenzaA__AEO89023
augaaccccaaucagaagaucauuaccauaggcagcaucugcauggugauugggaucgucucccugaugcuccaaauuggaaacaugguuucucuuugggugucacacaguauccagacagguaaucagcaucagguagagccuauaagcaacacuaauuuccugacggaaaaagccguggcuuccgucaccuuggcaggcaacucuucguuauguccaaucagagggugggccgugcacucaaaggacaauagcauuaggaucggaaguaaaggcgauguuuuugugauucgggagccguucaucuccugcucucaucuggaaugucgcacauuuuuccuaacucaaggugcgcuccugaacgacaagcacagcaaugggaccgucaaagaucgaagcccccaucguacacuuaugucaugcccugugggagaggcuccaagucccuacaacagcagauuugaaucuguagccugguccgcaucagccugucacgacggcaccagcuggcugacuauaggcauuagugggccugauaauggagcuguugcaguguugaaguauaacgguaugaucacagacaccauuaagucuuggaggaauaacauccuccggacgcaggaguccgagugcgccugugucaauggcagcugcuucacugugaugaccgaugggccaucgaacggacaggcuucuuacaaaaucuuuaagauggaaaaaggcaagguggucaaauccguugagcuggacgcccccaacuaucacuacgaagaguguucaugcuauccugaugcgggugagauuacaugugugugccgcgacaauuggcaugggaguaacagaccauggguauccuucaaucagaaccuggaauaccaaauaggauauaucugcuccggcguguuuggcgauaauccgaggcccaacgacgggacuggaucuugugguccugucagcccaaauggcgcauacggggugaagggauucucauuuaaguacggcaacgguguuuggauugggcggaccaaaagucccuccagccgcucuggcuucgagaugaucugggauccuaauggauggacagaaaccgacucaaguuuuagcgugaagcaggacauagucgccauuacggauugguccggcuauucugggucguucgugcagcacccagagcucacuggauuagacugcauccgacccuguuucuggguagaacugaucagagguaggccgaaagagagcacaauuuggaccuccggcucaaguaucucuuuuugcgggguuaacagcgauacuguguccuggucauggccugacggagcugagcuucccuucacaauugauaaguga

SEQ ID NO: 149099 - RNA, 1350 nt, Artificial Sequence
  derived and/or modified CDS sequence (opt3) from neuraminidase__InfluenzaA__AEO89032
augaaccccaaucagaagaucauuaccauaggcagcaucugcauggugauugggaucgucucccugaugcuccaaauuggaaacaugaucucuauauggguuucacacaguauccagacagguaaucagcaucaggccgagccuauuagaaacacuaauuuccuuacggaaaacgcuguggcaagcguaacccuggccggcaauuccucuuuguguccagugagggggugggcgguccacucgaaagacaacucaauccggauuggaagcaagggcgauguguuuguuauccgcgagccguucauaaguugcucccauuuagaaugucgaacauuuuuccugacucaaggugcucuacucaaugacaaacacucuaacgggaccgugaaggaucguagcccccauagaacacugauguccugcccugucggagaggccccaucacccuacaauaguagguuugaaagcguggcauggucugccuccgcuugucacgacggcaccucauggcuuacuauuggcaucagcgggccugauaacggagcaguagccguucugaaauauaaugguauuaucacagacaccaucaagaguuggcggaacaauauuuugcgcacgcaggagucugagugcgcuugugugaacggcuccugcuucacugucaugaccgaugggccaagcaacggacaggccucguacaagauauuuaaaauggaaaagggcaaaguggugaagucugucgagcucaaugcgcccaacuaucacuacgaagaguguuccugcuauccugacgcaggagagaucacauguguuugcagagauaauuggcaugggucaaacaggccaugggugaguuucaaucagaaccuggaauaccaaauuggauauaucugcagcggcguauuuggcgacaauccgcggcccaacgaugggacuggauccugugguccugugucuccaaauggcgccuacgggauaaaaggauucagcuuuaaguacggcaacggugucuggauugggcgcaccaagucaacaaauagucgauccggcuucgagaugaucugggaccccaacggauggaccggcacggauagcaauuuuucugugaaacaggacaucguugcuauuacugacuggucaggguauagugguagcuucgugcagcacccugaacugacaggucucgauugcaucagaccauguuucugggucgaguuaauuaggggccggcccaaggaauccaccauauggacuucugggucgagcaucuccuuuugcggagugaacucagacacaguaaguuggucuuggccggauggcgccgagcugccuuucaccauugacaaauga

SEQ ID NO: 149100 - RNA, 1350 nt, Artificial Sequence
  derived and/or modified CDS sequence (opt3) from neuraminidase__InfluenzaA__AEO89041
augaaccccaaucagaagaucauuaccauaggcagcaucugcauggugauugggcuggucucccucaugcuucaaaucggaaacaugauuucuaucuggguuucacacaguauacagacagguaaucagcaucaggccgagccuaucagaaacacuaauuuccugacggaaaacgcuguggcaagcguaaccuuggccggcaauuccucuuuauguccagugagggggugggcgguccacucgaaagacaacucaauucggaucggaagcaagggcgauguguuuguuauucgcgagccguucaucaguugcucccaucuggaaugucgaacauuuuuccuaacucaaggugcucuccugaaugacaaacacucuaacgggaccgugaaggaucguagcccccauagaacacuuauguccugcccugucggagaggccccaucacccuacaauaguagguuugaaagcguggcauggucugccuccgcuugucacgacggcaccucauggcugacuauaggcauuagcgggccugauaacggagcaguagccguuuugaaauauaaugguaucauuacagacaccaucaagaguuggcggaacaauauccuccgcacgcaggagucugagugcgcuugugugaacggcuccugcuucacugucaugaccgaugggccaagcaacggacaggccucguacaagauuuuuaaaauggaaaagggcaaaguggugaagucugucgagcugaaugcgcccaacuaucacuacgaagaguguuccugcuauccugacgcaggagagauaacauguguuugcagagauaauuggcaugggucaaacaggccaugggugaguuucaaucagaaccuggaauaccaaaucggauauauuugcagcggcguauuuggcgacaauccgcggcccaacgaugggacuggauccugugguccugugucuccaaauggcgccuacgggaucaaaggauucagcuuuaaguacggcaacggugucuggauagggcgcaccaagucaacaaauagucgauccggcuucgagaugauuugggaccccaacggauggaccggcacggauagcaauuuuucugugaaacaggacaucguugcuaucacugacuggucaggguauagugguagcuucgugcagcacccugaacucacagguuuagauugcauuagaccauguuucuggaucgagcugauuaggggccggcccaaggaauccaccauauggacuucugggucgagcaucuccuuuugcggagucaacucagacacagugaguuggucuuggccggauggcgccgagcuuccuuucaccauugacaaauga

SEQ ID NO: 149101 - RNA, 1350 nt, Artificial Sequence
  derived and/or modified CDS sequence (opt3) from neuraminidase__InfluenzaA__AEO89050
augaaccccaaucagaagaucauuaccauaggcagcaucugcauggugauugggaucgucucccugaugcuccaaauuggaaacaugaucucuauauggguuucacacaguauccagacagguaaucagcaucaggccgagccuauuagaaacacuaauuuccuuacggaaaacgcuguggcaagcguaacccuggccggcaauuccucuuuguguccaaucagggggugggcggugcacucgaaagacaacucaauucggaucggaagcaagggcgaugucuuugugauacgcgagccguucauuaguugcucccauuuagaaugucgaacauuuuuccugacucaaggugcucuacucaaugacaaacacucuaacgggaccguuaaggaucguagcccccauagaacacugauguccugcccuaugggagaggccccaucacccuacaauaguagguuugaaagcguggcauggucugccuccgcuugucacgacggcaccucauggcuuacuaucggcauuagcgggccugauaacggagcagucgccgugcugaaauauaaugguaucaucacagacaccauuaagaguuggcggaacaauauauugcgcacgcaggagucugagugcgcuuguguaaacggcuccugcuucacuguuaugaccgaugggccaagcaacggacaggccucguacaagaucuuuaaaauggaaaagggcaaaguggucaagucuguggagcucaaugcgcccaacuaucacuacgaagaguguuccugcuauccugacgccggugagauuaucugugugugcagagauaauuggcaugggucaaacaggccaugggucaguuucaaucagaaccuggaauaccaaauaggauauauuugcagcggcguuuuuggcgacaauccgcggcccaacgaugggacaggauccugugguccugugucuccaaauggcgcauacgggaucaaaggauucagcuuuaaguacggcaacgguguauggaucgggcgcacuaagucaaccaauagucgauccggcuucgagaugauuugggaccccaacggauggacaggcaccgauagcgacuuuucugugaaacaggacaucgucgcuauuacggauuggucaggguauaguggaucauucgugcagcacccugaacugacuggucucgacugcauaagaccauguuucuggguugaguuaaucaggggccggcccaaggaauccacaauuuggaccucugggucgagcaucuccuuuugcggagugaauagcgauacugucaguuggucuuggccggacggcgccgagcugccuuucacaaucgauaaauga

SEQ ID NO: 149102 - RNA, 1350 nt, Artificial Sequence
  derived and/or modified CDS sequence (opt3) from neuraminidase__InfluenzaA__AEO89058
augaaccccaaucagaagaucauuaccauaggcagcaucugcauggugauugggaucgucucccugaugcuccaaauuggaaacaugaucucuauauggguuucacacaguauccagacagguaaucagagacaggccgagccuauuagcaacacuaaauuccuuacggaaaaggcuguggcauccguaacccuggccggcaauucuucguuguguccaaucucagggugggcgguguacagcaaagacaacaguauuaggaucggaucccggggcgaugucuuugugauacgcgagccguucauuucuugcagccauuuagaaugucgaacauuuuuccugacucaaggugcucuacucaaugacaagcacuccaacgggaccguuaaagaucguucaccccauagaacacugaugaguugcccugugggagaggccccaagccccuauaauucuagguuugaauccgucgcauggucagccagcgcuugucacgacggcaccaguuggcuuacuaucggcauuucugggccugauaacggagcaguggccguacugaaguacaaugguaucaucacagacaccauuaaguccuggcggaacaauauauugcgcacgcaggagagcgagugcgcuuguguuaacggcucgugcuucacugugaugaccgaugggccaucuaauggacaggccuccuauaaaaucuuuaagauggaaaaaggcaaggucgugaaaucaguggagcucgacgcgcccaacuaccauuaugaagaguguaguugcuacccugaugccggugagauuacaugugucugcagagacaacuggcacgggagcaauaggccauggguuuccuucaaccagaaucuggauuaucaaaucggauacauaugcucuggcguguuuggcgacaacccgcggcccaaugaugggacuggaagcugugguccuguaucaccaaacggcgcauacggggugaagggauucaguuuuaaguauggcaauggugucuggauugggcgcaccaaauccacaaacagccgaucuggcuucgaaaugaucugggaccccaauggauggaccggcacggacucaaguuuuagcgugaagcaggauaucguugcuauuacugacugguccggguacucuggaucguucgugcagcacccugagcugacaggucucgauugcaucagaccauguuucugggucgaauuaauuaggggccggcccaaagagagcaccauauggacuuccgggucaaguaucucuuuuugcggagugaacagcgacacaguauccuggucauggccggauggcgccgaacugccuuucaccauugacaaguga

SEQ ID NO: 149103 - RNA, 1350 nt, Artificial Sequence
  derived and/or modified CDS sequence (opt3) from neuraminidase__InfluenzaA__AEO89075
augaaccccaaucagaagaucauuaccauaggcagcaucugcauggugauugggaucgucucccugaugcuccaaauuggaaacaugaucucuauauggguuucacacaguauccagagagguaaucuuaaccagguggagccuauuagcaauacaaacuuccugacugaaaaagccguagcuuccgugacguuggcaggcaauucuucguuauguccaaucagggggugggccauucauucaaaggacaacagcauccggauaggaaguaaaggcgaugucuuugugauucgcgagccguucaucuccugcucucaccuggaaugucgaaccuuuuuccuaacacagggugcgcuccugaaugacaagcauagcaacgggacuguuaaagaucguucaccccacagaacccuuauguccugcccugugggagaggucccaagucccuacaauagcagguuugaaucuguggcuugguccgccucagcaugucaugacggcacaagcuggcugaccauuggcaucagugggccugauaacggagccguagcuguugugaaguauaaugguaucauuacugacacaauaaagucuuggcggaacaauaucuugcgcacccaagaguccgagugcgcaugugucaacggcagcugcuucacggugaugacugaugggccaucgaacggacaggccucuuacaaaauuuuuaagauggaaaaaggcaaggugaucaaauccgucgagcucgacgcucccaauuaucacuacgaagaguguucaugcuauccugaugccggugagauaaccuguguuugcagagacaacuggcacgggaguaauaggccaugggugagcuucaaccagaaucuggaauaccagauuggauauaucugcuccggcguauuuggcgauaacccgcggcccaaugacgggacaggaucuugugguccugugagcccaaacggcgcguacggggucaagggauucucauuuaaguacggcaaugguguguggaucgggcgcacuaaaagucccaacucccgaagcggcuucgagaugauuugggauccuaauggauggucugaaaccgacucaaguuuuagcguuaagcaagacaucguggcaauuacagauugguccggcuauucugggucguucguccagcauccagagcugaccggacucgacugcauaagacccuguuucuggguggaauuaaucaggggucggccgaaagagagcacgauuuggacuuccggcucaaguaucucuuuuugcgggguaaacagcgauacaguuuccuggucauggccugacggagccgagcugcccuucaccaucgauaaguga

SEQ ID NO: 149104 - RNA, 1350 nt, Artificial Sequence
  derived and/or modified CDS sequence (opt3) from neuraminidase__InfluenzaA__AEO89084
augaaccccaaucagaagaucauuaccauaggcagcaucugcauggugauugggaucgucucccugaugcuccaaauuggaaacaugaucucuauauggaucucauacaguauucagacagguaaucagcaccaggccgagccuacuagaaacgcuacguuccuuaccgaaaaugcaguugccagcgugacacuggcgggcaacuccucuuuguguccaguaagggggugggcugugcauucgaaagacaauucaauccggauuggaagcaagggcgaugucuuugugauccgcgagccguucauaaguugcucccacuuagaaugucgaaccuuuuuccugacucaaggugcccuacucaacgacaaacauucuaaugggacaguuaaggaucguagcccccacagaacccugauguccugcccugugggagaggcaccaucacccuauaacaguagguuugaaagcgucgccuggucugcuuccgcaugucaugacggcacuucauggcuuacaauuggcaucagcgggccugauaauggagccguggcuguacugaaauacaacgguauuaucaccgacacgaucaagaguuggcggaauaacauuuugcgcacucaggagucugagugcgccuguguuaauggcuccugcuucaccgugaugacagaugggccaagcgacggacaggcgucguauaagauauuuaaaauggaaaagggcaaagucgugaagucuguggagcucaucgcacccaacuaccacuaugaagaguguuccugcuacccugaugccggugagauuacuugugucugcagagacaacuggcacgggucaaauaggccauggguuaguuucaaccagaaucuggaauaucaaaucggauacauaugcagcggcguguuuggcgauaacccgcggcccaaugacgggaccggauccugugguccuguaucuccaaacggcgcuuacgggauuaaaggauucagcuuuaaguauggcaaugguguguggaucgggcgcacaaagucaaccaacagucgauccggcuucgagaugaucugggaucccaauggauggacggaaacugacagcaacuuuucugucaaacaggacauuguggccaucacagauuggucaggcuacagugggagcuucguucagcauccugagcugaccggacucgacugcauuagaccauguuucuggguggaauuaauaaggggucggcccaaggaguccacuaucuggacaucuggcucgagcauuuccuuuugcggggucaauucagauaccgugaguuggucuuggccggacggagcagagcugccuuucacgaucgauaaauga

SEQ ID NO: 149105 - RNA, 1350 nt, Artificial Sequence
  derived and/or modified CDS sequence (opt3) from neuraminidase__InfluenzaA__AEO89093
augaaccccaaucagaagaucauuaccauaggcagcaucugcauggugauugggaucgucucccugaugcuccaaauuggaaacaugaucucucuuuggguuucacacaguauacagacagguaaucagcaucagguggagccuaucagcaacacuaauuuccugguagaaaaagccguggcuuccgucacguuggcaggcaacucuucguuauguccaauuagagggugggccgugcacucaaaggacaauagcaucaggauuggaaguaaaggcgauguuuuugugauccgggagccguucauauccugcucucaucuggaaugucgcaccuuuuuccuaacacaaggugcgcuccugaacgacaagcacagcaaugggacugucaaagaucgaagcccccaucguacccuuaugucaugcccugugggagaggcuccaagucccuacaacagcagauuugaaucuguagccugguccgcaucagccugucacgacggcacaagcuggcugaccauuggcaucagugggccugauaauggagcuguugcaguguugaaguauaacgguaugauuacugacacaaucaagucuuggaggaauaacauccuccggacccaggaguccgagugcgccugugucaauggcagcugcuucacggugaugacugaugggccaucgaacggacaggcuucuuacaaaauuuuuaagauggaaaaaggccgcguggucaaguccguugagcuggacgcccccaacuaucacuacgaagaguguucaugcuauccugaugcgggugagauaaccugugugugcagagacaauuggcaugggaguaacaggccauggguauccuucaaucagaaccuggaauaccaaaucggauauauuugcuccggcguguuuggcgauaauccgcggcccaacgacgggacaggaucuugugguccugucagcucaaauggcgcauacggggugaaaggauucaguuuuaaguacggcaacgguguuuggaucgggcgcacuaaguccccaaauagccgaucuggcuucgagaugauaugggaucccaacggauggaccgaaacagacucaaguuuuagcgugaaacaggacauugucgccaucaccgauugguccggcuauucugggucguucgugcagcacccugagcucacgggauuagacugcaucagaccauguuucuggguagaacugauuaggggucggcccaaggagagcacuaucuggacauccggcucaaguauuucuuuuugcgggguuaauagcgauaccguguccuggucauggccggacggagcugagcuuccuuucacuauagauaaauga

SEQ ID NO: 149106 - RNA, 1350 nt, Artificial Sequence
  derived and/or modified CDS sequence (opt3) from neuraminidase__InfluenzaA__AEO89102
augaaccccaaucagaagaucauuaccauaggcagcaucugcauggugauugggaucgucucccugaugcuccaaauuggaaacaugaucucuauauggaucucacacaguauucagacagguaaucagaaccagguugagccuaucagcaauacuaacuuccuuacggaaaaagccguggcuuccguaauucuggcaggcaauucuucguuguguccaaucagagggugggccauacauucaaaggacaacagcauuaggaucggaaguaaaggcgauguguuugucauucgggagccguucaucuccugcucucacuuagaaugucgcaccuuuuuccugacacaaggugcgcuacucaaugacaagcauagcaacgggacugugaaagaucgaucaccccaccguacccugauguccugcccuguuggagaggcuccaagucccuacaauagcagauuugaaucuguggccugguccgcaucagccugucaugacggcacaagcuggcuuaccaucggcauuagugggccugauucuggagcugucgcagugcugaaguauaacgguauaaucacugacacaauuaaguccuggaggaauaacaucuugcggacccaggagagcgagugcgccuguguaaauggcucgugcuucacgguuaugacugaugggccaucuaacggacaggcuuccuacaaaauauuuaagauggaaaaaggcaaggugauuaaaucagucgagcucgacgcccccaacuaucacuacgaagaguguaguugcuauccugaugcgggugagaucaccugugugugccgcgacaauuggcacgggagcaacagaccauggguguccuucaaucagaaccuggaauaccaaaucggauauauuugcucuggcgucuuuggcgauaauccgaggcccaacgacgggacaggaagcugugguccuguuucacauaauggcgcauacggggugaagggauucaguuuuaaguacggcaacgguguauggaucgggcggacuaaauccccaaauagccgcucuggcuucgagaugauuugggaucccaacggauggucagaaaccgacaguagcuuuuccgugaagcaggacauagucgccaucacagauuggucuggcuauucggggagcuucgugcagcacccugagcugaccggacucgacugcauucgaccauguuucuggguugaauuaaucagagguaggcccaaagaguccacgguguggacuucaggcaguucuaucagcuuuugcggggucaauuccgauacagugucauggagcuggccggacggagcugagcugccuuucaccauugauaaguga

SEQ ID NO: 149107 - RNA, 1350 nt, Artificial Sequence
  derived and/or modified CDS sequence (opt3) from neuraminidase__InfluenzaA__AEO89111
augaaccccaaucagaagaucauuaccauaggcagcaucugcauggugauugggaucgucucccugaugcuccaaauuggaaacaucauaucuaucuggguuucacacaguauucagacagguaaucagcaucaggacgagccuaucagaaacgccaaugugcuuacugaaaacgcuguagcaagcgugacgcuggccggcaauuccucuuuguguccagucagggggugggcggugcacucgaaagauaacucaauucggaucggaagcaagggcgacguuuucgugauacgcgagccguuuauuaguugcucccauuuagaaugucgaaccuucuuucugacacaaggugcucuacucaaugauaaacacucuaacgggacugucaaggaccguagcccccauagaacccugauguccugcccugugggagaggccccaucacccuacaauaguagguucgaaagcguagcauggucugccuccgcuugucacgauggcacaucauggcuuaccaucggcauuagcgggccugacaacggagcaguugccgugcugaaauauaaugguaucaucacugauacaauuaagaguuggcggaacaauauauugcgcacccaggagucugagugcgcuugugucaacggcuccugcuuuacggugaugacugacgggccaagcaacggacaggccucguacaagaucuucaaaauggaaaagggcaaaguggucaagucuguugagcucaaugcgcccaacuaucacuacgaagaguguuccugcuauccugaugccggugagauuaccugugugugcagagacaauuggcaugggucaaacaggccauggguaaguuuuaaucagaaccuggaauaccaaaucggauauauaugcagcggcguguucggcgauaauccgcggcccaacgacgggacaggauccugugauccugucucuccaaauggugcauacggcauuaaaggguuuagcuucaaguacggaaacggcguguggaucggucgcacuaagucaaccaauagucgauccggguuugagaugaucugggaccccaacggcuggacagaaaccgacagcaauuucucuguuaaacaggauauuguggcuaucacggacuggucaggauauaguggcagcuuuguccagcacccugagcugacugggcucgauugcauuagaccauguuucuggguggaauuaauaaggggacggcccaaggaguccacaaucuggaccucugguucgagcauuuccuucugcggcguaaacucagacacuguuaguuggucuuggccggauggggccgagcugccuuuuacaaucgacaaauga

SEQ ID NO: 149108 - RNA, 1350 nt, Artificial Sequence
  derived and/or modified CDS sequence (opt3) from neuraminidase__InfluenzaA__AEO89120
augaaccccaaucagaagaucauuaccauaggcagcaucugcauggugauugggaucgucucccugaugcuccaaauuggaaacaugaucucuauauggguuucacacaguauccagacagguaaucagcaucaggccgagccuauuagaaacgcuagcuuccuuacugaaaaugcaguggccuccguaacgcuggcgggcaacucuucguuguguccagugagggggugggcuguccacucaaaagacaauagcauccggauuggaaguaagggcgauguguuuguuauccgcgagccguucauauccugcucucauuuagaaugucgaaccuuuuuccugacacaaggugcccuacucaacgacaaacacagcaaugggacugugaaggaucguucaccccauagaacccugauguccugcccugucggagaggcaccaagucccuacaacagcagguuugaaucuguggccugguccgcuucagcaugucacgacggcauuagcuggcuuacaaucggcauuagugggccugauaauggagccguagcuguucugaaauauaacgguaucaucaccgacacuauuaagucuuggcggaauaacauauugcgcacacaggaguccgagugcgccugugugaauggcagcugcuucaccgucaugacggaugggccaucgaacggacaggcgucuuacaagaucuuuaaaauggaaaagggcaaaguggugaaguccgucgagcucaacgcacccaauuaucacuacgaagaguguucaugcuauccugacgccggugagauuacuuguguuugcagagauaacuggcaugggaguaauaggccaugggugagcuucaaccagaaucuggaauaccaaaucggauauauaugcuccggcguauuuggcgacaacccgcggcccaaugaugggaccggaucuugugguccugugagcccaaacggcgcuuacgggauuaaaggauucucauuuaaguacggcaauggugucuggaucgggcgcacaaagaguacuaacucccgaagcggcuucgagaugaucugggaccccaauggaugggccgaaaccgauucuaacuuuucagugaaacaggacauuguugcaaucacagacuggaguggcuauagcggguccuucgugcagcacccugagcugaccggacucgauugcauuagaccauguuucugggucgaauuaauaaggggucggcccaaggagggcacgaucuggacuucugggucgagcauuuccuuuugcggaguaaauucagacacagugaguuggucuuggccggauggcgcugagcugccuuucaccaucgacaaauga

SEQ ID NO: 149109 - RNA, 1350 nt, Artificial Sequence
  derived and/or modified CDS sequence (opt3) from neuraminidase__InfluenzaA__AEO89129
augaaccccaaucagaagaucauuaccauaggcagcaucugcauggugauugggaucgucucccugaugcuccaaauuggaaacaucauaucuaucuggguuucacacaguacacagacugguaaucagcaucaggacgagccuauuagaaacgccaauuuccuuacggaaaacgcuguggcaagcguaacccuggccggcaauuccucuuuguguccagugagggggugggcgguccacucgaaagauaacucaauccgggugggaagcaagggcgacguuuuugugauucgcgagccguucaucaguugcucccauuuagaaugucgaacauuuuuccugacucaaggugcucuacucaaugauaaacacucuaacgggaccgucaaggaccguagcccccauagaacacugauguccugcccugugggagaggccccaucacccuacaauaguagguuugaaagcguagcauggucugccuccgcuugucacgauggcaccucauggcuuacuauaggcauuagcgggccugacaacggagcaguugccgugcugaaauauaaugguaucauuacagauaccaucaagaguuggcggaacaauaucuugcgcacgcaggagucugagugcgcuugugucaacggcuccugcuucacugugaugaccgacgggccaagcaacggacaggccucguacaagauuuuuaaaauggaaaagggcaaaguggucaagucuguugagcucaaugcgcccaacuaucacuacgaagaguguuccugcuauccugaugccggugagauaacaugugugugcagagacaauuggcaugggucaaacaggccauggguaaguuucaaucagaaccuggaauaccaaaucggauauauuugcagcggcguguuuggcgauaauccgcggcccaacgacgggacuggauccugugauccugucucuccaaauggugcauacggcaucaaaggguucagcuuuaaguacggaaacggcguguggauaggucgcaccaagucaacaaauagucgauccggguucgagaugauuugggaccccaacggcuggaccgaaacggacagcaauuuuucuguuaaacaggauaucguggcuaucacugacuggucaggauauaguggcagcuucguccagcacccugagcugacagggcucgauugcauuagaccauguuucuggguggaauuaaucaggggacggcccaaggaguccaccauuuggacuucugguucgagcauauccuuuugcggcguaaacucagacacaguuaguuggucuuggccggauggggccgagcugccuuucaccaucgacaaauga

SEQ ID NO: 149110 - RNA, 1350 nt, Artificial Sequence
  derived and/or modified CDS sequence (opt3) from neuraminidase__InfluenzaA__AEO89138
augaaccccaaucagaagaucauuaccauaggcagcaucugcauggugacagggauugucucccugaugcuccaaaucggaaacauuaucucuauguggguuucacacaguauacagacuagaaaucagcaucaggccgagccuaucaggaacacgaauuuccuuaccgaaaacgcuguggcaagcguaacacugacugguaauuccucuuuguguccaauucggggcugggccgugcacucgaaagacaacucaauccgcauugggagcaagggagaugucuuugugauccgagagccguucauaaguugcucccauuuagaaugucguaccuuuuuccugacacaaggcgcgcuacucaaugacaaacacucuaacgguaccguuaaggauagaagcccccauaggacucugauguccugcccugugggggaggcuccaucacccuacaauagucgguuugaaagcgucgccuggucugcauccgccugucacgacggaacaucauggcuuaccauuggcaucagcggcccugauaacggggcuguggcaguacugaaauauaauggaauuaucacggacacuaucaagaguuggcgcaacaauauuuugagaacccaggagucugagugcgccuguguuaacgguuccugcuucacagugaugacugauggcccaagcaacgggcaggcuucguacaagauauuuaaaauggaaaagggaaaagucgugaagucuguggagcucaaugcccccaacuaucacuacgaagaguguuccugcuauccugacgcgggcgagaucauuugugucugcagggauaauuggcaugguucaaaccggccauggguuaguuucaaucagaaccuggaauaccaaaucggguauauaugcagcggaguguuuggcgacaauccgcgccccaacgauggcaccggguccuguggaccuguaucuccaaauggugcauacggcauuaaaggguucagcuuuaaguacggaaacggcguguggaucggucgaacaaagucaaccaauaguagauccggguucgagaugaucugggaccccaacggcuggacgggaacugauaaugacuuuagcgucaaacaggacauuguggccaucacagauuggucuggcuauucagggaguuucguucagcacccugaacugaccggacucgacugcauuaggccauguuucuggguggaguuaauacggggucgucccaaggaaagcacugucuggacauccgggucuucgaucagcuuuugcggcgugaacuccgauaccguaucauggaguuggccggacggagcugagcugccuuucacgauugauaaauga

SEQ ID NO: 149111 - RNA, 1350 nt, Artificial Sequence
  derived and/or modified CDS sequence (opt3) from neuraminidase__InfluenzaA__AEO89156
augaaccccaaucagaagaucauuaccauaggcagcaucugcauggugacagggauugucucccugaugcuccaaaucggaaacauuacuucuauguggguuucacacaguauccagacgagaaaucagcaucaggccgagccuauaaggaacaccaauuuccuuacagaaaacgcuguggcaagcguaacucuggccgguaauuccucuuuguguccaauccggggcugggcggugcacucgaaagacaacucaauucgcaucgggagcaagggagaugucuuugugauucgagagccguucaucaguugcucccauuuagaaugucguaccuuuuuccugacacaaggcgcucuacucaaugacaaacacucuaacgguaccguuaaggauagaagcccccauaggacucugauguccugcccugugggggaggccccaucacccuacaauagucgguuugaaagcgucgcauggucugccuccgcuugucacgacggaacaucauggcuuaccauaggcauuagcggcccugauaacggggcaguggccguacugaaauauaauggaaucauuacggacacuaucaagaguuggcgcaacaauaucuugagaacccaggagucugagugcgcuuguguuaacgguuccugcuucacagugaugacugauggcccaagcaacgggcaggccucguacaagauuuuuaaaauggaaaagggaaaagucgugaagucuguggagcucaaugcgcccaacuaucacuacgaagaguguuccugcuauccugacgcaggcgagauaaucugugucugcagggauaauuggcaugguucaaaccggccauggguuaguuucaaucagaaccuggaauaccaaauuggguauaucugcagcggaguguuuggcgacaauccgcgccccaacgauggcaccggguccuguggaccuguaucuccaaauggugccuacggcauaaaaggguucagcuuuaaguacggaaacggcguguggauuggucgaacaaagucaaccaauaguagauccggguucgagaugaucugggaccccaacggcuggacgggaacugauagcgacuuuucugucaaacaggacaucguggcuauuacagauuggucaggcuauagugggagcuucguucagcacccugaacugaccggacucgacugcaucaggccauguuucuggguggaguuaauucggggucgucccaaggaauccacuauauggacaucuggcucgagcaucuccuuuugcggggucaauucagauaccgugaguuggucuuggccggacggagccgagcugccuuucacgauugauaaauga

SEQ ID NO: 149112 - RNA, 1350 nt, Artificial Sequence
  derived and/or modified CDS sequence (opt3) from neuraminidase__InfluenzaA__AEO89174
augaaccccaaucagaagaucauuaccauaggcagcaucugcauggugacagggauugucucccugaugcuccaaaucggaaacauuaucucuauguggguuucacacaguauacagacuagaaaucagcaucaggccgagccuaucaggaacacgaauuuccuuaccgaaaacgcuguggcaagcguaacacuggccgguaauuccucuuuguguccaauucggggcugggcggugcacucgaaagacaacucaauccgcauugggagcaagggagaugucuuugugauccgagagccguucauaaguugcucccauuuagaaugucguaccuuuuuccugacucaaggcgcucuacucaaugacaaacacucuaacgguacaguuaaggauagaagcccccauaggacccugauguccugcccugugggggaggccccaucacccuacaauagucgguuugaaagcgucgcauggucugccuccgcuugucacgacggaacuucauggcuuacaauuggcaucagcggcccugauaacggggcaguggccguacugaaauauaauggaauuaucaccgacacgaucaagaguuggcgcaacaauauuuugagaacucaggagucugagugcgcuuguguuaacgguuccugcuucaccgugaugacagauggcccaagcaacgggcaggccucguacaagauauuuaaaauggaaaagggaaaagucgugaagucuguggagcucaaugcgcccaacuaucacuacgaagaguguuccugcuauccugacgcaggcgagaucauuugugucugcagggauaauuggcaugguucaaaccggccauggguuaguuucaaucagaaccuggaauaccaaaucggguauauaugcagcggaguguuuggcgacaauccgcgccccaacgauggcacuggguccuguggaccuguaucuccaaauggugccuacggcauuaaaggguucagcuuuaaguacggaaacggcguguggaucggucgaaccaagucaacaaauaguagauccggguucgagaugaucugggaccccaacggcuggaccggaacggauagcgacuuuucugucaaacaggacauuguggcuaucacugauuggucaggcuauagugggagcuucguucagcacccugaacugacaggacucgacugcauuaggccauguuucuggguggaguuaauacggggucgucccaaggaauccaccaucuggacuucuggcucgagcauuuccuuuugcggggucaauucagauacagugaguuggucuuggccggacggagccgagcugccuuucaccaucgauaaauga

SEQ ID NO: 149113 - RNA, 1350 nt, Artificial Sequence
  derived and/or modified CDS sequence (opt3) from neuraminidase__InfluenzaA__AEO89183
augaaccccaaucagaagaucgugaccauuggcagcauaugcauggucaucgggauuguuucccugaugcuccaaaucggaaacaugauuucuaucugggugucacacaguauacagacagguaaucagcaucagacugagccuaucagaaacacgaauuuccuuaccgaaaacacaguagccagcgugacucuggcuggcaauuccucuuuguguccaauuagggggugggcaguccacucgaaagacaacucaauccggauuggaagcaagggcgauguguuuguuauccgcgagccguucauaaguugcucccauuuagaaugucgaaccuuuuuccugacacaaggugcccuacucaaugacaaacacucuaacgggaccgugaaggaucguagcccccauagaacucugauguccugcccuauuggagaggcgccaucacccuacaauaguagguuugaaagcgucgcuuggucugccuccgcaugucacgacggcacaucauggcuuaccaucggcauuagcgggccugauaacggagccguggcuguacugaaauauaaugguaucaucacggacacuauuaagaguuggcggaacaauauauugcgcacccaggagucugagugcgcauguguuaacggcuccugcuucacagugaugacugaugggccaagcaacggacaggccucguacaagaucuuuaaaauggaaaagggcaaagucgugaagucuguggagcucaaugcucccaacuaucacuacgaagaguguuccugcuauccugacgccggugagauuaucugugucugcagagauaauuggcaugggucaaacaggccauggguuaguuucaaucagaaccuggaauaccaaauaggauauauuugcagcggcguguuuggcgacaauccgcggcccaacgaugggaaaggauccugugguccuguaucuccaaauggcgcguacggggugaagggauucagcuuuaaguacggcaacggugucuggaucgggcgcaccaaaucaacacacagucgauccggcuucgagaugaucugggaccccaauggauggaccggcacggauagcgaauuuucuaugaagcaggacauuguggcaaucacugacuggucaggguauagugguagcuucguucagcauccugagcugacaggacucgauugcauuagaccauguuucuggguggaauuaauaaggggccggcccaaagaguccaccaucuggacuucugggucgagcauuuccuuuugcggagucaacucagacacagugaguuggucuuggccggauggcgccgagcugccuuucaccaucgacaaguga

SEQ ID NO: 149114 - RNA, 1350 nt, Artificial Sequence
  derived and/or modified CDS sequence (opt3) from neuraminidase__InfluenzaA__AEO89205
augaaccccacccagaagaucauuacaauaggcagcaucugcauggugauugggaucgucucccugaugcuccaaauuggaaauaugaucucuauauggguuucacacaguauccagacugguaaccagcaucaggccgagccuauuagaaaugcuagcuuccuuacggaaaacgcaguggccuccguaacccuggcgggcaauucuucguuguguccagugagggggugggcuguccacucaaaagacaacagcauccggauuggaaguaagggcgauguguuuguuauccgcgagccguucauauccugcucucauuuagaaugucgaacauuuuuccugacucaaggugcccuacucaaugacaaacacagcaacgggaccgugaaggaucguucaccccauagaacacugauguccugcccugucggagaggcaccaagucccuacaauagcagguuugaaucuguggccugguccgcuucagcaugucacgacggcauuagcuggcuuaccaucggcauuagugggccugauaacggagccguagcuguucugaaauauaaugguaucaucacugacacaauuaagucuuggcggaacaauauauugcgcacccaggaguccgagugcgccugugugaacggcagcugcuucacggucaugacugaugggccaucgaauggacaggcgucuuacaagaucuuuaaaauggaaaagggcaaaguggugaaguccgucgagcucaacgcacccaacuaucacuacgaagaguguucaugcuauccugacgccggugagauuaccuguguuugcagagauaauuggcaugggaguaacaggccaugggugagcuucaaucagaaccuggaauaccaaaucggauauauaugcuccggcguauuuggcgacaauccgcggcccaacgaugggacaggaucuugugguccugugagcccaaauggcgcuuacgggauuaaaggauucucauuuaaguacggcaacggugucuggaucgggcgcacuaagaguaccaauucccgaagcggcuucgagaugaucugggaccccaacggaugggccgaaacagauucuaauuuuucagugaaacaggacauuguugcaaucaccgacuggaguggcuauagcggguccuucgugcagcacccugagcugacgggacucgauugcauuagaccauguuucugggucgaauuaauaaggggucggcccaaggagggcacuaucuggacaucugggucgagcauuuccuuuugcggagugaacucagacaccguaaguuggucuuggccggauggcgcugagcugccuuucacuaucgacaaauga

SEQ ID NO: 149115 - RNA, 1350 nt, Artificial Sequence
  derived and/or modified CDS sequence (opt3) from neuraminidase__InfluenzaA__AEO89215
augaaccccaaucagaagaucauuaccauaggcagcaucugcauggccauugggaucgugucccugaugcuccaaauuggaaacaugaucucuauaugggucucacacaguauccagacagguaaucagcaucaggcugagccuauuagaaacgcauccuuccuuacugaaaaugccguugcguccgugacgcuggcuggcaacucuucguuguguccaguaagggggugggccgugcacucaaaagacaauagcauccggauuggaaguaagggcgaugucuuugugauccgcgagccguucauauccugcucucauuuagaaugucgaaccuuuuuccugacacaaggugcacuacucaacgacaaacacagcaaugggacuguuaaggaucguagcccccauagaacccugaugucaugcccugugggagaggccccaagucccuacaacagcagguuugaaucugucgcuugguccgcaucagccugucacgacggcauuagcuggcuuacaaucggcauuagugggccugauaauggagcuguggccguacugaaauauaacgguaucaucaccgacacuauuaagucuuggcggaauaacauauugcgcacacaggaguccgagugcgcguguguuaauggcagcugcuucaccgugaugacggaugggccaucgaacggacaggcaucuuacaagaucuuuaaaauggaaaagggcaaagucgugaaguccguggagcucaacgcccccaauuaucacuacgaagaguguucaugcuauccugacgcuggugagauuacuugugucugcagagauaacuggcaugggaguaauaggccauggguuagcuucaaccagaaucuggaauaccaaaucggauauauaugcuccggcguguuuggcgacaacccgcggcccaaugaugggaccggaucuugugguccuguaagcccaaacggcgccuacgggauuaaaggauucucauuuaaguacggcaaugguguguggaucgggcgcacaaagaguacuaacucccgaagcggcuucgagaugaucugggaccccaauggaugggcagaaaccgauucuaacuuuucagucaaacaggacauuguggcuaucacagacuggaguggcuauagcggguccuucguucagcacccugagcugaccggacucgauugcauuagaccauguuucuggguggaauuaauaaggggucggcccaaggagggcacgaucuggacuucugggucgagcauuuccuuuugcggagucaauucagacacagugaguuggucuuggccggauggcgccgagcugccuuucaccaucgacaaauga

SEQ ID NO: 149116 - RNA, 1350 nt, Artificial Sequence
  derived and/or modified CDS sequence (opt3) from neuraminidase__InfluenzaA__AEO89226
augaaccccacccagaagaucauuacaauaggcagcaucugcauggccauugggaucgugucccugaugcuccaaauuggaaauaugaucucuauaugggucucacacaguauccagacugguaaccagcaucaggcugagccuauuagaaaugcauccuuccuuacggaaaacgccguugcguccgugacccuggcuggcaauucuucguuguguccaguaagggggugggccgugcacucaaaagacaacagcauccggauuggaaguaagggcgaugucuuugugauccgcgagccguucauauccugcucucauuuagaaugucgaacauuuuuccugacucaaggugcacuacucaaugacaaacacagcaacgggaccguuaaggaucguagcccccauagaacacugaugucaugcccugugggagaggccccaagucccuacaauagcagguuugaaucugucgcuugguccgcaucagccugucacgacggcauuagcuggcuuaccaucggcauuagugggccugauaacggagcuguggccguacugaaauauaaugguaucaucacugacacaauuaagucuuggcggaacaauauauugcgcacccaggaguccgagugcgcguguguuaacggcagcugcuucacggugaugacugaugggccaucgaauggacaggcaucuuacaagaucuuuaaaauggaaaagggcaaagucgugaaguccguggagcucaacgcccccaacuaucacuacgaagaguguucaugcuauccugacgcuggugagauuaccugugucugcagagauaauuggcaugggaguaacaggccauggguuagcuucaaucagaaccuggaauaccaaaucggauauauaugcuccggcguguuuggcgacaauccgcggcccaacgaugggacaggaucuugugguccuguaagcccaaauggcgccuacgggauuaaaggauucucauuuaaguacggcaacgguguguggaucgggcgcacuaagaguaccaauucccgaagcggcuucgagaugaucugggaccccaacggaugggcagaaacagauucuaauuuuucagucaaacaggacauuguggcuaucaccgacuggaguggcuauagcggguccuucguucagcacccugagcugacgggacucgauugcauuagaccauguuucuggguggaauuaauaaggggucggcccaaggagggcacuaucuggacaucugggucgagcauuuccuuuugcggagucaacucagacaccgugaguuggucuuggccggauggcgccgagcugccuuucacuaucgacaaauga

SEQ ID NO: 149117 - RNA, 1350 nt, Artificial Sequence
  derived and/or modified CDS sequence (opt3) from neuraminidase__InfluenzaA__AEO89237
augaaccccaaucagaagaucauuaccauaggcagcaucugcauggugauugggaucgucucccugaugcuccaaauuggaaacaucauaucuauguggguuucacacaguauccagacaagaaaucagcaucaggccgagccuauuaggaacacuaauuuccuuacggaaaacgcuguggcaagcguaacccuggccgguaauuccucuuuguguccaauccggggcugggcggugcacucgaaagacaacucaauucgcaucgggagcaagggagaugucuuugugauacgagagccguucauuaguugcucccauuuagaaugucguacauuuuuccugacucaaggcgcucuacucaaugacaaacacucuaacgguaccguuaaggauagaagcccccauaggacacugauguccugcccugugggggaggccccaucacccuacaauagucgguuugaaagcgucgcauggucugccuccgcuugucacgacggaaccucauggcuuacuaucggcauuagcggcccugauaacggggcaguggccguacugaaauauaauggaaucaucacagacaccauuaagaguuggcgcaacaauauauugagaacgcaggagucugagugcgcuuguguuaacgguuccugcuucacugugaugaccgauggcccaagcaacgggcaggccucguacaagaucuuuaaaauggaaaagggaaaagucgugaagucuguggagcucaaugcgcccaacuaucacuacgaagaguguuccugcuauccugacgcaggcgagauuaucugugucugcagggauaauuggcaugguucaaaccggccauggguuaguuucaaucagaaccuggaauaccaaauaggguauauuugcagcggaguguuuggcgacaauccgcgccccaacgauggcacaggguccuguggaccuguaucuccaaauggugccuacggcaucaaaggguucagcuuuaaguacggaaacggcguguggaucggucgaacuaagucaaccaauaguagauccggguucgagaugauuugggaccccaacggcuggacaggaaccgauagcgacuuuucugucaaacaggacaucguggcuauuacggauuggucaggcuauagugggagcuucguucagcacccugaacugacuggacucgacugcauaaggccauguuucuggguggaguuaauccggggucgucccaaggaauccacaauuuggaccucuggcucgagcaucuccuuuugcggggucaauucagauacugugaguuggucuuggccggacggagccgagcugccuuucacaaucgauaaauga

SEQ ID NO: 149118 - RNA, 1350 nt, Artificial Sequence
  derived and/or modified CDS sequence (opt3) from neuraminidase__InfluenzaA__AEO89248
augaaccccaaucagaagaucauuaccauaggcagcaucugcauggugauugggaucgucucccugaugcuccaaauuggaaacaucauaucuaucuggguuucacacaguuuccagacaagagugcagcaucaggccgagccuauuaggaauacuaacuuucuuacggaaaaugcuguagcaagcgugacccuggccgguaacuccucuuuguguccaauccggggcugggcgguccacucgaaagacaauucaauucgcaucgggagcaagggagauguguucguuauacgagagccguuuauuaguugcucccauuuagaaugucguacauucuuucugacucaaggcgcucuacucaacgacaaacacucuaaugguaccgugaaggauagaagcccccauaggacacugauguccugcccugucggggaggccccaucacccuacaacagucgguucgaaagcguggcauggucugccuccgcuugucacgacggaaccucauggcuuacuaucggcauuagcggcccugauaauggggcaguagccguucugaaauauaacggaaucaucacagacaccauuaagaguuggcgcaauaacauauugagaacgcaggagucugagugcgcuugugugaaugguuccugcuuuacugucaugaccgauggcccaagcaacgggcaggccucguacaagaucuucaaaaugaagaaaggaaagguggugaaaucugucgaacucaacgcgcccaauuaucacuacgaggaauguuccugcuauccugacgcaggcgagauuaucuguguuugcagggauaacuggcaugguucaaaucggccaugggugaguuuuaaccagaaucuggaguaccaaauaggguauauuugcagcggaguauucggcgacaacccgcgccccaaugauggcacaggguccuguggaccugugucuccaaacggugccuacggcaucaagggguuuagcuucaaguacggaaauggcgucuggaucggucgaacuaaaucaaccaacaguagauccggguuugaaaugauuugggaccccaauggcuggacaggaaccgauagcgacuucucuaugaagcaggacaucguggcuauuacggauuggucaggcuauagugggagcuucguucagcacccugagcugacuggacucgacugcauaaggccauguuuuuggguggaauuaauccggggucgucccaaagaguccacaauuuggaccucuggcucgagcaucuccuucugcggggucaacucagauacugugaguuggucuuggccggacggagccgaacugccuuuuacaaucgauaaguga

SEQ ID NO: 149119 - RNA, 1350 nt, Artificial Sequence
  derived and/or modified CDS sequence (opt3) from neuraminidase__InfluenzaA__AEO89270
augaaccccaaucagaagaucauuaccauaggcagcaucugcauggugacagggauugucucccugaugcuccaaaucggaaacauuacuucuauguggguuucacacaguauccagacgagaaaucagcaucaggccgagccuauaaggaacaccaauuuccuuacagaaaacgcuguggcaagcguaacucuggccgguaauuccucuuuguguccaauccggggcugggcggugcacucgaaagacaacucaauucgcaucgggagcaagggagaugucuuugugauucgagagccguucaucaguugcucccauuuagaaugucguaccuuuuuccugacacaaggcgcucuacucaaugacaaacacucuaacgguaccguuaaggauagaagcccccauaggacucugauguccugcccugugggggaggccccaucacccuacaauagucgguuugaaagcgucgcauggucugccuccgcuugucacgacggaacaucauggcuuaccauaggcauuagcggcccugauaacggggcaguggccguacugaaauauaauggaaucauuacggacacuaucaagaguuggcgcaacaauaucuugagaacccaggagucugagugcgcuuguguuaacgguuccugcuucacagugaugacugauggcccaagcaacgggcaggccucguacaagauuuuuaaaauggaaaagggaaaagucgugaagucuguggagcucaaugcgcccaacuaucacuacgaagaguguuccugcuauccugacgcaggcgagauaaucugugucugcagggauaauuggcaugguucaaaccggccauggguuaguuucaaucagaaccuggaauaccaaauuggguauaucugcagcggaguguuuggcgacaauccgcgccccaacgauggcaccggguccuguggaccuguaucuccaaauggugccuacggcauaaaaggguucagcuuuaaguacggaaacggcguguggauuggucgaacaaagucaaccaauaguagauccggguucgagaugaucugggaccccaacggcuggacgggaacugauagcgacuuuucugucaaacaggacaucguggcuauuacagauuggucaggcuauagugggagcuucguucagcacccugaacugaccggacucgacugcaucaggccauguuucuggguggaguuaauucggggucgucccaaggaauccacuauauggacaucuggcucgagcaucuccuuuugcggggucaauucagauaccgugggauggaguuggccggacggcgccgagcugccuuucacgauugauaaauga

SEQ ID NO: 149120 - RNA, 1350 nt, Artificial Sequence
  derived and/or modified CDS sequence (opt3) from neuraminidase__InfluenzaA__AEO89281
augaaccccaaucagaagaucauuaccauaggcagcaucugcaugguggucgggauuguuucccugaugcuccaaaucggaaacauugugucuaucuggguaucacacaguauacagacaggucaucagcagcaagccgagccuaucaaaaauacuaacuuccuuacgaagaaugcuguggcaagcgucacccuggccggcaacuccucuuuguguccaauuagagggugggcggugcacucgaaagacaauucaaucaggauuggaagcaagggcgauguuuuugugauccgggaaccguucauaaguugcucccauuuagagugucgcacauuuuuccugacucagggugcucuacucaacgacaaacacucuaaugggaccgucaaggaucgaagcccccaucguacacugauguccugcccugugggagaagccccaucacccuacaacaguagauuugagagcguagcauggucugccuccgcuugucacgacggcaccucauggcuuacuauuggcaucagcgggccugauaauggagcaguugccgugcugaaguauaacgguauuaucacagacaccaucaaaaguuggaggaauaacacguugcggacucaggaaucugagugcgcuugugucaauggcuccugcuucaccgugaugacagaugggccaagcaacggacaggccucguacaagauuuuuaaaauggagaagggcaaaguggucaagucugcggaacucaacgcacccaauuaucacuacgaggaauguuccugcuauccugacgccggugagauaaucuguguuugccgcgauaacuggcaugggucaaauagaccaugggugaguuucaaccaaaaucuggaguaccagauuggauauaucugcagcggcguauuuggcgacaacccgaggcccaaugaugggacuggauccugugguccugugucuccaaacggcgcuuacgggauaaagggauucagcuuuaaauacggcaauggugucuggauugggcggaccaagucaacaaacagucgcuccggcuucgaaaugaucugggaccccaauggauggaccggcacggauagcaacuuuucuaugaaacaggacaucguggccauuacugaguggucaggguauagugguagcuucguucagcacccugaacugacaggacucgacugcauccgaccauguuucuggguggaguuaauuagaggcaggcccaaggaauccaccauauggacuucugggucgagcaucuccuuuugcggagucaauucagauacagugaguuggucuuggccggacggcgcagagcugccuuucaccauugauaaauga

SEQ ID NO: 149121 - RNA, 1350 nt, Artificial Sequence
  derived and/or modified CDS sequence (opt3) from neuraminidase__InfluenzaA__AEO89291
augaaccccaaucagaagaucauuaccauaggcagcaucugcaugguggucgggauuguuucccugaugcuccaaaucggaaacauugugucuaucuggguaucacacaguauacagacaggucaucagcagcaagccgagccuaucaaaaauacuaacuuccuuacggaaaaugcuguggcaagcgucacccuggccggcaacuccucuuuguguccaauuagagggugggcggugcacucgaaggacaauucaaucaggauuggaagcaaaggcgauguuuuugugauccgggagccguucauaaguugcucccauuuagaaugucgcacauuuuuccugacucagggugcucuacucaacgacaagcacucuaaugggaccgucaaagaucgaagcccccaucguacacugauguccugcccugugggagaggccccaucacccuacaacaguagauuugaaagcguagcauggucugccuccgcuugucacgacggcaccucauggcuuacuauuggcaucagcgggccugauaauggagcaguugccgugcugaaguauaacgguauuaucacagacaccaucaagaguuggaggaauaacauuuugcggacgcaggagucugagugcgcuugugucaauggcuccugcuucacugugaugaccgaugggccaagcaacggacaggccucguacaaaauauuuaagauggaaaaaggcaagguggucaaaucugcggagcucaacgcacccaauuaucacuacgaagaguguuccugcuauccugacgccggugagaucauuuguguuugccgcgauaacuggcaugggucaaauagaccaugggugaguuucaaccaaaaucuggaauaccagaucggauauauaugcagcggcguauuuggcgacaacccgaggcccaaugaugggacaggauccugugguccugugucuccaaacggcgcuuacgggauuaagggauucagcuuuaaguacggcaauggugucuggaucgggcggacuaaaucaaccaacagucgcuccggcuucgagaugaucugggaccccaauggauggacaggcaccgauagcaacuuuucuaugaagcaggacauuguggccaucacggaauggucaggguauagugguagcuucguucagcacccugagcugacuggacucgacugcauucgaccauguuucuggguggaauuaauaagaggcaggcccaaagaguccacaaucuggaccucugggucgagcauuuccuuuugcggagucaauucagauacugugaguuggucuuggccggacggcgcagagcugccuuucacaaucgauaaguga

SEQ ID NO: 149122 - RNA, 1350 nt, Artificial Sequence
  derived and/or modified CDS sequence (opt3) from neuraminidase__InfluenzaA__AEO89302
augaaccccaaucagaagaucauuaccauaggcagcaucugcauggugauugggaucgucucccugaugcuccaaauuggaaacaucauaucuaucuggguuucacacaguauucagacagguaaucagcaucaggacgagccuaucagaaacgccaauuuccuuacugaaaacgcuguggcaagcguaacgcuggccggcaauuccucuuuguguccagugagggggugggcgguccacucgaaagauaacucaauucggaucggaagcaagggcgacguguuuguuauacgcgagccguucauuaguugcucccauuuagaaugucgaaccuuuuuccugacacaaggugcucuacucaaugauaaacacucuaacgggacugugaaggaccguagcccccauagaacccugauguccugcccugucggagaggccccaucacccuacaauaguagguuugaaagcguggcauggucugccuccgcuugucacgauggcacaucauggcuuaccaucggcauuagcgggccugacaacggagcaguagccguucugaaauauaaugguaucaucacugauacaauuaagaguuggcggaacaauauauugcgcacccaggagucugagugcgcuugugugaacggcuccugcuucacggucaugacugacgggccaagcaacggacaggccucguacaagaucuuuaaaauggaaaagggcaaaguggugagaucugucgagcucaaugcgcccaacuaucacuacgaagaguguuccugcuauccugaugccggugagauuaccuguguuugcagggacaauuggcaugggucaaaccggccaugggugaguuucaaucagaaccuggaauaccaaaucggauauauaugcagcggcguauuuggcgauaauccgcgccccaacgacgggacaggauccugugauccugugucuccaaauggugcauacggcauuaagggguucagcuuuaaauacggaaacggcgucuggaucggucgaacuaagucaaccaauaguagauccggguucgagaugaucugggaccccaacggcuggacagaaaccgacagcgauuuuucugugaagcaggacauuguugcuaucacggauuggucaggauauaguggcagcuucgugcagcacccugagcugacugggcucgacugcauuaggccauguuucugggucgaauuaauacggggacgucccaaagaguccacaaucuggaccucugguucgagcauuuccuuuugcggcgugucaagugauacuguaucuuggagcuggccggacggggccgagcugccuuucacaaucgauaaguga

SEQ ID NO: 149123 - RNA, 1410 nt, Artificial Sequence; identical to SEQ ID NO: 144105
  derived and/or modified CDS sequence (opt3) from neuraminidase__InfluenzaA__AEO99218

SEQ ID NO: 149124 - RNA, 1410 nt, Artificial Sequence
  derived and/or modified CDS sequence (opt3) from neuraminidase__InfluenzaA__AEQ49739
augaaccccaaucagaagaucauuaccauaggcagcgugugcaugacaaucgggauggccaaccugauucuccaaaucggaaauauuaucuccauauggaucucucacucaauucagcuugguaaccagagucagaucgagacuuguaaucaaagcgucauuacguacgaaaacaauaccuggguuaaccagacauaugugaauaucuccaacacuaauuucgcugcaggccagucuguagugucggucaaacuggccgggaacagcagcuugugcccugugaguggaugggcgauauacuccaaggacaauucuauuagaaucggcagcaaaggugauguuuuugugauuagggagccauucaucuccuguucaccguuagaaugccggaccuuuuuccugacacagggggcucuacucaacgacaagcauaguaauggaaccaucaaagaucgcagccccuaucgaacucugaugucuuguccuauuggcgaggucccaucccccuacaacucacguuuugaaagcguggccuggagugcaucugccugccacgacggcauaaacuggcuuacaaucgggauuuccggaccugauaauggugcuguagcaguucugaaguauaacggcaucauaaccgacacgauuaagagcuggagaaauaacaucuugaggacucaagagucggagugugccugcgugaaugggucuuguuucaccaucaugacagauggaccauccgacggccaggcuucauacaaaauuuuucggaucgaaaaggguaaaauugucaagaguguggagaugaacgcccccaauuaucauuacgaagagugcagcuguuacccugauuccucugaggugacuugcgucugccgcgacaacuggcacgggagcaauagaccauggguuucauucaaccagaaucucgaauaucagauaggauacaucuguaguggcauuuuuggcgauaacccgaggcccaaugacaaaaccggguccugcggaccugugagcucuaacggugcgaauggcguaaagggguucucauuuaaguauggaaacggcguguggaucggucggacaaaaaguaucagcucccgcaagggguucgagaugauuugggauccaaacggcuggaccggaacggacaauaacuuuucuauaaaacaagacaucgucggcauuaaugaauggucgggguacagcggauccuucgugcagcaucccgagcugacugguauggauuguauccgaccuugcuucuggguugaacugauuagaggcaggccaaaggagaacacaaucuggaccucagggaguucuauaucauuuuguggagucaauuccgacacugugggcuggucauggcccgauggugcagagcucccguucacaaucgacaaauga

SEQ ID NO: 149125 - RNA, 1410 nt, Artificial Sequence; identical to SEQ ID NO: 148305
  derived and/or modified CDS sequence (opt3) from neuraminidase__InfluenzaA__AEQ49740

SEQ ID NO: 149126 - RNA, 1410 nt, Artificial Sequence
  derived and/or modified CDS sequence (opt3) from neuraminidase__InfluenzaA__AEQ49741
augaaccccaaucagaagaucauuaccauaggcagcgugugcaugacaaucgggauggccaaccugauucuccaaaucggaaauauuaucuccauauggaucucucacucaauucagcuugguaaccagagucagaucgagacuuguaaucaaagcgucauuacguacgaaaacaauaccuggguuaaccagacauaugugaauaucuccaacacuaauuucgcugcaggccagucuguagugucggucaaacuggccgggaacagcucauugugcccugugaguggaugggcgauauacuccaaggacaauucuauuagaaucggcagcaaaggugauguuuuugugauuagggagccauucaucuccuguucaccguuagaaugccggaccuuuuuccugacacagggggcucuacucaacgacaagcauaguaauggaaccaucaaagaucgcagccccuaucgaacucugaugucuuguccuauuggcgaggucccaucccccuacaacucacguuuugaaagcguggccuggagugcaucugccugccacgacggcauaaacuggcuuacaaucgggauuuccggaccugauaauggugcuguagcaguucugaaguauaacggcaucauaaccgacacgauuaagagcuggagaaauaacaucuugaggacucaagagucggagugugccugcgugaaugggucuuguuucaccaucaugacagauggaccauccgacggccaggcuucauacaaaauuuuucggaucgaaaaggguaaaauugucaagaguguggagaugaacgcccccaauuaucauuacgaagagugcagcuguuacccugauuccucugagauaacuugcgugugccgcgacaacuggcacgggagcaauagaccaugggucucauucaaccagaaucucgaauaucagaucggauacauuuguaguggcaucuuuggcgauaacccgaggcccaaugacaaaaccggguccugcggaccuguuagcucuaacggugcgaauggcgugaagggguucucauuuaaguauggaaacggcguauggaucggucggacaaaaaguauuagcucccgcaagggguucgagaugauaugggauccaaacggcuggaccggaacggacaauaacuuuucuaucaaacaagacauugugggcaucaaugaauggucgggguacagcggauccuucguccagcaucccgagcugacugguauggauuguauucgaccuugcuucuggguggaacugaucagaggcaggccaaaggagaacacaauauggaccucagggaguucuaucagcuuuuguggaguuaauuccgacacugugggcuggucauggcccgauggugcagagcucccguucacaauugacaaauga

SEQ ID NO: 149127 - RNA, 1410 nt, Artificial Sequence
  derived and/or modified CDS sequence (opt3) from neuraminidase__InfluenzaA__AEQ49742
augaaccccaaucagaagaucauuaccauaggcagcgugugcaugacaaucgggauggccaaccugauucuccaaaucggaaauauuaucuccauauggaucucucacucaauucagcuugguaaccagagucagaucgagacuuguaaucaaagcgucauuacguacgaaaacaauaccuggguuaaccagacauaugugaauaucuccaacacuaauuucgcugcaggccagucuguagugucggucaaacuggccgggaacagcucauugugcccugugaguggaugggcgauacauuccaaggacaauucuauuagaaucggcagcaaaggugauguuuuugugauuagggagccauucaucuccuguucaccguuagaaugccggaccuuuuuccugacacagggggcucuacucaacgacaagcacaguaauggaaccaucaaagaucgcagccccuaccgaacucugaugucuuguccuauuggcgaggucccaucccccuauaacucacguuuugaaagcguggccuggagugcaucugccugccaugacggcauaaacuggcuuacaaucgggauuuccggaccugauaauggugcuguagcaguucugaaguacaacggcaucauaaccgacacgauuaagagcuggagaaauaacaucuugaggacucaagagucggagugugccugcgugaaugggucuuguuucaccaucaugacagauggaccauccgacggccaggcuucauauaaaauuuuucggaucgaaaaggguaaaauugucaagaguguggagaugaacgcccccaauuaccacuaugaagagugcagcuguuacccugauuccucugagauaacuugcgugugccgcgacaacuggcaugggagcaauagaccaugggucucauucaaccagaaucucgaauaccagaucggauauauuuguaguggcaucuuuggcgauaacccgaggcccaaugacaaaaccggguccugcggaccuguuagcucuaacggugcgaauggcgugaagggguucucauuuaaguacggaaacggcguauggaucggucggacaaaaaguauuagcucccgcaagggguucgagaugauaugggauccaaacggcuggaccggaacggacaauaacuuuucuaucaaacaagacauugugggcaucaaugaauggucgggguauagcggauccuucguccagcaccccgagcugacugguauggauuguauucgaccuugcuucuggguggaacugaucagaggcaggccaaaggagaacacaauauggaccucagggaguucuaucagcuuuuguggaguuaauuccgacacugugggcuggucauggcccgauggugcagagcucccguucacaauugacaaauga

SEQ ID NO: 149128 - RNA, 1410 nt, Artificial Sequence
  derived and/or modified CDS sequence (opt3) from neuraminidase__InfluenzaA__AEQ49743
augaaccccaaucagaagaucauuaccauaggcagcgugugcaugacaaucgggauggccaaccugauucuccaaaucggaaauauuaucuccauauggaucucucacucaauucagcuugguaaccagagucagaucgagacuuguaaucaaagcgucauuacguacgaaaacaauaccuggguuaaccagacauaugugaauaucuccaacacuaauuucgcugcaggccagucuguagugucggucaaacuggccgggaacagcagcuugugcccugugaguggaugggcgauauacuccaaggacaauucuauuagaaucggcagcaaaggugauguuuuugugauuagggagccauucaucuccuguucaccguuagaaugccggaccuuuuuccugacacagggggcucuacucaacgacaagcauaguaauggaaccaucaaagaucgcagccccuaucgaacucugaugucuuguccuauuggcgaggucccaucccccuacaacucacguuuugaaagcguggccuggagugcaucugccugccacgacggcauaaacuggcuuacaaucgggauuuccggaccugauaauggugcuguagcaguucugaaguauaacggcaucauaaccgacacgauuaagagcuggagaaauaacaucuugaggacucaagagucggagugugccugcgugaaugggucuuguuucaccaucaugacagauggaccauccgacggccaggcuucauacaaaauuuuucggaucgaaaaggguaaaauugucaagaguguggagaugaacgcccccaauuaucauuacgaagagugcagcuguuacccugauuccucugagauaacuugcgugugccgcgacaacuggcacgggagcaauagaccaugggucucauucaaccagaaucucgaauaucagaucggauacauuuguaguggcaucuuuggcgauaacccgaggcccaaugacaaaaccggguccugcggaccuguuagcucuaacggugcgaauggcgugaagggguucucauuuaaguauggaaacggcguauggaucggucggacaaaaaguauuagcucccgcaagggguucgagaugauaugggauccaaacggcuggaccggaacggacaauaacuuuucuaucaaacaagacauugugggcacuaaugaauggucgggguacagcggauccuucguccagcaucccgagcugacaggucuggauuguauccgaccuugcuucuggguggaacucauuagaggcaggccaaaggagaacaccaucuggacuucagggaguucuauaucauuuuguggaguuaauuccgacacagugggcuggucauggcccgauggugcagaguuaccguucaccaucgacaacuga

SEQ ID NO: 149129 - RNA, 1410 nt, Artificial Sequence
  derived and/or modified CDS sequence (opt3) from neuraminidase__InfluenzaA__AEQ49744
augaaccccaaucagaagaucauuaccauaggcagcgugugcaugacaaucgggauggccaaccugauucuccaaaucggaaauauuaucuccauauggaucucucacucaauucagcuugguaaccagagucagaucgagacuuguaaucaaagcgucauuacguacgaaaacaauaccuggguuaaccagacauaugugaauaucuccaacacuaauuucgcugcaggccagucuguagugucggucaaacuggccgggaacucauccuugugcccugugaguggaugggcgauauacuccaaggacaauucuauuagaaucggcagcaaaggugauguuuuugugauuagggagccauucaucuccuguucaccguuagaaugccggaccuuuuuccugacacagggggcucuagucaacgacaagcauaguaauggaaccaucaaagaucgcagccccuaucgaacucucaugucuuguccuauuggcgaggugccaucccccuacaacucacguuuugaaagcguagccuggagugcaucugccugccacgacggcauaaacuggcugacaaucgggauuuccggaccugauaauggugcuguugcagugcuuaaguauaacggcaucauaaccgacacgauuaagagcuggagaaauaacaucuucaggacucaagagucggagugugccugcgucaaugggucuuguuuuaccaucaugacagauggaccauccgacggccaggcuucauacaaaauuuuccggaucgaaaaggguaaaauugugaagaguguggagaugaacgcccccaauuaucauuacgaagagugcagcuguuacccugauuccucugagauaacuugcgucugccgcgacaacuggcacgggagcaauagaccauggguuucauuuaaccaggaucuggaauaucagaucggauacauuuguaguggcaucuucggcgacaauccgaggcccaacgauaaaaccggguccugcggaccugugagcucuaauggugcgaacggcguaaagggguuuucauucaaguauggaaauggcguguggaucggucggacaaaaaguauuagcucccgcaagggguuugagaugauaugggacccaaacggcuggaccggaacggacaacaauuucucuaucaaacaaaacauugucggcaucaaugaauggucgggguacagcggauccuucgugcagcaucccgaguugacuggucucgauuguauucgaccuugcuuuuggguugaacugaucagaggcaggccaaaggagaacacaauauggaccucagggaguucuaucagcuucuguggagugaauagcgacacugucggcuggucauggcccgauggugcagagcugccguuuacaauugacaaauga

SEQ ID NO: 149130 - RNA, 1410 nt, Artificial Sequence; identical to SEQ ID NO: 149126
  derived and/or modified CDS sequence (opt3) from neuraminidase__InfluenzaA__AEQ49745

SEQ ID NO: 149131 - RNA, 1410 nt, Artificial Sequence; identical to SEQ ID NO: 149126
  derived and/or modified CDS sequence (opt3) from neuraminidase__InfluenzaA__AEQ49746

SEQ ID NO: 149132 - RNA, 1410 nt, Artificial Sequence; identical to SEQ ID NO: 149126
  derived and/or modified CDS sequence (opt3) from neuraminidase__InfluenzaA__AEQ49747

SEQ ID NO: 149133 - RNA, 1410 nt, Artificial Sequence; identical to SEQ ID NO: 148305
  derived and/or modified CDS sequence (opt3) from neuraminidase__InfluenzaA__AEQ49748

SEQ ID NO: 149134 - RNA, 1410 nt, Artificial Sequence; identical to SEQ ID NO: 149126
  derived and/or modified CDS sequence (opt3) from neuraminidase__InfluenzaA__AEQ49749

SEQ ID NO: 149135 - RNA, 1410 nt, Artificial Sequence
  derived and/or modified CDS sequence (opt3) from neuraminidase__InfluenzaA__AEQ49750
augaaccccaaucagaagaucauuaccauaggcagcgugugcaugacaaucgggauggccaaccugauucuccaaaucggaaauauuaucuccauauggaucucucacucaauucagcuugguaaccagagucagaucgagacuuguaaucaaagcgucauuacguacgaaaacaauaccuggguuaaccagacauaugugaauaucuccaacacuaauuucgcugcaggccagucuguagugucggucaaacuggccgggaacagcagcuugugcccugugaguggaugggcgauauacuccaaggacaauucuauuagaaucggcagcaaaggugauguuuuugugauuagggagccauucaucuccuguucaccguuagaaugccggaccuuuuuccugacacagggggcucuacucaacgacaaucauaguaacggaaccaucaaggaucgcagccccuaucgaacucugaugucuuguccuauuggcgaggucccaucccccuacaacucacguuuugaaagcguggccuggagugcaucugccugccacgacggcauaaauuggcuuacaaucgggauuuccggaccugauaacggugcuguagcaguucugaaauauaauggcaucauaaccgacacgauuaagagcuggagaaacaauaucuugaggacucaagagucggagugugccugcgugaacgggucuuguuucaccaucaugacagauggaccauccgacggccaggcuucauacaagauuuuucggaucgaaaaagguaagauugucaaaaguguggagaugaaugcccccaacuaucauuacgaagagugcagcuguuacccugauuccucugagauaacuugcgugugccgcgacaauuggcacgggagcaacagaccaugggucucauucaaucagaaccucgaauaucagaucggauacauuuguaguggcaucuuuggcgauaauccgaggcccaacgacaagaccggguccugcggaccuguuagcucuaauggugcgaacggcgugaaaggguucucauuuaaguauggaaacggcguauggaucggucggacaaagaauauuaguagccgcaaaggguucgagaugauaugggauccaaacggcuggaccggaacggacaauaacuuuuccaucaagcaagacauugugggcaucaaugaauggucuggguacucgggaucauucguccagcaucccgagcugacuggucuggauuguauucgaccuugcuucuggguggaacucaucagaggcaggccaaaagagaacacaauauggaccuccgggucaaguaucucuuuuuguggaguuaauagcgacacugugggcugguccuggcccgauggugcagaguuaccguucacaauugacaaguga

SEQ ID NO: 149136 - RNA, 1410 nt, Artificial Sequence
  derived and/or modified CDS sequence (opt3) from neuraminidase__InfluenzaA__AEQ49751
augaaccccaaucagaagaucauuaccauaggcagcgugugcaugacaaucgggauggccaaccugauucuccaaaucggaaauauuaucuccauauggaucucucacucauuccagcuugguaaccagagucagauugagacuuguaaucaaagcgucaucacguacgaaaacaauaccuggguuaaccagacauaugugaauauuuccaacacuaauuuugcugcaggccagucuguagugucggucaaacuggccgggaacagcagcuugugcccugugaguggaugggcgaucuacuccaaggacaauucuauaagaauuggcagcaaaggugauguuuucgugaucagggagccauuuauuuccuguucaccguuagaaugccggaccuucuuucugacacagggggcucuacucaacgacaaucauaguaacggaaccaucaaggaucgcagccccuaucgaacucugaugucuuguccuaucggcgaggucccaucccccuacaacucacguuucgaaagcguggccuggagugcaucugccugccacgacggcauuaauuggcuuacaauagggaucuccggaccugauaacggugcuguagcaguucugaaauauaauggcauuaucaccgacacgauaaagagcuggagaaacaauauuuugaggacucaagagucggagugugccugcgugaacgggucuuguuuuaccaucaugacagauggaccauccgacggccaggcuucauacaagaucuuccggauugaaaaagguaagaucgucaaaaguguggagaugaaugcccccaacuaucauuacgaagagugcagcuguuacccugauuccucugagauuacuugcgugugccgcgacaauuggcacgggagcaacagaccaugggucucauuuaaucagaaccucgaauaucagauaggauacaucuguaguggcauuuucggcgauaauccgaggcccaacgacaagaccggguccugcggaccuguuagcucuaauggugcgaacggcgugaaaggguuuucauucaaguauggaaacggcguauggaucggucggacaaagaguaucagcucccgcaaaggguuugagaugauuugggauccaaauggcuggaccggaacggacaacaauuucucuauaaagcaagacaucgugggcauuaacgaauggucgggguacagcggauccuucguccagcaucccgagcugacugguauggauuguauccgaccuugcuuuuggguggaacugauuagaggcaggccaaaagagaauacaaucuggaccucagggaguucuauaucauucuguggaguuaacuccgacacugugggcuggucauggcccgauggugcagagcucccguuuacaaucgacaaguga

SEQ ID NO: 149137 - RNA, 1410 nt, Artificial Sequence
  derived and/or modified CDS sequence (opt3) from neuraminidase__InfluenzaA__AEQ49752
augaaccccaaucagaagaucauuaccauaggcagcgugugcaugacaaucgggauggccaaccugauucuccaaaucggaaauauuaucuccauauggaucucucacucaauucagcuugguaaccagagucagaucggcacuuguaaucaaagcgucauuacguacgagaacaauaccuggguuaaccagacauaugugaauaucuccaacacuaauuucgcugcagggcagucuguagugucggucaaacuggccggaaacagcucauugugcccugugaguggcugggcgauauacuccaaggacaauucuauuagaaucgguagcaaaggggauguuuuugugauuagggaaccauucaucuccuguucaccguuagagugccggaccuuuuuccugacacagggagcucuacucaacgacaagcauaguaauggcaccaucaaagaucgcagccccuaucgaacucugaugucuuguccuauuggcgaagucccaucccccuacaacucacguuuugagagcguggccuggagugcaucugccugccacgacgggauaaacuggcuuacaaucggaauuuccgguccugauaauggcgcuguagcaguucugaaguauaacgggaucauaaccgacacgauuaagagcuggagaaauaacaucuugaggacucaagaaucggagugugccugcgugaauggaucuuguuucaccaucaugacagauggcccauccgacggucaggcuucauacaaaauuuuucggaucgagaaggggaaaauugucaagaguguggaaaugaacgcccccaauuauuacuacgaggaaugcagcuguuauccugauuccucugagauaacuugcgugugccgcgacaacuggcauggaagcaauagaccaugggucucauucaaccagaaucucgaguaccagaucggcuauauuuguaguggcaucuuuggggauaacccgaggcccaaugacaaaaccggauccugcgguccuguuagcucuaacggcgcgaauggggugaagggauucucauuuaaguacggcaacgguguauggaucgggcggacaaaaaguauuagcucccgcaagggcuucgaaaugauaugggauccaaacggauggaccggcacggacaauaacuuuucuaucaaacaagacauuguggggaucaaugaguggucgggauauagcgguuccuucguccagcaccccgaacugacuggcauggauuguauucgaccuugcuucuggguggagcugaucagagggaggccaaaggaaaacacaauauggaccucaggaaguucuaucagcuuuuguggcguuaauuccgacacuguggguuggucauggcccgauggggcagagcucccguucacaauugacaaauga

SEQ ID NO: 149138 - RNA, 1410 nt, Artificial Sequence
  derived and/or modified CDS sequence (opt3) from neuraminidase__InfluenzaA__AEQ49753
augaaccccaaucagaagaucauuaccauaggcagcgugugcaugacaaucgggauggccaaccugauucuccaaaucggaaauauuaucuccauauggaucucucacucaauucagcuugguaaccagagucagaucgagacuuguaaucaaagcgucauuacguacgaaaacaauaccuggguuaaccagacauaugugaauaucuccaacacuaauuucgcugcaggccagucuguagugucggucaaacuggccgggaacagcucauugugcccugugaguggaugggcgauauacuccaaggacaauucuauuagaaucggcagcaaaggugauguuuuugugauuagggagccauucaucuccuguucaccguuagaaugccggaccuuuuuccugacacagggggcucuacucaacgacaagcauaguaauggaaccaucaaagaucgcagccccuaucgaacucugaugucuuguccuauuggcgaggucccaucccccuacaacucacguuuugaaagcguggccuggagugcaucugccugccacgacggcauaaacuggcuuacaaucgggauuuccggaccugauaauggugcuguagcaguucugaaguauaacggcaucauaaccgacacgauuaagagcuggagaaauaacaucuugaggacucaagagucggagugugccugcgugaaugggucuuguuucaccaucaugacagauggaccauccgacggccaggcuucauacaaaauuuuucggaucgaaaaggguaaaauugucaagaguguggagaugaacgcccccaauuaucauuacgaagagugcagcuguuacccugauuccucugagauaacuugcgugugccgcgacaacuggcacgggagcaauagaccaugggucucauucaaccagaaucucgaauaucagaucggauacauuuguaguggcaucuuuggcgauaacccgaggcccaaugacaaaaccggguccugcggaccuguuagcucuaacggugcgaauggcgugaagggguucucauuuaaguauggaaacggcguauggaucggucggacaaaaaguauuagcucccgcaagggguucgagaugauaugggauccaaacggcuggaccggaacggacaauaacuuuucuaucaaacaagacauugugggcaucaaugaauggucgggguacagcggauccuucguccagcaucccgagcugacugguauggauuguauucgaccuugcuucuggguggaacugaucagaggcaggccaaaggagaacacaauauggaccucagggaguucuaucagcuuuuguggaguuaauuccgacacuguggauuggucauggcccgacggcgcagagcucccguucacaauugauaaauga

SEQ ID NO: 149139 - RNA, 1410 nt, Artificial Sequence
  derived and/or modified CDS sequence (opt3) from neuraminidase__InfluenzaA__AEQ49754
augaaccccaaucagaagaucauuaccauaggcagcgugugcaugacaaucgggauggccaaccugauucuccaaaucggaaauauuaucuccauauggaucucucacucaauucagcuugguaaccagagucagaucgagacuuguaaucaaagcgucauuacguacgaaaacaauaccuggguuaaccagacauaugugaauaucuccaacacuaauuucgcugcaggccagucuguagugucggucaaacuggccgggaacagcucauugugcccugugaguggaugggcgauauacuccaaggacaauucuauuagaaucggcagcaaaggugauguuuuugugauuagggagccauucaucuccuguucaccguuagaaugccggaccuuuuuccugacacagggggcucuacucaacgacaagcauaguaauggaaccaucaaagaucgcagccccuaucgaacucugaugucuuguccuauuggcgaggucccaucccccuacaacucacguuuugaaagcguggccuggagugcaucugccugccacgacggcauaaacuggcuuacaaucgggauuuccggaccugauaauggugcuguagcaguucugaaguauaacggcaucauaaccgacacgauuaagagcuggagaaauaacaucuugaggacucaagagucggagugugccugcgugaaugggucuuguuucaccaucaugacagauggaccauccgacggccaggcuucauacaaaauuuuucggaucgaaaaggguaaaauugucaagaguguggagaugaacgcccccaauuaucauuacgaagagugcagcuguuacccugauuccucugagauaacuugcgugugccgcgacaacuggcacgggagcaauagaccaugggucucauucaaccagaaucucgaauaucagaucggauacauuuguaguggcaucuuuggcgauaacccgaggcccaaugacaaaaccggguccugcggaccuguuagcucuaacggugcgaauggcgugaagggguucucauuuaaguauggaaacggcguauggaucggucggacaaaaaguauuagcucccgcaagggguucgagaugauaugggauccaaacggcuggaccggaacggacaauaacuuuucuaucaaacaagacauugugggcaucaaugaauggucgggguacagcggauccuucguccagcaucccgagcugacuggucuggauuguauucgaccuugcuucuggguggaacucaucagaggcaggccaaaggagaacacaauauggaccucagggaguucuaucagcuuuuguggaguuaauuccaacacugugggcuggucauggcccgacggugcagaguuaccguucacaauugauaaauga

SEQ ID NO: 149140 - RNA, 1410 nt, Artificial Sequence; identical to SEQ ID NO: 149126
  derived and/or modified CDS sequence (opt3) from neuraminidase__InfluenzaA__AEQ49755

SEQ ID NO: 149141 - RNA, 1410 nt, Artificial Sequence
  derived and/or modified CDS sequence (opt3) from neuraminidase__InfluenzaA__AEQ49756
augaaccccaaucagaagaucauuaccauaggcagcgugugcaugacaaucgggauggccaaccugauucuccaaaucggaaauauuaucuccauauggaucucucacucaauucagcuugguaaccagagucaggucgagacuuguaaucaaagcguuaucacguacgaaaacaauaccugggugaaccagacauauguaaauauuuccaacacuaauuucgcugcaggccagucuguggucucggugaaacuggccgggaacagcagcuugugcccuguuaguggaugggcgaucuacuccaaggacaauucuauaagaauuggcagcaaaggugauguguuugucaucagggagccauucauuuccuguucaccguuagaaugccggaccuuuuuccugacacagggggcucuacucaacgacaagcauaguaauggaaccaucaaagaucgcagccccuaucgaacucugaugucuuguccuaucggcgaggugccaucccccuacaacucacguuuugaaagcguagccuggagugcaucugccugccacgacggcauuaacuggcuuacaauagggaucuccggaccugauaauggugcuguugcagugcugaaguauaacggcauuaucaccgacacgauaaagagcuggagaaauaacauuuugaggacucaagagucggagugugccugcgucaaugggucuuguuucaccaucaugacagauggaccauccgacggccaggcuucauacaaaaucuuucggauugaaaaggguaaaaucgugaagaguguggagaugaacgcccccaauuaucauuacgaagagugcagcuguuacccugauuccucugagauuacuugcgucugccgcgacaacuggcacgggagcaauagaccauggguuucauucaaccagaaucucgaauaucagauaggauacaucuguaguggcauuuuuggcgauaacccgaggcccaaugacaaaaccggguccugcggaccugugagcucuaacggugcgaauggcguaaagggguucucauuuaaguauggaaacggcguguggaucggucggacaaaaaguaucagcucccgcaagggguucgagaugauuugggauccaaacggcuggaccggaacggacaauaacuuuucuauaaaacaagacaucgucggcauuaaugaauggucgggguacagcggauccuucgugcagcaucccgagcugacuggucuggauuguauccgaccuugcuucuggguugaacucauuagaggcaggccaaaggagaacacaaucuggaccucagggaguucuauaucauuuuguggagucaauuccgacacugugggcuggucauggcccgauggugcagaguuaccguucacaaucgacaaauga

SEQ ID NO: 149142 - RNA, 1410 nt, Artificial Sequence; identical to SEQ ID NO: 149126
  derived and/or modified CDS sequence (opt3) from neuraminidase__InfluenzaA__AEQ49757

SEQ ID NO: 149143 - RNA, 1410 nt, Artificial Sequence
  derived and/or modified CDS sequence (opt3) from neuraminidase__InfluenzaA__AEQ49758
augaaccccaaucagaagaucauuaccauaggcagcgugugcaugacaaucgggauggccaaccugauucuccaaaucggaaauauuaucuccauauggaucucucacucaauucagcuugguaaccauagucagaucgagacuuguaaucagagcgucauuacguacgaaaacaauaccuggguuaaccaaacauaugugaauaucuccaacacuaauuucgcugcaggccagucuguagugucggucaaacuggccgggaacucaucauugugcccugugaguggaugggcgauauacuccaaggacaauucuauuagaaucggcagcaaaggugauguuuuugugauuagggagccauucaucuccuguucaccguuagaaugccggaccuuuuuccugacacagggggcucuacucaacgacaagcacaguaauggaaccaucaaagaucgcagccccuaucgaacucugaugucuuguccuauuggcgaggucccaucccccuacaacucacguuuugaaagcguggccuggagugcaucugccugccaugacggcauaaacuggcuuacaaucgggauuuccggaccugauaauggugcuguagcaguucugaaguauaacggcaucauaaccgacacgauuaagagcuggagaaauaacaucuugaggacucaggagucggagugugccugcgugaaugggucuuguuucaccaucaugacagauggaccauccgacggccaagcuagcuacaaaauuuuucggaucgaaaaggguaaaauugucaagaguguggagaugaacgcccccaauuauuacuacgaagagugcagcuguuauccugauuccucugagauaacuugcgugugccgcgacaacuggcacgggagcaauagaccaugggucucauucaaccagaaucucgaauaccagaucggauauauuuguaguggcaucuuuggcgauaacccgaggcccaaugacaaaaccggguccugcggaccuguuagcucuaacggugcgaauggcgugaagggguucucauuuaaguacggaaacggcguauggaucggucggacaaaaaguauuagcucccgcaagggguucgagaugauaugggauccaaacggcugggcaggaaccgacaauaacuuuucuaucaaacaggacauugugggcaucaaugaauggucgggguauagcggauccuucguccaacaucccgagcugacgggucuggauuguauucgaccuugcuucuggguggaacucaucagaggcaggccaaaggagaacacuauauggacaucagggaguucuaucagcuuuuguggaguuaauuccgacaccgugggcuggucauggcccgauggugccgaguuaccguucacuauugacaaauga

SEQ ID NO: 149144 - RNA, 1410 nt, Artificial Sequence; identical to SEQ ID NO: 149126
  derived and/or modified CDS sequence (opt3) from neuraminidase__InfluenzaA__AEQ49759

SEQ ID NO: 149145 - RNA, 1410 nt, Artificial Sequence; identical to SEQ ID NO: 149126
  derived and/or modified CDS sequence (opt3) from neuraminidase__InfluenzaA__AEQ49760

SEQ ID NO: 149146 - RNA, 1410 nt, Artificial Sequence
  derived and/or modified CDS sequence (opt3) from neuraminidase__InfluenzaA__AEQ49761
augaaccccaaucagaagaucauuaccauaggcagcgugugcaugacaaucgggauggccaaccugauucuccaaaucggaaauauuaucuccauauggaucucucacucaauucagcuugguaaccagagucagaucgagacuuguaaucaaagcgucauuacguacgaaaacaauaccuggcugaaccagacauauguuaauaucuccaacacuaauuucgcugcaggccagucugugguaucggugaaauuggccgggaacagcagcuuaugcccugucaguggaugggcgauauacuccaaggacaauucuauuagaaucggcagcaaaggugauguguuuguuauuagggagccauucaucuccuguucaccgagugaaugccggaccuuuuuccugacacagggggcucuacucaacgacaagcauagcaauggaaccaucaaagaucgcucucccuaucgaacucugauguccuguccuauuggcgaggugccaucacccuacaacagccguuuugaaagugucgccuggucugcauccgccugccacgacggcauaaacuggcuuacaaucgggauuagcggaccugauaauggugcuguggcaguacugaaguauaacggcaucauaaccgacacgauuaagucguggagaaauaacaucuugaggacucaagagucugagugugccugcguuaauggguccuguuucaccaucaugacagauggaccaucagacggccaggcuaguuacaaaauuuuucggaucgaaaaggguaaaauugugaagucagucgagaugaacgcccccaauuaucauuacgaagagugcuccuguuacccugauucuagcgagauaacuugcgugugccgcgacaacuggcacgggucaaauagaccaugggugaguuucaaccagaaucucgaauaucagaucggauacauuuguuccggcaucuuuggcgauaacccgaggcccaaugacaaaaccgggagcugcggaccugucucuucaaacggugcgaauggcguuaagggguucaguuuuaaguauggaaacggcguguggaucggucggacaaaaagcauuuccucucgcaagggguucgagaugauaugggauccaaacggcuggaccggaacggacaauaacuuuucgaucaaacaagacauuguaggcaucaaugaauggagcggguacuccggaucauucgugcagcaucccgagcugacuggucuggauuguauucgaccuugcuucugggucgaacucaucagaggcaggaguaaggagaacacaauauggaccucugggagcuccaucucauuuuguggagugaauagcgacacuguuggcuggucuuggccagauggugcagaguuacccuucacaauugacaaauga

SEQ ID NO: 149147 - RNA, 1410 nt, Artificial Sequence
  derived and/or modified CDS sequence (opt3) from neuraminidase__InfluenzaA__AEQ49762
augaaccccaaucagaagaucauuaccauaggcagcgugugcaugacaaucgggauggccaaccugauucuccaaaucggaaauauuaucuccauauggaucucucacucaauucagcuugguaaccagagucagaucgagacuuguaaucaaagcgucauuacguacgaaaacaauaccuggaucaaccagacauauguuaauauauccaacacuaauuucgcugcaggccagucugugguaucggugaaacuggccgggaacucauccuugugcccugucaguggaugggcgauuuacuccaaggacaauucuaucagaauuggcagcaaaggugauguguuuguuaucagggagccauucaucuccuguucaccguuagaaugccggaccuuuuuccugacacagggggcucuacucaacgacaagcauaguaauggaaccauuaaagaucgcagccccuaucgaacucugaugucuuguccuauaggcgaggugccaucccccuacaacucacguuuugaaagcgucgccuggagugcaucugccugccacgacggcaucaacuggcuuacaauugggaucuccggaccugauaauggugcuguggcaguacugaaguauaacggcauaauuaccgacacgaucaagagcuggagaaauaacaucuugaggacucaagagucggagugugccugcguuaaugggucuuguuucauuaucaugaccgauggaccauccgacggccaggcuucauacaaaauuuuucggauagaaaaggguaaaaucgugaagagugucgagaugaacgcccccaauuaucauuacgaagagugcagcuguuacccugauuccucugagauuacaugcgugugccgcgacaacuggcacgggagcaauagaccaugggugucauucaaccagaaucucgaauaucagaucggauacaucuguaguggcauuuuuggcgauaacccgaggcccaaugacaaaacuggguccugcggaccugucagcucuaacggugcgaauggcguuaagggguucucauuuaaguauggaaacggcguguggauaggucggaccaaaaguaucagcucccgcaagggguucgagaugauuugggauccaaacggcuggacaggaaccgacaauaacuuuucuaucaaacaagacauuguaggcaucaaugaauggucgggguacagcggauccuucgugcagcaucccgagcugacgggucuggauuguauacgaccuugcuucugggucgaacucaucagaggcaggccaaaggagaacacuauuuggacaucagggaguucuaucagcuuuuguggagugaauagcgacaccguuggcuggucauggcccgauggugcagaguuaccguucacuauugacaaauga

SEQ ID NO: 149148 - RNA, 1410 nt, Artificial Sequence; identical to SEQ ID NO: 149126
  derived and/or modified CDS sequence (opt3) from neuraminidase__InfluenzaA__AEQ49763

SEQ ID NO: 149149 - RNA, 1410 nt, Artificial Sequence; identical to SEQ ID NO: 149126
  derived and/or modified CDS sequence (opt3) from neuraminidase__InfluenzaA__AEQ49764

SEQ ID NO: 149150 - RNA, 1410 nt, Artificial Sequence; identical to SEQ ID NO: 149126
  derived and/or modified CDS sequence (opt3) from neuraminidase__InfluenzaA__AEQ49765

SEQ ID NO: 149151 - RNA, 1410 nt, Artificial Sequence
  derived and/or modified CDS sequence (opt3) from neuraminidase__InfluenzaA__AEQ49766
augaaccccaaucagaagaucauuaccauaggcagcgugugcaugacaaucgggauggccaaccugauucuccaaaucggaaauauuaucuccauauggaucucucacucaauucagcuugguaaccagagucagaucgagacuuguaaucaaagcgucauuacguacgaaaacaauaccuggguuaaccagacauaugugaauaucuccaacacuaauuucgcugcaggccagucuguagugucggucaaacugaccgggaacagcucauugugcccugugaguggaugggccauauacuccaaggacaauucuauuagaaucggcagcaaaggugauguuuuugugauuagggagccauucaucuccuguucaccguuagaaugccggacauuuuuccugacccagggggcgcuacucaacgacaagcauaguaauggaacuaucaaagaucgcagccccuaucgaacacugaugucuuguccuauuggcgaggucccaucccccuacaacucacguuuugaaagcguggcuuggagugccucugcaugccacgacggcauaaacuggcuuaccaucgggauuuccggaccugauaauggugccguagcuguucugaaguauaacggcaucauaacggacacuauuaagagcuggagaaauaacaucuugaggacccaagagucggagugugcaugcgugaaugggucuuguuucacaaucaugacugauggaccauccgacggccaggccucauacaaaauuuuucggaucgaaaaggguaaaauugucaagaguguggagaugaacgcucccaauuaucauuacgaagagugcagcuguuacccugauuccucugagauaaccugcgugugccgcgacaacuggcacgggagcaauagaccaugggucucauucaaccagaaucucgaauaucagaucggauacauuuguaguggcaucuuuggcgauaacccgaggcccaaugacaaaacaggguccugcggaccuguuagcucuaacggugccaauggcgugaagggguucucauuuaaguauggaaacggcguauggaucggucggaccaaaaguauuagcucccgcaagggguucgagaugauaugggauccaaacggcuggacgggaacugacaauaacuuuucuaucaaacaagacauugugggcaucaaugaauggucgggguacagcggauccuucguccagcaucccgagcugacaggucuggauuguauucgaccuugcuucuggguggaacucaucagaggcaggccaaaggagaacaccauauggacuucagggaguucuaucagcuuuuguggaguuaauuccgacacagugggcuggucauggcccgauggugcggaguuaccguucaccauugacaaauga

SEQ ID NO: 149152 - RNA, 1410 nt, Artificial Sequence
  derived and/or modified CDS sequence (opt3) from neuraminidase__InfluenzaA__AEQ49767
augaaccccaaucagaagaucauuaccauaggcagcgugugcaugacaaucgggauggccaaccugauucuccaaaucggaaauauuaucuccauauggaucucucacucaauucagcuugguaaccagagucagaucgagacuuguaaucaaagcgucauuacguacgaaaacaauaccuggguuaaccagacauaugugaauaucuccaacacuaauuucgcugcaggccagucuguagugucggucaaacuggccgggaacagcucauugugcccugugaguggaugggcgauauacuccaaggacaauucuauuagaaucggcagcaaaggugauguuuuugugauuagggagccauucaucuccuguucaccguuagaaugccggaccuuuuuccugacacagggggcucuacucaacgacaagcauaguaauggaaccaucaaagaucgcagccccuaucgaacucugaugucuuguccuauuggcgaggucccaucccccuacaacucacguuuugaaagcguggccuggagugcaucugccugccacgacggcauaaacuggcuuacaaucgggauuuccggaccugauaauggugcuguagcaguucugaaguauaacggcaucauaaccgacacgauuaagagcuggagaaauaacaucuugaggacucaagagucggagugugccugcgugaaugggucuuguuucaccaucaugacagauggaccauccgacggccaggcuucauacaaaauuuuuaagaucgaaaaagguaagauugucaaaaguguggagaugaacgcccccaauuaucauuacgaagagugcagcuguuacccugauuccucugagauaacuugcgugugccgggacaacuggcacgggagcaaucgcccaugggucucauucaaccagaaucucgaauaucagaucggauacauuuguaguggcaucuuuggcgauaacccgagacccaaugacaagaccggguccugcggaccuguuagcucuaacggugcgaauggcgugaagggguucucauauaaauacggaaacggcguauggaucgguaggacaaagaguauuagcucccggaaaggguuugagaugauaugggauccaaacggcuggaccggaacggacaauaacuucucuaucaagcaagacauugugggcaucaaugaauggucgggguauagcggauccuuuguccagcaucccgagcugacugguaugggcuguauucgcccuugcuucuggguggaacugauccgagggagaccaaaagagaacacaauauggaccucaggaaguucuaucagcuucuguggcguuaauuccgauacuguggguuggucauggcccgacggggcagagcucccguuuacaauugauaaguga

SEQ ID NO: 149153 - RNA, 1410 nt, Artificial Sequence; identical to SEQ ID NO: 148305
  derived and/or modified CDS sequence (opt3) from neuraminidase__InfluenzaA__AEQ49768

SEQ ID NO: 149154 - RNA, 1410 nt, Artificial Sequence; identical to SEQ ID NO: 149126
  derived and/or modified CDS sequence (opt3) from neuraminidase__InfluenzaA__AEQ49769

SEQ ID NO: 149155 - RNA, 1410 nt, Artificial Sequence
  derived and/or modified CDS sequence (opt3) from neuraminidase__InfluenzaA__AEQ49770
augaaccccaaucagaagaucauuaccauaggcagcgugugcaugacaaucgggauggccaaccugauucuccaaaucggaaauauuaucuccgucuggauaucucacucaauccagcuugguaaccagaaucagacugagacguguaaccaaaguguuauuaccuacgaaaauaacacaugggugaaucagacuuauguaaacaucagcaauaccaacuucgcugcaggccaguccguggucucugugaaacuggccggaaauucgucauugugcccuguuagcggaugggcgauuuacaguaaggacaacuccaucagaauaggcucuaaaggugauguguuugucauuagggagccauucaucagcuguuccccguuagaaugccggacauuuuuccugacccagggggcucuacucaaugacaagcauucaaacggaacuauuaaagaucgcagucccuaucgaacacugaugagcuguccuaucggcgaggugccaucucccuacaacucccguuuugaaucaguagccuggagcgcaagugccugccacgacggcaucaauuggcuuaccauugggauaucuggaccugauaacggugcuguugcagugcugaaguauaauggcaucauuacggacacuaucaaguccuggagaaacaauauauugaggacccaagagagcgagugugccugcgucaacgggucguguuucacagugaugacugauggaccaucugacggccaggcuuccuacaaaauuuuucggaucgaaaaggguaaaaucgugaagucagucgagaugaaugcccccaacuaucauuacgaagagugcaguuguuacccugauagcuccgagauuaccugcguuugccgcgacaauuggcacgggucuaacagaccaugggugagcuucaaucagaaccucgaauauaggaucggauacauuuguucaggcauauuuggcgauaauccgcggcccaacgacaaaacagggaguugcggaccuguauccagcaauggugcgaacggcgugaagggguucucuuuuaaguauggaaacggcgucuggaucggucgcaccaaaucaauuaguagccgaaauggguucgagaugaucugggauccaaacggcuggacgggaacugacaauaacuuuuccaucaagcaggacauuauaggcaucaaugaauggucuggguacucggggagcuucgugcaacaucccgagcugacaggucuggauuguauuagaccuugcuucuggguugaacucaucaggggccggccaaaagagaacaccauuuggacuuccgggucaaguaucucuuuuuguggagugaauagcgacacagucggcugguccuggcccgauggugcagaguuaccguucaccguggacaaguga

SEQ ID NO: 149156 - RNA, 1410 nt, Artificial Sequence; identical to SEQ ID NO: 149139
  derived and/or modified CDS sequence (opt3) from neuraminidase__InfluenzaA__AEQ49771

SEQ ID NO: 149157 - RNA, 1410 nt, Artificial Sequence; identical to SEQ ID NO: 148305
  derived and/or modified CDS sequence (opt3) from neuraminidase__InfluenzaA__AEQ49772

SEQ ID NO: 149158 - RNA, 1410 nt, Artificial Sequence
  derived and/or modified CDS sequence (opt3) from neuraminidase__InfluenzaA__AEQ49773
augaaccccaaucagaagaucauuaccauaggcagcaucugcaugacaauugggauggccaaccugauccuccaaauuggaaauaucauauccaucuggauuucucacucaauccagcuugguaaccagagucagauugagacuuguaaucaaagcgugaucacguacgaaaacaauaccugggucaaccagacauauguuaauauauccaacacuaauuucgcugcaggccagucugugguaucggugaaacuggccgggaacucauccuugugcccugucaguggaugggcgauuuacuccaaggacaauucuaucagaauuggcagcaaaggugauguguuuguuaucagggagccauucaucuccuguucaccguuagaaugccggaccuuuuuccugacacagggggcucuacucaacgacaagcauaguaauggaaccauuaaagaucgcagccccuaucgaacucugaugucuuguccuauaggcgaggugccaucccccuacaacucacguuuugaaagcgucgccuggagugcaucugccugccacgacggcaucaacuggcuuacaauugggaucuccggaccugauaauggugcuguggcaguacugaaguauaacggcauaauuaccgacacgaucaagagcuggagaaauaacaucuugaggacucaagagucggagugugccugcguuaaugggucuuguuucaccauuaugacagauggaccauccgacggccaggcuucauacaaaaucuuucggauugaaaaggguaaaauagugaagagugucgagaugaacgcccccaauuaucauuacgaagagugcagcuguuacccugauuccucugagaucacuugcgugugccgcgacaacuggcacgggagcaauagaccaugggugucauucaaccagaaucucgaauaucagauuggauacaucuguaguggcaucuuuggcgauaacccgaggcccaaugacaaaaccggguccugcggaccugucagcucuaacggugcgaauggcguuaagggguucucauuuaaguauggaaacggcguguggauuggucggacaaaaaguauaagcucccgcaagggguucgagaugaucugggauccaaacggcuggaccggaacggacaauaacuuuucuauuaaacaagacaucguaggcauuaaugaauggucgggguacagcggauccuucgugcagcaucccgagcugacuggucuggauuguauccgaccuugcuucugggucgaacucauaagaggcaggccaaaggagaacacaaucuggaccucagggaguucuauuagcuuuuguggagugaauagcaacacuguuggcuggucauggcccgacggugcagaguuaccguucacaaucgauaaauga

SEQ ID NO: 149159 - RNA, 1410 nt, Artificial Sequence
  derived and/or modified CDS sequence (opt3) from neuraminidase__InfluenzaA__AEQ49774
augaaccccaaucagaagaucauuaccauaggcagcgugugcaugacaaucgggauggccaaccugauucuccaaaucggaaauauuaucuccauauggaucucucacucaauucagcuugguaaccagagucagaucgagacuuguaaucaaagcgucauuacguacgaauauaacaccuggguuaaucagacauacaucaacauauccaauacuaacuucgcugcaggccagucugugguaucggugaaacuggucgggaauagcucauugugcccugugaguggaugggccauuuauuccaaggacaacucuaucagaauuggcagcaaaggugauguuuuugugaucagggagccauucaucuccuguucaccguuagaaugccggaccuuuuuccugacacagggggcgcuacucaaugacaagcauaguaacggaaccauuaaagaucgcagccccuaccgaacucugaugucuuguccuauaggcgaggucccaucccccuauaauucacguuuugaaagcguggcuuggagugccucugcaugccacgacggcaucaacuggcuuacaauugggaucuccggaccugauaacggugccguagcuguucugaaguacaauggcauaauuaccgacacgaucaagagcuggagaaacaauaucuugaggacucaagagucggagugugcaugcgugaacgggucuuguuucaccauuaugacagauggaccauccgacggccaggccucauauaaaaucuuucggauugaaaaggguaaaauagucaagaguguggagaugaaugcucccaacuaccauuacgaagagugcagcuguuauccugauuccucugagaucacuugcgugugccgcgacaauuggcacgggagcaacagaccaugggucucauucaaucagaaccucgaauaccagauuggauauaucuguaguggcaucuuuggcgauaauccgaggcccaacgacaaaaccggguccugcggaccuguuagcucuaauggugccaacggcgugaagggguucucauuuaaguacggaaauggcguauggauuggucggacaaaaaguauaagcucccgcaagggguaugagaugaucugggauccaaacggcuggaccggaacggacaacaauuucucuauuaaacaagacaucgugggcauuaacgaauggucgggguacagcggauccuuuguccagcaucccgagcugacugguauggauuguauccgaccuugcuucuggguggaacugauaagaggcaggccaaaggagaauacaaucuggaccucagggaguucuauuagcuucuguggaguuaacuccgacacugugggcuggucauggcccgauggugcggagcucccguuuacaaucgacaaauga

SEQ ID NO: 149160 - RNA, 1410 nt, Artificial Sequence; identical to SEQ ID NO: 148305
  derived and/or modified CDS sequence (opt3) from neuraminidase__InfluenzaA__AEQ49775

SEQ ID NO: 149161 - RNA, 1410 nt, Artificial Sequence
  derived and/or modified CDS sequence (opt3) from neuraminidase__InfluenzaA__AEQ49776
augaaccccaaucagaagaucauuaccauaggcagcgugugcaugacaaucgggauggccaaccugauucuccaaaucggaaauauuaucuccauauggaucucucacucaauucagcuugguaaccagagucagaucgagacuuguaaucaaagcgucauuacguacgaaaacaauaccuggguuaaccagacauaugugaauaucuccaacacuaauuucgcugcaggccagucuguagugucggucaaacuggccgggaacaguagcuugugcccugugaguggaugggcgauauacuccaaggacaauucuauuagaaucggcagcaaaggugauguuuuugugauuagggagccauucaucuccuguucaccgagugaaugccggaccuuuuucuuaacacagggggcucugcuaaacgacaagcauagcaauggaaccaucaaagaucgcucucccuaucgaacucucauguccuguccuauuggcgaggucccaucacccuacaacagccguuuugaaaguguggccuggucugcauccgccugccacgacggcauaaacuggcugacaaucgggauuagcggaccugauaauggugcuguagcaguucuuaaguauaacggcaucauaaccgacacgauuaagucguggagaaauaacauccugaggacucaagagucugagugugccugcgugaauggguccuguuucaccaucaugacagauggaccaucagacggccaggcuaguuacaaaauuuuucggaucgaaaaggguaaaauugucaagagcguggagaugaacgcccccaauuaucauuacgaagagugcuccuguuacccugauucuagcgagauaacuugcgugugccgcgacaacuggcacgggucaaauagaccaugggucaguuucaaccagaauuuggaauaucagaucggauacauuuguuccggcaucuuuggcgauaacccgaggcccaaugacaaaaccgggagcugcggaccuguuucuucaaacggugcgaauggcgugaagggguucaguuuuaaguauggaaacggcguauggaucggucggacaaaaagcauuuccucucgcaagggguucgagaugauaugggauccaaacggcuggaccggaacggacaauaacuuuucgaucaaacaagacauugugggcaucaaugaauggagcggguacuccggaucauucguccagcaucccgagcucacuggucuggauuguauucgaccuugcuucuggguggaacugaucagaggcaggccaacagagaacaccauauggacuucagggucuagcaucuccuuuuguggaguuaauucagacacagugggcuggagcuggcccgauggugcagagcucccguucaccauugacaaguga

SEQ ID NO: 149162 - RNA, 1410 nt, Artificial Sequence; identical to SEQ ID NO: 149126
  derived and/or modified CDS sequence (opt3) from neuraminidase__InfluenzaA__AEQ49777

SEQ ID NO: 149163 - RNA, 1410 nt, Artificial Sequence
  derived and/or modified CDS sequence (opt3) from neuraminidase__InfluenzaA__AEQ49778
augaaccccaaucagaagaucauuaccauaggcagcgugugcaugacaaucgggauggccaaccugauucuccaaaucggaaauauuaucuccauauggaucucucacucaauucagcuugguaaccagagucagaucgagacuuguaaucaaagcgucauuacguacgaaaacaauaccuggaucaaccagacauauguuaauauauccaacacuaauuucgcugcagugcagucuguagugucggucaaacuggccggcaacucaaccuugugcccugugagcgggugggcgauuuacaguaaggacaauuccaucagaauuggaucuaaaggcgauguuuuugugaucagggagccauucaucagcuguuccccguuagaaugccggacauuuuuccugacccagggugcucuacucaacgacaagcauucaaaugggacuauuaaagaucgcagucccuaucgaacacugaugagcuguccuauaggagaggucccaucucccuacaacucccguuuugaaucaguggccuggagcgcaagugccugccacgacggcaucaacuggcuuaccauuggcaucucugggccugauaauggagcuguagcaguucugaaguauaacgguauaauuacggacacuaucaaguccuggagaaauaacaucuugaggacccaagagagcgagugugccugcgugaauggcucguguuucacaauuaugacugaugggccaucugacggacaggcuuccuacaaaaucuuucggauugaaaagggcaaaauagucaagucaguggagaugaacgcccccaauuaucauuacgaagagugcaguuguuacccugauagcuccgagauuaccugcgugugccgcgacaacuggcacgguucuaauagaccaugggucagcuucaaccagaaucucgaauaucagaucggguacaucuguucaggaaucuuuggcgauaacccgaggcccaaugacaaaacaggcaguugcgggccuguuuccagcaacggagcgaauggugugaagggcuucucuuuuaaguaugggaacggaguauggauuggccggaccaaaucaauaaguagccgcaaggguuucgagaugaucugggauccaaacggguggacgggcacugacaauaacuuuuccauuaaacaagacaucgugggaauuaaugaauggucuggcuacucggggagcuucguccagcaucccgagcugacaggacuggauuguauccgaccuugcuucuggguggaacucauaagagguaggccaaaggagaacaccaucuggacuuccggcucaaguauuucuuuuugugggguuaauagcgacacagugggaugguccuggcccgauggcgcagaguuaccguucaccaucgacaaauga

SEQ ID NO: 149164 - RNA, 1410 nt, Artificial Sequence
  derived and/or modified CDS sequence (opt3) from neuraminidase__InfluenzaA__AEQ49779
augaaccccaaucagaagaucauuaccauaggcagcgugugcaugacaaucgggauggccaaccugauucuccaaaucggaaauauuaucuccauauggaucucucacucaauucagcuugguaaccagaaucagacugagacguguaaccaaagugucaucaccuacgaaaauaacacauggguuaaucagacuuaugugaacauuagcaauaccaacuucgcugcaggccaguccguagugucugucaaacuggccggaaauucgucauugugcccugugagcggaugggcgaucuacaguaaggacaacuccauaagaauuggcucuaaaggugauguuuuugugaucagggagccauucauuagcuguuccccguuagaaugccggacauuuuuccugacccagggggcucuacucaaugacaagcauucaaacggaacuaucaaagaucgcagucccuaucgaacacugaugagcuguccuaucggcgaggucccaucucccuacaacucccguuuugaaucaguggccuggagcgcaagugccugccacgacggcauuaauuggcuuaccauagggaucucuggaccugauaacggugcuguagcaguucugaaguauaauggcauuaucacggacacuauaaaguccuggagaaacaauauuuugaggacccaagagagcgagugugccugcgugaacgggucguguuucacagucaugacugauggaccaucugacggccaggcuuccuacaaaaucuuucggaucgaaaaggguaaaauugugaagucaguggagaugaaugcccccaacuaucauuacgaagagugcaguuguuacccugauagcuccgagauuaccugcgucugccgcgacaauuggcacgggucuaacagaccauggguuagcuucaaucagaaccucgaauauaggaucggauacauauguucaggcaucuuuggcgauaauccgcggcccaacgacaaaacagggaguugcggaccuguguccagcaauggugcgaacggcguaaagggguucucuuuuaaguauggaaacggcguguggauuggucgcaccaaaucaaucaguagccgaaauggguucgagaugaucugggauccaaacggcuggacgggaacugacaauaacuuuuccauuaagcaggacauaaucggcauuaaugaauggucuggguacucggggagcuucguccaacaucccgagcugacaggucuggauuguaucagaccuugcuucuggguggaacucauuaggggccggccaaaagagaacaccaucuggacuuccgggucaaguauaucuuuuuguggaguuaauagcgacacagugggcugguccuggcccgauggugcagaguuaccguucaccgucgacaaguga

SEQ ID NO: 149165 - RNA, 1410 nt, Artificial Sequence; identical to SEQ ID NO: 148305
  derived and/or modified CDS sequence (opt3) from neuraminidase__InfluenzaA__AEQ49780

SEQ ID NO: 149166 - RNA, 1410 nt, Artificial Sequence; identical to SEQ ID NO: 148305
  derived and/or modified CDS sequence (opt3) from neuraminidase__InfluenzaA__AEQ49781

SEQ ID NO: 149167 - RNA, 1410 nt, Artificial Sequence; identical to SEQ ID NO: 149126
  derived and/or modified CDS sequence (opt3) from neuraminidase__InfluenzaA__AEQ49782

SEQ ID NO: 149168 - RNA, 1410 nt, Artificial Sequence
  derived and/or modified CDS sequence (opt3) from neuraminidase__InfluenzaA__AEQ49783
augaaccccaaucagaagaucauuaccauaggcagcgccugcaugacaaucgggauggcuaaccugauucuccaaaucggaaauauuaucuccauauggaucucucacucaauucagcuugguaaccagagucagaucgagacuuguaaucaaagcgugauuacguacgaaaacaauaccugggucaaccagacauauguuaauaucuccaacacuaauuucgcagccggccagucugugguaucggugaaacuggcggggaacucauccuugugcccugucaguggaugggcuauauacuccaaggacaauucuauuagaaucggcagcaaaggugauguguuuguuauuagggagccauucaucuccuguucaccguuagaaugccggaccuuuuuccugacacagggggcccuacucaacgacaagcauaguaauggaaccaucaaagaucgcagccccuaucgaacucugaugucuuguccuauuggcgaggugccaucccccuacaacucacguuuugaaagcgucgcauggagugccucugcuugccacgacggcauaaacuggcuuacaaucgggauuuccggaccugauaauggugcaguggccguacugaaguauaacggcaucauaaccgacacgauuaagagcuggagaaauaacaucuugaggacucaagagucggagugugcuugcguuaaugggucuuguuucaccaucaugacagauggaccauccgacggccaggccucauacaaaauuuuucggaucgaaaaggguaaaauugugaagagugucgagaugaacgcgcccaauuaucauuacgaagagugcagcuguuacccugauuccucugagauaacuugcgugugccgcgacaacuggcacgggagcaauagaccaugggugucauucaaccagaaucucgaauaucagaucggauacauuuguaguggcaucuuuggcgauaacccgaggcccaaugacaaaaccggguccugcggaccugucagcucuaacggugcaaauggcguuaagggguucucauuuaaguauggaaacggcguguggaucggucggacaaaaaguauuagcucccgcaagggguucgagaugauaugggauccaaacggcuggaccggaacggacaauaacuuuucuaucaaacaagacauuguaggcaucaaugaauggucgggguacagcggauccuucgugcagcaucccgagcugacuggucuggauuguauucgaccuugcuucugggucgaacucaucagaggcaggccaaaggagaacacaauauggaccucagggaguucuaucagcuuuuguggagugaauagcgacacuguuggcuggucauggcccgauggugccgaguuaccguucacaauugacaaauga

SEQ ID NO: 149169 - RNA, 1410 nt, Artificial Sequence
  derived and/or modified CDS sequence (opt3) from neuraminidase__InfluenzaA__AEQ49785
augaaccccaaucagaagaucauuaccauaggcagcgugucccugacaaucucuacuauuugcuucuuuaugcagaucgccauucucaucacgaccgucacacuucacuucaaacaguacgaguuuaacucaccuccaaauaaccagguuaugcugugugaaccgacuauaaucgagagaaauauuaccgaaaucguguauuugacaaacaccacuauugagaaggaaaucugccccaaauuagcugaguacaggaauuggaguaagccucagugugacauaacaggguucgcaccauuuagcaaagauaacuccauucggcugucugccggaggugacaucuggguaacccgcgagcccuaugugucgugcgauccuaauaaguguuaccaauucgcgcuaggccaggggacgacucucaacaauguccauucaaacaauaccgugcgagaccguacaccauauagaacucugcuuaugaacgaacugggaguucccuuucacuugggcaccaaacaggugugcauugcuuggagcaguuccucuugucaugaugguaaggccuggcuccacgucugcaucacaggggacgauaagaaugcaaccgccagcuucaucuacaacggaaggcugguggacuccguaguuucauggaguaaagagauucugcggacgcaggaaagcgagugugugugcauaaacggcacuuguacagucgugaugaccgauggcucugcuuccgggaaggcagacacuaaaauccucuuuauugaggaaggaaagaucgugcauacaucaaccuuaagcgguagugcccaacacgucgaggaaugcucuugcuauccucgcuacccaggcguuagaugugugugcagggauaauuggaagggguccaaccggccgauaguagacauuaauaugaaagaucacagcaucgugucgucuuacgucuguuccggacuggugggcgacacgccccgcaagaacgacucaaguagcuccucucauugcuucgauccuaaugacgaggaaggugggcacggaguuaaaggcugggcuuuugaugacggcaacgauguguggauggggcgaaccaucagcgagaagucaagacuuggauaugagacauucaaagucauugaagguuggaguaauccaaaguccaaauugcagaucaacaggcaagugauuguagaccggggcgaucguagcggguacucuggaauauuuucaguugagggcaagaguuguaucaaucgcugcuucuauguggaacugauuagagguagcaaggaggaaacugagguccuauggaccuccaacucuaucguggucuucugugggacaucgggcacuuacggaaccggcagcuggcccgacggggccgauaucaaucucaugccuauuuga

SEQ ID NO: 149170 - RNA, 1410 nt, Artificial Sequence; identical to SEQ ID NO: 149169
  derived and/or modified CDS sequence (opt3) from neuraminidase__InfluenzaA__AEQ49786

SEQ ID NO: 149171 - RNA, 1410 nt, Artificial Sequence; identical to SEQ ID NO: 149169
  derived and/or modified CDS sequence (opt3) from neuraminidase__InfluenzaA__AEQ49788

SEQ ID NO: 149172 - RNA, 1410 nt, Artificial Sequence; identical to SEQ ID NO: 149169
  derived and/or modified CDS sequence (opt3) from neuraminidase__InfluenzaA__AEQ49789

SEQ ID NO: 149173 - RNA, 1410 nt, Artificial Sequence
  derived and/or modified CDS sequence (opt3) from neuraminidase__InfluenzaA__AEQ49790
augaaccccaaucagaagaucauuaccauaggcagcgugucccugacaaucucuacuauuugcuucuuuaugcagaucgccauucucaucacgaccgucacacuucacuucaaacaguacgaguuuuauucaccuccaaacaaucagguuaugcugugugaaccgacuauaaucgagagaaacauuaccgaaaucguguacuugacaaauaccacuauugagaaggaaaucugccccaaauuagcugaguauaggaacuggaguaagccucagugugacauaacaggguucgcaccauuuagcaaagauaauuccauucggcugucugccggaggugacaucuggguaacccgcgagcccuacgugucgugcgauccugacaaguguuaucaauucgcgcuaggccaggggacgacucucaacaauguccauucaaacaauaccgugcgaggacguacaccauacagaacucugcuuaugaacgaacugggcguucccuuucacuuggguaccaaacaggugugcauugcuuggagcaguuccucuugucaugaugggaaggccuggcuccacgucugcaucacaggagacgauaagaaugcaaccgccagcuucaucuauaacggcaggcugguggacuccguaguuucauggaguaaagagauucugcggacgcaggaaagcgagugugugugcauaaauggcacuuguacagucgugaugaccgaugggucugcuuccggaaaggcagacacuaaaauccucuuuauugaggaagguaagaucgugcauacaucaaccuuaagcggcagugcccaacacgucgaggaaugcucuugcuacccucgcuacccagggguuagaugugugugcagggauaacuggaagggauccaaccggccgauaguagacauuaauaucaaagaucacagcaucgugucgucuuaugucuguuccggccuggugggugacacgccccgcaagaacgacucaaguagcuccucucauugccuugauccuaauaacgaggaagggggacacggcguuaaaggcugggcuuucgacgaugggaaugacguguggaugggacgaaccauuaacgagacaagcagauuggguuacgagacuuuuaaggucaucgaaggcuggucaaauccaaaaaguaagcugcagauuaacaggcaagugauaguagaucgggggaaucguuccggauauagcggcaucuucucuguugaggguaaaucauguauuaaccgcugcuuuuacguggaacuaaucagagggaggaaggaggaaaccgagguccucuggacaaguaauagcaucguggucuucuguggcacuuccggaaccuauggcacagggucuuggcccgacggagccgaucugaaccuuaugccuauuuga

SEQ ID NO: 149174 - RNA, 1410 nt, Artificial Sequence
  derived and/or modified CDS sequence (opt3) from neuraminidase__InfluenzaA__AEQ49791
augaaccccaaucagaagaucauuaccauaggcagcgugucccugacaaucucuacuauuugcuucuuuaugcagaucgccauucucaucacgaccgucacacuucacuucaaacaguacgaguuuuauccuccaccgaacaaucagguuaugcugugugaacccacuauaaucgagagaaacauuaccgaaaucguguacuugacaaauaccacuauugagaaggaaaucugcccuaaauuagcugaguauaggaacuggucaaagccacagugugacauaacaggguucgcacccuuuaguaaagauaauagcauucggcuguccgccggaggugacaucuggguaacccgcgagccuuacgugucuugcgauccagacaaguguuaucaauucgcgcuaggccaggggacgacucucaacaauguccauucgaacaauaccgugcgaaaccguacacccuacagaacucugcuuaugaaugaacugggaguuccuuuucacuugggcaccaaacaggugugcauugcuuggucaagcaguuccugucaugaugguaaggccuggcuccacgucugcaucacaggggacgauaagaacgcaaccgccucuuucaucuauaauggaaggcugguggacagcguaguuuccuggucaaaagagauucugcggacgcaggaaagugagugugugugcauaaacggcacuuguacagucgugaugaccgauggcagcgcuucugggaaggcagacacuaaaauccucuuuauugaggaaggaaagaucgugcauacauccaccuuaucagguagcgcccaacacgucgaggaaugcaguugcuacccacgcuacccgggcguuagaugugugugcagggauaacuggaaggggucuaaucggcccauaguagacauuaacaucaaagaucacuccaucgugagcucguaugucuguucuggacuggugggcgacacgccucgcaagaaugacuccucaaguagcucccauugccuugauccaaacaaugaggaaggugggcacggaguuaaaggcugggcuuucgacgauggcaacgacguguggauggggcgaaccauuaaugagacaucuagauugggauacgagacuuuuaaggucaucgaagguuggagcaaccccaaaucaaagcugcagauuaauaggcaagugauaguagaucggggcaaccguaguggguauuccggaaucuucagcguugagggcaaaucuuguauuaaucgcugcuuuuacguggaacuaaucagagguaggaaggaggaaaccgagguccucuggacaucaaacaguaucguggucuucugugggacuagcggcaccuauggaacaggcuccuggccugacggggccgaucugaaucuuaugccaauuuga

SEQ ID NO: 149175 - RNA, 1410 nt, Artificial Sequence; identical to SEQ ID NO: 149169
  derived and/or modified CDS sequence (opt3) from neuraminidase__InfluenzaA__AEQ49792

SEQ ID NO: 149176 - RNA, 1410 nt, Artificial Sequence; identical to SEQ ID NO: 149169
  derived and/or modified CDS sequence (opt3) from neuraminidase__InfluenzaA__AEQ49793

SEQ ID NO: 149177 - RNA, 1410 nt, Artificial Sequence; identical to SEQ ID NO: 149169
  derived and/or modified CDS sequence (opt3) from neuraminidase__InfluenzaA__AEQ49794

SEQ ID NO: 149178 - RNA, 1410 nt, Artificial Sequence; identical to SEQ ID NO: 149169
  derived and/or modified CDS sequence (opt3) from neuraminidase__InfluenzaA__AEQ49795

SEQ ID NO: 149179 - RNA, 1410 nt, Artificial Sequence
  derived and/or modified CDS sequence (opt3) from neuraminidase__InfluenzaA__AEQ49796
augaaccccaaucagaagaucauuaccauaggcagcgugucccugacaaucucuacuauuugcuucuuuaugcagaucgccauucucaucacgaccgucacacuucacuucaaacaguacgaguuuaacucaccuccaaauaaccagguuaugcugugugaaccgacuauaaucgagagaaauauuaccgaaaucguguauuugacaaacaccacuauugagaaggaaaucugccccaaauuagcugaguacaggaauuggaguaagccucagugugacauaacaggguucgcaccauuuagcaaagauaacuccauucggcugucugccggaggugacaucuggguaacccgcgagcccuaugugucgugcgauccugacaaguguuaccaauucgcgcuaggccaggggacgacucucaauaacguccauucaaauaacaccgugcgaggacguacaccauauagaacucugcuuaugaaugaacugggcguucccuuucacuuggguaccaaacaggugugcauugcuuggagcaguuccucuugucaugaugggaaggccuggcuccacgucugcaucacaggagacgauaagaacgcaaccgccagcuucaucuacaauggcaggcugguggacuccguaguuucauggaguaaagagauucugcggacgcaggaaagcgagugugugugcauaaacggcacuuguacagucgugaugaccgaugggucugcuuccggaaaggcagacacuaaaauccucuuuauugaggaagguaagaucgugcauacaucaaccuuaagcggcagugcccaacacgucgaggaaugcucuugcuauccucgcuacccagggguuagaugugugugcagggauaacuggaagggauccaaucggccgauaguagacauuaacaucaaagaucacagcaucgugucgucuuacgucuguuccggccuggugggugacacgccccgcaagaaugacucaaguagcuccucucauugccuugauccuaacaaugaggaagggggacacggcguuaaaggcugggcuuucgacgaugggaacgacguguggaugggacgaaccauuaaugagacaagcagauuggguuaugagacuuuuaaggucaucgaaggcuggucaaacccaaaaaguaagcugcagauuaauaggcaagugauaguagauaaagggaaccgguccggauacagcggcaucuucucuguugaggguaagucauguauuaaucguugcuuuuauguggaacuaauccgcgggagaaaggaggaaaccgagguccucuggacaaguaacagcaucguggucuucuguggcacuuccggaaccuacggcacagggucuuggcccgacggagccgaucugaaucuuaugccuauuuga

SEQ ID NO: 149180 - RNA, 1410 nt, Artificial Sequence; identical to SEQ ID NO: 149169
  derived and/or modified CDS sequence (opt3) from neuraminidase__InfluenzaA__AEQ49797

SEQ ID NO: 149181 - RNA, 1410 nt, Artificial Sequence; identical to SEQ ID NO: 149169
  derived and/or modified CDS sequence (opt3) from neuraminidase__InfluenzaA__AEQ49798

SEQ ID NO: 149182 - RNA, 1410 nt, Artificial Sequence; identical to SEQ ID NO: 149169
  derived and/or modified CDS sequence (opt3) from neuraminidase__InfluenzaA__AEQ49799

SEQ ID NO: 149183 - RNA, 1410 nt, Artificial Sequence; identical to SEQ ID NO: 149169
  derived and/or modified CDS sequence (opt3) from neuraminidase__InfluenzaA__AEQ49800

SEQ ID NO: 149184 - RNA, 1410 nt, Artificial Sequence; identical to SEQ ID NO: 149169
  derived and/or modified CDS sequence (opt3) from neuraminidase__InfluenzaA__AEQ49801

SEQ ID NO: 149185 - RNA, 1410 nt, Artificial Sequence; identical to SEQ ID NO: 149169
  derived and/or modified CDS sequence (opt3) from neuraminidase__InfluenzaA__AEQ49802

SEQ ID NO: 149186 - RNA, 1410 nt, Artificial Sequence
  derived and/or modified CDS sequence (opt3) from neuraminidase__InfluenzaA__AEQ49803
augaaccccaaucagaagaucauuaccauaggcagcgugucccugacaaucucuacuauuugcuucuuuaugcagaucgccauucucaucacgaccgucacacuucacuucaaacaguacgaguuuaacucaccuccaaauaaccagguuaugcugugugaaccgacuauaaucgagagaaauauuaccgaaaucguguauuugacaaacaccacuauugagaaggaaaucugccccaaauuagcugaguacaggaauuggaguaagccucagugugacauaacaggguucgcaccauuuagcaaagauaacuccauucggcugucugccggaggugacaucuggguaacccgcgagcccuaugugucgugcgauccuaauaaguguuaccaauucgcgcuaggccaggggacgacucucaacaauguccauucaaacaauaccgugcgagaccguacaccauauagaacucugcuuaugaacgaacugggaguucccuuucacuugggcaccaaacaggugugcauugcuuggagcaguuccucuugucaugaugguaaggccuggcuccacgucugcaucacaggggacgauaagaaugcaaccgccagcuucaucuacaacggaaggcugguggacuccguaguuucauggaguaaagagauucugcggacgcaggaaagcgagugugugugcauaaacggcacuuguacagucgugaugaccgauggcucugcuuccgggaaggcagacacuaaaauccucuuuauugaggaaggaaagaucgugcauacaucaaccuuaagcgguagugcccaacacgucgaggaaugcucuugcuauccucgcuacccaggcguuagaugugugugcagggauaauuggaagggguccaaccggccgauaguagacauuaauaucaaagaucacagcaucgugucgucuuacgucuguuccggacuggugggcgacacgccccgcaagaacgacucaaccaguagcucccauugccuugauccuaauaacgaggaaggugggcacggaguuaaaggcugggcuuucgacgauggcaaugacguguggauggggcgaacaauuucugagacuagcagauugggauaugagaccuuuaaggucaucgaagguuggucaaacccaaaaaguaagcugcagauuaauaggcaagugauaguagauaaaggcaaccgguccggguacagcggaaucuucucuguugagggcaagucauguauuaaucguugcuuuuauguggaacuaauccgcgguagaaaggaggaaacagagguccucuggaccaguaacagcaucguggucuucugugggacuuccggcacauacggaaccggcucuuggcccgacggggccgaucugaaucuuaugacuauuuga

SEQ ID NO: 149187 - RNA, 1410 nt, Artificial Sequence
  derived and/or modified CDS sequence (opt3) from neuraminidase__InfluenzaA__AEQ49804
augaaccccaaucagaagaucauuaccauaggcagcgugucccugacaaucucuacuauuugcuucuuuaugcagaucgccauucucaucacgaccgucacacuucacuucaaacaguacgaguuuaacucaccuccaaauaaccagguuaugcugugugaaccgacuauaaucgagagaaauauuaccgaaaucguguauuugacaaacaccacuauugagaaggaaaucugccccaaaccugcugaguacaggaauuggaguaagccacagugugacauaacaggguucgcacccuuuagcaaagauaacuccauucgguuaucugccggaggugacaucuggguaacccgcgagccuuaugugucgugcgauccagacaaguguuaccaauucgcgcugggccaggggacgacucuaaauaacguccauucaaauaacaccgugcgagaucguacacccuauagaacucuccugaugaaugaacuuggaguuccuuuucaccugggcaccaaacaggugugcauugcuuggagcaguuccucuugucaugacgguaaggccugguugcacgucugcaucacaggggaugacaagaacgcaaccgccagcuucaucuacaauggaaggcucguggauuccguaguuucauggaguaaagacauucugcggacgcaggagagcgaaugugugugcauaaacggcacuuguacagucgugaugaccgauggcucugcuuccgggaaggcagacacuaaaauccuguuuauugaggagggaaagaucgugcauacaucaacccucagcgguagugcccaacacgucgaagagugcucuugcuauccacgcuacccgggcguuagaugugugugcagggauaacuggaagggguccaaucggcccauaguagacauuaacaucaaagaccacagcaucgugucgucuuacgucuguuccggauuagugggcgauacgccucgcaagaaugacucaaguagcuccucucauugccuggauccaaacaaugaagagggugggcacggaguuaaaggcugggcuuucgacgauggcaacgacguguggauggggcgaaccauuaaugaaacaagcagacuuggauaugagacuuuuaaggucaucgaggguuggucaaaccccaaaaguaaguugcagauuaauaggcaagugauaguagaucggggcaaccguuccggguacagcggaaucuucucuguugaaggcaaaucauguauuaaucgcugcuuuuauguggagcugaucagagguaggaaggaagagaccgaaguccuauggacaaguaacagcaucguggucuucugugggacuuccggcaccuacggaacaggcucuuggccugacggggccgaucucaaucugaugccaauuuga

SEQ ID NO: 149188 - RNA, 1410 nt, Artificial Sequence
  derived and/or modified CDS sequence (opt3) from neuraminidase__InfluenzaA__AEQ49805
augaaccccaaucagaagaucauuaccauaggcagcgugucccugacaaucucuacuauuugcuucuuuaugcagaucgccauucucaucacgaccgucacacuucacuucaaacaguacgaguuuaacucaccuccaaauaaccagguuaugcugugugaaccgacuauaaucgagagaaauauuaccgaaaucguguauuugacaaacaccacuauugagaaggaaaucugccccaaaccugcugaguacaggaauuggaguaagccacagugugacauaacaggguucgcacccuuuagcaaagauaacuccauucgguuaucugccggaggugacaucuggguaacccgcgagccuuaugugucgugcgauccagacaaguguuaccaauucgcgcugggccaggggacgacucuaaauaacguccauucaaauaacaccgugcgaaaucguacacccuauagaacucuccugaugaacgaacuuggaguuccuuuucaccugggcaccaaacaggugugcauugcuuggagcaguuccucuugucaugaugguaaggccugguugcacgucugcaucacaggggacgauaagaaugcaaccgccagcuucaucuacaacggaaggcucguggacuccguaguuucauggaguaaagauauucugcggacgcaggagagcgaaugugugugcauaaacggcacuuguacagucgugaugaccgacggcucugcuuccgggaaggcagauacuaaaauccuguuuauugaggagggaaagaucgugcauacaucaacccucagcgguagugcccaacacgucgaagagugcucuugcuauccacgcuacccgggcguuagaugugugugcagggacaauuggaagggguccaaccggcccauaguagauauuaauaucaaagaccacagcaucgugucgucuuacgucuguuccggauuagugggcgacacgccucgcaagaacgauucaaguagcuccucucauugccuggacccaaauaacgaagagggugggcacggaguuaaaggcugggcuuucgaugacggcaaugauguguggauggggcgaaccauuaacgaaacaagcagacuuggauaugagacuuuuaaggucaucgaggguuggucaaaucccaaaaguaaguugcagauuaacaggcaagugauaguagaccggggcaaucguuccggguacagcggaaucuucucuguugaaggcaaaucauguauuaaccgcugcuuuuauguggagcugaucagagguaggaaggaagagaccgaaguccuauggacaaguaauagcaucguggucuucugugggacuuccggcaccuacggaacaggcucuuggccugauggggccgaccucaaccugaugccaauuuga

SEQ ID NO: 149189 - RNA, 1410 nt, Artificial Sequence
  derived and/or modified CDS sequence (opt3) from neuraminidase__InfluenzaA__AEQ49806
augaaccccaaucagaagaucauuaccauaggcagcgugucccugacaaucucuacuauuugcuucuuuaugcagaucgccauucucaucacgaccgucacacuucacuucaaacaguacgaguuuaacucaccuccaaauaaccagguuaugcugugugaaccgacuauaaucgagagaaauauuaccgaaaucguguauuugacaaacaccacuauugagaaggaaaucugccccaaauuagcugaguacaggaauuggaguaagccucagugugacauaacaggguucgcaccauuuagcaaagauaacuccauucggcugucugccggaggugacaucuggguaacccgcgagcccuaugugucgugcgauccugacaaguguuaccaauucgcgcuaggccaggggacgacucucaauaacguccauucaaauaacaccgugcgagaucguacaccauauagaacucugcuuaugaaugaacugggaguucccuuucacuugggcaccaaacaggugugcauugcuuggagcaguuccucuugucaugacgguaaggccuggcuccacgucugcaucacaggggaugacaagaacgcaaccgccagcuucaucuacaauggaaggcugguggauuccguaguuucauggaguaaagagauucugcggacgcaggaaagcgagugugugugcauaaacggcacuuguacagucgugaugaccgacggcucugcuuccgggaaggcagauacuaaaauccucuuuauugaggaaggaaagaucgugcauacaucaaccuuaagcgguagugcccaacacgucgaggaaugcucuugcuauccucgcuacccaggcguuagaugugugugcagggacaacuggaagggguccaaucggccgauaguagauauuaacaucaaagaccacagcaucgugucgucuuacgucuguuccggacuggugggcgacacgccccgcaagaaugauucauucaguagcucccauugccuugacccuaacaaugaggaaggugggcacggaguuaaaggcugggcuuuugaugacggcaacgauguguggauggggcgaaccauuaaugagacaucuagauugggauaugagacuuucaaggucaucgaagguuggagcaacccaaaaucaaagcugcagauuaauaggcaagugauaguagaccggggcaaccguaguggguacuccggaaucuuuagcguugagggcaaaucuuguauuaaucgcugcuucuauguggaacuaaucagagguaggaaggaggaaaccgagguccucuggacaucaaacaguaucguggucuucugugggacuagcggcaccuacggaacaggcuccuggcccgauggggccgaccugaaucuuaugccuauuuga

SEQ ID NO: 149190 - RNA, 1410 nt, Artificial Sequence; identical to SEQ ID NO: 147566
  derived and/or modified CDS sequence (opt3) from neuraminidase__InfluenzaA__AEQ49807

SEQ ID NO: 149191 - RNA, 1410 nt, Artificial Sequence
  derived and/or modified CDS sequence (opt3) from neuraminidase__InfluenzaA__AEQ49809
augaaccccaaucagaagaucauuaccauaggcagcgugucccugacaaucucuacuauuugcuucuuuaugcaaaucgccauucucaucacgaccgucacacuucacuucaaacaguacgaguuuaacucaccuccaaauaaccagguuaugcugugugaaccgacuauaaucgagagaaauauuaccgaaaucguguauuugacaaacaccacuauugagaaggaaaucugccccaaauuagcugaguacaggaauuggaguaagccucagugugacauaacaggguucgcaccauuuagcaaagauaacuccauucggcugucugccggaggugacaucuggguaacccgcgagcccuaugugucgugcgauccugacaaguguuaccaauucgcgcuaggccaggggacgacucucaauaacguccauucaaauaacaccgugcgagaucguacaccauauagaacucugcuuaugaaugaacugggaguucccuuucacuugggcaccaaacaggugugcauugcuuggagcaguuccucuugucaugacgguaaggccuggcuccacgucugcaucacaggggaugacaagaacgcaaccgccagcuucaucuacaauggaaaacugguggauuccguaguuucauggaguaaggagauucugaggacgcaggaaagcgagugugugugcauaaacggcacuuguacagucgugaugaccgacggcucugcuuccgggaaagcagauacuaagauccucuuuauugaggaaggaaagaucgugcauacaucaaccuuaagcgguagugcccaacacgucgaggaaugcucuugcuauccucgguacccaggcguucgcugugugugcagagacaacuggaaaggguccaauaggccgauaguagauauuaacaucaaggaccacagcaucgugucgucuuacgucuguuccggacuggugggcgacacgccccggaaaaaugauucaaguagcuccucucauugccuugacccuaacaaugaggaaggugggcacggaguuaagggcugggcuuucgaugacggcaacgauguguggauggggcgcaccauuaaugagacaagccgauugggauaugagacuuuuaaagucaucgaagguuggucaaacccaaagaguaaacugcagauuaauagacaggugauaguagacaggggcaaccgguccggguacagcggaaucuucucuguugagggcaagucauguauuaaucguugcuuuuauguggaacuaauccgcgguagaaaggaggaaaccgagguccucuggacaaguaacagcaucguggucuucugugggacuuccggcaccuacggaacaggcucuuggcccgauggggccgaccugaaucuuaugccuauuuga

SEQ ID NO: 149192 - RNA, 1410 nt, Artificial Sequence; identical to SEQ ID NO: 149191
  derived and/or modified CDS sequence (opt3) from neuraminidase__InfluenzaA__AEQ49811

SEQ ID NO: 149193 - RNA, 1410 nt, Artificial Sequence; identical to SEQ ID NO: 147566
  derived and/or modified CDS sequence (opt3) from neuraminidase__InfluenzaA__AEQ49812

SEQ ID NO: 149194 - RNA, 1410 nt, Artificial Sequence; identical to SEQ ID NO: 147566
  derived and/or modified CDS sequence (opt3) from neuraminidase__InfluenzaA__AEQ49813

SEQ ID NO: 149195 - RNA, 1410 nt, Artificial Sequence; identical to SEQ ID NO: 147566
  derived and/or modified CDS sequence (opt3) from neuraminidase__InfluenzaA__AEQ49815

SEQ ID NO: 149196 - RNA, 1410 nt, Artificial Sequence
  derived and/or modified CDS sequence (opt3) from neuraminidase__InfluenzaA__AEQ49816
augaaccccaaucagaagaucauuaccauaggcagcgugucccugacaaucucuacuauuugcuucuuuaugcaaaucgccauucucaucacgaccgucacacuucacuucaaacaguacgaguuuaacucaccuccaaauaaccagguuaugcugugugaaccgacuauaaucgagagaaauauuaccgaaaucguguauuugacaaacaccacuauugagaaggaaaucugccccaaauuagcugaguacaggaauuggaguaagccucagugugacauaacaggguucgcaccauuuagcaaagauaacuccauucggcugucugccggaggugacaucuggguaacccgcgagcccuaugugucgugcgauccuaauaaguguuaccaauucgcgcuaggccaggggacgacucucaacaauguccauucaaacaauaccgugcgagaccguacaccauauagaacucugcuuaugaacgaacugggaguucccuuucacuugggcaccaaacaggugugcauugcuuggagcaguuccucuugucaugaugguaaggccuggcuccacgucugcaucacaggggacgauaagaaugcaaccgccagcuucaucuacaacggaaggcugguggacuccguaguuucauggaguaaagagauucugcggacgcaggaaagcgagugugugugcauaaacggcacuuguacagucgugaugaccgauggcucugcuuccgggaaggcagacacuaaaauccucuuuguggaggaaggaaagauuguccauacaucaaccuuaagcgguagugcccaacacguugaggaaugcucuugcuauccucgcuacccaggcgugagauguguaugcagggauaauuggaagggguccaaccggccgaucguggacauaaauaugaaagaucacagcauugucucgucuuacguguguuccggacugguuggcgacacgccccgcaagaacgacucaaguagcuccucucauugcuucgauccuaaugacgaggaaggugggcacggagugaaaggcugggcuuuugaugacggcaacgaugucuggauggggcgaaccaucagcgagaagucaagacuuggauaugagacauucaaagugaucgaagguuggaguaauccaaaguccaaauugcagauuaacaggcagguaaucguugaccggggcaaucguagcggguacucuggaauauuuucaguggagggcaagaguuguauuaaccgcugcuucuaugucgaacugaucagagguaggaaggaggaaacugaggugcuauggaccagcaauuccauugucguguucugugggacaucuggcacuuacggaaccggcucguggcccgauggggccgacaucaaccucaugccuaucuga

SEQ ID NO: 149197 - RNA, 1410 nt, Artificial Sequence; identical to SEQ ID NO: 148931
  derived and/or modified CDS sequence (opt3) from neuraminidase__InfluenzaA__AEQ49820

SEQ ID NO: 149198 - RNA, 1410 nt, Artificial Sequence; identical to SEQ ID NO: 148931
  derived and/or modified CDS sequence (opt3) from neuraminidase__InfluenzaA__AEQ49821

SEQ ID NO: 149199 - RNA, 1410 nt, Artificial Sequence; identical to SEQ ID NO: 149169
  derived and/or modified CDS sequence (opt3) from neuraminidase__InfluenzaA__AEQ49822

SEQ ID NO: 149200 - RNA, 1410 nt, Artificial Sequence; identical to SEQ ID NO: 149169
  derived and/or modified CDS sequence (opt3) from neuraminidase__InfluenzaA__AEQ49823

SEQ ID NO: 149201 - RNA, 1410 nt, Artificial Sequence; identical to SEQ ID NO: 149169
  derived and/or modified CDS sequence (opt3) from neuraminidase__InfluenzaA__AEQ49824

SEQ ID NO: 149202 - RNA, 1410 nt, Artificial Sequence; identical to SEQ ID NO: 149169
  derived and/or modified CDS sequence (opt3) from neuraminidase__InfluenzaA__AEQ49825

SEQ ID NO: 149203 - RNA, 1410 nt, Artificial Sequence; identical to SEQ ID NO: 149169
  derived and/or modified CDS sequence (opt3) from neuraminidase__InfluenzaA__AEQ49826

SEQ ID NO: 149204 - RNA, 1410 nt, Artificial Sequence; identical to SEQ ID NO: 149169
  derived and/or modified CDS sequence (opt3) from neuraminidase__InfluenzaA__AEQ49827

SEQ ID NO: 149205 - RNA, 1410 nt, Artificial Sequence; identical to SEQ ID NO: 149169
  derived and/or modified CDS sequence (opt3) from neuraminidase__InfluenzaA__AEQ49828

SEQ ID NO: 149206 - RNA, 1410 nt, Artificial Sequence
  derived and/or modified CDS sequence (opt3) from neuraminidase__InfluenzaA__AEQ49829
augaaccccaaucagaagaucauuaccauaggcagcgugucccugacaaucucuacuauuugcuucuuuaugcagaucgccauucucaucacgaccgucacacuucacuucaaacaguacgaguuuaacucaccuccaaauaaccagguuaugcugugugaaccgacuauaaucgagagaaauauuaccgaaaucguguauuugacaaacaccacuauugagaaggaaaucugccccaaauuagcugaguacaggaauuggaguaagccucagugugacauaacaggguucgcaccauuuagcaaagauaacuccauucggcugucugccggaggugacaucuggguaacccgcgagcccuaugugucgugcgauccuaauaaguguuaccaauucgcgcuaggccaggggacgacucucaacaauguccauucaaacaauaccgugcgagaccguacaccauauagaacucugcuuaugaacgaacugggaguucccuuucacuugggcaccaaacaggugugcauugcuuggagcaguuccucuugucaugaugguaaggccuggcuccacgucugcaucacaggggacgauaagaaugcaaccgccagcuucaucuacaacggaaggcugguggacuccguaguuucauggaguaaagagauucugcggacgcaggaaagcgagugugugugcauaaacggcacuuguacagucgugaugaccgauggcucugcucucgggaaggcagacacuaaaaucuuauuuauugaggaaggaaagaucgugcauacauccacccugucagguagcgcccaacacgucgaggaaugcaguugcuauccucgcuacccaggcguuagaugugugugcagggauaauuggaaggggucuaaccggccgauaguagacauuaauaugaaagaucacuccaucgugagcucguacgucuguucuggacuugugggcgacacgccccgcaagaacgacuccucaaguagcucccauugcuucgauccuaaugacgaggaaggugggcacggaguuaaaggcugggcuuuugaugacggcaacgauguguggauggggcgaaccaucucugaaaagagcagauugggauaugagacauucaaagucauugaggguuggucaaauccaaagaguaaacugcagaucaacaggcaagugauuguagaccggggcgaucguuccggguacagcggaauauuuucuguugagggcaagucauguaucaaucgcugcuucuauguggaacuaauuagagguaguaaggaggaaacugagguccucuggaccagcaacuccaucguggucuucugugggacaucuggcacuuacggaaccggcucguggcccgacggggccgauaucaaucugaugccuauuuga

SEQ ID NO: 149207 - RNA, 1410 nt, Artificial Sequence; identical to SEQ ID NO: 149169
  derived and/or modified CDS sequence (opt3) from neuraminidase__InfluenzaA__AEQ49830

SEQ ID NO: 149208 - RNA, 1410 nt, Artificial Sequence; identical to SEQ ID NO: 149169
  derived and/or modified CDS sequence (opt3) from neuraminidase__InfluenzaA__AEQ49831

SEQ ID NO: 149209 - RNA, 1410 nt, Artificial Sequence
  derived and/or modified CDS sequence (opt3) from neuraminidase__InfluenzaA__AEQ49832
augaaccccaaucagaagaucauuaccauaggcagcgugucccugacaaucucuacuauuugcuucuuuaugcaaaucgccauucucaucacgaccgucacacuucacuucaaacaguacgaguuuaacucaccuccaaauaaccagguuaugcugugugaaccgacuauaaucgagagaaauauuaccgaaaucguguauuugacaaacaccacuauugagaaggaaaucugccccaaauuagcugaguacaggaauuggaguaagccucagugugacauaacaggguucgcaccauuuagcaaagauaacuccauucggcugucugccggaggugacaucuggguaacccgcgagcccuaugugucgugcgauccuaauaaguguuaccaauucgcgcuaggccaggggacgacucucaacaauguccauucaaacaauaccgugcgagaccguacaccauauagaacucugcuuaugaacgaacugggaguucccuuucacuugggcaccaaacaggugugcauugcuuggagcaguuccucuugucaugaugguaaggccuggcuccacgucugcaucacaggggacgauaagaaugcaaccgccagcuucaucuacaacggaaggcugguggacuccguaguuucauggaguaaagagauucugcggacgcaggaaagcgagugugugugcauaaacggcacuuguacagucgugaugaccgauggcucugcuuccgggaaggcagacacuaaaauccucuuuauugaggaaggaaagaucgugcauacaucaaccuuaagcgguagugcccaacacgucgaggaaugcucuugcuauccucgcuacccaggcguuagaugugugugcagggauaauuggaagggguccaaccggccgauaguagacauuaauaugaaagaucacagcaucgugucgucuuacgucuguuccggacuggugggcgacacgccccgcaagaacgacucaaguagcuccucucauugcuucgauccuaaugacgaggaaggugggcacggaguuaaaggcugggcuuuugaugacggcaacgauguguggauggggcgaaccaucagcgagaagucaagacuuggauaugagacauucaaagucguggaagguuggaguaauccaaaguccaaauugcagauuaacaggcagguaaucguugaccggggcgaucguagcggguacucuggaauauuuucaguggagggcaagaguuguauuaaucgcugcuucuaugucgaacugaucagagguagcaaggaggaaacugaggugcuauggaccuccaacucuauugucguguucugugggacaucgggcacuuacggaaccggcagcuggcccgacggggccgauaucaaucucaugccuaucuga

SEQ ID NO: 149210 - RNA, 1410 nt, Artificial Sequence
  derived and/or modified CDS sequence (opt3) from neuraminidase__InfluenzaA__AEQ49833
augaaccccaaucagaagaucauuaccauaggcagcgugucccugacaaucucuacuauuugcuucuuuaugcaaaucgccauucucaucacgaccgucacacuucacuucaaacaguacgaguuuaacucaccuccaaauaaccagguuaugcugugugaaccgacuauaaucgagagaaauauuaccgaaaucguguauuugacaaacaccacuauugagaaggaaaucugccccaaauuagcugaguacaggaauuggaguaagccucagugugacauaacaggguucgcaccauuuagcaaagauaacuccauucggcugucugccggaggugacaucuggguaacccgcgagcccuaugugucgugcgauccugacaaguguuaccaauucgcgcuaggccaggggacgacucucaauaacguccauucaaauaacaccgugcgagaucguacaccauauagaacucugcuuaugaaugaacugggaguucccuuucacuugggcaccaaacaggugugcauugcuuggagcaguuccucuugucaugacgguaaggccuggcuccacgucugcaucacaggggaugacaagaacgcaaccgccagcuucaucuacaauggaaaacugguggauuccguaguuucauggaguaaggagauucugaggacgcaggaaagcgagugugugugcauaaacggcacuuguacagucgugaugaccgacggcucugcuuccgggaaagcagauacuaagauccucuuuauugaggaaggaaagaucgugcauacaucaaccuuaagcgguagugcccaacacgucgaggaaugcucuugcuauccucgguacccaggcguucgcugugugugcagagacaacuggaaaggguccaauaggccgauaguagauauuaacaucaaggaccacagcaucgugucgucuuacgucuguuccggacuggugggcgacacgccccggaaaaaugauucaaguagcuccucucauugccuugacccuaacaaugaggaaggugggcacggaguuaagggcugggcuuucgaugacggcaacgauguguggauggggcgcaccauuaaugagacaagccgauugggauaugagacuuuuaaagucaucgaagguuggucaaacccaaagaguaaacugcagauuuccagacaggugauaguagacaggggcaaucggagcggguacucuggaaucuucucaguugagggcaagaguuguauuaaccguugcuuuuauguggaacuaauccgcgguagaaaggaggaaaccgagguccucuggacaagcaauuccaucguggucuucugugggacuucuggcaccuacggaacaggcucguggcccgauggggccgaccugaaccuuaugccuauuuga

SEQ ID NO: 149211 - RNA, 1410 nt, Artificial Sequence
  derived and/or modified CDS sequence (opt3) from neuraminidase__InfluenzaA__AEQ49835
augaaccccaaucagaagaucauuaccauaggcagcgugucccugacaaucucuacuauuugcuucuuuaugcagaucgccauucucaucacgaccgucacacuucacuucaaacaguacgaguuuaacucaccuccaaauaaccagguuaugcugugugaaccgacuauaaucgagagaaauauuaccgaaaucguguauuugacaaacaccacuauugagaaggaaaucugccccaaauuagcugaguacaggaauuggaguaagccucagugugacauaacaggguucgcaccauuuagcaaagauaacuccauucggcugucugccggaggugacaucuggguaacccgcgagcccuaugugucgugcgauccuaauaaguguuaccaauucgcgcuaggccaggggacgacucucaacaauguccauucaaacaauaccgugcgagaccguacaccauauagaacucugcuuaugaacgaacugggaguucccuuucacuugggcaccaaacaggugugcauggcuuggagcaguuccucuugucaugaugguaaggccuggcuccacgucugcauuacaggggacgauaagaaugcaaccgccagcuucaucuacaacggaaggcugguggacuccguaguuucauggaguaaagagauccugcggacgcaggaaagcgagugugugugcauuaacggcacuuguacagucgugaugaccgauggcucugcuuccgggaaggcagacacuaaaauacucuuuaucgaggaaggaaagauugugcauacaucaaccuuaagcgguagugcccaacacgucgaggaaugcucuugcuauccucgcuacccaggcguuagaugugugugcagggauaauuggaagggguccaaccggccgaucguagacauaaauaugaaagaucacagcauugugucgucuuacgucuguuccggacuggugggcgacacgccccgcaagaacgacucaaguagcuccucucauugcuucgauccuaaugacgaggaaggugggcacggaguuaaaggcugggcuuuugaugacggcaacgauguguggauggggcgaaccaucagcgagaagucaagacuuggauaugagacauucaaagucaucgaagguuggaguaauccaaaguccaaauugcagauuaacaggcaagugaucguagaccggggcaaucguagcggguacucuggaauauuuucaguugagggcaagaguuguauuaaccgcugcuucuauguggaacugaucagagguaggaaggaggaaacugagguccuauggaccagcaauuccauuguggucuucugugggacaucuggcacuuacggaaccggcucguggcccgauggggccgacaucaaccucaugccuaucuga

SEQ ID NO: 149212 - RNA, 1410 nt, Artificial Sequence; identical to SEQ ID NO: 149211
  derived and/or modified CDS sequence (opt3) from neuraminidase__InfluenzaA__AEQ49836

SEQ ID NO: 149213 - RNA, 1410 nt, Artificial Sequence; identical to SEQ ID NO: 149211
  derived and/or modified CDS sequence (opt3) from neuraminidase__InfluenzaA__AEQ49838

SEQ ID NO: 149214 - RNA, 1410 nt, Artificial Sequence; identical to SEQ ID NO: 149211
  derived and/or modified CDS sequence (opt3) from neuraminidase__InfluenzaA__AEQ49839

SEQ ID NO: 149215 - RNA, 1410 nt, Artificial Sequence
  derived and/or modified CDS sequence (opt3) from neuraminidase__InfluenzaA__AEQ49840
augaaccccaaucagaagaucauuaccauaggcagcgugucccugacaaucucuacuauuugcuucuuuaugcagaucgccauucucaucacgaccgucacacuucacuucaaacaguacgaguuuaacucaccuccaaauaaccagguuaugcugugugaaccgacuauaaucgagagaaauauuaccgaaaucguguauuugacaaacaccacuauugagaaggaaaucugccccaaauuagcugaguacaggaauuggaguaagccucagugugacauaacaggguucgcaccauuuagcaaagauaacuccauucggcugucugccggaggugacaucuggguaacccgcgagcccuaugugucgugcgauccuaauaaguguuaccaauucgcgcuaggccaggggacgacucucaacaauguccauucaaacaauaccgugcgagaccguacaccauauagaacucugcuuaugaacgaacugggaguucccuuucacuugggcaccaaacaggugugcauggcuuggagcaguuccucuugucaugaugguaaggccuggcuccacgucugcauuacaggggacgauaagaaugcaaccgccagcuucaucuacaacggaaggcugguggacuccguaguuucauggaguaaagagauccugcggacgcaggaaagcgagugugugugcauuaacggcacuuguacagucgugaugaccgauggcucugcuuccgggaaggcagacacuaaaauacucuuuaucgaggaaggaaagauugugcauacaucaaccuuaagcgguagugcccaacacgucgaggaaugcucuugcuauccucgcuacccaggcguuagaugugugugcagggauaauuggaagggguccaaccggccgaucguagacauaaauaugaaagaucacagcauugugucgucuuacgucuguuccggacuggugggcgacacgccccgcaagaacgacucaaguagcuccucucauugcuucgauccuaaugacgaggaaggugggcacggaguuaaaggcugggcuuuugaugacggcaacgauguguggauggggcgaaccaucagcgagaagucaagacuuggauaugagacauucaaagucaucgaagguuggaguaaucauaaguccaaauugcagauuaacaggcaagugaucguagaccggggcaaucguagcggguacucuggaauauuuucaguugagggcaagaguuguauuaaccgcugcuucuauguggaacugaucagagguaggaaggaggaaacugagguccuauggaccagcaauuccauuguggucuucugugggacaucuggcacuuacggaaccggcucguggccagauggggccgacaucaaccucaugcccaucuga

SEQ ID NO: 149216 - RNA, 1410 nt, Artificial Sequence; identical to SEQ ID NO: 149211
  derived and/or modified CDS sequence (opt3) from neuraminidase__InfluenzaA__AEQ49841

SEQ ID NO: 149217 - RNA, 1410 nt, Artificial Sequence; identical to SEQ ID NO: 149211
  derived and/or modified CDS sequence (opt3) from neuraminidase__InfluenzaA__AEQ49842

SEQ ID NO: 149218 - RNA, 1410 nt, Artificial Sequence; identical to SEQ ID NO: 149211
  derived and/or modified CDS sequence (opt3) from neuraminidase__InfluenzaA__AEQ49843

SEQ ID NO: 149219 - RNA, 1410 nt, Artificial Sequence; identical to SEQ ID NO: 149169
  derived and/or modified CDS sequence (opt3) from neuraminidase__InfluenzaA__AEQ49844

SEQ ID NO: 149220 - RNA, 1410 nt, Artificial Sequence
  derived and/or modified CDS sequence (opt3) from neuraminidase__InfluenzaA__AEQ49845
augaaccccaaucagaagaucauuaccauaggcagcgugucccugacaaucucuacuauuugcuucuuuaugcaaaucgccauucucaucacgaccgucacacuucacuucaaacaguacgaguuuaacucaccuccaaauaaccagguuaugcugugugaaccgacuauaaucgagagaaauauuaccgaaaucguguauuugacaaacaccacuauugagagggaaaucugccccaaguuagcugaguaccggaauuggaguaaaccucagugugacauaacaggguucgcaccauuuagcaaggauaacuccauucgccugucugccggaggugacaucuggguaacccgagagcccuaugugucgugcgauccuaauaaauguuaccaauucgcgcuaggccaggggacgacucucaacaauguccauucaaacaauaccgugcgugacagaacaccauauaggacucugcuuaugaacgaacugggaguucccuuucacuugggcaccaaacaggugugcauggcuuggagcaguuccucuugucaugaugguaaggccuggcuccacgucugcauuacaggggacgauaagaaugcaaccgccagcuucaucuacaacggacggcugguggacuccguaguuucauggaguaaggagauccugcgcacgcaggaaagcgagugugugugcauuaacggcacuuguacagucgugaugaccgauggcucugcuuccgggaaagcagacacuaagauacucuuuaucgaggaaggaaaaauugugcauacaucaaccuuaagcgguagugcccaacacgucgaggaaugcucuugcuauccuagauacccaggcguuaggugugugugccgggauaauuggaagggguccaaccgcccgaucguagacauaaauaugaaggaucacagcauugugucgucuuacgucuguuccggacuggugggcgacacgccccggaaaaacgacucaaguagcuccucucauugcuucgauccuaaugacgaggaaggugggcacggaguuaagggcugggcuuuugaugacggcaacgauguguggauggggagaaccaucagcgagaaaucaaggcuuggauaugagacauucaaggucaucgaagguuggaguaauccaaaauccaaguugcagauuaaccgacaggugaucguagaccguggcaaucgcagcggguacucuggaauauuuucaguugagggcaaaaguuguauuaacagaugcuucuauguggaacugaucaggggucggaaggaggaaacugagguccuauggaccagcaauuccauuguggucuucugugggacaucuggcacuuacggaaccggcucguggcccgauggggccgacaucaaccucaugccuaucuga

SEQ ID NO: 149221 - RNA, 1410 nt, Artificial Sequence
  derived and/or modified CDS sequence (opt3) from neuraminidase__InfluenzaA__AEQ49846
augaaccccaaucagaagaucauuaccauaggcagcgugucccugacaaucucuacuauuugcuucuuuaugcagaucgccauucucaucacgaccgucacacuucacuucaaacaguacgaguuuaacucaccuccaaauaaccagguuaugcugugugaaccgacuauaaucgagagaaauauuaccgaaaucguguauuugacaaacaccacuauugagaaggaaaucugccccaaauuagcugaguacaggaauuggaguaagccucagugugacauaacaggguucgcaccauuuagcaaagauaacuccauucggcugucugccggaggugacaucuggguaacccgcgagcccuaugugucgugcgauccuaauaaguguuaccaauucgcgcuaggccaggggacgacucucaacaauguccauucaaacaauaccgugcgagaccguacaccauauagaacucugcuuaugaacgaacugggaguucccuuucacuugggcaccaaacaggugugcauggcuuggagcaguuccucuugucaugaugguaaggccuggcuccacgucugcauuacaggggacgauaagaaugcaaccgccagcuucaucuacaacggaaggcugguggacuccguaguuucauggaguaaagagauccugcggacgcaggaaagcgagugugugugcauuaacggcacuuguacagucgugaugaccgauggcucugcuuccgggaaggcagacacuaaaauacucuuuaucgaggaaggaaagauugugcauacaucaaccuuaagcgguagugcccaacacgucgaggaaugcucuugcuauccucgcuacccaggcguuagaugugugugcagggauaauuggaagggguccaaccggccgaucguagacauaaaucugaaagaucacagcauugugucgucuuacgucuguuccggacuugugggcgacacgccccgcaagaacgacucaaguagcuccucucauugcuucgauccuaaugacgaggaaggugggcacggaguuaaaggcugggcuuuugaugacggcaacgauguguggauggggcgaaccaucagcgagaagucaagauugggauaugagacauucaaagucaucgaagguuggaguaauccaaaguccaaacugcagauuaacaggcaagugaucguagaccggggcaaucguagcggguacucuggaauauuuucaguugagggcaagaguuguauuaaccgcugcuucuauguggaacuaaucagagguaggaaggaggaaacugagguccucuggaccagcaauuccauuguggucuucugugggacaucuggcacuuacggaaccggcucguggcccgauggggccgacaucaaccugaugccuaucuga

SEQ ID NO: 149222 - RNA, 1410 nt, Artificial Sequence
  derived and/or modified CDS sequence (opt3) from neuraminidase__InfluenzaA__AEQ49850
augaaccccaaucagaagaucauuaccauaggcagcgugucccugacaaucucuacuauuugcuucuuuaugcagaucgccauucucaucacgaccgucacacuucacuucaaacaguacgaguuuaacucaccuccaaauaaccagguuaugcugugugaaccgacuauaaucgagagaaauauuaccgaaaucguguauuugacaaacaccacuauugagaaggaaaucugccccaaauuagcugaguacaggaauuggaguaagccucagugugacauaacaggguucgcaccauuuagcaaagauaacuccauucggcugucugccggaggugacaucuggguaacccgcgagcccuaugugucgugcgauccuaauaaguguuaccaauucgcgcuaggccaggggacgacucucaacaauguccauucaaacaauaccgugcgagaccguacaccauauagaacucugcuuaugaacgaacugggaguucccuuucacuugggcaccaaacaggugugcauugcuuggagcaguuccucuugucaugaugguaaggccuggcuccacgucugcaucacaggggacgauaagaaugcaaccgccagcuucaucuacaacggaaggcugguggacuccguaguuucauggaguaaagagauucugcggacgcaggaaagcgagugugugugcauaaacggcacuuguacagucgugaugaccgauggcucugcuuccgggaaggcagacacuaaaauccucuuuauugaggaaggaaagaucgugcauacaucaaccuuaagcgguagugcccaacacgucgaggaaugcucuugcuauccucgcuacccaggcguuagaugugugugcagggauaauuggaagggguccaaccggccgauaguagacauuaauaugaaagaucacagcaucgugucgucuuacgucuguuccggacuggugggcgacacgccccgcaagaacgacucaaguagcuccucucauugcuucgauccuaaugacgaggaaggugggcacggaguuaaaggcugggcuuuugaugacggcaacgauguguggauggggcgaaccaucagcgagaagucaagacuuggauaugagacauucaaagucauugaagguuggaguaauccaaaguccaaauugcagaucaacaggcaagugauuguagaccggggcgaucguagcggguacucuggaauauuuucaguugagggcaagaguuguaucaaucgcugcuucuauguggaacugauuagagguagcaaggaggaaacugagguccuauggaccuccaacucuaucguggucuucugugggacaucgggcacuuacggaaccggcagcuggcccgacggggccgauaucaaaauuaugccuauauga

SEQ ID NO: 149223 - RNA, 1410 nt, Artificial Sequence
  derived and/or modified CDS sequence (opt3) from neuraminidase__InfluenzaA__AEQ49851
augaaccccaaucagaagaucauuaccauaggcagcgugucccugacaaucucuacuauuugcuucuuuaugcaaaucgccauucucaucacgaccgucacacuucacuucaaacaguacgaguuuaacucaccuccaaauaaccagguuaugcugugugaaccgacuauaauggagagaaauaucaccgaaauuguguauuugacaaacaccacuaucgagaaggaaauuugccccaaauuagcugaguacaggaauuggaguaagccucagugugacaucacaggguucgcaccauuuagcaaagauaacuccauacggcugucugccggaggugacauuuggguaacccgcgagcccuaugugucgugcgauccugacaaguguuaccaauucgcgcuaggccaggggacgacucucaauaacguccauucaaauaacaccgugcgagaucguacaccauauagaacucugcuuaugaaugaacugggaguucccuuucacuugggcaccaaacaggugugcaucgcuuggagcaguuccucuugucaugacgguaaggccuggcuccacgucugcauuacaggggaugacaagaacgcaaccgccagcuucaucuacaauggaaaacugguggauuccguaguuucauggaguaaggagauccugaggacgcaggaaagcgagugugugugcauuaacggcacuuguacagucgugaugaccgacggcucugcuuccgggaaagcagauacuaagauacucuuuaucgaggaaggaaagauugugcauacaucaaccuuaagcgguagugcccaacacgucgaggaaugcucuugcuauccucgguacccaggcguucgcugugugugcagagacaacuggaaaggguccaauaggccgaucguagauauaaacauuaaggaccacagcaucgugucgucuuacgucuguuccggacuggugggcgacacgccccggaaaaaugauucaaguagcuccucucauugccuugacccuaacaaugaggaaggugggcacggaguuaagggcugggcuuucgaugacggcaacgauguguggauggggcgcaccaucaaugagacaagccgauugggauaugagacuuuuaaagucauugaagguuggucaaacccaaagaguaaacugcagaucaauagacaggugauuguagacaggggcaaccgguccggguacagcggaauauucucuguugagggcaagucauguaucaaucguugcuuuuauguggaacuaauucgcgguagaaaggaggaaaccgagguccucuggacaaguaacagcaucguggucuucugugggacuuccggcaccuacggaacaggcucuuggcccgauggggccgaccugaaucuuaugccuaucuga

SEQ ID NO: 149224 - RNA, 1410 nt, Artificial Sequence; identical to SEQ ID NO: 149191
  derived and/or modified CDS sequence (opt3) from neuraminidase__InfluenzaA__AEQ49852

SEQ ID NO: 149225 - RNA, 1410 nt, Artificial Sequence; identical to SEQ ID NO: 149169
  derived and/or modified CDS sequence (opt3) from neuraminidase__InfluenzaA__AEQ49969

SEQ ID NO: 149226 - RNA, 1410 nt, Artificial Sequence; identical to SEQ ID NO: 149191
  derived and/or modified CDS sequence (opt3) from neuraminidase__InfluenzaA__AEQ49970

SEQ ID NO: 149227 - RNA, 1410 nt, Artificial Sequence
  derived and/or modified CDS sequence (opt3) from neuraminidase__InfluenzaA__AEQ54954
augaaccccaaucagaagaucauuaccauaggcagcgugucccugacaaucucuacuauuugcuucuuuaugcaaaucgccauucucaucacgaccgucacacuucacuucaaacaguacgaguuuaacucaccuccaaauaaccagguuaugcugugugaaccgacuauaaucgagagaaauauuaccgaaaucguguauuugacaaacaccacuauugagaaggaaaucugccccaaauuagcugaguacaggaauuggaguaagccucagugugacauaacaggguucgcaccauuuagcaaagauaacuccauucggcugucugccggaggugacaucuggguaacccgcgagcccuaugugucgugcgauccugacaaguguuaccaauucgcgcuaggccaggggacgacucucaauaacguccauucaaauaacaccgugcgagaucguacaccauauagaacucugcuuaugaaugaacugggaguucccuuucacuugggcaccaaacaggugugcauugcuuggagcaguuccucuugucaugacgguaaggccuggcuccacgucugcaucacaggggaugacaagaacgcaaccgccagcuucaucuacaauggaaaacugguggauuccguaguuucauggaguaaggagauucugaggacgcaggaaagcgagugugugugcauaaacggcacuuguacagucgugaugaccgacggcucugcuuccgggaaagcagauacuaagauccucuuuauugaggaaggaaagaucgugcauacaucaaccuuaagcgguagugcccaacacgucgaggaaugcucuugcuauccucgguacccaggcguucgcugugugugcagagacaacuggaaaggguccaauaggccgauaguagauauuaacaucaaggaccacagcaucgugucgucuuacgucuguuccggacuggugggcgacacgccccggaaaaaugauucaaguagcuccucucauugccuugacccuaacaaugaggaaggugggcacggaguuaagggcugggcuuucgaugacggcaacgauguguggauggggcgcaccauuagcgagacaucacgauugggauaugagacuuuuaaagucaucgaagguuggaguaauccaaaguccaaacugcagauuaacagacaggugauaguagacaggggcaaucggagcggguacucuggaaucuucucaguugagggcaagaguuguauuaaccguugcuuuuauguggaacuaauccgcgguagaaaggaggaaaccgagguccucuggacaagcaauuccaucguggucuucugugggacuucuggcaccuacggaacaggcucguggcccgauggggccgaccugaaccuuaugccuauuuga

SEQ ID NO: 149228 - RNA, 1410 nt, Artificial Sequence; identical to SEQ ID NO: 144647
  derived and/or modified CDS sequence (opt3) from neuraminidase__InfluenzaA__AER08645

SEQ ID NO: 149229 - RNA, 1410 nt, Artificial Sequence
  derived and/or modified CDS sequence (opt3) from neuraminidase__InfluenzaA__AER08649
augaaccccaaucagaagaucauuaccauaggcagcgugucccugacaaucucuacuauuugcuucuuuaugcagaucgccauucucaucacgaccgucacacuucacuucaaacaguacgaguuuaacucaccuccaaauaaccagguuaugcugugugaaccgacuauaaucgagagaaauauuaccgaaaucguguauuugacaaacaccacuauugagaaggaaaucugccccaaauuagcugaguacaggaauuggaguaagccucagugugacauaacaggguucgcaccauuuagcaaagauaacuccauucggcugucugccggaggugacaucuggguaacccgcgagcccuaugugucgugcgauccugacaaguguuaccaauucgcgcuaggccaggggacgacucucaauaacguccauucaaauaacaccgugcgagaucguacaccauauagaacucugcuuaugaaugaacugggaguucccuuucacuugggcaccaaacaggugugcauugcuuggagcaguuccucuugucaugacgguaaggccuggcuccacgucugcaucacaggggaugacaagaacgcaaccgccagcuucaucuacaauggaaggcugguggauuccguaguuucauggaguaaagagauucugcggacgcaggaaagcgagugugugugcauaaacggcacuuguacagucgugaugaccgacggcucugcuuccgggaaggcagauacuaaaauccucuuuauugaggaaggaaaguuagugcauacaucaacccugagcgguagugcccaacacgucgaggaaugcucuugcuauccucgcuacccaggcguuagaugugugugcagggacaacuggaagggguccaaucggccgaucguagauauaaacauuaaagaccacagcaucgugucgucuuacgucuguuccggacuugugggcgacacgccccgcaagaaugauucaaguagcuccucucauugcuuggacccuaacaaugaggaaggugggcacggaguuaaaggcugggcuuucgaugacggcaacgauguguggauggggcgaaccaucagcgagaagucaagacugggauaugagacauuuaaagucauugaagguuggaguaauccaaaguccaaacuacagaucaacaggcaagugauuguagaccggggcaaucguagcggguacucuggaauauucucaguugagggcaagaguuguaucaaccgcugcuuuuauguggaacucauuagagguaggaaggaggaaacugagguccuguggaccagcaauuccaucguggucuucugugggacaucuggcacuuacggaaccggcucguggcccgauggggccgacaucaaccuuaugccuauuuga

SEQ ID NO: 149230 - RNA, 1410 nt, Artificial Sequence
  derived and/or modified CDS sequence (opt3) from neuraminidase__InfluenzaA__AER08657
augaaccccaaucagaagaucauuaccauaggcagcgugucccugacaaucucuacugucugcuucuuuaugcaaauugccauccucauuacgaccguuacacuucacuucaaacaguacgaguuuaacucaccuccaaauaaccaggugaugcugugugaaccgacuaucauagagagaaauaucaccgaaauuguauauuugacaaacaccacuaucgagaaggaaaugugccccaaauuagcugaguacaggaauuggaguaagccucagugugacauuacaggguucgcaccauuuagcaaagauaacuccauccggcugucugccggaggugacauaugggugacccgcgagcccuaugucucgugcgauccugacaaguguuaccaauucgcgcuaggccaggggacgacucucaauaacgugcauucaaauaacaccguucgagaucguacaccauauagaacucugcuuaugaaugaacugggagugcccuuucacuugggcaccaagcaggucugcauugcuuggagcaguuccucuugucaugacgguaaagccuggcuccacgugugcaucacaggggaugacaagaacgcaaccgccagcuucauuuacaauggaaggcugguagauuccguugugucauggaguaaagagauccugcggacgcaggaaagcgagugugucugcaucaacggcacuuguacaguggugaugaccgacggcucugcuuccgggaaggcagauacuaaaauucucuuuauagaggaaggaaagaucguccauacaucaaccuuaagcgguagugcccaacacguugaggaaugcucuugcuauccucgcuacccaggcgugagauguguaugcagggacaacuggaagggguccaaucggccgauuguggauaucaacauaaaagaccacagcauugucucgucuuacguguguuccggacugguuggcgacacgccccgcaagaaugauucaaguagcuccucucauugccuugacccuaacaaugaggaaggugggcacggagugaaaggcugggcuuucgaugacggcaacgaugucuggauggggcgaaccaucagcgagaagucaagauugggauaugagacauuuaaagugaucgaagguuggaguaauccaaaguccaaacugcagauuaacaggcagguaaucguugaccggggcaaucguagcggguacucuggaauuuucucaguggagggcaagaguuguauaaaccgcugcuuuuaugucgaacuaaucagagguaggaaggaggaaacugaggugcucuggaccagcaauuccauugucguguucugugggacaucuggcacuuacggaaccggcucguggcccgauggggccgacaucaaccugaugccuaucuga

SEQ ID NO: 149231 - RNA, 1410 nt, Artificial Sequence; identical to SEQ ID NO: 144647
  derived and/or modified CDS sequence (opt3) from neuraminidase__InfluenzaA__AER08659

SEQ ID NO: 149232 - RNA, 1410 nt, Artificial Sequence
  derived and/or modified CDS sequence (opt3) from neuraminidase__InfluenzaA__AER08661
augaaccccaaucagaagaucauuaccauaggcagcgugucccugacaaucucuacuauuugcuucuuuaugcagaucgccauucucaucacgaccgucacacuucacuucaaacaguacgaguuuaacucaccuccaaauaaccagguuaugcugugugaaccgacuauaaucgagagaaauauuaccgaaaucguguauuugacaaacaccacuauugagaaggaaaucugccccaaauuagcugaguacaggaauuggaguaagccucagugugacauaacaggguucgcaccauuuagcaaagauaacuccauucggcugucugccggaggugacaucuggguaacccgcgagcccuaugugucgugcgauccugacaaguguuaccaauucgcgcuaggccaggggacgacucucaauaacguccauucaaauaacaccgugcgagaucguacaccauauagaacucugcuuaugaaugaacugggaguucccuuucacuugggcaccaaacaggugugcauugcuuggagcaguuccucuugucaugacgguaaggccuggcuccacgucugcaucacaggggaugacaagaacgcaaccgccagcuucaucuacaauggaaggcugguggauuccguaguuucauggaguaaagagauucugcggacgcaggaaagcgagugugugugcauaaacggcacuuguacagucgugaugaccgacggcucugcuuccgggaaggcagauacuaaaauccucuuuauugaggaaggaaagaucgugcauacaucaaccuuaagcgguagugcccaacacgucgaggaaugcucuugcuauccucgcuacccaggcguuagaugugugugcagggacaacuggaagggguccaaucggccgauaguagauauuaacaucaaagaccacagcaucgugucgucuuacgucuguuccggacuggugggcgacacgccccgcaagaaugauucaaguagcuccucucauugccuugacccuaacaaugaggaaggugaucacgggguuaaaggaugggcuuucgacgauggcaacgacguguggaugggccgaaccauuaaugagacaagcagauugggguaugagacuuuuaaggucaucgaaggauggucaaacccaaaaaguaagcugcagauuaauaggcaagugauaguagaucgggguaaccguuccggcuacagcgggaucuucucuguugagggaaaaucauguauuaaucgcugcuuuuauguggaacuaaucagaggcaggaaggaggaaaccgagguccucuggacaaguaacagcaucguggucuucugugguacuuccgggaccuacggcacaggaucuuggcccgacggcgccgaucugaaucuuaugccuauuuga

SEQ ID NO: 149233 - RNA, 1410 nt, Artificial Sequence; identical to SEQ ID NO: 147566
  derived and/or modified CDS sequence (opt3) from neuraminidase__InfluenzaA__AER08663

SEQ ID NO: 149234 - RNA, 1410 nt, Artificial Sequence; identical to SEQ ID NO: 147566
  derived and/or modified CDS sequence (opt3) from neuraminidase__InfluenzaA__AER08665

SEQ ID NO: 149235 - RNA, 1410 nt, Artificial Sequence
  derived and/or modified CDS sequence (opt3) from neuraminidase__InfluenzaA__AER08669
augaaccccaaucagaagaucauuaccauaggcagcgugucccugacaaucucuacuauuugcuucuuuaugcaaaucgccauucucaucacgaccgucacacuucacuucaaacaguacgaguuuaacucaccuccaaauaaccagguuaugcugugugaaccgacuauaaucgagagaaauauuaccgaaaucguguauuugacaaacaccacuauugagaaggaaaucugccccacauuagcugaguacaggaauuggaguaaaccucagugugacauaaccggguucgcaccauuuagcaaggauaacuccauucggcugucugccggaggugacaucuggguaacgcgcgagcccuaugugucgugcgauccugacaaauguuaccaauucgcgcuaggccaggggacuacccucaauaacguccauucaaauaacacagugcgagaucguacuccauauagaacccugcuuaugaaugaacugggaguucccuuucacuugggcacaaaacaggugugcauugcuuggagcaguuccucuugucaugacgguaaggccuggcuccacgucugcaucaccggggaugacaagaacgcaacggccagcuucaucuacaauggaaggcugguggauuccguaguuucauggaguaaggagauucugcggacucaggaaagcgagugugugugcauaaacggcacauguaccgucgugaugacugacggcucugcuuccgggaaagcagauacaaagauccucuuuauugaggaaggaaaaaucgugcauaccucaacguuaagcgguagugcccaacacgucgaggaaugcucuugcuauccucgcuacccaggcguuagaugugugugcagggacaacuggaagggguccaaucggccgauaguagauauuaacaucaaggaccacagcaucgugucgucuuacgucuguuccggacuggugggcgacacccccaggaaaaaugauucaaguagcuccucucauugccuugacccuaacaaugaggaaggugggcacggaguuaagggcugggcuuucgaugacggcaacgauguguggauggggcgaacaauuagcgagacuucaagauugggauaugagaccuuuaaagucaucgaagguuggaguaauccaaaguccaaacugcagauuaaccgccaggugauaguagaccggggcaaucguagcggguacucuggaaucuucucaguugagggcaagaguuguauuaaccgcugcuuuuauguggaacuaaucagagguaggaaagaggaaacagagguccucuggacuagcaauuccaucguggucuucugugggaccucuggcacauacggaaccggcucguggcccgauggggccgaccugaaccuuaugccuauuuga

SEQ ID NO: 149236 - RNA, 1410 nt, Artificial Sequence
  derived and/or modified CDS sequence (opt3) from neuraminidase__InfluenzaA__AER08671
augaaccccaaucagaagaucauuaccauaggcagcgugucccugacaaucucuacuauuugcuucuuuaugcaaaucgccauucucaucacgaccgucacacuucacuucaaacaguacggguuuaacucaccuccaaauaaccagguuaugcugugugagccgacuauaaucgaaagaaauauuaccgagaucguguauuugacaaacaccacuauugaaaaggagaucugccccacauuagcugaauacaggaauuggaguaaaccucagugugacauaaccggauucgcaccauuuagcaaggauaacuccauucggcugucugccgguggcgacaucuggguaacgcgcgagcccuaugugucgugcgauccugacaaauguuaccaauucgcgcuagggcagggaacuacccucaauaacguccauucaaauaacacagugcgagaucguacuccauauagaacccugcuuaugaaugagcugggcguucccuuucacuuggguacaaaacaggugugcauugcuuggagcaguuccucuugucaugacgggaaggccuggcuccacgucugcaucaccggagaugacaagaacgcaacggccagcuucaucuacaauggcaggcugguggauuccguaguuucauggaguaaggaaauucugcggacucaggagagcgaaugugugugcauaaacggcacauguaccgucgugaugacugacgggucugcuuccggaaaagcagauacaaagauccucuuuauugaggaggguaaaaucgugcauaccucaacguuaagcggcagugcccaacacgucgaagagugcucuugcuauccucgcuacccagggguuagaugugugugcagggacaacuggaagggauccaaucggccgauaguagauauuaacaucaaggaccacagcaucgugucgucuuacgucuguuccggccuggugggugacacccccaggaaaaaugauucaaguagcuccucucauugccuugacccuaacaaugaagaagggggacacggcguuaagggcugggcuuucgaugacgggaacgauguguggaugggacgaacaauuaaugagacuagcagauuggguuaugagaccuuuaaagucaucgagggcuggucaaacccaaagaguaaacugcagauuaaucgccaggugauaguagaccgggggaaccguuccggauacagcggcaucuucucuguugaagguaagucauguauuaaucgcugcuuuuauguggagcuaaucagagggaggaaagaagagacagaaguccucuggaccaguaacagcaucguggucuucuguggcacuuccggaacauacggcaccgggucuuggcccgauggagccgaccugaaucuuaugccuauuuga

SEQ ID NO: 149237 - RNA, 1410 nt, Artificial Sequence; identical to SEQ ID NO: 147566
  derived and/or modified CDS sequence (opt3) from neuraminidase__InfluenzaA__AER08673

SEQ ID NO: 149238 - RNA, 1410 nt, Artificial Sequence; identical to SEQ ID NO: 147566
  derived and/or modified CDS sequence (opt3) from neuraminidase__InfluenzaA__AER08675

SEQ ID NO: 149239 - RNA, 1410 nt, Artificial Sequence; identical to SEQ ID NO: 147566
  derived and/or modified CDS sequence (opt3) from neuraminidase__InfluenzaA__AER08677

SEQ ID NO: 149240 - RNA, 1410 nt, Artificial Sequence; identical to SEQ ID NO: 147566
  derived and/or modified CDS sequence (opt3) from neuraminidase__InfluenzaA__AER08679

SEQ ID NO: 149241 - RNA, 1410 nt, Artificial Sequence
  derived and/or modified CDS sequence (opt3) from neuraminidase__InfluenzaA__AER08681
augaaccccaaucagaagaucauuaccauaggcagcgugucccugacaaucucuacuauuugcuucuuuaugcagaucgccauucucaucacgaccgucacacuucacuucaaacaguacgaguuuaacucaccuccaaauaaccagguuaugcugugugaaccgacuauaaucgagagaaauauuaccgaaaucguguauuugacaaacaccacuauugagaaggaaaucugccccaaauuagcugaguacaggaauuggaguaagccucagugugacauaacaggguucgcaccauuuagcaaagauaacuccauucggcugucugccggaggugacaucuggguaacccgcgagcccuaugugucgugcgauccugacaaguguuaccaauucgcgcuaggccaggggacgacucucaauaacguccauucaaauaacaccgugcgagaucguacaccauauagaacucugcuuaugaaugaacugggaguucccuuucacuugggcaccaaacaggugugcauugcuuggagcaguuccucuugucaugacgguaaggccuggcuccacgucugcaucacaggggaugacaagaacgcaaccgccagcuucaucuacaauggaaggcugguggauuccguaguuucauggaguaaagagauucugcggacgcaggaaagcgagugugugugcauaaacggcacuuguacagucgugaugaccgacggcucugcuuccgggaaggcagauacuaaaauccucuuuauugaggaaggaaagaucgugcauacaucaaccuuaagcgguagugcccaacacgucgaggaaugcucuugcuauccucgcuacccaggcguuagaugugugugcagggacaacuggaagggguccaaucggccgauaguagauauuaacaucaaagaccacagcaucgugucgucuuacgucuguuccggacuggugggcgacacgccccgcaagaaugauucaaguagcuccucucauugccuugacccuaacgaugaggaaggugggcacggaguuaaaggcugggcuuucgacgauggcaaugacguguggauggggcgaaccauuaacgagacaagcagauugggauaugagacuuuuaaggucaucgaagguuggucaaauccaaaaaguaagcugcagauuaacaggcaagugauaguagauaaaggcaaucgguccggguacagcggaaucuucucuguugagggcaagucauguauuaaccguugcuuuuauguggaacuaauccgcgguagaaaggaggaaaccgagguccucuggacaaguaauagcaucguggucuucugugggacuuccggcaccuacggaacaggcucuuggcccgacggggccgaucugaaccuuaugccuauuuga

SEQ ID NO: 149242 - RNA, 1410 nt, Artificial Sequence; identical to SEQ ID NO: 147566
  derived and/or modified CDS sequence (opt3) from neuraminidase__InfluenzaA__AER08683

SEQ ID NO: 149243 - RNA, 1410 nt, Artificial Sequence; identical to SEQ ID NO: 149191
  derived and/or modified CDS sequence (opt3) from neuraminidase__InfluenzaA__AER08685

SEQ ID NO: 149244 - RNA, 1410 nt, Artificial Sequence; identical to SEQ ID NO: 149191
  derived and/or modified CDS sequence (opt3) from neuraminidase__InfluenzaA__AER08687

SEQ ID NO: 149245 - RNA, 1410 nt, Artificial Sequence
  derived and/or modified CDS sequence (opt3) from neuraminidase__InfluenzaA__AER08689
augaaccccaaucagaagaucauuaccauaggcagcgugucccugacaaucucuacuauuugcuucuuuaugcaaaucgccauucucaucacgaccgucacacuucacuucaaacaguacgaguuuaacucaccuccaaauaaccagguuacucugugugaaccgaccauaaucgagagaaauauuacagaaaucguguauuugaccaacacuacaauugagaaggaaaucugccccaaauuagcugaguacaggaauuggaguaagccucagugugacauaaccggguucgcaccauuuagcaaagauaacuccauucggcugucugccggaggugacaucuggguaacgcgcgagcccuaugugucgugcgauccugacaaguguuaccaauucgcgcuaggccaggggacuacccucaauaacguccauucaaauaacacagugcgagaucguacuccauauagaacccugcuuaugaaugaacugggaguucccuuucacuugggcacaaaacaggugugcauugcuuggagcaguuccucuugucaugacgguaaggccuggcuccacgucugcaucaccggggaugacaagaacgcaacggccagcuucaucuacaauggaaggcugguggauuccguaguuucauggaguaaagagauucugcggacucaggaaagcgagugugugugcauaaacggcacauguaccgucgugaugacugacggcucugcuuccgggaaggcagauacaaaaauccucuuuauugaggaaggaaagaucgugcauaccucaacguuaagcgguagugcccaacacgucgaggaaugcucuugcuauccucgcuacccaggcguuagaugugugugcagggacaacuggaagggguccaaucggccgauaguagauauuaacaucaaagaccacagcaucgugucgucuuacgucuguuccggacuggugggcgacacccccaggaaggaugacucaaguagcuccucucauugccuugauccuaauaacgaggaaggugggcacggaguuaaaggcugggcuuucgacgauggcaaugacguguggauggggcgaacaauuaacgagacuagcagauugggauaugagaccuuuaaggucaucgaagguuggucaaauccaaaaaguaagcugcagauuaaccgccaggugauaguagaucggggcaaucguuccggguacagcggaaucuucucuguugagggcaaaucauguauuaaccgcugcuuuuauguggaacuaaucagagguaggaaggaggaaacagagguccucuggaccaguaauagcaucguggucuucugugggacuuccggcacauacggaaccggcucuuggcccgacggggccgaucugaaccuuaugccuauuuga

SEQ ID NO: 149246 - RNA, 1410 nt, Artificial Sequence; identical to SEQ ID NO: 149191
  derived and/or modified CDS sequence (opt3) from neuraminidase__InfluenzaA__AER08691

SEQ ID NO: 149247 - RNA, 1410 nt, Artificial Sequence
  derived and/or modified CDS sequence (opt3) from neuraminidase__InfluenzaA__AER08693
augaaccccaaucagaagaucauuaccauaggcagcgugucccugacaaucucuacuauuugcuucuuuaugcaaaucgccauucucaucacgaccgucacacuucacuucaaacaguacgaguuuaacucaccuccaaagaaucagguuaugcugugugaaccgacuauaaucgagagaaacauuaccgaaaucguguauuugacaaauaccacuauugagaaagaaaucugccccaaguuagcugaguacaggaacuggaguaaaccucagugugacauaacaggguucgcaccauuuagcaaggauaauuccauucggcugucugccggaggugacaucuggguaacccgcgagcccuaugugucgugcgauccugacaaguguuaccaauucgcgcuaggccaggggacgacucucaacaauguccauucaaacaauaccgugcgagaucguacaccauauagaacucugcuuaugaacgaacugggaguucccuuucacuugggcaccaaacaggugugcauugcuuggagcaguuccucuugucaugacgguaaggccuggcuccacgucugcaucacaggggaugacaaaaaugcaaccgccagcuucaucuacaacggaaagcugguggauuccguaguuucauggaguaaagagauucugaggacgcaggaaagcgagugugugugcauaaauggcacuuguacagucgugaugaccgacggcucugcuuccgggaaggcagauacuaagauccucuuuauugaggaaggaaaaaucgugcauacaucaaccuuaagcgguagugcccaacacgucgaggaaugcucuugcuauccucgguacccaggcguucgcugugugugcagagacaacuggaagggguccaacaggccgauaguagauauuaauaucaaagaccacagcaucgugucgucuuacgucuguuccggacuggugggcgacacgccccggaagaacgauucaaguagcuccucucauugccuugacccuaauaacgaggaaggugggcacggaguuaaaggcugggcuuucgaugacggcaaugauguguggauggggcgcaccauuaacgagacaagccgauugggauaugagacuuuuaaggucaucgaagguuggucaaauccaaaaaguaagcugcagauuaacagacaggugauaguagacaggggcaaucgguccggguacagcggaaucuucucuguugagggcaagucauguauuaaccguugcuuuuauguggaacuaauccgcgguagaaaagaggaaaccgagguccucuggacaaguaauagcaucguggucuucugugggacuuccggcaccuacggaacaggcucuuggcccgauggggccgaccugaaccuuaugccuauuuga

SEQ ID NO: 149248 - RNA, 1410 nt, Artificial Sequence
  derived and/or modified CDS sequence (opt3) from neuraminidase__InfluenzaA__AER08697
augaaccccaaucagaagaucauuaccauaggcagcgugucccugacaaucucuacuauuugcuucuuuaugcaaaucgccauucucaucacgaccgucacacuucacuucaaacaguacgaguuuaacucaccuccaaauaaccagguuaugcugugugaaccgacuauaaucgagagaaauauuaccgaaaucguguauuugacaaacaccacuauugagaaggaaacaugccccaccuuagcugaguacaggaauuggaguaaaccucagugugacaucacgggguucgcaccauuuagcaaggauaacuccauacggcugucugccggaggugacauuuggguaacucgcgagcccuaugugucgugcgauccugacaaauguuaccaauucgcgcuaggccaggggaccacacucaauaacguccauucaaauaacacugugcgagaucguaccccauauagaacacugcuuaugaaugaacugggaguucccuuucacuugggcaccaaacaggugugcaucgcuuggagcaguuccucuugucaugacgguaaggccuggcuccacgucugcauuacgggggaugacaagaacgcaacugccagcuucaucuacaauggaaggcugguggauuccguaguuucauggaguaaggagauccugcggacacaggaaagcgagugugugugcauuaacggcaccuguacugucgugaugacagacggcucugcuuccgggaaagcagauaccaagauacucuuuaucgaggaaggaaaaauugugcauacgucaaccuuaagcgguagugcccaacacgucgaggaaugcucuugcuauccucgcuacccaggcguuagaugugugugcagggacaacuggaagggguccaaucggccgaucguagauauaaacauuaaggaccacagcaucgugucgucuuacgucuguuccggacuggugggcgacacaccccgcaaaaaugauucaaguagcuccucucauugccuugacccuaacaaugaggaaggugggcacggaguuaagggcugggcuuucgaugacggcaacgauguguggauggggcgaacuaucaaugucaccagcagauugggauaugagacauuuaaagugauugaggguuggucaaacccaaagaguaaacugcagaucaauaggcagguaauuguugaccggggcaaccguuccggguacagcggaauauucucuguggaaggcaagucauguaucaaucgcugcuuuuaugucgagcuaauuagagguaggaaagaagagacugaagugcucuggaccaguaacagcaucgucguguucugugggacauccggcaccuacggaacuggcucuuggcccgauggggccgaccugaaucuuaugccuaucuga

SEQ ID NO: 149249 - RNA, 1410 nt, Artificial Sequence; identical to SEQ ID NO: 149045
  derived and/or modified CDS sequence (opt3) from neuraminidase__InfluenzaA__AER92714

SEQ ID NO: 149250 - RNA, 1410 nt, Artificial Sequence; identical to SEQ ID NO: 144786
  derived and/or modified CDS sequence (opt3) from neuraminidase__InfluenzaA__AER92721

SEQ ID NO: 149251 - RNA, 1410 nt, Artificial Sequence; identical to SEQ ID NO: 144786
  derived and/or modified CDS sequence (opt3) from neuraminidase__InfluenzaA__AER92724

SEQ ID NO: 149252 - RNA, 1413 nt, Artificial Sequence
  derived and/or modified CDS sequence (opt3) from neuraminidase__InfluenzaA__AET84165
augaaccccaaucagaagaucauuaccauaggcagcaucuccauugccaucgggauuaucucucugaugcuccaaauaggaaacaucauuucaaucugggcuagucacagcauucagacagguucccagaauaacacuggcaucugcaaucagagaauaauuacguacgagaacucuaccugggugaaucauacauaugucaacaucaauaacacuaauguuguggcaggggaagacaaaaccucgguaacacuugccggaaacucaagccuguguaguauuuccggcugggcgaucuacaccaaggauaauucuaucaggauugguagcaaaggggacguguucgucauacgggagccuuuuaucuccugcucacacuuggaaugucgcacuuucuuuuuaacacaaggagcucugcuaaacgauaagcauaguaauggcaccgugaaagaccgaagcccauaucgugcccucaugucuugcccgcugggcgaggcacccuccccuuacaacucaaaguucgaaagcguugccuggagugcuucugcaugucacgaugggaugggauggcuuacgauugguaucuccggcccagacaacggggccguggcuguccugaaguauaauggaauaauuacuggcaccaucaaaagcuggaagaaacagaucuugagaacacaggagucggagugcguguguaugaacgguucuugcuuuacuauuaugaccgaugggcccuccaauaaggccgcgucauacaaaaucuucaagauugaaaagggaaaaguaacaaagaguauagagcucagcgcaccuaacuuuuauuacgaagaguguuccugcuacccagacaccggcaucguuaugugugugugcagggauaauuggcauggcucuaaccggcccugggucagcuucaaucagaaccuggacuaucaaauuggguacaucugcucaggaguguuuggugauaauccucgcccagaggacggcgaagggaguuguaacccggugacgaucgauggagccaauggcgucaaagguuucuccuauaaguacgggaacggcguuuggauuggaagaacuaaaagcaauaggcugcggaagggcuuugagaugauaugggaccccaacggguggacaaauaccgacucugauuucucagugaaacaggacguaguggcuaucacugauuggaguggauauagcgguuccuuuguccagcacccugaacucacaggcuuagacugcauucgcccauguuucuggguggagcugguucgagggcuucccagagaaaacaccacgaucuggaccucuggaucgagcauuuccuucugcggcgugaacucagauacagccaauuggaguuggccugacggugcagaguugccauuuacuaucgauaaguga

SEQ ID NO: 149253 - RNA, 1413 nt, Artificial Sequence; identical to SEQ ID NO: 146978
  derived and/or modified CDS sequence (opt3) from neuraminidase__InfluenzaA__AET84176

SEQ ID NO: 149254 - RNA, 1413 nt, Artificial Sequence
  derived and/or modified CDS sequence (opt3) from neuraminidase__InfluenzaA__AET84187
augaaccccaaucagaagaucauuaccauaggcagcaucuccauugccaucgggauuaucucucugaugcuccaaauaggaaacaucauuucaaucugggcuagucacagcauucagacagguucccagaauaacacuggcaucugcaaucagagaauaauuacguacgagaacucuaccugggugaaucauacauaugucaacaucaauaacacuaauguuguggcaggggaagacaaaaccucgguaacacuugccggaaacucaagccuguguaguauuuccggcugggcgaucuacaccaaggauaauucuaucaggauugguagcaaaggggacguguucgucauacgggagccuuuuaucuccugcucacacuuggaaugucgcacuuucuuuuuaacacaaggagcucugcuaaacgauaagcauaguaauggcaccgugaaagaccgaagcccauaucgugcccucaugucuugcccgcugggcgaggcacccuccccuuacaacucaaaguucgaaagcguugccuggagugcuucugcaugucacgaugggauggacuggcuuacgauuggaaucuccgguccagauaacggcgccguggcuguccugaaguauaaugggauaauuacuggaaccaucaaaagcuggaagaaacagaucuugagaacacaggagucggagugcguguguaugaacggcucuugcuuuacuauuaugaccgacggucccuccaauaaggccgcgucauacaaaaucuucaagauugaaaaggggaaaguaacaaagaguauagagcucaacgcaccuaauuuuuauuacgaagaguguagcugcuacccagauaccggaaucguuaugugugugugcagggacaacuggcauggcuccaaucggcccugggucucuuucaaccagaaucuggauuaucaaauuggcuacaucugcagcgggguguuuggagacaacccucgcccaaaagauggugagggcucauguaauccggugacgaucgacggggccaacggagucaagggcuucaguuauaaauacgguaaugggguuuggauuggcagaacuaaguccaacaggcugcggaaaggauuugaaaugauaugggaccccaauggcuggacaaacaccgauagcgacuucucugugaagcaggauguaguggcuaucacugacuggucaggguauaguggauccuuuguccagcacccugagcucacagguuuagauugcauucgcccauguuucuggguggaacugguucgaggccuucccagagagaacaccacgaucuggaccuccgggucuucgauuagcuucugcggagugaauagcgacacagccaacuggucauggccugauggcgcagaauugccauuuacuaucgacaaguga

SEQ ID NO: 149255 - RNA, 1413 nt, Artificial Sequence
  derived and/or modified CDS sequence (opt3) from neuraminidase__InfluenzaA__AET84198
augaaccccaaucagaagaucauuaccauaggcagcaucuccauugccaucgggauuaucucucugaugcuccaaauaggaaacaucauuucaaucugggcuagucacagcauucagacagguucccagaauaacacuggcaucugcaaucagagaauaauuacguacgagaacucuaccugggugaaucauacauaugugaacaucaauaacacuaauguuguggcaggggaagacaaaaccucgaugacacuugccggaaacucaagccuguguaguauuuccggcugggcgaucuacaccaaggauaauucuaucaggauugguagcaaaggggacguauucgugauacgggagccuuuuaucuccugcucacacuuggaaugucgcacuuucuuuuuaacacaaggagcucugcuaaacgauaagcauaguaauggcaccgucaaagaccgaagcccauaucgugcccucaugucuugcccgcugggcgaggcacccuccccuuacaacucaaaguucgaaagcguggccuggagugcuucugcaugucacgaugggaugggauggcuuacgauugguaucuccggcccagacaacggggccguugcugugcugaaguauaauggaauaauuacuggcaccaucaaaagcuggaagaaacagaucuugagaacacaggagucggagugcgucuguaugaacgguucuugcuuuacuauuaugaccgaugggcccuccaauaaggccgcgucauacaaaaucuucaagauugaaaagggaaaagugacaaagaguauagagcucaacgcaccuaauuuuuauuacgaagaguguagcugcuacccagacaccggcaucguaauguguguuugcagggauaacuggcauggcuccaaucggcccugggugucuuucaaccagaaucuggacuaucaaauuggguacaucugcagcggagucuuuggugauaacccucgcccaaaagacggcgaggggucauguaauccggugacgguggauggagccaacggcgucaaggguuucaguuauaaauacgggaauggcguuuggaucggaagaacuaaguccaacaggcugcggaaaggcuuugaaaugauuugggaccccaauggguggacaaacaccgacagcgauuucucugugaagcaggacguaguggcuauaacugauuggucaggauauagugguagcuuuguccagcacccugagcucacaggcuuagacugcauccgcccauguuucuggguggaacugguucgagggcuucccagagagaacaccacgauuuggaccuccggaucuucgaucagcuucugcggcgucaauuccgauacagccaacuggucauggccugacggugcagaauugccauuuacuauugauaaguga

SEQ ID NO: 149256 - RNA, 1413 nt, Artificial Sequence
  derived and/or modified CDS sequence (opt3) from neuraminidase__InfluenzaA__AET84209
augaaccccaaucagaagaucauuaccauaggcagcaucuccauugccaucgggauuaucucucugaugcuccaaauaggaaacaucauuucaaucugggcuagucacagcauucagacagguucccagaauaacacuggcaucugcaaucagagaauaauuacguacgagaacucuaccugggugaaucauacauaugucaacaucaauaacacuaaaguuguggcaggggaagacaagaccucgguaacacuugccggaaauucaagccuguguaguauuuccggcugggcgaucaacaccaaagauaauucuaucaggauugguagcaagggggacguguucgucauacgggagccuuuuaucuccugcucacacuuggaaugucgcacuuucuuuuuaacacaaggagcucugcuaaacgauaaacauaguaauggcaccgugaaggaccgaagcccauaccgugcccucaugucuugcccgcugggcgaggcacccuccccuuauaacucaaaguucgaaagcguugccuggagugcuucugcaugucacgaugggaugggauggcuuacgauugguaucuccggcccagacaacggggccguggcuguccugaaauacaauggaauaauuacuggcaccaucaagagcuggaaaaagcagaucuugagaacacaggagucggagugcguguguaugaacgguucuugcuuuacuauuaugaccgaugggcccuccaauaaagccgcgucauauaagaucuucaagauugaaaaaggaaagguaacaaaaaguauagagcucaacgcaccuaauuuuuacuaugaagaguguagcugcuacccagacaccggcaucguuaugugugugugcagggauaacuggcauggcuccaaucggcccugggucucuuucaaccagaaucuggacuaccaaauuggguauaucugcagcggaguguuuggugauaacccucgcccaaaggacggcgaggggucauguaauccggugacggucgauggagccaacggcguuaaagguuucaguuacaaguaugggaauggcguguggaucggaagaacuaaauccaacaggcugcggaagggcuuugaaaugauuugggaccccaauggguggacaaacaccgacagcgauuucucuguaaagcaggacguggucgcuauaacugauuggucaggauacagugguagcuuugugcagcacccugagcucacaggcuuagacugcauccgcccauguuucuggguugaacuggugcgagggcuucccagagagaacaccacgauuuggaccuccggaucuucgaucagcuucugcggcgucaauuccgauacagccaacuggucauggccugacggugcagaauugccauuuacuauugauaaauga

SEQ ID NO: 149257 - RNA, 1413 nt, Artificial Sequence
  derived and/or modified CDS sequence (opt3) from neuraminidase__InfluenzaA__AET84231
augaaccccaaucagaagaucauuaccauaggcagcaucuccauugccaucgggauuaucucucugaugcuccaaauaggaucaaucauuaguaucugggcuagccacuccauucauacagguucucagaacaauacuggcaucugcaaccagagaauaauuacguacgaaaauucgaccugggugaaccacacauaugucaauaucaacaauacuaacguuguggcaggggaggacaaaaccucaguaacacuugccggaaauagcagucuguguuccauuucuggcugggcgaucuacaccaaggauaacagcaucaggauugguuccaaaggggacguguucgucauacgggagccuuuuaucucaugcagucauuuggaaugucgcacuuucuuuuuaacacagggagcucugcuaaaugauaagcacagcaacggcaccgugaaagaccgaucuccauaucgugcccucauguccugcccgcugggcgaggcacccucaccuuacaauagcaaguucgaaaguguugccuggucugcuuccgcaugucaugaugggaugggauggcuuacgauugguaucagcggcccagacaacggggccguggcuguccugaaguauaacggaauaauuacuggcaccaucaaaucguggaagaaacaaaucuugagaacacaggagucugagugcguguguaugaaugguuccugcuuuacuauuaugaccgaugggcccucaaacaaggccaguagcuacaaaaucuucaagauugaaaagggaaaaguaacaaaguccauagagcucaaugcgccuaacuuuuauuacgaagaguguucuugcuacccagacaccggcaucguuaugugugugugcagggauaauuggcacggcagcaaccggcccugggucucauucaaucagaaccuggacuaucagauuggguacaucugcaguggaguguuuggugauaauccucgcccagaggacggcgaaggguccuguaacccggugacggucgauggagcaaauggcguuaaagguuucagcuauaaguacgggaacggcguguggaucggaagaacuaaaucuaauaggcugcggaagggcuuugagaugauuugggaccccaacggguggacaaauaccgacucagauuucaguguaaaacaagacguggucgccauaacugauuggagcggauauuccgguucuuuugugcagcacccugaacucacaggcuuagacugcauccgcccauguuucuggguugagcuggugcgagggcuucccagagaaaacaccacgauuuggaccucgggaagcuccaucucauucugcggcgucaacagugauacagcuaauuggucuuggccugacggugccgaguugccauuuacuauugauaaguga

SEQ ID NO: 149258 - RNA, 1413 nt, Artificial Sequence; identical to SEQ ID NO: 145509
  derived and/or modified CDS sequence (opt3) from neuraminidase__InfluenzaA__AET84242

SEQ ID NO: 149259 - RNA, 1413 nt, Artificial Sequence
  derived and/or modified CDS sequence (opt3) from neuraminidase__InfluenzaA__AET84253
augaaccccaaucagaagaucauuaccauaggcagcaucuccauugccaucgggauuaucucucugaugcuccaaauaggaucaaucauuaguaucugggcuagccacuccauucagacagguucucagaacaauacuggcaucugcaaccagagaauaauuacguacgaaaauucgaccugggugaaccauacauaugucaauaucaacaauacuaacguuguggcaggggaggacaaaaccucaguaacacuugccggaaauagcagucuguguuccauuucuggcugggcgaucuacaccaaggauaacagcaucaggauugguuccaaaggggacguguucgucauacgggagccuuuuaucucaugcagucacuuggaaugucgcacuuucuuuuuaacacaaggagcucugcuaaaugauaagcauagcaacggcaccgugaaagaccgaucuccauaucgugcccucauguccugcccgcugggcgaggcacccucaccuuacaauagcaaguucgaaaguguugccuggucugcuuccgcaugucacgaugggaugggauggcuuacgauugguaucagcggcccagacaacggggccguggcuguccugaaguauaacggaauaauuacugagaccaucaaaucguggaagaaacagaucuugagaacacaggagucugaaugcguguguaugaauggcuccugcuuuacuauuaugaccgauggucccucaaacaaggccgcgaguuacaaaaucuucaagauugagaaggggaaaguaacaaagagcauagaacucaaugcaccuaacuuuuauuacgaggaguguuccugcuacccagacaccggaaucguuaugugugugugcagggauaauuggcauggcucuaaccggcccugggucagcuucaaucagaaccuggacuaucaaauuggcuacaucugcucagggguguuuggagauaauccucgcccagaagacggugagggcaguuguaacccggugacggucgauggggccaauggaguuaaaggcuucuccuauaaguacgguaacgggguguggaucggcagaacuaaaagcaauaggcugcggaagggauuugaaaugauuugggaccccaacggcuggacaaauaccgacucugauuucucaguaaaacaggacguggucgcuauaacugauuggaguggguauagcggauccuuugugcagcacccugagcucacagguuuagacugcauccgcccauguuucuggguugaacuggugcgaggccuucccagagagaacaccacgauuuggaccucugggucgagcaucuccuucugcggagucaacucagauacagccaauuggaguuggccugacggcgcagaguugccauuuacuauugauaaguga

SEQ ID NO: 149260 - RNA, 1413 nt, Artificial Sequence
  derived and/or modified CDS sequence (opt3) from neuraminidase__InfluenzaA__AET84264
augaaccccaaucagaagaucauuaccauaggcagcaucuccauugccaucgggauuaucucucugauguuccaaauaggaucaaucauuaguaucugggcuagccacuccauucagacagguucucagaacaauacuggcaucugcaaccagagaauaauuacguacgaaaauucgaccugggugaaccauacauaugucaauaucaacaauacuaacguuguggcaggggaggacaaaaccucaguaacacucgccggaaauagcagucuuuguuccauuucuggcugggcgaucuacaccaaggauaacagcaucaggauugguuccaaaggggacguguuugucauacgggagccuuucaucucaugcagucaccuggaaugucgcacauuuuucuugacucaaggagcuuuacugaaugauaagcauagcaacggcaccgugaaagaccgaucuccauaucgugcccuaauguccugcccgcucggcgaggcacccucaccuuacaauagcaaguuugaaaguguugccuggucugcuuccgcaugucacgaugggaugggauggcugacgauugguaucagcggcccagacaacggggccguggcuguccuuaaguauaacggaauaauuacugagaccaucaaaucguggaagaaacagauccugagaacacaggagucugaaugcguguguaugaauggcuccugcuucacuauuaugaccgauggucccucaaacaaggccgcgaguuacaaaaucuuuaagauugagaaggggaaaguaacaaagagcauagaauugaaugcaccuaacuucuauuacgaggaguguuccugcuacccagacaccggaaucguuaugugugugugcagggauaauuggcauggcucuaaccggcccugggucagcuuuaaucagaaccucgacuaucaaauuggcuacaucugcucagggguguucggagauaauccucgcccagaagacggugagggcaguuguaacccggugacggucgauggggccaauggaguuaaaggcuuuuccuauaaguacgguaacgggguguggaucggcagaacuaaaagcaauaggcugcggaagggauucgaaaugauuugggaccccaacggcuggacaaauaccgacucugauuuuucaguaaaacaggacguggucgcuauaacugauuggaguggguauagcggauccuucgugcagcacccugagcugacaggucucgacugcauccgcccauguuucuggguugaauuagugcgaggccugcccagagagaacaccacgauuuggaccucugggucgagcaucuccuuuugcggagucaacucagauacagccaauuggaguuggccugacggcgcagagcuuccauucacuauugauaaguga

SEQ ID NO: 149261 - RNA, 1413 nt, Artificial Sequence
  derived and/or modified CDS sequence (opt3) from neuraminidase__InfluenzaA__AET84275
augaaccccaaucagaagaucauuaccauaggcagcaucuccauugccaucgggauuaucucucugaugcuccaaauaggaaacaucauuucaaucugggcuagucacagcauucagacagguucccagaauaacacuggcaucugcaaucagagaauaauuacguacgagaacucuaccugggugaaucauacauaugucaacaucaauaacacuaauguuguggcaggggaagacaaaaccucgguaacacuugccggaaacucaagccuguguaguauuuccggcugggcgaucuacaccaaggauaauucuaucaggauugguagcaaaggggacguguucgucauacgggagccuuuuaucuccugcucacacuuggaaugucgcacuuucuuuuuaacacaaggagcucugcuaaacgauaagcauaguaauggcaccgugaaagaccgaagcccauaucgugcccucaugucuugcccgcugggcgaggcacccuccccuuacaacucaaaguucgaaagcguugccuggagugcuucugcaugucacgaugggaugggauggcuuacgauugguaucuccggcccagacaacggggccguggcuguccugaaguauaauggaauaauuacuggcaccaucaaaagcuggaagaaacagaucuugagaacacaggagucggagugcguguguaugaacgguucuugcuuuacuauuaugaccgaugggcccuccaauaaggccgcgucauacaaaaucuucaagauugaaaagggaaaaguaacaaagaguauagagcucaacgcaccuaauuuuuauuacgaagaguguagcugcuacccagacaccggcaucguuaugugugugugcagggauaacuggcauggcuccaaucggcccugggucucuuucaaccagaaucuggacuaucaaauuggguacaucugcagcggaguguuuggugauaacccucgcccaaaagacggcgaggggucauguaauccggugacggucgauggagccaacggcguuaaggguuucaguuauaaauacgggaauggcguguggaucggaagaacuaaguccaacaggcugcggaaaggcuuugaaaugauuugggaccccaauggguggacaaacaccgacagcgauuucucuguaaagcaggacguggucgcuauaacugauuggucaggauauagugguagcuuugugcagcacccugagcucacaggcuuagacugcauccgcccauguuucuggguugaacuggugcgagggcuucccagagagaacaccacgauuuggaccuccggaucuucgaucagcuucugcggcgucaauuccgauacagccaacuggucauggccugacggugcagaauugccauuuacuauugauaaguga

SEQ ID NO: 149262 - RNA, 1413 nt, Artificial Sequence; identical to SEQ ID NO: 145509
  derived and/or modified CDS sequence (opt3) from neuraminidase__InfluenzaA__AET84286

SEQ ID NO: 149263 - RNA, 1413 nt, Artificial Sequence
  derived and/or modified CDS sequence (opt3) from neuraminidase__InfluenzaA__AET84297
augaaccccaaucagaagaucauuaccauaggcagcaucuccauugccaucgggauuaucucucugaugcuccaaauaggaaacaucauuucaaucugggcuagucacagcauucagacagguucccagaauaacacuggcaucugcaaucagagaauaauuacguacgagaacucuaccugggugaaucauacauaugucaacaucaauaacacuaauguuguggcaggggaagacaaaaccucgguaacacuugccggaaacucaagccuguguaguauuuccggcugggcgaucuacaccaaggauaauucuaucaggauugguagcaaaggggacguguucgucauacgggagccuuuuaucuccugcucacacuuggaaugucgcacuuucuuuuuaacacaaggagcucugcuaaacgauaagcauaguaauggcaccgugaaagaccgaagcccauaucgugcccucaugucuugcccgcugggcgaggcacccuccccuuacaacucaaaguucgaaagcguugccuggagugcuucugcaugucacgaugggaugggauggcuuacgauugguaucuccggcccagacaacggggccguggcuguccugaaguauaauggaauaauuacuggcaccaucaaaagcuggaagaaacagaucuugagaacacaggagucggagugcguguguaugaacgguucuugcuuuacuauuaugaccgaugggcccuccaauaaggccgcgucauacaaaaucuucaagauugaaaagggaaaaguaacaaagaguauagagcucaacgcaccuaauuuuuauuacgaagaguguagcugcuacccagacaccggcaucguuaugugugugugcagggauaacuggcauggcuccaaucggcccugggucucuuucaaccagaaucuggacuaucaaauuggguacaucugcagcggaguguuuggugauaacccucgcccagaggacggcgaagggucauguaauccggugacggucgauggagccaacggcguuaaagguuucaguuauaaguacgacaaugggguguggaucggcagaacuaaauccaacaggcugcggaagggauuugagaugauuugggaccccaauggcuggacaaacaccgauagcgacuucucuguaaaacaggauguggucgcuauaacugacuggucaggguauagugguagcuuugugcagcacccugaacucacaggauuagauugcauccgcccauguuucuggguugagcuggugcgaggccuucccagagaaaacaccacgauuuggaccuccgggucuucgaucagcuucugcggagucaauuccgacacaacuaacuggucauggccugauggcgccgaguugccauuuaccauugacaaguga

SEQ ID NO: 149264 - RNA, 1413 nt, Artificial Sequence
  derived and/or modified CDS sequence (opt3) from neuraminidase__InfluenzaA__AET84308
augaaccccaaucagaagaucauuaccauaggcagcaucuccauugccaucgggauuaucucucugaugcuccaaauaggaaacaucauuucaaucugggcuagucacagcauucagacagguucccagaauaacacuggcaucugcaaucagagaauaauuacguacgagaacucuaccugggugaaucauacauaugucaacaucaauaacacuaauguuguggcaggggaagacaaaaccucgguaacacuugccggaaacucaagccuguguaguauuuccggcugggcgaucuacaccaaggauaauucuaucaggauugguagcaaaggggacguguucgucauacgggagccuuuuaucuccugcucacacuuggaaugucgcacuuucuuuuuaacacaaggagcucugcuaaacgauaagcauaguaauggcaccgugaaagaccgaagcccauaucgugcccucaugucuugcccgcugggcgaggcacccuccccuuacaacucaaaguucgaaagcguugccuggagugcuucugcaugucacgaugggaugggauggcuuacgauugguaucuccggcccagacaacggggccguggcuguccugaaguauaauggaauaauuacugagaccaucaaaagcuggaagaaacagaucuugagaacacaggagucggaaugcguguguaugaacggcucuugcuuuacuauuaugaccgauggucccuccaauaaggccgcgucauacaaaaucuucaagauugagaaggggaaaguaacaaagaguauagaacucaacgcaccuaauuuucauuaugaggaguguagcugcuacccagacaccggaaucguuaugugugugugcagggauaacuggcacggcuccaaucggcccugggucucuuucaaccagaaucuggacuaccaaauuggcuauaucugcagcgggguguuuggagauaacccucgcccagaagacggugagggcucauguaauccggugacggucgauggggccaacggaguuaaaggcuucaguuacaaguaugacaaugguguguggaucgggagaacuaaauccaacaggcugcggaagggcuuugaaaugauuugggaccccaauggauggacaaacaccgauagcgacuucucuguaaaacaggauguggucgcuauaacugacuggucaggcuacagugggagcuuugugcagcacccugagcucacaggauuagauugcauccgcccauguuucuggguugaacuggugcgaggucuucccagagagaacaccacgauuuggaccuccgggucuucgaucagcuucugcggcgucaauuccgacacaacuaacuggucauggccugauggagccgaguugccauuuaccauugacaaguga

SEQ ID NO: 149265 - RNA, 1413 nt, Artificial Sequence
  derived and/or modified CDS sequence (opt3) from neuraminidase__InfluenzaA__AET84319
augaaccccaaucagaagaucauuaccauaggcagcaucuccauugccaucgggauuaucucucugaugcuccaaauaggaaacaucauuucaaucugggcuagucacagcauucagacagguucccagaauaacacuggcaucugcaaucagagaauaauuacguacgagaacucuaccugggugaaucauacauaugugaacaucaauaacacuaauguuguggcaggggaagacaaaaccucgaugacacuugccggaaacucaagccuguguaguauuuccggcugggcgaucuacaccaaggauaauucuaucaggauugguagcaaaggggacguauucgugauacgggagccuuuuaucuccugcucacacuuggaaugucgcacuuucuuuuuaacacaaggagcucugcuaaacgauaagcauaguaaucgaaccgucaaagaccguagcccauauagagcccucaugucuugcccgcugggcgaggcacccuccccuuacaacucaaaguucgaaagcguggccuggagugcuucugcaugucacgauggcaugggguggcuuacgauuggaaucuccgguccagacaacggcgccguugcugugcugaaguauaaugggauaauuacugagaccaucaaaagcuggaagaaacagaucuugaggacacaggagucggaaugcgucuguaugaacggaucuugcuuuacuauuaugaccgauggccccuccaauaaggccgcgucauacaaaaucuucaagauugagaaggguaaagugacaaagaguauagaacucaacgcaccuaauuuuuauuacgaggaguguagcugcuacccagacaccgggaucguaauguguguuugccgggauaacuggcauggauccaaucgccccugggugucuuucaaccagaaucuggacuaucaaauuggcuacaucugcagcggcgucuuuggggauaacccuagaccagaagacggagaggguucauguaauccggugacgguggauggcgccaacggggucaaaggauucaguuauaaguacggcaaugguguuuggaucgggaggacuaaauccaaccggcugcgcaagggcuuugaaaugauuugggaccccaauggauggacaaacaccgacagcgauuucucugugaaacaggacguaguggcuauaacugauuggucaggcuauagugggagcuuuguccagcacccugagcucacaggauuagacugcauccgaccauguuucuggguggaacugguuagaggucuucccagggagaacaccacgauuuggaccuccgggucuucgaucagcuucugcggcgucaauuccgauacagccaacuggucauggccugacggagcagaguugccauuuacuauugauaaguga

SEQ ID NO: 149266 - RNA, 1413 nt, Artificial Sequence
  derived and/or modified CDS sequence (opt3) from neuraminidase__InfluenzaA__AET84330
augaaccccaaucagagaaucauuaccauaggcagcaucuccauugccaucgggauuaucucucugaugcuccaaauaggaaacaucauuucaaucugggcuagucacagcauucagaucgguucccagaauaacacaggcauaugcaaucagaggauuaucacuuacgagaacucuacgugggugaaucauaccuaugugaacauuaauaacacaaauguuguggcaggggaagacaagacuucgguaacccuugccggaaacucaagccuguguaguaucuccggcugggcgaucuacacaaaagauaauucuauucggauagguagcaagggggacguguucgucauccgcgagccuuuuauuuccugcucacacuuggaaugucgaaccuucuuuuuaacucaaggagcucugcuaaacgauaaacauaguaauggcacagccaaggaccguagcccauauagagcacucaugucuugcccgcugggcgaggcccccuccccuuacaacucaaaauucgaaagcguggcuuggagugcaucugccugucacgaugggaugggauggcuuaccaucgguauauccggcccagacaacggggcuguugccgugcugaaguauaauggaauuaucacgggcacuaucaagagcuggaaaaagcagauuuugaggacccaggagucggagugcgucuguaugaacgguucuugcuuuacaaucaugacugaugggcccuccaauaaagcggcaucauacaagauuuucaaaauagaaaagggaaaggugaccaaaaguaucgagcucaacgccccuaauuuuuauuacgaagaguguagcugcuacccagacacaggcauuguaauguguguuugccgggauaacuggcauggcuccaaucgccccugggugucuuucaaccagaaucuggacuaucaaaucggguacaucugcagcggagucuuuggugauaacccuagaccaaaggacggcgaggggucauguaauccggugaccguggauggagcuaacggcgucaaagguuucaguuauaaguacgggaauggcguuuggauuggaaggacgaaauccaaccggcugcgcaagggcuuugaaaugauaugggaccccaauggguggacuaacacagacagcgauuucucugugaaacaggacguaguggccaucaccgauuggucaggauauagugguagcuuuguccagcacccugagcucacuggcuuagacugcauucgaccauguuucuggguggaacugguuagagggcuucccagggagaacacaaccaucuggacguccggaucuucgauuagcuucugcggcgucaauuccgauaccgcaaacuggucauggccugacggugcugaauugccauuuacaaucgauaaguga

SEQ ID NO: 149267 - RNA, 1413 nt, Artificial Sequence
  derived and/or modified CDS sequence (opt3) from neuraminidase__InfluenzaA__AET84341
augaaccccaaucagagaaucauuaccauaggcagcaucuccauugccaucgggauuaucucucugaugcuccaaauaggaaacaucauuucaaucugggcuagucacagcauucagaucgguucccagaauaacacaggcauaugcaaucagaggauuaucacuuacgagaacucuacgugggugaaucauaccuaugugaacauuaauaacacaaauguuguggcaggggaagacaagacuucgguaacccuugccggaaacucaagccuguguaguaucuccggcugggcgaucuacacaaaagauaauucuauucggauagguagcaagggggacguguucgucauccgcgagccuuuuauuuccugcucacacuuggaaugucgaaccuucuuuuuaacucaaggagcucugcuaaacgauaaacauaguaauggcacagccaaggaccguagcccauauagagcacucaugucuugcccgcugggcgaggcccccuccccuuacaacucaaaauucgaaagcguggcuuggagugcaucugccugucacgaugggaugggauggcuuaccaucgguauauccggcccagacaacggggcuguugccgugcugaaguauaauggaauuaucacgggcacuaucaagagcuggaaaaagcagauuuugaggacccaggagucggagugcgucuguaugaacgguucuugcuuuacaaucaugacugaugggcccuccaauaaagcggcaucauacaagauuuucaaaauagaaaagggaaaggugaccaaaaguaucgagcucaacgccccuaauuuuuauuacgaagaguguagcugcuacccagacacaggcauuguaauguguguuugccgggauaacuggcauggcuccaaucgccccugggugucuuucaaccagaaucuggacuaucaaaucggguacaucugcagcggagucuuuggugauaacccuagaccaaaggacggcgaggggucauguaauccggugaccguggauggagcuaacggcgucaaagguuucaguuauaaguacgggaauggcguuuggauuggaaggacgaaauccaaccggcugcgcaagggcuuugaaaugauaugggaccccaauggguggacuaacacagacagcgauuucucugugaaacaggacguaguggccaucaccgauuggucaggauauagugguagcuuuguccagcacccugagcucacuggcuuagacugcauucgaccauguuucuggguggaacugguuagagggcuucccaaggagaacacaaccaucuggacguccggaucuucgauuagcuucugcggcgucaauuccgauaccgcaaacuggucauggccugacggugcugaauugccauuuacaaucgauaaguga

SEQ ID NO: 149268 - RNA, 1413 nt, Artificial Sequence
  derived and/or modified CDS sequence (opt3) from neuraminidase__InfluenzaA__AET84363
augaaccccaaucagagaaucauuaccauaggcagcaucuccauugccaucgggauuaucucucugaugcuccaaauaggaaacaucauuucaaucugggcuagucacagcauucagacagguucccagaauaacacuggcaucugcaaucagaggauaauuacguacgagaacucuaccugggugaaucauacauaugucaacaucaauaacacuaauguuguggcaggggaagacaagaccucgaugacacuugccggaaacucaagccuguguaguauuuccggcugggcgaucuacaccaaagauaauucuauccggauugguagcaagggggacguauucgugauacgcgagccuuuuaucuccugcucacacuuggaaugucgaacuuucuuuuuaacacaaggagcucugcuaaacgauaaacauaguaauggcaccgccaaggaccguagcccauauagagcacucaugucuugcccgcugggcgaggcccccuccccuuacaacucaaaauucgaaagcgucgcuuggagugcaucugccugucacgaugggaugggauggcuuacgauugguaucuccggcccagacaacggggcuguggccguucugaaguauaauggaauaauuacuggcaccaucaagagcuggaaaaagcagaucuugaggacacaggagucggagugcguguguaugaacgguucuugcuuuacuauuaugaccgaugggcccuccaauaaagcggcaucauacaagaucuucaaaauugaaaagggaaaggucacaaaaaguauagagcucaacgccccuaauuuuuauuacgaagaguguagcugcuacccagacaccggcaucgugauguguguaugccgggauaacuggcauggcuccaaucgccccuggguuucuuucaaccagaaucuggacuaucaaauuggguacaucugcagcggaguguuuggugauaacccuagaccaaaggacggcgaggggucauguaauccggucacgguggauggagcuaacggcgugaaagguuucaguuauaaguacgggaauggcgucuggaucggaaggacuaaauccaaccggcugcgcaagggcuuugaaaugauuugggaccccaauggguggacaaacaccgacagcgauuucucuguuaaacaggacgugguagccauaacugauuggucaggauauagugguagcuuugugcagcacccugagcucacaggcuuagacugcauccgaccauguuucugggucgaacuggugagagggcuucccagggagaacaccacgauuuggaccuccggaucuucgaucagcuucugcggcguuaauuccgauacagcaaacuggucauggccugacggugcugaauugccauuuacuauugauaaguga

SEQ ID NO: 149269 - RNA, 1413 nt, Artificial Sequence
  derived and/or modified CDS sequence (opt3) from neuraminidase__InfluenzaA__AET84374
augaaccccaaucagagaaucauuaccauaggcagcaucuccauugccaucgggauuaucucucugaugcuccaaauaggaaacaucauuucaaucugggcuagucacagcauucagaucgguucccagaauaacacaggcauaugcaaucagaggauuaucacuuacgagaacucuacgugggugaaucauaccuaugucaacauuaauaacacaaauguuguggcaggggaagacaagacuucgguaacccuugccggaaacucaagccuguguaguaucuccggcugggcgaucuacacaaaagauaauucuauucggauagguagcaagggggacguguucgucauccgcgagccuuuuauuuccugcucacacuuggaaugucgaaccuucuuuuuaacucaaggagcucugcuaaacgauaaacauaguaauggcacagccaaggaccguagcccauauagagcacucaugucuugcccgcugggcgaggcccccuccccuuacaacucaaaauucgaaagcguggcuuggagugcaucugccugucacgaugggaugggauggcuuaccaucgguauauccggcccagacaacggggcuguugccgugcugaaguauaauggaauuaucacggagacuaucaagagcuggaaaaagcagauuuugaggacccaggagucggaaugcgucuguaugaacggcucuugcuuuacaaucaugacugauggucccuccaauaaagcggcaucauacaagauuuucaaaauagagaaggggaaggugaccaaaaguaucgaacucaacgccccuaauuuuuauuacgaggaguguagcugcuacccagacacaggaauuguaauguguguuugccgggauaacuggcauggcuccaaucgccccugggugucuuucaaccagaaucuggacuaucaaaucggcuacaucugcagcggggucuuuggagauaacccuagaccaaaggacggugaaggcucauguaauccggugaccguggauggggcuaacggagucaaaggcuucaguuauaaguacgguaaugggguuuggauuggcaggacgaaauccaaccggcugcgcaagggauuugagaugauaugggaccccaauggcuggacuaacacagacagcgauuucucugugaaacaggacguaguggccaucaccgauuggucaggguauaguggauccuuuguccagcacccugaacucacugguuuagacugcauucgaccauguuucuggguggagcugguuagaggccuucccagggaaaacacaaccaucuggacguccgggucuucgauuagcuucugcggagugaauagcgauaccgcaaacuggucauggccugacggcgcugaguugccauuuacaaucgauaaguga

SEQ ID NO: 149270 - RNA, 1413 nt, Artificial Sequence
  derived and/or modified CDS sequence (opt3) from neuraminidase__InfluenzaA__AET84396
augaaccccaaucagagaaucauuaccauaggcagcaucuccauugccaucgggauuaucucucugaugcuccaaauaggaaacaucauuucaaucugggcuagucacagcauucagacagguucccagaauaacacuggcaucugcaaucagaggauaauuacguacgagaacucuaccugggugaaucauacauaugucaacaucaauaacacuaauguuguggcaggggaagacaagaccucgaugacacuugccggaaacucaagccuguguaguauuuccggcugggcgaucuacaccaaagauaauucuauccggauugguagcaagggggacguauucgugauacgcgagccuuuuaucuccugcucacacuuggaaugucgaacuuucuuuuuaacacaaggagcucugcuaaacgauaaacauaguaauggcaccgccaaggaccguagcccauauagagcacucaugucuugcccgcugggcgaggcccccuccccuuacaacucaaaauucgaaagcgucgcuuggagugcaucugccugucacgaugggaugggauggcuuacgauugguaucuccggcccagacaacggggcuguggccguucugaaguauaauggaauaauuacugagaccaucaagagcuggaaaaagcagaucuugaggacacaggagucggaaugcguguguaugaacggcucuugcuuuacuauuaugaccgauggucccuccaauaaagcggcaucauacaagaucuucaaaauugagaaggggaaggucacaaaaaguauagaacucaacgccccuaauuuuuauuacgaggaguguagcugcuacccagacaccggaaucgugauguguguaugccgggauaacuggcauggcuccaaucgccccuggguuucuuucaaccagaaucuggacuaucaaauuggcuacaucugcagcgggguguuuggagauaacccuagaccaaaggacggugaaggcucauguaauccggucacgguggauggggcuaacggagugaaaggcuucaguuauaaguacgguaauggggucuggaucggcaggacuaaauccaaccggcugcgcaagggauuugagaugauuugggaccccaauggcuggacaaacaccgacagcgauuucucuguuaaacaggacgugguagccauaacugauuggucaggguauagugguagcuuugugcagcacccugaacucacaggauuagacugcauccgaccauguuucugggucgagcuggugagaggccuucccagggaaaacaccacgauuuggaccuccgggucuucgaucagcuucugcggaguuaauuccgauacagcaaacuggucauggccugacggcgcugaguugccauuuacuauugauaaguga

SEQ ID NO: 149271 - RNA, 1413 nt, Artificial Sequence
  derived and/or modified CDS sequence (opt3) from neuraminidase__InfluenzaA__AET84407
augaaccccaaucagagaaucauuaccauaggcagcaucuccauugccaucgggauuaucucucugaugcuccaaauaggaaacaucauuucaaucugggcuagucacagcauucagaucgguucccagaauaacacaggcauaugcaaucagaggauuaucacuuacgagaacucuacgugggugaaucauaccuaugugaacauuaauaacacaaauguuguggcaggggaagacaagacuucgguaacccuugccggaaacucaagccuguguaguaucuccggcugggcgaucuacacaaaagauaauucuauucggauagguagcaagggggacguguucgucauccgcgagccuuuuauuuccugcucacacuuggaaugucgaaccuucuuuuuaacucaaggagcucugcuaaacgauaaacauaguaauggcacagccaaggaccguagcccauauagagcacucaugucuugcccgcugggcgaggcccccuccccuuacaacucaaaauucgaaagcguggcuuggagugcaucugccugucacgaugggaugggauggcuuaccaucgguauauccggcccagacaacggggcuguugccgugcugaaguauaauggaauuaucacgggcacuaucaagagcuggaaaaagcagauuuugaggacccaggagucggagugcgucuguaugaacgguucuugcuuuacaaucaugacugaugggcccuccaauaaagcggcaucauacaagauuuucaaaauagaaaagggaaaggugaccaaaaguaucgagcucaacgccccuaauuuuuauuacgaagaguguagcugcuacccagacacaggcauuguaauguguguuugccgggauaacuggcauggcuccaaucgccccugggugucuuucaaccagaaucuggacuaucaaaucggguacaucugcagcggagucuuuggugauaacccuagaccagaggacggcgaagggucauguaauccggugaccguggauggagcuaacggcgucaaggguuucaguuauaaauacgggaauggcguuuggauuggaaggacgaaguccaaccggcugcgcaaaggcuuugagaugauaugggaccccaauggguggacuaacacagacagcgauuucucugugaagcaggacguaguggccaucaccgauuggucaggauauagugguagcuuuguccagcacccugaacucacuggcuuagacugcauucgaccauguuucuggguggagcugguuagagggcuucccagggaaaacacaaccaucuggacguccggaucuucgauuagcuucugcggcgucaauuccgauaccgcaaacuggucauggccugacggugcugaguugccauuuacaaucgauaaauga

SEQ ID NO: 149272 - RNA, 1413 nt, Artificial Sequence
  derived and/or modified CDS sequence (opt3) from neuraminidase__InfluenzaA__AET84418
augaaccccaaucagagaaucauugccauaggcagcaucuccauugcuaucgggauuaucucucugaugcuccaaauaggaaacaucauuucaaucugggcaagucacagcauucagaucgguucccagaauaacaccggcauaugcaaucagaggauuaucacauacgagaacucuacuugggugaaucauacguaugucaacauuaauaacaccaauguuguggccggggaagacaagacaucgguaacucuugcgggaaacucaagccuguguaguaucuccggcugggcuaucuacaccaaagauaauucuauucggauagguagcaagggggacguguucgucauccgcgagccuuuuauuuccugcucacacuuggaaugucgaacauucuuuuuaacccaaggagcccugcuaaacgauaaacauaguaauggcacugcaaaggaccguagcccauauagagcccucaugucuugcccgcugggcgaggcucccuccccuuacaacucaaaauucgaaagcguggcauggagugccucugcuugucacgaugggaugggauggcuuacaaucgguauauccggcccagacaacggggccguugcggugcugaaguauaauggaauuaucaccgagacgaucaagagcuggaaaaagcagauuuugaggacucaggagucggaaugcgucuguaugaacggcucuugcuuuaccaucaugacagauggucccuccaauaaagcagccucauacaagauuuucaaaauagagaaggggaaggugacuaaaaguaucgaacucaacgcuccuaauuuuuauuacgaggaguguagcugcuacccagacaccggaauuguaauguguguuugccgggauaacuggcauggcuccaaucgccccugggugucuuucaaccagaaucuggacuaucaaaucggcuacaucugcagcggggucuuuggagauaacccuagaccagaagacggugagggcucauguaauccggugacaguggauggggccaacggagucaagggcuucaguuauaaauacgguaaugggguuuggauuggcaggaccaaguccaaccggcugcgcaaaggauuugaaaugauaugggaccccaauggcuggacgaacacugacagcgauuucucugugaagcaggacguaguggcaaucacagauuggucaggguauaguggauccuuuguccagcacccugagcucaccgguuuagacugcauucgaccauguuucuggguggaacugguuagaggccuucccagggagaacacuacaaucuggaccuccgggucuucgauuagcuucugcggagugaauagcgauacggcuaacuggucauggccugacggcgccgaguugccauuuaccaucgauaaauga

SEQ ID NO: 149273 - RNA, 1413 nt, Artificial Sequence
  derived and/or modified CDS sequence (opt3) from neuraminidase__InfluenzaA__AET84429
augaaccccaaucagaagaucauuaccauaggcagcaucuccauugccaucgggauuaucucucugaugcuccaaauaggaaacaucauuucaaucugggcuagucacagcauucagacagguucccagaauaacacuggcaucugcaaucagagaauaauuacguacgagaacucuaccugggugaaucauacauaugucucgaucaacaauacuaacguuguggcagggaaagacaagaccucaguaacacuugccggaaauagcagucuguguuccauuucuggcugggcgaucuacaccaaagauaacagcaucaggauugguuccaagggggacguguucgucauacgggaaccuuuuaucucaugcagucacuuggagugucgcacuuucuuuuuaacacaaggagcucugcuaaaugauaaacauagcaacggcaccgugaaggaccgaucuccauaucgugcccucauguccugcccgcugggcgaagcacccucaccuuacaauagcaaguucgagaguguugccuggucugcuuccgcaugucacgaugggaugggauggcuuacgauugguaucagcggcccagacaacggggccguggcuguccugaaauauaacggaauaauuacuggcaccaucaagucguggaaaaagcagaucuugagaacacaggaaucugagugcguguguaugaaugguuccugcuuuacuauuaugaccgaugggcccucaaacaaagccgcgaguuacaagaucuucaagauugagaaaggaaagguaacaaaaagcauagaacucaaugcaccuaacuuuuauuacgaggaauguuccugcuacccagacaccggcaucguuaugugugugugcagggauaauuggcauggcucuaaccggcccugggucagcuucaaucaggaccuggauuaucaaauuggguacaucugcucaggaguguuuggugacaacccucgcccaaaggauggcgaggggaguuguaauccggugacggucgacggagccaacggcguuaaagguuucuccuauaaguacgggaauggcguguggaucggaagaacuaaaagcaacaggcugcggaagggcuuugagaugauuugggaccccaauggguggacaaacaccgauucugacuucucaguaaagcaggauguggucgcuauaacugacuggaguggauauagcgguuccuuugugcagcacccugaacucacaggcuuagauugcauccgcccauguuucuggguugagcuggugcgagggcuucccagagaaaauaccacgauuuggaccucuggaucgagcaucuccuucugcggcgucaacucagacacagccaacuggaguuggccugauggugcagaguugccauuuacuauugacaaauga

SEQ ID NO: 149274 - RNA, 1413 nt, Artificial Sequence
  derived and/or modified CDS sequence (opt3) from neuraminidase__InfluenzaA__AET84440
augaaccccaaucagaagaucauuaccauaggcagcaucuccauugccaucgggauuaucucucugaugcuccaaauaggaaacaucauuucaaucugggcuagucacagcauucagacagguucccagaauaacacuggcaucugcaaucagagaauaauuacguacgagaacucuaccugggugaaucauacauaugucaacaucaauaacacuaauguuguggcaggggaagacaaaaccucgguaacacuugccggaaacucaagccuguguaguauuuccggcugggcgaucuacaccaaggauaauucuaucaggauugguagcaaaggggacguguucgucauacgggagccuuuuaucuccugcucacacuuggaaugucgcacuuucuuuuuaacacaaggagcucugcuaaacgauaagcauaguaauggcaccgugaaagaccgaagcccauaucgugcccucaugucuugcccgcugggcgaggcacccuccccuuacaacucaaaguucgaaagcguugccuggagugcuucugcaugucacgaugggaugggauggcuuacgauugguaucuccggcccagacaacggggccguggcuguccugaaguauaauggaauaauuacugagaccaucaaaagcuggaagaaacagaucuugagaacacaggagucggaaugcguguguaugaacggcucuugcuuuacuauuaugaccgauggucccuccaauaaggccgcgucauacaaaaucuucaagauugagaaggggaaaguaacaaagaguauagaacucaacgcaccuaauuuuuauuacgaggaguguagcugcuacccagacaccggaaucguuaugugugugugcagggauaacuggcauggcuccaaucggcccugggucucuuucaaccagaaucuggacuaucaaauuggcuacaucugcagcgggguguuuggagauaacccucgcccaaaagacggugaaggcucauguaauccggugacggucgauggggccaacggaguuaagggcuucaguuauaaauacgguaaugggguguggaucggcagaacuaaguccaacaggcugcggaaaggauuugagaugauuugggaccccaauggcuggacaaacaccgacagcgauuucucuguaaagcaggacguggucgcuauaacugauuggucaggguauagugguagcuuugugcagcacccugaacucacaggauuagacugcauccgcccauguuucuggguugagcuggugcgaggccuucccagagaaaacaccacgauuuggaccuccgggucuucgaucagcuucugcggagucaauuccgauacagccaacuggucauggccugacggcgcagaguugccauuuacuauugauaaguga

SEQ ID NO: 149275 - RNA, 1413 nt, Artificial Sequence
  derived and/or modified CDS sequence (opt3) from neuraminidase__InfluenzaA__AET84451
augaaccccaaucagaagaucauuaccauaggcagcaucuccauugccaucgggauuaucucucugauacuccaaaucggaaacauuaucucaauuugggcuagucacagcauccagacagguucccagaaucauacuggcauaugcaaccagagaauuaucacguacgaaaauucuaccugggugaacaauacauaugucaacauuaauaacacuaauguuguggcagagaaagacaagaccucgguaacacuugccgggaacucaagccuguguaguaucuccggaugggcgaucuacaccaaagauaauucuauuaggauaggcagcaagggugacguguucgucauccgggagccuuuuauuuccugcucacacuuggaaugucgcacuuucuuuuuaacaaaaggggcucugcuaaacgauaagcauaguaauggaaccgugacggaccgaagcccauaucgugcccucaugucuugcccgcugggcgaggcacccuccccuuacaacucaagauucgaaagcguugccuggagugcuucugcaugucacgauggcaugggguggcuuacuaucggaauauccgguccagacaacggcgccguggcuguccugaaguauaaugggauuaucaccgagacaaucaaaagcuggaagaaaaggauuuugcggacucaagagucggaaugcguguguaugaacggaucuugcuuuaccaucaugacagauggccccuccaauggugccgcgucauacaagauuuucaaaauagagaaggggaagguaaccaaaacgaucgaacucaacgcaccuaauuuucauuaugaggaguguaguugcuacccagacacuggaacaguuaugugugugugccgcgauaacuggcacggcagcaauagacccugggucuccuucaaccagaaucuggacuaccagauuggcuauaucugcucugggguguuuggagauaacccuaggccaaaggacggugaaggcagcuguaauccggugaccgucgauggggccgacggaguuaaaggcuucucauacaaguaugguaacgggguguggaucggccggacuaaaaguaaucgccugcgaaagggauuugagaugauuugggaccccaacggcuggacaaauaccgauuccgacuucagcguaaaacaggauguggucgcuauaacggacuggucuggguacucaggaaguuuugugcaacacccugaacucaccgguuuagauugcaucagaccauguuucuggguugagcuggugaggggccuuccccgggaaaacacaacuauuuggaccagcggguccucuaucucguucugcggagucaacagcggcacagccaauugguccuggccugacggugcagaguugccauuuacuauugauaaguga

SEQ ID NO: 149276 - RNA, 1410 nt, Artificial Sequence; identical to SEQ ID NO: 144786
  derived and/or modified CDS sequence (opt3) from neuraminidase__InfluenzaA__AEV53421

SEQ ID NO: 149277 - RNA, 1410 nt, Artificial Sequence; identical to SEQ ID NO: 144786
  derived and/or modified CDS sequence (opt3) from neuraminidase__InfluenzaA__AEV53423

SEQ ID NO: 149278 - RNA, 1410 nt, Artificial Sequence; identical to SEQ ID NO: 146248
  derived and/or modified CDS sequence (opt3) from neuraminidase__InfluenzaA__AEV53425

SEQ ID NO: 149279 - RNA, 1410 nt, Artificial Sequence; identical to SEQ ID NO: 144786
  derived and/or modified CDS sequence (opt3) from neuraminidase__InfluenzaA__AEV53427

SEQ ID NO: 149280 - RNA, 1410 nt, Artificial Sequence; identical to SEQ ID NO: 146248
  derived and/or modified CDS sequence (opt3) from neuraminidase__InfluenzaA__AEV53429

SEQ ID NO: 149281 - RNA, 1410 nt, Artificial Sequence
  derived and/or modified CDS sequence (opt3) from neuraminidase__InfluenzaA__AEV53431
augaaccccaaucagaagaucauuaccauaggcagcgugugcaugacaaucgggauggccaaccugauucuccaaaucggaaauauuaucuccauauggaucucucacucaauucagcuugguaaccagaaucagaucgagacuuguaaccaaagugucauuacguacgaaaauaacaccuggguuaaucagacauaugugaacaucagcaauacuaacuucgcugcaggccaguccguagugccugucaaacuggccggaaauucuucguugugcccagugucagggugggcgauauacagcaaggacaacaguauuagaaucggcuccaaaggugauguuuuugugauuagggagccguucaucucuuguagccccuuagaaugccggaccuuuuuccugacacagggggcucuacucaaugacaagcauuccaacggaaccaucaaagaucgcucaccuuaucgaacucugaugaguuguccaauuggcgagguccccagcccuuacaacucucguuuugaauccguggccuggucagcaagcgccugccacgacggcauaaauuggcuuacaaucgggauuaguggaccagauaacggugcuguagcaguucugaaguauaauggcaucauaaccgacacgauuaagucuuggagaaacaauaucuugaggacucaagaguccgagugugccugcgugaacgggagcuguuucaccgucaugacagauggacccucggacggccaggcuucuuacaaaaucuuucggauugaaaaggguaaaaucgugaaguccguggagaugaaugccccuaacuaucauuacgaagagugcucauguuacccagauaguagcgagauuacuugcgucugccgcgacaauuggcacggguccaacagaccguggguuucuuucaaucagaaccucgaauaucagauaggauacaucuguagcggcauuuuuggcgauaaucccaggccuaacgacaaaaccgggucaugcggaccagugaguuccaauggugcgaacggcguaaagggguucagcuuuaaguauggaaacggcguguggaucggucggacaaaaucuaucucaagucgcaauggguucgagaugauuugggaucccaacggcuggaccggaacggacaauaacuuuagcauaaagcaagacaucgucggcauuaaugaaugguccggguacucuggaucguucgugcagcauccugagcugacuggucuggauuguauccgaccaugcuucuggguugaacucauuagaggcaggcccaaagagaacacaaucuggaccagcggguccucaauaaguuuuuguggagucaauucuggcacuguggguuggagcuggccggacggggcagaguuaccuuucacaaucgauaaguga

SEQ ID NO: 149282 - RNA, 1410 nt, Artificial Sequence; identical to SEQ ID NO: 144786
  derived and/or modified CDS sequence (opt3) from neuraminidase__InfluenzaA__AEV53435

SEQ ID NO: 149283 - RNA, 1410 nt, Artificial Sequence
  derived and/or modified CDS sequence (opt3) from neuraminidase__InfluenzaA__AEV53437
augaaccccaaucagaagaucauuaccauaggcagcgugugcaugacaaucgggauggccaaccugauucuccaaaucggaaauauuaucuccauauggaucucucacucaauucagcuugguaaccagaaucagaucgagacuuguaaccaaagugucauuacguacgaaaauaacaccuggguuaaucagacauaugugaacaucagcaauacuaacuucgcugcaggccaguccguagugucugucaaacuggccggaaauucgucauugugcccugugagcggaugggcgauauacaguaaggacaacuccauuagaaucggcucuaaaggugauguuuuugugauuagggagccauucaucagcuguuccccguuagaaugccggaccuuuuuccugacacagggggcucuacucaaugacaagcauucaaacggaaccaucaaagaucgcagucccuaucgaacucugaugagcuguccuauuggcgaggucccaucucccuacaacucccguuuugaaucaguggccuggagcgcaagugccugccacgacggcauaaauuggcuuacaaucgggauuucuggaccugauaacggugcuguagcaguucugaaguauaauggcaucauaaccgacacgauuaaguccuggagaaacaauacuuugaggacccaagagagcgagugugccugcgugaacgggucguguuucacagucaugacugauggaccaucugacggccaggcuuccuacaaaaucuuucggaucgaaaaggguaaaauugugaagucaguggagaugaaugcccccaacuaucauuacgaagagugcaguuguuacccugauagcuccgagauuaccugcgucugccgcgacaauuggcacgggucuaacagaccauggguuagcuucaaucagaaccucgaauaucagaucggauacauauguucaggcaucuuuggcgauaauccgaggcccaacgacaaaacagggaguugcggaccuguguccagcaauggugcgaacggcguaaagggguucucuuuuaaguauggaaacggcguguggauuggucggaccaaaucaaucaguagccgcaauggguucgagaugaucugggauccaaacggcuggacgggaacugacaauaacuuuuccauuaagcaagacauagucggcaucaaugaauggucuggguacucggggagcuucgugcagcaucccgagcugacaggucuggauuguauucgaccuugcuucuggguugaacucaucagaggcaggccaaaagagaacaccauuuggacuuccgggucaaguaucucuuuuuguggagugaauagcgacacagucggcugguccuggcccgauggugcagaguuaccguucaccauagacaaguga

SEQ ID NO: 149284 - RNA, 1410 nt, Artificial Sequence; identical to SEQ ID NO: 144786
  derived and/or modified CDS sequence (opt3) from neuraminidase__InfluenzaA__AEV53439

SEQ ID NO: 149285 - RNA, 1410 nt, Artificial Sequence; identical to SEQ ID NO: 144786
  derived and/or modified CDS sequence (opt3) from neuraminidase__InfluenzaA__AEV53441

SEQ ID NO: 149286 - RNA, 1410 nt, Artificial Sequence; identical to SEQ ID NO: 144786
  derived and/or modified CDS sequence (opt3) from neuraminidase__InfluenzaA__AEV53443

SEQ ID NO: 149287 - RNA, 1410 nt, Artificial Sequence
  derived and/or modified CDS sequence (opt3) from neuraminidase__InfluenzaA__AEV53445
augaaccccaaucagaagaucauuaccauaggcagcgugugcaugacaaucgggauggccaaccugauucuccaaaucggaaauauuaucuccauauggaucucucacucaauucagcuugguaaccagaaucagaucgagacuuguaaccaaagugucauuacguacgaaaauaacaccuggguuaaucagacauaugugaacaucagcaauacuaacuucgcugcaggccaguccguagugucugucaaacuggccggaaauucgucauugugcccugugagcggaugggcgauauacaguaaggacaacuccauuagaaucggcucuaaaggugauguuuuugugauuagggagccauucaucagcuguuccccguuagaaugccggaccuuuuuccugacacagggggcucuacucaaugacaagcauucaaacggaaccaucaaagaucgcagucccuaucgaacucugaugagcuguccuauuggcgaggucccaucucccuacaacucccguuuugaaucaguggccuggagcgcaagugccugccacgacggcauaaauuggcuuacaaucgggauuucuggaccugauaacggugcuguagcaguucugaaguauaauggcaucauaaccgacacgauuaaguccuggagaaacaauaucuugaggacucaagagagcgagugugccugcgugaacgggucguguuucaccgucaugacagauggaccaucugacggccaggcuuccuacaaaaucuuucggauugaaaaggguaaaaucgugaagucaguggagaugaaugcccccaacuaucauuacgaagagugcaguuguuacccugauagcuccgagauuacuugcgucugccgcgacaauuggcacgggucuaacagaccauggguuagcuucaaucagaaccucgaauaucagauaggauacaucuguucaggcauuuuuggcgauaauccgaggcccaacgacaaaaccgggaguugcggaccuguguccagcaauggugcgaacggcguaaagggguucucuuuuaaguauggaaacggcguguggaucggucggacaaaaucaaucaguagccgcaauggguucgagaugauuugggauccaaacggcuggaccggaacggaccauaauuuuuccauaaagcaagacaucgucggcauuaacgaauggucuggguacucggggagcuucgugcagcaccccgagcugacuggucuggauuguauccgaccuugcuucuggguugaacucauuagaggcaggccaaaagagaauacaaucuggaccuccgggucaaguauaucuuuuuguggagugaacagcgacacugucggcugguccuggcccgauggugcagaguuaccguucacaaucgacaaguga

SEQ ID NO: 149288 - RNA, 1410 nt, Artificial Sequence; identical to SEQ ID NO: 144786
  derived and/or modified CDS sequence (opt3) from neuraminidase__InfluenzaA__AEV53447

SEQ ID NO: 149289 - RNA, 1410 nt, Artificial Sequence; identical to SEQ ID NO: 146688
  derived and/or modified CDS sequence (opt3) from neuraminidase__InfluenzaA__AEV53449

SEQ ID NO: 149290 - RNA, 1410 nt, Artificial Sequence
  derived and/or modified CDS sequence (opt3) from neuraminidase__InfluenzaA__AEV53451
augaaccccaaucagaagaucauuaccauaggcagcgugugcaugacaaucgggauggccaaccugauucuccaaaucggaaauauuaucuccauauggaucucucacucaauucagcuugguaaccagaaucagaucgagacuuguaaccaaagugucauuacguacgaaaauaacaccuggguuaaucagacauaugugaacaucagcaauacuaacuucgcugcaggccaguccguagugucugucaaacuggccggaaauucgucauugugcccugugagcggaugggcgauauacaguaaggacaacuccauuagaaucggcucuaaaggugauguuuuugugauuagggagccauucaucagcuguuccccguuagaaugccggaccuuuuuccugacacagggggcucuacucaaugacaagcauucaaacggaaccaucaaagaucgcagucccuaucgaacucugaugagcuguccuauuggcgaggucccaucucccuacaacucccguuuugaaucaguggccuggagcgcaagugccugccacgacggcauaaauuggcuuacaaucgggauuucuggaccugauaacggugcuguagcaguucugaaguauaauggcaucauaaccgacacgauuaaguccuggagaaacaauaucuugaggacucaagagagcgagugugccugcgugaacgggucguguuucaccgucaugacagauggaccaucugacggccaggcuuccuacaaaaucuuuaagauugaaaaagguaagaucgugaaaucaguggagaugaaugcccccgauuaucauuacgaagagugcaguuguuacccugacagcuccgagauuacuugcgucugccgggauaacuggcacgggucuaaucgcccauggguuagcuucaaccagaaucucgaauaucagauaggauacaucuguucaggcauuuuuggcgacaacccgagacccaaugauaagaccgggaguugcggaccuguguccagcaacggugcgaauggcguaaagggguucucuuuuaaauauggaaacggcguguggaucgguaggacaaagucaaucaguagccggaacggguucgagaugauuugggacccaaauggcuggaccggaacggacaacaauuuuuccauaaaacaagauaucgucggcauuaacgaauggucuggguacucggggagcuucgugcagcaucccgagcugacuggucuggacuguauccgcccuugcuucuggguugaacucauucgaggcagaccaaaggagaauacaaucuggaccuccgggucaaguauaucuuuuuguggagugaacagcgauacugucggcugguccuggcccgacggugcagaguuaccguucacaaucgauaaauga

SEQ ID NO: 149291 - RNA, 1410 nt, Artificial Sequence; identical to SEQ ID NO: 144786
  derived and/or modified CDS sequence (opt3) from neuraminidase__InfluenzaA__AEV53453

SEQ ID NO: 149292 - RNA, 1410 nt, Artificial Sequence
  derived and/or modified CDS sequence (opt3) from neuraminidase__InfluenzaA__AEV53455
augaaccccaaucagaagaucauuaccauaggcagcgugugcaugacaaucgggauggccaaccugauucuccaaaucggaaauauuaucuccauauggaucucucacucaauucagcuugguaaccagaaucagaucgagacuuguaaccaaagugucauuacguacgaaaauaacaccuggguuaaucagacauaugugaacaucagcaauacuaacuucgcugcaggccaguccguagugucugucaaacuggccggaaauucgucauugugcccugugagcgggugggcgauauacaguaaggacaacuccauuagaaucggcucuaaaggugauguuuuugugauuagggagccauucaucagcuguuccccguuagaaugccggaccuuuuuccugacacagggggcucuacucaaugacaagcauucaaacggaaccaucaaagaucgcagucccuaucgaacucugaugagcuguccuauuggcgaggucccaucucccuacaacucccguuuugaaucaguggccuggagcgcaagugccugccacgacggcauaaauuggcuuacaaucgggauuucuggaccugauaacggugcuguagcaguucugaaguauaauggcaucauaaccgacacgauuaaguccuggagaaacaauaucuugaggacucaagagagcgagugugccugcgugaacgggucguguuucaccgucaugacagauggaccaucugacggccaggcuuccuacaaaaucuuucggauugaaaaggguaaaaucgugaagucaguggagaugaaugcccccaacuaucauuacgaagagugcaguuguuacccugauagcuccgagauuacuugcgucugccgcgacaauuggcacgggucuaacagaccauggguuagcuucaaucagaaccucgaauaucagauaggauacaucuguucaggcauuuuuggcgauaauccgaggcccaacgacaaaaccgggaguugcggaccuguguccagcaauggugcgaacggcguaaagggguucucuuuuaaguauggaaacggcguguggaucggucggacaaaaucaaucaguagccgcaauggguucgagaugauuugggauccaaacggcuggaccgaaacggacaauaacuuuuccauaaagcaagacaucgucggaauuaaugaguggucuggcuacucggggagcuucgugcagcaucccgaacugacuggacugaacuguauccgaccuugcuucuggguugagcucauuagagguaggccaaaagagaauacaaucuggaccuccggcucaaguauaucuuuuuguggggugaacagcgauacugucggaugguccuggcccgacggcgcagaauuaccguucacaaucgauaaguga

SEQ ID NO: 149293 - RNA, 1410 nt, Artificial Sequence
  derived and/or modified CDS sequence (opt3) from neuraminidase__InfluenzaA__AEV53457
augaaccccaaucagaagaucauuaccauaggcagcgugugcaugacaaucgggauggccaaccugauucuccaaaucggaaauauuaucuccauauggaucucucacucaauucagcuugguaaccagaaucagaucgagacuuguaaccaaagugucauuacguacgaaaauaacaccuggguuaaucagacauaugugaacaucagcaauacuaacuucgcugcaggccaguccguagugucugucaaacuggccggaaauucgucauugugcccugugagcggaugggcgauauacaguaaggacaacuccauuagaaucggcucuaaaggugauguuuuugugauuagggagccauucaucagcuguuccccguuagaaugccggaccuuuuuccugacacagggggcucuacucaaugacaagcauucaaacggaaccaucaaagaucgcagucccuaucgaacucugaugagcuguccuauuggcgaggucccaucucccuacaacucccguuuugaaucaguggccuggagcgcaagugccugccacgacggcauaaauuggcuuacaaucgggauuucuggaccugauaacggugcuguagcaguucugaaguauaauggcaucauaaccgacacgauuaaguccuggagaaacaauaucuugaggacucaagagagcgagugugccugcgugaacgggucguguuucaccgucaugacagauggaccaucugacggccaggcuuccuacaaaaucuuucggguggaaaaggguaaaauugugaagucagucgagaugaaugcccccaacuaucauuacgaagagugcaguuguuacccugauagcuccgagaucacuugcguuugccgcgacaauuggcacgggucuaacagaccaugggugagcuucaaucagaaccucgaauaucagauuggauacauauguucaggcaucuuuggcgauaauccgaggcccaacgacaaaaccgggaguugcggaccuguauccagcaauggugcgaacggcgugaagggguucucuuuuaaguauggaaacggcgucuggauuggucggacaaaaucaaucaguagccgcaauggguucgagaugaucugggauccaaacggcuggaccggaacggacaauaacuuuuccauuaagcaagacauagugggcaucaaugaauggucuggguacucggggagcuucguucagcaucccgagcugacuggucuggauuguauucgaccuugcuucuggguggaacucaucagaggcaggccaaaagagaacacaauuuggaccuccgggucaaguaucucuuuuuguggagucaauagcgacacugugggcugguccuggcccgauggugcagaguuaccguucacaauagacaaguga

SEQ ID NO: 149294 - RNA, 1410 nt, Artificial Sequence
  derived and/or modified CDS sequence (opt3) from neuraminidase__InfluenzaA__AEV53459
augaaccccaaucagaagaucauuaccauaggcagcgugugcaugacaaucgggauggccaaccugauucuccaaaucggaaauauuaucuccauauggaucucucacucaauucagcuugguaaccagaaucagaucgagacuuguaaccaaagugucauuacguacgaaaauaacaccuggguuaaucagacauaugugaacaucagcaauacuaacuucgcugcaggccaguccguagugucugucaaacuggccggaaauucgucauugugcccugugagcgggugggcgauauacaguaaggacaacuccauuagaaucggcucuaaaggugauguuuuugugauuagggagccauucaucagcuguuccccguuagaaugccggaccuuuuuccugacacagggggcucuacucaaugacaagcauucaaacggaaccaucaaagaucgcagucccuaucgaacucugaugagcuguccuauuggcgaggucccaucucccuacaacucccguuuugaaucaguggccuggagcgcaagugccugccacgacggcauaaauuggcuuacaaucgggauuucuggaccugauaacggugcuguagcaguucugaaguauaauggcaucauaaccgacacgauuaaguccuggagaaacaauaucuugaggacucaagagagcgagugugccugcgugaacgggucguguuucaccgucaucacagauggaccaucugacggccaggcuuccuacaaaauuuuucggaucgaaaaggguaaaauugugaagucaguggagaugaaugcccccaacuaucauuacgaagagugcaguuguuacccugauagcuccgagauaacuugcgucugccgcgacaauuggcacgggucuaacagaccauggguuagcuucaaucagaaccucgaauaucagaucggauacauuuguucaggcaucuuuggcgauaauccgaggcccaacgacaaaaccgggaguugcggaccuguguccagcaauggugcgaacggcguaaagggguucucuuuuaaguauggaaacggcguguggaucggucggacaaaaucaauuaguagccgcaauggguucgagaugauaugggauccaaacggcuggaccgaaacggacaauaacuuuuccaucaagcaagacauugucggaaucaaugaguggucuggcuacucggggagcuucgugcagcaucccgaacugacuggacugaacuguauucgaccuugcuucuggguugagcucaucagagguaggccaaaagagaauacaauauggaccuccggcucaaguaucucuuuuuguggggugaacagcgauacugucggaugguccuggcccgacggcgcagaauuaccguucacaauugauaaguga

SEQ ID NO: 149295 - RNA, 1410 nt, Artificial Sequence; identical to SEQ ID NO: 144786
  derived and/or modified CDS sequence (opt3) from neuraminidase__InfluenzaA__AEV53461

SEQ ID NO: 149296 - RNA, 1410 nt, Artificial Sequence
  derived and/or modified CDS sequence (opt3) from neuraminidase__InfluenzaA__AEV53463
augaaccccaaucagaagaucauuaccauaggcagcgugugcaugacaaucgggauggccaaccugauucuccaaaucggaaauauuaucuccauauggaucucucacucaauucagcuugagaaccagaaucagaucgaaacuuguaaccaaagugucauuacguacgagaauaacaccuggguuaaucagacauaugugaacaucagcaauacuaacuucgcugcaggucaguccguagugucugucaaacuggccggcaauucgucauugugcccugugagcgggugggcgauauacaguaaggacaacuccauuagaaucggaucuaaaggcgauguuuuugugauuagggaaccauucaucagcuguuccccguuagagugccggaccuuuuuccugacacagggugcucuacucaaugacaagcauucaaacgggaccaucaaagaucgcagucccuaucgaacucugaugagcuguccuauuggagaagucccaucucccuacaacucccguuuugagucaguggccuggagcgcaagugccugccacgacggcauaaauuggcuuacaaucggcauuucugggccugauaacggagcuguagcaguucugaaguauaaugguaucauaaccgacacgauuaaguccuggagaaacaauaucuugaggacucaagagagcgaaugugccugcaucaacggcucguguuucaccgugaugacagaugggccaucugacggacaggcuuccuacaaaauuuuucggaucgagaagggcaaaauugucaagucaguggaaaugaaugcccccaacuaucauuacgaggagugcaguuguuacccugauagcuccgaaauaacuugcgugugccgcgacaauuggcacgguucuaacagaccaugggucagcuucaaucagaaccucgaguaucagaucggguacauuuguucaggaaucuuuggcgauaauccgaggcccaacgacaaaaccggcaguugcgggccuguuuccagcaauggagcgaacggugugaagggcuucucuuuuaaguaugggaacggaguauggaucggccggacaaaaucaauuaguagccgcaaugguuucgaaaugauaugggauccaaacggguggaccggcacggacaauaacuuuuccaucaagcaagacauugugggaaucaaugaguggucuggcuacucggggagcuucguccagcaucccgaacugacuggacuggauuguauucgaccuugcuucuggguggagcucaucagagguaggccaaaagagaacacaauauggaccuccggcucaaguaucucuuuuugugggguuaauagcgacacugugggaugguccuggcccgauggcgcagaauuaccguucacaauugacaaguga

SEQ ID NO: 149297 - RNA, 1410 nt, Artificial Sequence
  derived and/or modified CDS sequence (opt3) from neuraminidase__InfluenzaA__AEV53465
augaaccccaaucagaagaucauuaccauaggcagcgugugcaugacaaucgggauggccaaccugauucuccaaaucggaaauauuaucuccauauggaucucucacucaauucagcuugguaaccagaaucagaucgagacuuguaaccaaagugucauuacguacgaaaauaacaccuggguuaaucagacauaugugaacaucagcaauacuaacuucgcugcaggccaguccguagugucugucaaacuggccggaaauucgucauugugcccugugagcgggugggcgauauacaguaaggacaacuccauuagaaucggcucuaaaggugauguuuuugugauuagggagccauucaucagcuguuccccguuagaaugccggaccuuuuuccugacacagggggcucuacucaaugacaagcauucaaacggaaccaucaaagaucgcagucccuaucgaacucugaugagcuguccuauuggcgaggucccaucucccuacaacucccguuuugaaucaguggccuggagcgcaagugccugccacgacggcauaaauuggcuuacaaucgggauuucuggaccugauaacggugcuguagcaguucugaaguauaauggcaucauaaccgacacgauuaaguccuggagaaacaauaucuugaggacucaagagagcgagugugccugcgugaacgggucguguuucaccgucaugacagauggaccaucugaccggcaggcuuccuacaaaaucuuucgcauugaaaagggcaaaaucgugaagucaguggagaugaaugcccccaacuaucauuacgaagagugcaguuguuacccugauagcuccgagauuacuugcgucugcagagacaauuggcacgguucuaacaggccauggguuagcuucaaucagaaccucgaauaucagauaggguacaucuguucaggaauuuuuggcgauaauccgcggcccaacgacaaaaccggcaguugcgggccuguguccagcaauggagcgaacgguguaaagggcuucucuuauaaguacgggaacggaguguggaucggccgcacaaaaucaaucaguagccgaaaugguuuugagaugauuugggauccaaacggguggaccggcacggacaauaacuucuccauaaagcaagacaucgucggaauuaaugaauggucuggcuauucggggagcuuugugcagcaucccgagcugacuggacuggauuguaucagaccuugcuucuggguugaacucauuaggggucggccaaaagagaacacaaucuggaccuccggcucaaguauaucuuucuguggggugaauagcgacacugucggaugguccuggcccgauggcgcagaguuaccguuuacaaucgacaaguga

SEQ ID NO: 149298 - RNA, 1410 nt, Artificial Sequence; identical to SEQ ID NO: 146587
  derived and/or modified CDS sequence (opt3) from neuraminidase__InfluenzaA__AEV53467

SEQ ID NO: 149299 - RNA, 1410 nt, Artificial Sequence; identical to SEQ ID NO: 146587
  derived and/or modified CDS sequence (opt3) from neuraminidase__InfluenzaA__AEV53469

SEQ ID NO: 149300 - RNA, 1410 nt, Artificial Sequence; identical to SEQ ID NO: 144786
  derived and/or modified CDS sequence (opt3) from neuraminidase__InfluenzaA__AEV53471

SEQ ID NO: 149301 - RNA, 1410 nt, Artificial Sequence; identical to SEQ ID NO: 144786
  derived and/or modified CDS sequence (opt3) from neuraminidase__InfluenzaA__AEV53473

SEQ ID NO: 149302 - RNA, 1410 nt, Artificial Sequence; identical to SEQ ID NO: 144786
  derived and/or modified CDS sequence (opt3) from neuraminidase__InfluenzaA__AEV53475

SEQ ID NO: 149303 - RNA, 1410 nt, Artificial Sequence; identical to SEQ ID NO: 144786
  derived and/or modified CDS sequence (opt3) from neuraminidase__InfluenzaA__AEV53477

SEQ ID NO: 149304 - RNA, 1410 nt, Artificial Sequence; identical to SEQ ID NO: 144786
  derived and/or modified CDS sequence (opt3) from neuraminidase__InfluenzaA__AEV53479

SEQ ID NO: 149305 - RNA, 1410 nt, Artificial Sequence; identical to SEQ ID NO: 144786
  derived and/or modified CDS sequence (opt3) from neuraminidase__InfluenzaA__AEV53481

SEQ ID NO: 149306 - RNA, 1410 nt, Artificial Sequence; identical to SEQ ID NO: 144786
  derived and/or modified CDS sequence (opt3) from neuraminidase__InfluenzaA__AEV53483

SEQ ID NO: 149307 - RNA, 1410 nt, Artificial Sequence
  derived and/or modified CDS sequence (opt3) from neuraminidase__InfluenzaA__AEV53485
augaaccccaaucagaagaucauuaccauaggcagcgugugcaugacaaucgggauggccaaccugauucuccaaaucggaaauauuaucuccauaugggucucucacucaauccagcuugguaaccagaaucagauugagacuuguaaccaaaguguuaucacguacgaaaauaacaccugggugaaucagacauauguaaacauuagcaauacuaacuucgcugcaggccaguccguggucucugugaaacuggccggaaauucgucauugugcccuguuagcggaugggcgaucuacaguaaggacaacuccauaagaauuggcucuaaaggugauguguuugucaucagggagccauucauuagcuguuccccguuagaaugccggaccuuuuuccugacacagggggcucuacucaaugacaagcauucaaacggaaccaucaaagaucgcagucccuaucgaacucugaugagcuguccuaucggcgaggugccaucucccuacaacucccguuuugaaucaguagccuggagcgcaagugccugccacgacggcauuaauuggcuuacaauagggaucucuggaccugauaacggugcuguugcagugcugaaguauaauggcauuaucaccgacacgauaaaguccuggagaaacaauauuuugaggacucaagagagcgagugugccugcgucaacgggucguguuucaccgugaugacagauggaccaucugacggccaggcuuccuacaaaaucuuucggaucgaaaaggguaaaauugugaagucagucgagaugaaugcccccaacuaucauuacgaagagugcaguuguuacccugauagcuccgagaucacuugcguuugccgcgacaauuggcacgggucuaacagaccaugggugagcuucaaucagaaccucgaauaucagauuggauacauauguucaggcaucuuuggcgauaauccgaggcccaacgacaaaaccgggaguugcggaccuguauccagcaauggugcgaacggcgugaagggguucucuuuuaaguauggaaacggcgucuggauuggucggacaaaaucaaucaguagccgcaauggguucgagaugaucugggauccaaacggcuggaccggaacggacaauaacuuuuccauuaagcaagacauagugggcaucaaugaauggucuggguacucggggagcuucguucagcaucccgagcugacuggucuggauuguauucgaccuugcuucuggguggaacucaucagaggcaggccaaaagagaacacaauuuggaccuccgggucaaguaucucuuuuuguggagucaauagcgacacugugggcugguccuggcccgauggugcagaguuaccguucacaauagacaaguga

SEQ ID NO: 149308 - RNA, 1410 nt, Artificial Sequence; identical to SEQ ID NO: 146587
  derived and/or modified CDS sequence (opt3) from neuraminidase__InfluenzaA__AEV53487

SEQ ID NO: 149309 - RNA, 1410 nt, Artificial Sequence; identical to SEQ ID NO: 145804
  derived and/or modified CDS sequence (opt3) from neuraminidase__InfluenzaA__AEV53489

SEQ ID NO: 149310 - RNA, 1410 nt, Artificial Sequence
  derived and/or modified CDS sequence (opt3) from neuraminidase__InfluenzaA__AEV53491
augaaccccaaucagaagaucauuaccauaggccuggugugcaugacaaucgggauggccaaccucauucuucaaaucggaaauauuaucagcauauggaucucccacucuauucagcuggguaaccagaaucagaucgagacuuguaaccaaucagucauuacguacgaaaauaacaccuggguuaaucagacauaugugaacaucaguaauacuaacuucgcugcaggccagagcguaguguccgucaaauuggccggaaauucuucguuaugcccugugucagggugggcgauauacagcaaggacaacaguauuagaaucggcuccaaaggugauguuuuugugauuagggagccauucaucucuuguagcccgcuggaaugccggaccuuuuuccuaacacagggggcucuccugaaugacaagcauuccaacggaaccaucaaagaucgcucacccuaucgaacucuuaugaguuguccuauuggcgaggucccaagccccuacaacucucguuuugaauccguggccuggucagcaagcgccugccacgacggcauaaauuggcugacaaucgggauuaguggaccugauaacggugcuguagcaguuuugaaguauaauggcaucauaaccgacacgauuaagucuuggagaaacaauauccucaggacucaagaguccgagugugccugcgugaacgggagcuguuucaccgucaugacagauggaccaucggacggccaggcuucuuacaaaaucuuucggauugaaaaggguaaaaucgugaaguccguggagaugaaugcccccaacuaucauuacgaagagugcucauguuacccugauaguagcgagauuacuugcgucugccgcgacaauuggcacggguccaacagaccauggguuucuuucaaucagaaccuggaauaucagauaggauacaucuguagcggcauuuuuggcgauaauccgaggcccaacgacaaaaccgggucaugcggaccugugaguuccaauggugcgaacggcguaaagggguucagcuuuaaguauggaaacggcguguggaucggucggacaaaaucuaucucaagucgcaauggguucgagaugauuugggauccaaacggcuggaccggaacggacaauaacuuuagcauaaagcaagacaucgucggcauuaaugaaugguccggguacucuggaucguucgugcagcaucccgagcugacuggucucgauuguauccgaccuugcuucuggguugaauuaauuagaggcaggccaaaagagaacacaaucuggaccagcggguccucaauaaguuuuuguggagucaauucugacacugugggcuggagcuggcccgauggugcagagcugccguucacaaucgacaaguga

SEQ ID NO: 149311 - RNA, 1410 nt, Artificial Sequence; identical to SEQ ID NO: 144786
  derived and/or modified CDS sequence (opt3) from neuraminidase__InfluenzaA__AEV53493

SEQ ID NO: 149312 - RNA, 1410 nt, Artificial Sequence; identical to SEQ ID NO: 146248
  derived and/or modified CDS sequence (opt3) from neuraminidase__InfluenzaA__AEV53495

SEQ ID NO: 149313 - RNA, 1410 nt, Artificial Sequence
  derived and/or modified CDS sequence (opt3) from neuraminidase__InfluenzaA__AEV53497
augaaccccaaucagaagaucauuaccauaggcagcgugugcaugacaaucgggauggccaaccugauucuccaaaucggaaauauuaucuccauauggaucucucacucaauucagcuugagaaccagaaucagaucgaaacuuguaaccaaagugucauuacguacgagaauaacaccuggguuaaucagacauaugugaacaucagcaauacuaacuucgcugcaggucaguccguagugucugucaaucuggccggcaacucgucauugugcccugugagcgggugggcgauauacaguaaagacaauuccauuagaaucggaucuaagggcgauguuuuugugauuagggaaccauucaucagcuguuccccguuagagugccggaccuuuuuccugacacagggugcucuacucaacgacaaacauucaaacgggaccaucaaggaucgcagucccuaucgaacucugaugagcuguccuauuggagaagucccaucucccuacaauucccguuuugagucaguggccuggagcgcaagugccugccacgacggcauaaacuggcuuacaaucggcauuucugggccugauaauggagcuguagcaguucugaaauauaacgguaucauaaccgacacgauuaaguccuggagaaauaacaucuugaggacucaagagagcgaaugugccugcgugaauggcucguguuucaccgucaugacagaugggccaucugacggacaggcuuccuacaagaucuuucggauugagaaaggcaagaucgugaaaucaguggaaaugaacgcccccaauuaucauuacgaggagugcaguuguuacccugauagcuccgaaauuacuugcgucugccgcgacaacuggcacgguucuaauagaccauggguuagcuucaaccagaaucucgaguaucagauaggguacaucuguucaggaauuuuuggcgauaacccgaggcccaaugacaagaccggcaguugcgggccuguguccagcaacggagcgaacgguguaaaaggcuucucuuuuaaguaugggaauggaguguggaucggccggacaaagucaaucaguagccgcaacgguuucgaaaugauuugggauccaaauggguggaccggcacggacaacaauuuuuccauaaaacaagacaucgucggaauuaacgaguggucuggcuacucggggagcuucgugcagcaucccgaacugacuggacuggauuguauccgaccuugcuucuggguugagcucauuagagguaggccaaaggagaauacaaucuggaccuccggcucaaguauaucuuuuuguggggugaacagcgacacugucggaugguccuggcccgauggcgcagaauuaccguucacaaucgacaaauga

SEQ ID NO: 149314 - RNA, 1410 nt, Artificial Sequence; identical to SEQ ID NO: 145804
  derived and/or modified CDS sequence (opt3) from neuraminidase__InfluenzaA__AEV53499

SEQ ID NO: 149315 - RNA, 1410 nt, Artificial Sequence; identical to SEQ ID NO: 144786
  derived and/or modified CDS sequence (opt3) from neuraminidase__InfluenzaA__AEV53501

SEQ ID NO: 149316 - RNA, 1410 nt, Artificial Sequence; identical to SEQ ID NO: 144786
  derived and/or modified CDS sequence (opt3) from neuraminidase__InfluenzaA__AEV53503

SEQ ID NO: 149317 - RNA, 1410 nt, Artificial Sequence; identical to SEQ ID NO: 144786
  derived and/or modified CDS sequence (opt3) from neuraminidase__InfluenzaA__AEV53505

SEQ ID NO: 149318 - RNA, 1410 nt, Artificial Sequence; identical to SEQ ID NO: 144786
  derived and/or modified CDS sequence (opt3) from neuraminidase__InfluenzaA__AEV53507

SEQ ID NO: 149319 - RNA, 1410 nt, Artificial Sequence; identical to SEQ ID NO: 144786
  derived and/or modified CDS sequence (opt3) from neuraminidase__InfluenzaA__AEV53509

SEQ ID NO: 149320 - RNA, 1410 nt, Artificial Sequence; identical to SEQ ID NO: 146248
  derived and/or modified CDS sequence (opt3) from neuraminidase__InfluenzaA__AEV53511

SEQ ID NO: 149321 - RNA, 1410 nt, Artificial Sequence; identical to SEQ ID NO: 146248
  derived and/or modified CDS sequence (opt3) from neuraminidase__InfluenzaA__AEV53513

SEQ ID NO: 149322 - RNA, 1410 nt, Artificial Sequence; identical to SEQ ID NO: 146248
  derived and/or modified CDS sequence (opt3) from neuraminidase__InfluenzaA__AEV53515

SEQ ID NO: 149323 - RNA, 1410 nt, Artificial Sequence
  derived and/or modified CDS sequence (opt3) from neuraminidase__InfluenzaA__AEV53517
augaaccccaaucagagaaucauuaccauaggcagcgugugcaugacaaucgggauggccaaccugauucuccaaaucggaaauauuaucuccauaugggucucucacucaauccagcuugguaaccagaaucagauugagacuuguaaccaaaguguuaucacguacgaaaauaacaccugggugaaucagacauauguaaacauuagcaauacuaacuucgcugcaggccaguccguggucucugugaagcuggccggaaauucgucauugugcccuguuagcggaugggcgaucuacaguaaagacaacuccauaaggauuggcucuaagggugauguguuugucauccgggagccauucauuagcuguuccccguuagaaugccgcaccuuuuuccugacacagggggcucuacucaaugacaaacauucaaacggaaccaucaaggaucgaagucccuaucguacucugaugagcuguccuaucggcgaggugccaucucccuacaacuccagauuugaaucaguagccuggagcgcaagugccugccacgacggcauuaauuggcuuacaauagggaucucuggaccugauaacggugcuguugcagugcugaaauauaauggcauuaucaccgacacgauaaaguccuggaggaacaauauuuugcggacucaagagagcgagugugccugcgucaacgggucguguuucaccgugaugacagauggaccaucugacggccaggcuuccuacaagaucuuucgcaucgaaaaagguaagauugugaaaucagucgagaugaaugcccccaacuaucauuacgaagagugcaguuguuacccugauagcuccgagaucacuugcguuugcagagacaauuggcacgggucuaacaggccaugggugagcuucaaucagaaccucgaauaucagauuggauacauauguucaggcaucuuuggcgauaauccgcggcccaacgacaagaccgggaguugcggaccuguauccagcaauggugcgaacggcgugaaaggguucucuuuuaaguauggaaacggcgucuggauuggucgcacaaagucaaucaguagccgaaauggguucgagaugaucugggauccaaacggcuggaccggaacggacaauaacuuuuccauuaaacaagacauagugggcaucaaugaauggucuggguacucggggagcuucguucagcaucccgagcugacuggucuggauuguauuagaccuugcuucuggguggaacucaucaggggccggccaaaggagaacacaauuuggaccuccgggucaaguaucucuuuuuguggagucaauagcgacacugugggcugguccuggcccgauggugcagaguuaccguucacaauagacaaauga

SEQ ID NO: 149324 - RNA, 1410 nt, Artificial Sequence; identical to SEQ ID NO: 144786
  derived and/or modified CDS sequence (opt3) from neuraminidase__InfluenzaA__AEV53519

SEQ ID NO: 149325 - RNA, 1410 nt, Artificial Sequence; identical to SEQ ID NO: 146248
  derived and/or modified CDS sequence (opt3) from neuraminidase__InfluenzaA__AEV53521

SEQ ID NO: 149326 - RNA, 1410 nt, Artificial Sequence; identical to SEQ ID NO: 146074
  derived and/or modified CDS sequence (opt3) from neuraminidase__InfluenzaA__AEV53523

SEQ ID NO: 149327 - RNA, 1410 nt, Artificial Sequence; identical to SEQ ID NO: 145140
  derived and/or modified CDS sequence (opt3) from neuraminidase__InfluenzaA__AEV53525

SEQ ID NO: 149328 - RNA, 1410 nt, Artificial Sequence; identical to SEQ ID NO: 144786
  derived and/or modified CDS sequence (opt3) from neuraminidase__InfluenzaA__AEV53527

SEQ ID NO: 149329 - RNA, 1410 nt, Artificial Sequence
  derived and/or modified CDS sequence (opt3) from neuraminidase__InfluenzaA__AEV53529
augaaccccaaucagaagaucauuaccauaggcagcgugugcaugacaaucgggauggccaaccugauucuccaaaucggaaauauuaucuccauauggaucucucacucaauucagcuugagaaccagaaucagaucgaaacuuguaaccaaagugucauuacguacgagaauaacaccuggguuaaucagacauaugugaacaucagcaauacuaacuucgcugcaggucaguccguagugucugucaaacuggccggcaauucgucauugugcccugugagcgggugggcgauauacaguaaggacaacuccauuagaaucggaucuaaaggcgauguuuuugugauuagggaaccauucaucagcuguuccccguuagagugccggaccuuuuuccugacacagggugcucuacucaaugacaagcauucaaacgggaccaucaaagaucgcagucccuaucgaacucugaugagcuguccuauuggagaagucccaucucccuacaacucccguuuugagucaguggccuggagcgcaagugccugccacgacggcauaaauuggcuuacaaucggcauuucugggccugauaacggagcuguagcaguucugaaguauaaugguaucauaaccgacacgauuaaguccuggagaaacaauaucuugaggacucaagagagcgaaugugccugcgugaacggcucguguuucaccgucaugacagaugggccaucugacggacaggcuuccuacaaaaucuuucggauugagaagggcaaaaucgugaagucaguggaaaugaaugcccccaacuaucauuacgaggagugcaguuguuacccugauagcuccgaaauuacuugcgucugccgcgacaauuggcacgguucuaacagaccauggguuagcuucaaucagaaccucgaguaucagauaggguacaucuguucaggaauuuuuggcgauaauccgaggcccaacgacaaaaccggcaguugcgggccuguguccagcaauggagcgaacgguguaaagggcuucucuuuuaaguaugggaacggaguguggaucggccggacaaaaucaaucaguagccgcaaugguuucgaaaugauuugggauccaaacggguggaccggcacggacaauaacuuuuccauaaagcaagacaucgucggaauuaaagaguggucuggcuacucggggagcuucgugcagcaucccgaacugacuggacuggauuguauccgaccuugcuucuggguugagcucauuagagguaggccaaaggagaauacaaucuggaccuccggcucaaguauaucuuuuuguggggugaacagcgacacugucggaugguccuggcccgauggcgcagaauuaccguucacaaucgacaaauga

SEQ ID NO: 149330 - RNA, 1410 nt, Artificial Sequence; identical to SEQ ID NO: 146248
  derived and/or modified CDS sequence (opt3) from neuraminidase__InfluenzaA__AEV53531

SEQ ID NO: 149331 - RNA, 1410 nt, Artificial Sequence
  derived and/or modified CDS sequence (opt3) from neuraminidase__InfluenzaA__AEV53533
augaaccccaaucagaagaucauuaccauaggcagcgugugcaugacaaucgggauggccaaccugauucuccaaaucggaaauauuaucuccauauggaucucucacucaauucagcuugguaaccagaaucagaucgagacuuguaaccaaagugucauuacguacgaaaauaacaccuggguuaaucagacauaugugaacaucagcaauacuaacuucgcugcaggccaguccguagugucugucaaacuggccggaaauucgucauugugcccugugagcggaugggcgauauacaguaaggacaacuccauuagaaucggcucuaaaggugauguuuuugugauuagggagccauucaucagcuguuccccguuagaaugccggaccuuuuuccugacacagggggcucuacucaaugacaagcauucaaacggaaccaucaaagaucgcagucccuaucgaacucugaugagcuguccuauuggcgaggucccaucucccuacaacucccguuuugaaucaguggccuggagcgcaagugccugccacgacggcauaaauuggcuuacaaucgggauuucuggaccugauaacggugcuguagcaguucugaaguauaauggcaucauaaccgacacgauuaaguccuggagaaacaauaucuugaggacucaagagagcgagugugccugcgugaacgggucguguuucaccgucaugacagauggaccaucugacggccaggcuuccuacaaaaucuuucggauugaaaaggguaaaaucgugaagucaguggagaugaaugcccccaacuauuacuacgaagagugcaguuguuauccugauagcuccgagauuacuugcgucugccgcgacaauuggcaugggucuaacagaccauggguuagcuucaaucagaaccucgaauaccagauaggauauaucuguucaggcauuuuuggcgauaauccgaggcccaacgacaaaaccgggaguugcggaccuguguccagcaauggugcgaacggcguaaagggguucucuuuuaaguacggaaacggcguguggaucggucggacaaaaucaaucaguagccgcaauggguucgagaugauuugggauccaaacggcuggaccggaacggacaauaacuuuuccauaaagcaagacaucgucggcauuaaugaauggucuggguauucggggagcuucgugcagcaccccgagcugacuggucugaacuguauccgaccuugcuucuggguugaacucauuagaggcaggccaaaagagaauacaaucuggaccuccgggucaaguauaucuuuuuguggagugaacagcgauacugucggcugguccuggcccgacggugcagaguuaccguucacaaucgauaaguga

SEQ ID NO: 149332 - RNA, 1410 nt, Artificial Sequence; identical to SEQ ID NO: 144786
  derived and/or modified CDS sequence (opt3) from neuraminidase__InfluenzaA__AEV53535

SEQ ID NO: 149333 - RNA, 1410 nt, Artificial Sequence; identical to SEQ ID NO: 149307
  derived and/or modified CDS sequence (opt3) from neuraminidase__InfluenzaA__AEV53537

SEQ ID NO: 149334 - RNA, 1410 nt, Artificial Sequence; identical to SEQ ID NO: 144786
  derived and/or modified CDS sequence (opt3) from neuraminidase__InfluenzaA__AEV53539

SEQ ID NO: 149335 - RNA, 1410 nt, Artificial Sequence; identical to SEQ ID NO: 148225
  derived and/or modified CDS sequence (opt3) from neuraminidase__InfluenzaA__AEV53541

SEQ ID NO: 149336 - RNA, 1410 nt, Artificial Sequence; identical to SEQ ID NO: 148225
  derived and/or modified CDS sequence (opt3) from neuraminidase__InfluenzaA__AEV53543

SEQ ID NO: 149337 - RNA, 1410 nt, Artificial Sequence; identical to SEQ ID NO: 146434
  derived and/or modified CDS sequence (opt3) from neuraminidase__InfluenzaA__AEV53545

SEQ ID NO: 149338 - RNA, 1410 nt, Artificial Sequence; identical to SEQ ID NO: 148225
  derived and/or modified CDS sequence (opt3) from neuraminidase__InfluenzaA__AEV53547

SEQ ID NO: 149339 - RNA, 1410 nt, Artificial Sequence; identical to SEQ ID NO: 148225
  derived and/or modified CDS sequence (opt3) from neuraminidase__InfluenzaA__AEV53549

SEQ ID NO: 149340 - RNA, 1410 nt, Artificial Sequence; identical to SEQ ID NO: 148225
  derived and/or modified CDS sequence (opt3) from neuraminidase__InfluenzaA__AEV53551

SEQ ID NO: 149341 - RNA, 1410 nt, Artificial Sequence; identical to SEQ ID NO: 148225
  derived and/or modified CDS sequence (opt3) from neuraminidase__InfluenzaA__AEV53553

SEQ ID NO: 149342 - RNA, 1410 nt, Artificial Sequence; identical to SEQ ID NO: 149307
  derived and/or modified CDS sequence (opt3) from neuraminidase__InfluenzaA__AEV53555

SEQ ID NO: 149343 - RNA, 1410 nt, Artificial Sequence; identical to SEQ ID NO: 145804
  derived and/or modified CDS sequence (opt3) from neuraminidase__InfluenzaA__AEV53557

SEQ ID NO: 149344 - RNA, 1410 nt, Artificial Sequence; identical to SEQ ID NO: 144786
  derived and/or modified CDS sequence (opt3) from neuraminidase__InfluenzaA__AEV53559

SEQ ID NO: 149345 - RNA, 1410 nt, Artificial Sequence; identical to SEQ ID NO: 144786
  derived and/or modified CDS sequence (opt3) from neuraminidase__InfluenzaA__AEV53561

SEQ ID NO: 149346 - RNA, 1410 nt, Artificial Sequence; identical to SEQ ID NO: 146378
  derived and/or modified CDS sequence (opt3) from neuraminidase__InfluenzaA__AEV53563

SEQ ID NO: 149347 - RNA, 1410 nt, Artificial Sequence
  derived and/or modified CDS sequence (opt3) from neuraminidase__InfluenzaA__AEV53565
augaaccccaaucagaagaucauuaccauaggcagcgugugcaugacaaucgggauggccaaccugauucuccaaaucggaaauauuaucuccauauggaucucucacucaauucagcuugguaaccagaaucagaucgagacuuguaaccaaagugucauuacguacgaaaauaacaccuggguuaaucagacauaugugaacaucagcaauacuaacuucgcugcaggccaguccguagugucugucaaacuggccggaaauucgucauugugcccugugaacgggugggcgauauacagcaaggacaauaguauuagaaucggcuccaaaggugauguuuuugugauuagggagccauucaucucuuguagcccguuagaaugccggaccuuuuuccugacacagggggcucuacucaacgacaagcauuccaacggaaccaucaaagaucgcucacccuaucgaacucugaugaguuguccuauuggcgaggucccaagccccuacaauucucguuuugaauccguggccuggucagcaagcgccugccacgacggcauaaacuggcuuacaaucgggauuaguggaccugauaauggugcuguagcaguucugaaguauaacggcaucauaaccgacacgauuaagucuuggagaaauaacaucuugaggacucaagaguccgagugugccugcgugaaugggagcuguuucaccgucaugacagauggaccaucggacggccaggcuucuuacaaaaucuuucggauugaaaaggguaaaaucgugaaguccguggagaugaacgcccccaauuaucauuacgaagagugcucauguuacccugauaguagcgagauuacuugcgucugccgcgacaacuggcacggguccaauagaccauggguuucuuucaaccagaaucucgaauaucagauaggauacaucuguagcggcauuuuuggcgauaacccgaggcccaaugacaaaaccgggucaugcggaccugugaguuccaacggugcgaacggcguaaagggguucagcuuuaaguauggaaauggcguguggaucggucggacaaaaucuaucucaagucgcaacggguucgagaugauuugggauccaaauggcuggaccggaacggacaacaauuuuagcauaaagcaagacaucgucggcauuaacgaaugguccggguacucuggaucguucgugcagcaucccgagcugacuggucuggauuguauccgaccuugcuucuggguugaacucauuagaggcaggccaaaagagaauacaaucuggaccagcggguccucaauaaguuuuuguggagugaacucugacacugucggcuggagcuggcccgauggugcagaguuaccgcugacaaucgacaaguga

SEQ ID NO: 149348 - RNA, 1410 nt, Artificial Sequence
  derived and/or modified CDS sequence (opt3) from neuraminidase__InfluenzaA__AEV53567
augaaccccaaucagaagaucauuaccauaggcagcgugugcaugacaaucgggauggccaaccugauucuccaaaucggaaauauuaucuccauauggaucucucacucaauucagcuugguaaccagaaucagaucgagacuuguaaccaaagugucauuacguacgaaaauaacaccuggguuaaucagacauaugugaacaucagcaauacuaacuucgcugcaggccaguccguagugucugucaaacuggccggaaauucgucauugugcccugugagcgggugggcgauauacaguaaggacaacuccauuagaaucggcucuaaaggugauguuuuugugauuagggagccauucaucagcuguuccccguuagaaugccggaccuuuuuccugacacagggggcucuacucaaugacaagcauucaaacggaaccaucaaagaucgcagucccuaucgaacucugaugagcuguccuauuggcgaggucccaucucccuacaacucccguuuugaaucaguggccuggagcgcaagugccugccacgacggcauaaauuggcuuacaaucgggauuucuggaccugauaacggugcuguagcaguucugaaguauaauggcaucauaaccgacacgauuaaguccuggagaaacaauaucuugaggacucaagagagcgagugugccugcgugaacgggucguguuucaccgucaugacagauggaccaucugacggccaggcuuccuacaaaaucuuucggauugaaaaggguaaaaucgugaagucaguggagaugaaugcccccaacuaucauuacgaagagugcaguuguuacccugauagcuccgagauuacuugcgucugccgcgacaauuggcacgggucuaacagaccauggguuagcuucaaucagaaccucgaauaucagauaggauacaucuguucaggcauuuuuggcgauaauccgaggcccaacgacaaaaccgggaguugcggaccuguguccagcaauggugcgaacggcguaaagggguucucuuuuaaguauggaaacggcgcauggaucggucggacaaaaucaaucaguagccgcaauggguucgagaugauuugggauccaaacggcuggaccgaaacggacaauaacuuuuccauaaagcaagacaucgugggaauuaaugaguggucuggcuacucggggagcuucguccagcaucccgaacugacuggacugaacuguauccgaccuugcuucuggguggagcucauuagagguaggccaaaagagaauacaaucuggaccuccggcucaaguauaucuuuuugugggguuaacagcgauacugugggaugguccuggcccgacggcgccgaauuaccguucacaaucgauaaguga

SEQ ID NO: 149349 - RNA, 1410 nt, Artificial Sequence; identical to SEQ ID NO: 144786
  derived and/or modified CDS sequence (opt3) from neuraminidase__InfluenzaA__AEV53569

SEQ ID NO: 149350 - RNA, 1410 nt, Artificial Sequence; identical to SEQ ID NO: 148225
  derived and/or modified CDS sequence (opt3) from neuraminidase__InfluenzaA__AEV53571

SEQ ID NO: 149351 - RNA, 1410 nt, Artificial Sequence; identical to SEQ ID NO: 148225
  derived and/or modified CDS sequence (opt3) from neuraminidase__InfluenzaA__AEV53573

SEQ ID NO: 149352 - RNA, 1410 nt, Artificial Sequence; identical to SEQ ID NO: 146587
  derived and/or modified CDS sequence (opt3) from neuraminidase__InfluenzaA__AEV53575

SEQ ID NO: 149353 - RNA, 1410 nt, Artificial Sequence
  derived and/or modified CDS sequence (opt3) from neuraminidase__InfluenzaA__AEV53577
augaaccccaaucagaagaucauuaccauaggcagcgugugcaugacaaucgggauggccaaccugauucuccaaaucggaaauauuaucuccauauggaucucucacucaauucagcuugguaaccagaaucagaucgagacuuguaaccaaagugucauuacguacgaaaauaacaccuggguuaaucagacauaugugaacaucagcaauacuaacuucgcugcaggccaguccguagugucugucaaacuggccggaaauucgucauugugcccugugagcggaugggcgauauacaguaaggacaacuccauuagaaucggcucuaaaggugauguuuuugugauuagggagccauucaucagcuguuccccguuagaaugccggaccuuuuuccugacacagggggcucuacucaaugacaagcauucaaacggaaccaucaaagaucgcagucccuaucgaacucugaugagcuguccuauuggcgaggucccaucucccuacaacucccguuuugaaucaguggccuggagcgcaagugccugccacgacggcauaaauuggcuuacaaucgggauuucuggaccugauaacggugcuguagcaguucugaaguauaauggcaucauaaccgacacgauuaaguccuggagaaacaauaucuugaggacucaagagagcgagugugccugcgugaacgggucguguuucaccgucaugacagauggaccaucugacggccaggcuuccuacaaaaucuuucggauugaaaaggguaaaaucgugaagucaguggagaugaaugcccccaacuaucauuacgaagagugcaguuguuacccugauagcuccgagauuacuugcgucugccgcgacaauuggcacgggucuaacagaccauggguuagcuucaaucagaaccucgaauaucagauaggauacaucuguucaggcauuuuuggcgauaauccgaggcccaacgacaaaaccgggaguugcggaccuguguccagcaauggugcgaacggcguaaagggguucucuuuuaaguauggaaacggcguguggaucggucggacaaaaucaaucaguagccgcaauggguucgagaugauuugggauccaaacggcuggaccggaacggacaauaacuuuuccauaaagcaagacaucgucggcauuaaugaauggucuggguacucggggagcuucgugcagcagcccgagcugacuggucuggauuguauccgaccuugcuucuggguugaacucauuagaggcaggccaaaagagaacacaaucuggaccuccgggucaaguauaucuuuuuguggagugaauagcgacacugucggcugguccuggcccgauggugcagaguuaccguucacaaucgacaaguga

SEQ ID NO: 149354 - RNA, 1410 nt, Artificial Sequence; identical to SEQ ID NO: 149292
  derived and/or modified CDS sequence (opt3) from neuraminidase__InfluenzaA__AEV53579

SEQ ID NO: 149355 - RNA, 1410 nt, Artificial Sequence; identical to SEQ ID NO: 146587
  derived and/or modified CDS sequence (opt3) from neuraminidase__InfluenzaA__AEV53581

SEQ ID NO: 149356 - RNA, 1410 nt, Artificial Sequence; identical to SEQ ID NO: 146248
  derived and/or modified CDS sequence (opt3) from neuraminidase__InfluenzaA__AEV53583

SEQ ID NO: 149357 - RNA, 1410 nt, Artificial Sequence; identical to SEQ ID NO: 146248
  derived and/or modified CDS sequence (opt3) from neuraminidase__InfluenzaA__AEV53585

SEQ ID NO: 149358 - RNA, 1410 nt, Artificial Sequence
  derived and/or modified CDS sequence (opt3) from neuraminidase__InfluenzaA__AEV76877
augaaccccaaucagaagaucauuaccauaggcagcgugugcaugacaaucgggauggccaaccugauucuccaaaucggaaauauuaucuccauauggaucucucacucaauucagcuugguaaccagagucagaucgagacuuguaaucaaagcgucauuacguacgaaaacaauaccuggguuaaccagacauaugugaauaucuccacuaccaacuucgcugcaggccagucuguagugucggucaaacuggccgggaauagcucauugugcccugugaguggaugggcgauauacuccaaggacaacucuauuagaaucggcagcaaaggugauguuuuugugauuagggagccauucaucuccuguucaccguuagaaugccggacauuuuuccugacccagggggcucuacucaaugacaagcauaguaacggaacuaucaaagaucgcagccccuaucgaacacugaugucuuguccuauuggcgaggucccaucccccuacaauucacguuuugaaagcguggccuggagugcaucugccugccacgacggcauaaacuggcuuaccaucgggauuuccggaccugauaacggugcuguagcaguucugaaguauaauggcaucauaacggacacuauuaagagcuggagaaacaauaucuugaggacccaagagucggagugugccugcgugaacgggucuuguuucacaaucaugacugauggaccauccgacggccaggcuucauacaaaauuuuucggaucgaaaaggguaaaauugucaagaguguggagaugaaugcccccaacuaucauuacgaagagugcagcuguuacccugauuccucugagauaaccugcgugugccgcgacaauuggcacgggagcaacagaccaugggucucauucaaucagaaccucgaauaucagaucggauacauuuguaguggcaucuuuggcgauaauccgaggcccaacgacaaaacaggguccugcggaccuguuagcucuaauggugcgaacggcgugaagggguucucauuuaaguauggaaauggcguauggaucggucggaccaaaaguauuagcucccgcaagggguucgagaugauaugggauccaaacggcuggacgggaacugacaacaauuuuucuaucaaacaagacauugugggcaucaacgaauggucgggguacagcggauccuucguccagcaucccgagcugacaggucuggauuguauucgaccuugcuucuggguggaacucaucagaggcaggccaaaggagaauaccauauggacuucagggaguucuaucagcuuuuguggaguuaacuccgacacagugggcuggucauggcccgauggugcagaguuaccguucaccauugacaaauga

SEQ ID NO: 149359 - RNA, 1410 nt, Artificial Sequence; identical to SEQ ID NO: 144786
  derived and/or modified CDS sequence (opt3) from neuraminidase__InfluenzaA__AEW10576

SEQ ID NO: 149360 - RNA, 1410 nt, Artificial Sequence; identical to SEQ ID NO: 144786
  derived and/or modified CDS sequence (opt3) from neuraminidase__InfluenzaA__AEW10586

SEQ ID NO: 149361 - RNA, 1410 nt, Artificial Sequence; identical to SEQ ID NO: 144786
  derived and/or modified CDS sequence (opt3) from neuraminidase__InfluenzaA__AEW10596

SEQ ID NO: 149362 - RNA, 1410 nt, Artificial Sequence; identical to SEQ ID NO: 144786
  derived and/or modified CDS sequence (opt3) from neuraminidase__InfluenzaA__AEW10606

SEQ ID NO: 149363 - RNA, 1410 nt, Artificial Sequence; identical to SEQ ID NO: 145673
  derived and/or modified CDS sequence (opt3) from neuraminidase__InfluenzaA__AEW10616

SEQ ID NO: 149364 - RNA, 1410 nt, Artificial Sequence
  derived and/or modified CDS sequence (opt3) from neuraminidase__InfluenzaA__AEW10626
augaaccccaaucagaagaucauuaccauaggcagcgugugcaugacaaucgggauggccaaccugauucuccaaaucggaaauauuaucuccauauggaucucucacucaauucagcuugguaaccagaaucagaucgagacuuguaaccaaagugucauuacguacgaaaauaacaccuggguuaaucagacauaugugaacaucagcaauacuaacuucgcugcaggccaguccguagugucugucaaacuggccggaaauucgucauugugcccugugagcggaugggcgauauacaguaaggacaacuccauuagaaucggcucuaaaggugauguuuuugugauuagggagccauucaucagcuguuccccguuagaaugccggaccuuuuuccugacacagggggcucuacucaaugacaagcauucaaacggaaccaucaaagaucgcagucccuaucgaacucugaugagcuguccuauuggcgaggucccaucucccuacaacucccguuuugaaucaguggccuggagcgcaagugccugccacgacggcauaaauuggcuuacaaucgggauuucuggaccugauaacggugcuauggcaguacugaaguauaauggcaucauaaccgacacgauuaaguccuggagaaacaauaucuugaggacucaagagagcgagugugccugcguuaacgggucguguuucaccgugaugacagauggaccaucugacggccaggcuuccuacaaaaucuuucggauugaaaaggguaaaaucgucaagucaguggagaugaaugcccccaacuaucauuacgaagagugcaguuguuacccugauagcuccgagauuacuugcgugugccgcgacaauuggcacgggucuaacagaccaugggucagcuucaaucagaaccucgaauaucagauaggauacaucuguucaggcauuuuuggcgauaauccgaggcccaacgacaaaaccgggaguugcggaccuguuuccagcaauggugcgaacggcgugaagggguucucuuuuaaguauggaaacggcguauggaucggucggacaaaaucaaucaguagccgcaauggguucgagaugauuugggauccaaacggcuggaccggaacggacaauaacuuuuccauaaagcaagacaucgugggcauuaaugaauggucuggguacucggggagcuucguccagcaucccgagcugacuggucuggauuguauccgaccuugcuucuggguggaacucauuagaggcaggccaaaagagaacacaaucuggaccuccgggucaaguauaucuuuuuguggaguuaauagcgacacugugggcugguccuggcccgauggugcagaguuaccguucacaaucgacaaguga

SEQ ID NO: 149365 - RNA, 1410 nt, Artificial Sequence; identical to SEQ ID NO: 144786
  derived and/or modified CDS sequence (opt3) from neuraminidase__InfluenzaA__AEW10636

SEQ ID NO: 149366 - RNA, 1410 nt, Artificial Sequence; identical to SEQ ID NO: 144776
  derived and/or modified CDS sequence (opt3) from neuraminidase__InfluenzaA__AEW10646

SEQ ID NO: 149367 - RNA, 1410 nt, Artificial Sequence; identical to SEQ ID NO: 144786
  derived and/or modified CDS sequence (opt3) from neuraminidase__InfluenzaA__AEW10656

SEQ ID NO: 149368 - RNA, 1410 nt, Artificial Sequence; identical to SEQ ID NO: 144786
  derived and/or modified CDS sequence (opt3) from neuraminidase__InfluenzaA__AEW10666

SEQ ID NO: 149369 - RNA, 1410 nt, Artificial Sequence; identical to SEQ ID NO: 144786
  derived and/or modified CDS sequence (opt3) from neuraminidase__InfluenzaA__AEW10676

SEQ ID NO: 149370 - RNA, 1410 nt, Artificial Sequence; identical to SEQ ID NO: 144786
  derived and/or modified CDS sequence (opt3) from neuraminidase__InfluenzaA__AEW10686

SEQ ID NO: 149371 - RNA, 1410 nt, Artificial Sequence; identical to SEQ ID NO: 144786
  derived and/or modified CDS sequence (opt3) from neuraminidase__InfluenzaA__AEW10696

SEQ ID NO: 149372 - RNA, 1410 nt, Artificial Sequence; identical to SEQ ID NO: 144786
  derived and/or modified CDS sequence (opt3) from neuraminidase__InfluenzaA__AEW10706

SEQ ID NO: 149373 - RNA, 1410 nt, Artificial Sequence; identical to SEQ ID NO: 144776
  derived and/or modified CDS sequence (opt3) from neuraminidase__InfluenzaA__AEW10716

SEQ ID NO: 149374 - RNA, 1410 nt, Artificial Sequence; identical to SEQ ID NO: 144786
  derived and/or modified CDS sequence (opt3) from neuraminidase__InfluenzaA__AEW10726

SEQ ID NO: 149375 - RNA, 1410 nt, Artificial Sequence; identical to SEQ ID NO: 144786
  derived and/or modified CDS sequence (opt3) from neuraminidase__InfluenzaA__AEW10736

SEQ ID NO: 149376 - RNA, 1410 nt, Artificial Sequence; identical to SEQ ID NO: 144776
  derived and/or modified CDS sequence (opt3) from neuraminidase__InfluenzaA__AEW10746

SEQ ID NO: 149377 - RNA, 1410 nt, Artificial Sequence; identical to SEQ ID NO: 144776
  derived and/or modified CDS sequence (opt3) from neuraminidase__InfluenzaA__AEW10756

SEQ ID NO: 149378 - RNA, 1410 nt, Artificial Sequence; identical to SEQ ID NO: 144776
  derived and/or modified CDS sequence (opt3) from neuraminidase__InfluenzaA__AEW10766

SEQ ID NO: 149379 - RNA, 1410 nt, Artificial Sequence; identical to SEQ ID NO: 144776
  derived and/or modified CDS sequence (opt3) from neuraminidase__InfluenzaA__AEW10776

SEQ ID NO: 149380 - RNA, 1410 nt, Artificial Sequence; identical to SEQ ID NO: 144776
  derived and/or modified CDS sequence (opt3) from neuraminidase__InfluenzaA__AEW10786

SEQ ID NO: 149381 - RNA, 1410 nt, Artificial Sequence; identical to SEQ ID NO: 144776
  derived and/or modified CDS sequence (opt3) from neuraminidase__InfluenzaA__AEW10796

SEQ ID NO: 149382 - RNA, 1410 nt, Artificial Sequence; identical to SEQ ID NO: 144776
  derived and/or modified CDS sequence (opt3) from neuraminidase__InfluenzaA__AEW10806

SEQ ID NO: 149383 - RNA, 1410 nt, Artificial Sequence; identical to SEQ ID NO: 144776
  derived and/or modified CDS sequence (opt3) from neuraminidase__InfluenzaA__AEW10816

SEQ ID NO: 149384 - RNA, 1410 nt, Artificial Sequence; identical to SEQ ID NO: 144786
  derived and/or modified CDS sequence (opt3) from neuraminidase__InfluenzaA__AEW10826

SEQ ID NO: 149385 - RNA, 1410 nt, Artificial Sequence; identical to SEQ ID NO: 144776
  derived and/or modified CDS sequence (opt3) from neuraminidase__InfluenzaA__AEW10836

SEQ ID NO: 149386 - RNA, 1410 nt, Artificial Sequence; identical to SEQ ID NO: 144776
  derived and/or modified CDS sequence (opt3) from neuraminidase__InfluenzaA__AEW10846

SEQ ID NO: 149387 - RNA, 1410 nt, Artificial Sequence; identical to SEQ ID NO: 144776
  derived and/or modified CDS sequence (opt3) from neuraminidase__InfluenzaA__AEW10856

SEQ ID NO: 149388 - RNA, 1410 nt, Artificial Sequence; identical to SEQ ID NO: 144776
  derived and/or modified CDS sequence (opt3) from neuraminidase__InfluenzaA__AEW10866

SEQ ID NO: 149389 - RNA, 1410 nt, Artificial Sequence; identical to SEQ ID NO: 144776
  derived and/or modified CDS sequence (opt3) from neuraminidase__InfluenzaA__AEW10876

SEQ ID NO: 149390 - RNA, 1410 nt, Artificial Sequence; identical to SEQ ID NO: 144776
  derived and/or modified CDS sequence (opt3) from neuraminidase__InfluenzaA__AEW10886

SEQ ID NO: 149391 - RNA, 1410 nt, Artificial Sequence; identical to SEQ ID NO: 144776
  derived and/or modified CDS sequence (opt3) from neuraminidase__InfluenzaA__AEW10896

SEQ ID NO: 149392 - RNA, 1410 nt, Artificial Sequence; identical to SEQ ID NO: 144776
  derived and/or modified CDS sequence (opt3) from neuraminidase__InfluenzaA__AEW10906

SEQ ID NO: 149393 - RNA, 1410 nt, Artificial Sequence; identical to SEQ ID NO: 144776
  derived and/or modified CDS sequence (opt3) from neuraminidase__InfluenzaA__AEW10916

SEQ ID NO: 149394 - RNA, 1410 nt, Artificial Sequence
  derived and/or modified CDS sequence (opt3) from neuraminidase__InfluenzaA__AEW10926
augaaccccaaucagaagaucauuaccauaggcagcgugugcaugacaaucgggauggccaaccugauucuccaaaucggaaauauuaucuccauauggaucucucacucaauucagcuugguaaccagaaucagaucgagacuuguaaccaaagugucauuacguacgaaaauaacaccuggguuaaucagacauaugugaacaucagcaauacuaacuucgcugcaggccaguccguagugucugucaaacuggccggaaauucgucauugugcccugugagcggaugggcgauauacaguaaggacaacuccauuagaaucggcucuaaaggugauguuuuuauuaucagggagccauucaucagcuguuccccguuagaaugccggaccuuuuuccugacacagggggcucuacucaaugacaagcauucaaacggaaccauuaaagaucgcagucccuaucgaacucugaugagcuguccuauaggcgaggugccaucucccuacaacucccguuuugaaucagucgccuggagcgcaagugccugccacgacggcaucaauuggcuuacaauugggaucucuggaccugauaacggugcuguggcaguacugaaguauaauggcauaauuaccgacacgaucaaguccuggagaaacaauaucuugaggacucaagagagcgagugugccugcguuaacgggucguguuucaccgugaugacagauggaccaucugacggccaggcuuccuacaaaauuuuucggaucgaaaaggguaaaauugucaagucaguggagaugaaugcccccaacuaucauuacgaagagugcaguuguuacccugauagcuccgagauaacuugcgugugccgcgacaauuggcacgggucuaacagaccaugggucagcuucaaucagaaccucgaauaucagaucggauacauuuguucaggcaucuuuggcgauaauccgaggcccaacgacaaaaccgggaguugcggaccuguuuccagcaauggugcgaacggcgugaagggguucucuuuuaaguauggaaacggcguauggaucggucggacaaaaucaauuaguagccgcaauggguucgagaugauaugggauccaaacggcuggaccggaacggacaauaacuuuuccaucaagcaagacauugugggcaucaaugaauggucuggguacucggggagcuucguccagcaucccgagcugacuggucuggauuguauucgaccuugcuucuggguggaacucaucagaggcaggccaaaagagaacacaauauggaccuccgggucaaguaucucuuuuuguggaguuaauagcgacacugugggcugguccuggcccgauggugcagaguuaccguucacaauugacaaguga

SEQ ID NO: 149395 - RNA, 1410 nt, Artificial Sequence; identical to SEQ ID NO: 144776
  derived and/or modified CDS sequence (opt3) from neuraminidase__InfluenzaA__AEW10936

SEQ ID NO: 149396 - RNA, 1410 nt, Artificial Sequence; identical to SEQ ID NO: 144776
  derived and/or modified CDS sequence (opt3) from neuraminidase__InfluenzaA__AEW10946

SEQ ID NO: 149397 - RNA, 1410 nt, Artificial Sequence; identical to SEQ ID NO: 144786
  derived and/or modified CDS sequence (opt3) from neuraminidase__InfluenzaA__AEW10956

SEQ ID NO: 149398 - RNA, 1410 nt, Artificial Sequence; identical to SEQ ID NO: 144786
  derived and/or modified CDS sequence (opt3) from neuraminidase__InfluenzaA__AEW10966

SEQ ID NO: 149399 - RNA, 1410 nt, Artificial Sequence; identical to SEQ ID NO: 144776
  derived and/or modified CDS sequence (opt3) from neuraminidase__InfluenzaA__AEW10976

SEQ ID NO: 149400 - RNA, 1410 nt, Artificial Sequence; identical to SEQ ID NO: 144786
  derived and/or modified CDS sequence (opt3) from neuraminidase__InfluenzaA__AEW10986

SEQ ID NO: 149401 - RNA, 1410 nt, Artificial Sequence; identical to SEQ ID NO: 144786
  derived and/or modified CDS sequence (opt3) from neuraminidase__InfluenzaA__AEW10996

SEQ ID NO: 149402 - RNA, 1410 nt, Artificial Sequence; identical to SEQ ID NO: 144786
  derived and/or modified CDS sequence (opt3) from neuraminidase__InfluenzaA__AEW11006

SEQ ID NO: 149403 - RNA, 1410 nt, Artificial Sequence; identical to SEQ ID NO: 144786
  derived and/or modified CDS sequence (opt3) from neuraminidase__InfluenzaA__AEW11016

SEQ ID NO: 149404 - RNA, 1410 nt, Artificial Sequence; identical to SEQ ID NO: 144786
  derived and/or modified CDS sequence (opt3) from neuraminidase__InfluenzaA__AEW11026

SEQ ID NO: 149405 - RNA, 1410 nt, Artificial Sequence; identical to SEQ ID NO: 144786
  derived and/or modified CDS sequence (opt3) from neuraminidase__InfluenzaA__AEW11036

SEQ ID NO: 149406 - RNA, 1410 nt, Artificial Sequence; identical to SEQ ID NO: 144776
  derived and/or modified CDS sequence (opt3) from neuraminidase__InfluenzaA__AEW11046

SEQ ID NO: 149407 - RNA, 1410 nt, Artificial Sequence; identical to SEQ ID NO: 144786
  derived and/or modified CDS sequence (opt3) from neuraminidase__InfluenzaA__AEW11056

SEQ ID NO: 149408 - RNA, 1410 nt, Artificial Sequence; identical to SEQ ID NO: 145590
  derived and/or modified CDS sequence (opt3) from neuraminidase__InfluenzaA__AEW11066

SEQ ID NO: 149409 - RNA, 1410 nt, Artificial Sequence; identical to SEQ ID NO: 145590
  derived and/or modified CDS sequence (opt3) from neuraminidase__InfluenzaA__AEW11076

SEQ ID NO: 149410 - RNA, 1410 nt, Artificial Sequence; identical to SEQ ID NO: 145590
  derived and/or modified CDS sequence (opt3) from neuraminidase__InfluenzaA__AEW11086

SEQ ID NO: 149411 - RNA, 1410 nt, Artificial Sequence; identical to SEQ ID NO: 145590
  derived and/or modified CDS sequence (opt3) from neuraminidase__InfluenzaA__AEW11096

SEQ ID NO: 149412 - RNA, 1410 nt, Artificial Sequence; identical to SEQ ID NO: 145590
  derived and/or modified CDS sequence (opt3) from neuraminidase__InfluenzaA__AEW11106

SEQ ID NO: 149413 - RNA, 1410 nt, Artificial Sequence; identical to SEQ ID NO: 144786
  derived and/or modified CDS sequence (opt3) from neuraminidase__InfluenzaA__AEW11116

SEQ ID NO: 149414 - RNA, 1410 nt, Artificial Sequence; identical to SEQ ID NO: 145590
  derived and/or modified CDS sequence (opt3) from neuraminidase__InfluenzaA__AEW11126

SEQ ID NO: 149415 - RNA, 1410 nt, Artificial Sequence; identical to SEQ ID NO: 145494
  derived and/or modified CDS sequence (opt3) from neuraminidase__InfluenzaA__AEW11136

SEQ ID NO: 149416 - RNA, 1410 nt, Artificial Sequence; identical to SEQ ID NO: 144786
  derived and/or modified CDS sequence (opt3) from neuraminidase__InfluenzaA__AEW11146

SEQ ID NO: 149417 - RNA, 1410 nt, Artificial Sequence; identical to SEQ ID NO: 144786
  derived and/or modified CDS sequence (opt3) from neuraminidase__InfluenzaA__AEW11156

SEQ ID NO: 149418 - RNA, 1410 nt, Artificial Sequence; identical to SEQ ID NO: 145590
  derived and/or modified CDS sequence (opt3) from neuraminidase__InfluenzaA__AEW11166

SEQ ID NO: 149419 - RNA, 1410 nt, Artificial Sequence; identical to SEQ ID NO: 145590
  derived and/or modified CDS sequence (opt3) from neuraminidase__InfluenzaA__AEW11176

SEQ ID NO: 149420 - RNA, 1410 nt, Artificial Sequence; identical to SEQ ID NO: 144786
  derived and/or modified CDS sequence (opt3) from neuraminidase__InfluenzaA__AEW11186

SEQ ID NO: 149421 - RNA, 1410 nt, Artificial Sequence; identical to SEQ ID NO: 145590
  derived and/or modified CDS sequence (opt3) from neuraminidase__InfluenzaA__AEW11196

SEQ ID NO: 149422 - RNA, 1410 nt, Artificial Sequence; identical to SEQ ID NO: 144786
  derived and/or modified CDS sequence (opt3) from neuraminidase__InfluenzaA__AEW11206

SEQ ID NO: 149423 - RNA, 1410 nt, Artificial Sequence; identical to SEQ ID NO: 144786
  derived and/or modified CDS sequence (opt3) from neuraminidase__InfluenzaA__AEW11216

SEQ ID NO: 149424 - RNA, 1410 nt, Artificial Sequence; identical to SEQ ID NO: 145494
  derived and/or modified CDS sequence (opt3) from neuraminidase__InfluenzaA__AEW11226

SEQ ID NO: 149425 - RNA, 1410 nt, Artificial Sequence; identical to SEQ ID NO: 144786
  derived and/or modified CDS sequence (opt3) from neuraminidase__InfluenzaA__AEW11236

SEQ ID NO: 149426 - RNA, 1410 nt, Artificial Sequence; identical to SEQ ID NO: 144786
  derived and/or modified CDS sequence (opt3) from neuraminidase__InfluenzaA__AEW11246

SEQ ID NO: 149427 - RNA, 1410 nt, Artificial Sequence; identical to SEQ ID NO: 145590
  derived and/or modified CDS sequence (opt3) from neuraminidase__InfluenzaA__AEW11255

SEQ ID NO: 149428 - RNA, 1410 nt, Artificial Sequence; identical to SEQ ID NO: 145590
  derived and/or modified CDS sequence (opt3) from neuraminidase__InfluenzaA__AEW11265

SEQ ID NO: 149429 - RNA, 1410 nt, Artificial Sequence; identical to SEQ ID NO: 144786
  derived and/or modified CDS sequence (opt3) from neuraminidase__InfluenzaA__AEW11275

SEQ ID NO: 149430 - RNA, 1410 nt, Artificial Sequence
  derived and/or modified CDS sequence (opt3) from neuraminidase__InfluenzaA__AEW11285
augaaccccaaucagaagaucauuaccauaggcagcgugugcaugacaaucgggauggccaaccugauucuccaaaucggaaauauuaucuccauauggaucucucacucaauucagcuugguaaccagaaucagaucgagacuuguaaccaaagugucauuacguacgaaaauaacaccuggguuaaucagacauaugugaacaucagcaauacuaacuucgcugcaggccaguccguagugucugucaaacuggccggaaauucgucauugugcccugugagcggaugggcgauauacaguaaggacaacuccguuagaauuggcucuaaaggugauguguuugucaucagggagccauucauuagcuguuccccguuagaaugccggaccuuuuuccugacacagggggcucuacucaaugacaagcauucaaacggaaccaucaaagaucgcagucccuaucgaacucugaugagcuguccuaucggcgaggugccaucucccuacaacucccguuuugaaucaguagccuggagcgcaagugccugccacgacggcauuaauuggcuuacaauagggaucucuggaccugauaacggugcuguugcagugcugaaguauaauggcauuaucaccgacacgauaaaguccuggagaaacaauauuuugaggacucaagagagcgagugugccugcgucaacgggucguguuucaccgugaugacagauggaccaucuaauggccaggcuuccuacaaaaucuuucggaucgaaaaggguaaaauugugaagucagucgagaugaacgcccccaauuaucauuacgaagagugcaguuguuacccugacagcuccgagaucacuugcguuugccgcgauaacuggcacgggucuaauagaccaugggugagcuucaaccagaaucucgaauaucagauuggauacauauguucaggcaucuuuggcgacaacccgaggcccaaugauaaaaccgggaguugcggaccuguauccagcaacggugcgaacggcgugaagggguucucuuuuaaguauggaaauggcgucuggauuggucggacaaaaucaaucaguagccgcaacggguucgagaugaucugggacccaaauggcuggaccggaacggauaacaauuuuuccauuaagcaagacauagugggcaucaacgaauggucuggguacucggggagcuucguucagaaucccgagcugacuggucuggacuguauucgaccuugcuucuggguggaacucaucagaggcaggccaaaagagaacacaauuuggaccuccgggucaaguaucucuuuuuguggagucaauagcgauacugugggcugguccuggcccgacggugcagaguuaccguucacaauagauaaguga

SEQ ID NO: 149431 - RNA, 1410 nt, Artificial Sequence; identical to SEQ ID NO: 145590
  derived and/or modified CDS sequence (opt3) from neuraminidase__InfluenzaA__AEW11295

SEQ ID NO: 149432 - RNA, 1410 nt, Artificial Sequence; identical to SEQ ID NO: 144786
  derived and/or modified CDS sequence (opt3) from neuraminidase__InfluenzaA__AEW11305

SEQ ID NO: 149433 - RNA, 1410 nt, Artificial Sequence; identical to SEQ ID NO: 145590
  derived and/or modified CDS sequence (opt3) from neuraminidase__InfluenzaA__AEW11315

SEQ ID NO: 149434 - RNA, 1410 nt, Artificial Sequence; identical to SEQ ID NO: 144786
  derived and/or modified CDS sequence (opt3) from neuraminidase__InfluenzaA__AEW11325

SEQ ID NO: 149435 - RNA, 1410 nt, Artificial Sequence; identical to SEQ ID NO: 144786
  derived and/or modified CDS sequence (opt3) from neuraminidase__InfluenzaA__AEW25299

SEQ ID NO: 149436 - RNA, 1410 nt, Artificial Sequence; identical to SEQ ID NO: 144786
  derived and/or modified CDS sequence (opt3) from neuraminidase__InfluenzaA__AEW25308

SEQ ID NO: 149437 - RNA, 1410 nt, Artificial Sequence; identical to SEQ ID NO: 145859
  derived and/or modified CDS sequence (opt3) from neuraminidase__InfluenzaA__AEW25317

SEQ ID NO: 149438 - RNA, 1410 nt, Artificial Sequence; identical to SEQ ID NO: 144786
  derived and/or modified CDS sequence (opt3) from neuraminidase__InfluenzaA__AEW25324

SEQ ID NO: 149439 - RNA, 1410 nt, Artificial Sequence
  derived and/or modified CDS sequence (opt3) from neuraminidase__InfluenzaA__AEW25327
augaaccccaaucagaagaucauuaccauaggcagcgugugcaugacaaucgggauggccaaccugauucuccaaaucggaaauauuaucuccauauggaucucucacucaauucagcuugguaaccagaaucagaucgagacuuguaaccaaagugucauuacguacgaaaauaacaccuggguuaaucagacauaugugaacaucagcaauacuaacuucgcugcaggccaguccguagugucugucaaacuggccggaaauucgucauugugcccugugagcgggugggcgauauacaguaaggacaacuccauuagaaucggcucuaaaggugauguuuuugugauuagggagccauucaucagcuguuccccguuagaaugccggaccuuuuuccugacacagggggcucuacucaaugacaagcauucaaacggaaccaucaaagaucgcagucccuaucgaacucugaugagcuguccuauuggcgaggucccacccccuuacaacucucguuuugaauccguggccuggucagcaagcgccugccacgacggcauaaauuggcuuacaaucgggauuaguggaccagauaacggugcuguagcaguucugaaguauaauggcaucauaaccgacacgauuaagucuuggagaaacaauaucuugaggacucaagaguccgagugugccugcgugaacgggagcuguuucaccgucaugacagauggacccucggacggccaggcuucuuacaaaaucuuucggauugaaaaggguaaaaucgugaaguccguggagaugaaugccccuaacuaucauugcgaagaguguucaugcuacccagauaguagcgagauuacuugcgucugucgcgacaauuggcacggguccaacagaccguggguuucuuucaaucagaaccucgaauaccagauaggauauaucugcagcggcauuuuuggcgauaaucccaggccuaacgacaaaaccgggucauguggaccagugaguuccaauggugcgaacggcguaaagggguucagcuuuaaguacggaaacggcguguggaucggucggacaaaaucuaucucaagucgcaauggguucgagaugauuugggaucccaacggcuggaccggaacggacaauaacuuuagcauaaagcaagacaucgucggcauuaaugaaugguccggguauucuggaucguucgugcagcauccugagcugacuggucuggauugcauccgaccauguuucuggguugaacucauuagaggcaggcccaaagagaacacaaucuggaccagcggguccucaauaaguuuuugcggagucaauucugacacugugggcuggagcuggccggauggugcagaguuaccuuucacaaucgacaaguga

SEQ ID NO: 149440 - RNA, 1410 nt, Artificial Sequence
  derived and/or modified CDS sequence (opt3) from neuraminidase__InfluenzaA__AEW25333
augaaccccaaucagaagaucauuaccauaggcagcgugugcaugacaaucgggauggccaaccugauucuccaaaucggaaauauuaucuccauauggaucucucacucaauucagcuugguaaccagaaucagaucgagacuuguaaccaaagugucauuacguacgaaaauaacaccuggguuaaucauacauaugugaacaucagcaauacuaacuucgcugcaggccaguccguagugucugucaaacuggccggaaauucgucauugugcccugugagcggaugggcgauauacaguaaggacaacuccauuagaaucggcucuaaaggugauguuuuugugauuagggagccauucaucagcuguuccccguuagaaugccggaccuuuuuccugacacagggggcucuacucaaugacaagcacucaaacggaaccaucaaagaucgcagucccuaucgaacucugaugagcuguccuauuggcgaggucccaucucccuacaacucccguuuugaaucaguggccuggagcgcaagugccugccaugacggcauaaauuggcuuacaaucgggauuucuggaccugauaacggugcuguagcaguucugaaguauaauggcaucauaaccgacacgauuaaguccuggagaaacaauaucuugaggacucaggagagcgagugugccugcgugaacgggucguguuucaccgucaugacagauggaccaucugacggccaggcuuccuacaaaaucuuucggauugaaaaggguaaaaucgugaagucaguggagaugaaugcccccaacuaucacuacgaagagugcaguuguuacccugauagcuccgagauuacuugcgucugccgcgacaauuggcaugggucuaacagaccauggguuagcuucaaucaaaaccucgaauaucagauaggauacaucuguucaggcauuuuuggcgauaauccgaggcccaacgacaaaaccgggaguugcggaccuguguccagcaauggugcgaacggcguaaagggguucucuuuuaaguauggaaacggcgugugggucggucggacaaaaucaaucaguagccgcaauggguucgagaugaucugggauccaaacggcuggaccggaacggacaauaacuuuuccauuaagcaggacauagugggcaucaaugaauggucuggguacucggggagcuucguucaacaccccgagcugacuggucuggauuguauucgacacugcuucuggguggaacucaucagaggcaggccuaaagagaacacaauuuggaccuccgggucaaguaucucuuuuuguggagucaauagcgacacugugggcugguccuggccagauggugcagaguuacccuucacaauagacaaguga

SEQ ID NO: 149441 - RNA, 1410 nt, Artificial Sequence
  derived and/or modified CDS sequence (opt3) from neuraminidase__InfluenzaA__AEW25338
augaaccccaaucagaagaucauuaccauaggcagcgugugcauggccaucgggauggcuaaccugauucuccaaaucggaaauauuaucuccauauggaucucucacucaauucagcuugguaaccagaaucagaucgagacauguaaccaaagugucauuacuuacgaaaauaacacguggguuaaucagaccuaugugaacaucagcaauacaaacuucgcagccggccaguccguagugucugucaaacuggcgggaaauucgucauugugcccugugagcggaugggcuauauacaguaaggacaacuccauuagaaucggcucuaaaggugauguuuuugugauuagggagccauucaucagcuguuccccguuagaaugccggaccuuuuuccugacucagggggcccuacucaaugacaagcauucaaacggaacaaucaaagaucgcagucccuaucgaacccugaugagcuguccuauuggcgaggucccaucucccuacaacucccguuuugaaucaguggcauggagcgccagugcuugccacgacggcauaaauuggcuuacuaucgggauuucuggaccugauaacggugcaguagccguucugaaguauaauggcaucauaacagacaccauuaaguccuggagaaacaauaucuugaggacgcaagagagcgagugugcuugcgugaacgggucguguuucacugucaugaccgauggaccaucugacggccaggccuccuacaaaaucuuucggauugaaaaggguaaaaucgugaagucaguggagaugaaugcgcccaacuaucauuacgaagagugcaguuguuacccugauagcuccgagauuacaugcgucugccgcgacaauuggcacgggucuaacagaccauggguuagcuucaaucagaaccucgaauaucagauaggauacaucaggucaggcauuuuuggcgauaauccgcggcccaacgacaaaacugggaguuguggaccuguguccagcaauggugcaaacggcguaaagggguucucuuuuaaguauggaaacggcguguggaucggucgcaccaaaucaaucaguagccgaaauggguucgagaugauuugggauccaaacggcuggacaggaaccgacaauaacuuuuccauaaagcaagacaucgucggcauuaaugaauggucuggguacucggggagcuucgugcagcaucccgagcugacgggucuggauugcaucagaccuuguuucuggguugaacucauuaggggccggccaaaagagaacacuaucuggacauccgggucaaguauaucuuuuugcggagugaauagcgacaccgucggcugguccuggcccgauggugccgaguuaccguucacuaucgacaaguga

SEQ ID NO: 149442 - RNA, 1410 nt, Artificial Sequence
  derived and/or modified CDS sequence (opt3) from neuraminidase__InfluenzaA__AEW25343
augaaccccaaucagaagaucauuaccauaggcagcgugugcaugacaaucgggauggccaaccugauucuccaaaucggaaauauuaucuccauauggaucucucacucaauucagcuugguaaccagaaucagaucgagacuuguaaccaaagugucauuacguacgaaaauaacaccuggguuaaucagacauaugugaacaucagcaauacuaacuucgcugcaggccaguccguagugucugucaaacuggccggaaauucgucauugugcccugugagcgggugggcgauauacaguaaggacaacuccauuagaaucggcucuaaaggugauguuuuugugauuagggagccauucaucagcuguuccccguuagaaugccggaccuuuuuccugacacagggggcucuacucaaugacaagcauucaaacggaaccaucaaagaucgcagucccuaucgaacucugaugagcuguccuauuggcgaggucccaucucccuacaacucccguucagaaagcguggccuggagugcaucugccugccacgacggcauaaauuggcuuacaaucgggauuuccggaccugauaacggugcuguagcaguucugaaguauaauggcaucauaaccgacacgauuaagagcuggagaaacaauaucuugaggacucaagagucggugugugccugcgucaacgggucuuguuuuaccgugaugacagauggaccauccgacggccaggcuucauacaaaaucuuccggauugagaaggguaaaaucgugaagagugucgaaaugaaugcccccaacuaucauuacgaggaaugcagcuguuacccugauuccucugagauuacuugcguuugccgcgacaauuggcacgggagcaacagaccaugggugucauuuaaucagaaccucgaguaucagauaggauacaucuguaguggcauuuucggcgauuccccgaggcccaaugacaaaaccgggagcugcggaccuguaucuucaaacggugcgaauggcgugaagggguuuaguuucaaguauggaaacggcgucuggaucggucggacaaaaagcaucuccucucgcaacggguuugaaaugauuugggauccaaauggcuggaccggaacggacaacaauuucucgauaaagcaagacaucgugggcauuaacgaguggagcggguacuccggaucauuuguucagcaucccgaacugacuggucuggauuguauccgaccuugcuucuggguggagcucauuagaggcaggccaaaagaaaauacaaucuggaccagugggucuagcauauccuucuguggagucaacucagacacugugggcuggagcuggcccgauggugcagaguuaccguuuacaaucgacaaguga

SEQ ID NO: 149443 - RNA, 1410 nt, Artificial Sequence
  derived and/or modified CDS sequence (opt3) from neuraminidase__InfluenzaA__AEW25351
augaaccccaaucagaagaucauuaccauaggcagcgugugcaugacaaucgggauggccaaccugauucuccaaaucggaaauauuaucuccauauggaucucucacucaauucagcuugguaaccagaaucagaucgagacuuguaaccaaagugucauuacguacgaaaauaacaccuggguuaaucauacauaugugaacaucagcaauacuaacuucgcugcaggccaguccguagugucugucaaacuggccggaaauucgucauugugcccugugagcggaugggcgauauacaguaaggacaacuccauuagaaucggcucuaaaggugauguuuuugugauuagggagccauucaucagcuguuccccguuagaaugccggaccuuuuuccugacacagggggcucuacucaaugacaagcacucaaacggaaccaucaacgaucgcagucccuaucgaacucugaugagcuguccuauuggcgaggucccaucucccuacaauucccguuuugaaucaguggccuggagcgcaagugccugccaugacggcauaaacuggcuuacaaucgggauuucuggaccugauaauggugcuguagcaguucugaaauauaacggcaucauaaccgacacgauuaaguccuggagaaauaacaucuugaggacucaggagagcgagugugccugcgugaaugggucguguuucaccgucaugacagauggaccaucugacggccaggcuuccuacaagaucuuucggauugaaaaagguaagaucgugaaaucaguggagaugaacgcccccaauuaucacuacgaagagugcaguuguuacccugauagcuccgagauuacuugcgucugccgcgacaacuggcaugggucuaauagaccauggguuagcuucaaccaaaaucucgaauaucagauaggauacaucuguucaggcaccuuuggcgauaacccgaggcccaaugacaagacagggaguugcggaccuguguccagcaacggugcgaacggcguaaaaggguucucuuuuaaguauggaaauggcguguggauuggucggaccaagucaaucaguagccgcaacggguucgagaugaucugggauccaaauggcuggacgggaacugacaacaauuuuuccauuaaacaggacauagucggcaucaacgaauggucuggguacucggggagcuucgugcaacaccccgagcugacaggucuggauuguauucgaccuugcuucuggguugaacucaucagaggcaggccaaaggagaauaccauuuggacuuccgggucaaguaucucuuuuuguggagugaacagcgacacagucggcugguccuggcccgauggugcagaguuaccguucaccauagacaaauga

SEQ ID NO: 149444 - RNA, 1410 nt, Artificial Sequence
  derived and/or modified CDS sequence (opt3) from neuraminidase__InfluenzaA__AEW25358
augaaccccaaucagaagaucauuaccauaggcagcgugugcaugacaaucgggauggccaaccugauucuccaaaucggaaauauuaucuccauaugggucucucacucaauccagcuugguaaccagaaucagauugagacuuguaaccaaaguguuaucacguacgaaaauaacaccugggugaaucagacauauguaaacauuagcaauacuaacuucgcugcaggccaguccguggucucugugaaacuggccggaaauucgucauugugcccuguuagcggaugggcgaucuacaguaaggacaacuccauaagaauuggcucuaaaggugauguguuugucaucagggagccauucaccagcuguuccccguuagaaugccggacauuuuuccugacccagggggcucuacucaaugacaagcauucaaacggaacuauuaaagaucgcagucccuaucgaacacugaugagcuguccuaucggcgaggugccaucucccuacaacucccguuuugaaucaguagccuggagcgcaagugccugccacgacggcaucaauuggcuuaccauugggauaucuggaccugauaacggugcuguugcagugcugaaguauaauggcaucauuacggacacuaucaaguccuggagaaacaauauauugaggacccaagagagcgagugugccugcgucaacgggucguguuucacagugaugacugauggaccaucugacggccaggcuuccuacaaaauuuuucggaucgaaaaggguaaaaucgugaagucagucgagaugaaugcccccaacuaucauuacgaagagugcaguuguuacccugauagcuccgagauuaccugcguuugccgcgacaauuggcacgggucuaacagaccaugggugagcuucaaucagaaccucgaauaucagaucggauacauuuguucaggcauauuuggcgauaauccgaggcccaacgacaaaacagggaguugcggaccuguauccagcaauggugcgaacggcgugaagggguucucuuuuaaguauggaaacggcgucuggaucggucggaccaaaucaauuaguagccgcaauggguucgagaugaucugggauccaaacggcuggacgggaacugacaauaacuuuuccaucaagcaagacauugugggcauaaaugaauggucuggguacucggggagcuucguucagcaucccgagcugacaggucuggauuguauccgaccuugcuucuggguggaacucauuagaggcaggccaaaagagaacaccaucuggacuuccgggucaaguauuucuuuuuguggagucaauagcgacacagugggcugguccuggcccgauggugcagaguuaccguucaccaucguaaaguga

SEQ ID NO: 149445 - RNA, 1410 nt, Artificial Sequence; identical to SEQ ID NO: 144786
  derived and/or modified CDS sequence (opt3) from neuraminidase__InfluenzaA__AEW25361

SEQ ID NO: 149446 - RNA, 1410 nt, Artificial Sequence
  derived and/or modified CDS sequence (opt3) from neuraminidase__InfluenzaA__AEW25379
augaaccccaaucagaagaucauuaccauaggcagcgugugcaugacaaucgggauggccaaccugauucuccaaaucggaaauauuaucuccauauggacuucucacucaauccagcuugguaaccagaaucagauugagacguguaaccaaagugucaucaccuacgaaaauaacacauggguuaaucagacuuaugugaacauuagcaauaccaacuucgcugcaggccaguccguagugucugucaaacuggccggaaauucgucauugugcccugugagcggaugggcgaucuacaguaaggacaacuccauaagaauuggcucuaaaggugauguuuuugugaucagggagccauucauuagcuguuccccguuagaaugccggacauuuuuccugacccagggggcucuacucaaugacaagcauucaaacggaacuaucaaagaucgcagucccuaucgaacacugaugagcuguccuaucggcgaggucccaucucccuacaacucccguuuugaaucaguggccuggagcgcaagugccugccacgacggcauuaauuggcuuaccauagggaucucuggaccugauaacggugcuguagcaguucugaaguauaauggcauuaucacggacacuauaaaguccuggagaaacaauauuuugaggacccaagagagcgagugugccugcgugaacgggucguguuucacagucaugacugauggaccaucugacggccaggcuuccuacaaaaucuuucggaucgaaaaggguaaaauugugaagucaguggagaugaaugcccccaacuaucauuacgaagagugcaguuguuacccugauagcuccgagguuaccugcgucugccgcgacaauuggcacgggucuaacagaccaugggugagcuucaaucagaaccucgaauaucagaucggauacauuuguucaggcauauuuggcgauaauccgaggcccaacgacaaaacagggaguugcggaccuguauccagcgauggugcgaauggcgugaagggguucucuuuuaaguauggaaacggcgucuggaucggucggaccaaaucaauuaguagccgcaacggguucgagaugaucugggacccaaauggcuggacgggaacugacaacaauuuuuccaucaagcaagauauugugggcauaaacgaauggucuggguacucggggagcuucguucagcaucccgagcugacaggucuggacuguauccgaccuugcuucuggguggaacucauuagaggcaggccaaaagagaauaccaucuggacuuccgggucaaguauuucuuuuuguggagucaacagcgauacagugggcugguccuggcccgacggugcagaguuaccguucaccaucgauaaguga

SEQ ID NO: 149447 - RNA, 1410 nt, Artificial Sequence
  derived and/or modified CDS sequence (opt3) from neuraminidase__InfluenzaA__AEW25387
augaaccccaaucagaagaucauuaccauaggcagcgugugcaugacaaucgggauggccaaccugauucuccaaaucggaaauauuaucuccauauggaucucucacucaauucagcuugguaaccagaaucagaucgagacuuguaaccaaagugucauuacguacgaaaauaacaccuggguuaaucagacauaugugaacaucagcaauacuaacuucgcugcaggccaguccguagugucugucaaacuggccggaaauucgucauugugcccugugagcgggugggcgauauacaguaaggacaacuccauuagaaucggcucuaaaggugauguuuuugugauuagggagccauucaucagcuguuccccguuagaaugccggaccuuuuuccugacacagggggcucuacucaaugacaagcauucaaacggaaccaucaaagaucgcagucccuaucgaacucugaugagcuguccuauuggcgaggucccaucucccuacaacucccguuuugaaucaguggccuggagcgcaagugccugccacgacggcauaaauuggcuuacaaucgggauuucuggaccugauaacggugcuguagcaguucugaaguauaauggcaucauaaccgacacgauuaaguccuggagaaacaauaucuugaggacucaagagagcgagugugccugcguggaugggucguguuucaccgucaugacagacggaccaucugauggccaggcuuccuacaaaaucuuucggauugaaaaggguaaaaucgugaagucaguggagaugaacgcccccaauuaucauuacgaagagugcaguuguuacccugacagcuccgagauuacuugcgucugccgcgauaacuggcacgggucuaauagaccauggguuagcuucaaccagaaucucgaauaucagauaggauacaucuguucaggcauuuuugaggacaacccgaggcccaaugauaaaaccggcaguugcgggccuguguccagcaacggagcgaaugguguaaagggcuucucuuuuaaguaugggaacggaguguggaucggccggacaaaaucaaucaguagccgcaacgguuucgaaaugauuugggacccaaauggguggaccggcacggacaacaauuuuuccauaaagcaagauaucgucggaauuaacgaguggucuggcuacucggggagcuucgugcagcaucccgaacugacuggacuggacuguauccgaccuugcuucuggguugagcucauuagagguaggccaaaagagaauacaaucuggaccuccggcucaaguauaucuuuuuguggggugaacagcgauacugucggaugguccuggcccgacggcgcagaauuaccguucacaaucgauaaguga

SEQ ID NO: 149448 - RNA, 1410 nt, Artificial Sequence
  derived and/or modified CDS sequence (opt3) from neuraminidase__InfluenzaA__AEW25392
augaaccccaaucagaagaucauuaccauaggcagcgugugcaugacaaucgggauggccaaccugauucuccaaaucggaaauauuaucuccauauggaucucucacucaauucagcuugguaaccagaaucagaucgagacuuguaaccaaagugucauuacguacgaaaauaacaccuggguuaaucagacauaugugaacaucagcaauacuaacuucgcugcaggccaguccguagugucugucaaacuggccggaaauucgucauugugcccugugagcggaugggcgauauacaguaaggacaacuccauuagaaucggcucuaaaggugauguuuuugugauuagggagccauucaucagcuguuccccguuagaaugccggaccuuuuuccugacacagggggcucuacucaaugacaagcauucaaacggaaccaucaaagaucgcagucccuaucgaacucugaugagcuguccuauuggcgaggucccaucucccuacaacucccguuuugaaucaguggccuggagcgcaagugccugccacgacggcauaaauuggcuuacaaucgggauuucuggaccugauaacggugcuguagcaguucugaaguauaauggcaucauaaccgacacgauuaaguccuggagaaacaauaucuugaggacucaagagagcgagugugccugcgugaacgggucguguuucaccgucaugacagauggaccaucugacggccaggcuuccuacaaaaucuuucggauugaaaaggguaaaaucgugaagucaguggagaugaaugcccccaacuaucauuacgaagagugcaguuguuacccugauagcuccgagauuacuugcgucugccgcgacaauuggcacgggucuaacagaccauggguuagcuucaaucagaaccucgaauaucagauaggauacaucuguucaggcauuuuuggcgauaauccgaggcccaacgacaaaaccgggaguugcggaccuguguccagcaauggugcgaacggcguaaagggguucucuuuuaaguauggaaacggcguguggaucggucggacaaaaucaaucaguagccgcaauggguucgagaugauuugggauccaaacggcuggaccggaacggacaauaacuuuuccauaaagcaugacaucgucggcauuaaugaauggucuggguacucggggagcuucgugcaacaccccgagcugacuggucuggauuguauccgaccuugcuucuggguugaacucauuagaggcaggccaaaagagaacacaaucuggaccuccgggucaaguauaucuuuuuguggagugaauagcgacacugucggcugguccuggcccgauggugcagaguuaccguucacaaucgacaaguga

SEQ ID NO: 149449 - RNA, 1410 nt, Artificial Sequence
  derived and/or modified CDS sequence (opt3) from neuraminidase__InfluenzaA__AEW25397
augaaccccaaucagaagaucauuaccauaggcagcgugugcaugacaaucgggauggccaaccugauucuccaaaucggaaauauuaucuccauauggaucucucacucaauucagcuugguaaccagaaucagaucgagacuuguaaccaaagugucauuacguacgaaaauaacaccuggguuaaucagacauaugugaacaucagcaauacuaacuucgcugcaggccaguccguagugucugucaaacuggccggaaauucgucauugugcccugugagcggaugggcgauauacaguaaggacaacuccauuagaaucggcucuaaaggugauguuuuugugauuagggagccauucaucagcuguuccccguuagaaugccggaccuuuuuccugacacagggggcucuacucaaugacaagcauucaaacggaaccaucaaagaucgcagucccuaucgaacucugaugagcuguccuauuggcgaggucccaucucccuacaacucccguuuugaaccuguggccuggucagcaagcgccugccacgacggcauaaauuggcuuacaaucgggauuaguggaccagauaacggugcuguagcaguucugaaguauaauggcaucauaaccgacacgauuaagucuuggagaaacaauaucuugaggacucaagaguccgagugugccugcgugaacgggagcuguuucaccgucaugacagauggacccucggacggccaggcuucuuacaaaaucuuucggauugaaaaggguaaaaucgugaaguccguggagaugaaugccccuaacuaucauuacgaagagugcucauguuacccagauaguagcgagauuacuugcgucugccgcgacaauuggcacggguccaacagaccguggguuucuuucaaucagaaccucgaauaucagauaggauacaucuguagcggcauuuuuggcgauucacccaggccuaaugacaaaaccgggaguugcggaccaguguccagcaacggugcgaauggcguaaagggguucucuuuuaaguauggaaacggcguguggaucggucggacaaaaucaaucaguagccgcaacggguucgagaugauuugggaucccaauggcuggaccggaacggacaacaauuuuuccauaaagcaagacaucgucggcauuaacgaauggucuggguacucggggagcuucgugcagcauccugagcugacuggucuggauuguauccgaccaugcuucuggguugaacucauuagaggcaggcccaaagagaauacaaucuggaccuccgggucaaguauaucuuuuuguggagugaacagcgacaaugucggcugguccuggccggauggugcagaguuaccuuucacuaucgacaaguga

SEQ ID NO: 149450 - RNA, 1410 nt, Artificial Sequence; identical to SEQ ID NO: 144786
  derived and/or modified CDS sequence (opt3) from neuraminidase__InfluenzaA__AEW25402

SEQ ID NO: 149451 - RNA, 1410 nt, Artificial Sequence; identical to SEQ ID NO: 144786
  derived and/or modified CDS sequence (opt3) from neuraminidase__InfluenzaA__AEW25407

SEQ ID NO: 149452 - RNA, 1410 nt, Artificial Sequence
  derived and/or modified CDS sequence (opt3) from neuraminidase__InfluenzaA__AEW25418
augaaccccaaucagaagaucauuaccauaggcagcgugugcaugacaaucgggauggccaaccugauucuccaaaucggaaauauuaucuccauauggaucucucacucaauucagcuugguaaccagaaucagaucgagacuuguaaccaaagugucauuacguacgaaaauaacaccuggguuaaucauacauaugugaacaucagcaauacuaacuucgcugcaggccaguccguagugucugucaaacuggccggaaauucgucauugugcccugugagcgggugggcgauauacaguaaggacaacuccauuagaaucggcucuaaaggugauguuuuugugauuagggagccauucaucagcuguuccccguuagaaugccggaccuuuuuccugacacagggggcucuacucaaugacaagcacucaaacggaaccaucaaagaucgcagucccuaucgaacucugaugagcuguccuauuggcgaggucccaucucccuacaacucccguuuugaaucaguggccuggagcgcaagugccugccaugacggcauaaauuggcuuacaaucgggauuucuggaccugauaacggugcuguagcaguucugaaguauaauggcaucauaaccgacacgauuaaguccuggagaaacaauaucuugaggacucaggagagcgagugugccugcgugaacgggucguguuucaccgucaugacagauggaccaucugacggccaggcuuccuacaaaaucuuucggauugguaaggggaaaaucgugaagucaguggaaaugaaugcccccaacuaucacuacgaggaaugcaguuguuacccugauagcuccgagauuacuugcgucugccgcgacaauuggcauggaucuaacagaccauggguuagcuucaaucaaaaccucgaguaucagauaggcuacaucuguucaggcauuuuuggggauaauccgaggcccaacgacaaaaccggaaguugcgguccuguguccagcaauggcgaaaacgggguaaagggauucucuuuuaaguauggcaacgguguguggaucgggcggacaaaaucaaucaguagccgcaauggcuucgagaugauuugggauccaaacggauggaccggcacggacaauaacuuuuccauaaagcaggacaucgucgggauuaaugaauggucuggauacucggguagcuucgugcaacaccccgagcugacuggccuggauuguauccgaccuugcuucuggguugaacucauuagagggaggccaaaagagaacacaaucuggaccuccggaucaaguauaucuuuuuguggcgugaauagcgacacugucgguugguucuggcccgauggggcggaguuaccguuuacaaucgacaaguga

SEQ ID NO: 149453 - RNA, 1410 nt, Artificial Sequence
  derived and/or modified CDS sequence (opt3) from neuraminidase__InfluenzaA__AEW25423
augaaccccaaucagaagaucauuaccauaggcagcgugugcaugacaaucgggauggccaaccugauucuccaaaucggaaauauuaucuccauauggaucucuaacucaauucagcuugguaaucagaaccagaucgagacuuguaaucaaagugucauuacguacgaaaacaauaccuggguuaaccagacauaugugaauaucagcaacacuaauuucgcugcaggccaguccguagugucugucaaacuggccgggaacucgucauugugcccugugagcggaugggcgauauacaguaaggacaauuccauuagaaucggcucuaaaggugauguuuuugugauuagggagccauucaucagcuguuccccguuagaaugccggaccuuuuuccugacacagggggcucuacucaacgacaagcacucaaacggaaccaucaaagaucgcagucccuaucgaacucugaugagcuguccuauuggcgaggucccaucucccuacaauucccguuuugaaucaguggccuggagcgcaagugccugccaugacggcauaaacuggcuuacaaucgggauuucuggaccugauaauggugcuguagcaguucugaaguauaacggcaucauaaccgacacgauuaaguccuggagaaauaacaucuugaggacucaagagagcgagugugccugcgugaaugggucguguuucaccgucaugacagauggaccaucugacggccaggcuuccuacaaaaucuuucggauugaaaaggguaaaaucgugaagucaguggagaugaacgcccccaauuaucacuacgaagagugcaguuguuacccugauagcuccgagauuacuugcgucugccgcgacaacuggcaugggucuaauagaccauggguuagcuucaaccagaaucucgaauaucagauaggauacaucuguucaggcauuuuuggcgauaacccgaggcccaaugacaaaaccgggaguugcggaccuguguccagcaacggugcgaacggcguaaagggguucucuuuuaaguauggaaauggcguguggaucggucggacaaaaucaaucaguagccgcaacggguucgagaugauuugggauccaaauggcuggaccggaacggacaacaauuuuuccauaaagcaagacaucgucggcauuaacgaauggucuggguacucggguagcuucgugcagcaccccgagcugacuggacuggauuguauccgaccuugcuucuggguugaacucauuagaggcaggccaaaagagaauacaaucuggaccuccgggucaaguauaucuuuuuguggagugaacagcgacacugucggcugguccuggcccgauggugcagaguuaccguucacaaucgacaaguga

SEQ ID NO: 149454 - RNA, 1410 nt, Artificial Sequence; identical to SEQ ID NO: 144786
  derived and/or modified CDS sequence (opt3) from neuraminidase__InfluenzaA__AEW25426

SEQ ID NO: 149455 - RNA, 1410 nt, Artificial Sequence
  derived and/or modified CDS sequence (opt3) from neuraminidase__InfluenzaA__AEW25432
augaaccccaaucagaagaucauuaccauaggcagcgugugcaugacaaucgggauggccaaccugauucuccaaaucggaaauauuaucuccauauggacuucucacucaauccagcuugguaaccagaaucagauugagacguguaaccaaagugucaucaccuacgaaaauaacacauggguuaaucagacuuaugugaacauuagcaauaccaacuucgcugcaggccaguccguagugucugucaaacuggccggaaauucgucauugugcccugugagcgggugggcgaucuacaguaaggacaacuccauaagaauuggcucuaaaggugauguuuuugugaucagggagccauucauuagcuguuccccguuagaaugccggacauuuuuccugacccagggggcucuacucaaugacaagcauucaaacggaacuaucaaagaucgcagucccuaucgaacacugaugagcuguccuaucggcgaggucccaucucccuacaacucccguuuugaaucaguggccuggagcgcaagugccugccacgacggcauuaauuggcuuaccauagggaucucuggaccugauaacggugcuguagcaguucugaaguauaauggcauuaucacggacacuauaaaguccuggagaaacaauauuuugaggacccaagagagcgagugugccugcgugaacgggucguguuucacagucaugacugauggaccaucugacggccaggcuuccuacaaaaucuuucggaucgaaaaggguaaaauugugaagucaguggagaugaaugcccccaacuaucauuacgaagagugcaguuguuacccugauagcuccgagauuaccugcgucugccgcgacaauuggcacgggucuaacagaccauggguuagcuucaaucagaaccucgaauaucagaucggauacauauguucaggcaucuuuggcgauaauccgaggcccaacgacaaaacagggaguugcggaccuguguccagcaauggugcgaacggcguaaagggguucucuuuuaaguauggaaacggcguguggauuggucggaccaaaucaaucaguagccgcaauggguucgagaugaucugggauccaaacggcuggacgggaacugacaauaacuccucuauuaagcaagacauagucggcaucaaugaauggucgggguacagcggauccuuugugcagcaucccgagcugacaggucuggauuguauucgaccuugcuucuggguugaacucaucagaggcaggccaaaagagaacaccauuuggacuucagggaguucuaucagcuucuguggaauaaauuccgacgcagugggcuggucauggcccgauggugccgaguuaccguuuacaaucgacaaguga

SEQ ID NO: 149456 - RNA, 1410 nt, Artificial Sequence
  derived and/or modified CDS sequence (opt3) from neuraminidase__InfluenzaA__AEW25436
augaaccccaaucagaagaucauuaccauaggcagcgugugcaugacaaucgggauggccaaccugauucuccaaaucggaaauauuaucuccauauggaucucucacucaauucagcuugguaaccagaaucagaucgagacuuguaaccaaaguauuaucacguacgaaaauaacaccugggucaaucagacauauguuaacauaagcaauacuaacuucgcugcaggccaguccgugguaucugugaaacuggccggaaauucgucauugugcccugucagcggaugggcgauuuacaguaaggacaacuccaucagaauuggcucuaaaggugauguguuuguuaucagggagccauucaucagcuguuccccguuagaaugccggaccuuuuuccugacacagggggcucuacucaaugacaagcauucaaacggaaccauuaaagaucgcagucccuaucgaacucugaugagcuguccuauaggcgaggugccaucucccuacaacucccguuuugaaucagucgccuggagcgcaagugccugccacgacggcaucaauuggcuuacaauugggaucucuggaccugauaacggugcuguggcaguacugaaguauaauggcauaauuaccgacacgaucaaguccuggagaaacaauaucuugaggacucaagagagcgagugugccugcguuaacgggucguguuucaccgugaugacagauggaccaucugacggccaggcuuccuacaaaauuuuucggaucgaaaaggguaaaauugucaagucaguggagaugaaugcccccaacuaucauuacgaagagugcaguuguuacccugauagcuccgagauaacuugcgugugccgcgacaauuggcacgggucuaacagaccaugggucagcuucaaucagaaccucgaauauaggaucggauacauuuguucaggcaucuuuggcgauaauccgcggcccaacgacaaaaccgggaguugcggaccuguuuccagcaauggugcgaacggcgugaagggguucucuuuuaaguauggaaacggcguauggaucggucgcacaaaaucaauuaguagccgaaauggguucgagaugauaugggauccaaacggcuggaccggaacggacaauaacuuuuccaucaagcaggacauugugggcacuaaugaauggucuggguacucggggagcuucguccaacaucccgagcugacaggucuggauuguaucagaccuugcuucuggguggaacucauuaggggccggccaaaagagaacaccaucuggacuuccgggucaaguauaucuuuuuguggaguuaauagcgacacaaugggcugguccuggcccgauggugcagaguuaccguucaccaucgacaaguga

SEQ ID NO: 149457 - RNA, 1410 nt, Artificial Sequence; identical to SEQ ID NO: 144786
  derived and/or modified CDS sequence (opt3) from neuraminidase__InfluenzaA__AEW25440

SEQ ID NO: 149458 - RNA, 1410 nt, Artificial Sequence
  derived and/or modified CDS sequence (opt3) from neuraminidase__InfluenzaA__AEW25448
augaaccccaaucagaagaucauuaccauaggcagcgugugcaugacaaucgggauggccaaccugauucuccaaaucggaaauauuaucuccauauggaucucucacucaauucagcuugguaaccagaaucagaucgagacuuguaaccaaagugucauuacguacgaaaauaacaccuggguuaaucagacauaugugaacaucagcaauacuaacuucgcugcaggccaguccguagugucugucaaacuggccggaaauucgucauugugcccugugagcggaugggcgauauacaguaaggacaacuccauuagaaucggcucuaaaggugauguuuuugugauuagggagccauucaucagcuguuccccguuagaaugccggaccuuuuuccugacacagggggcucuacucaaugacaagcauucaaacggaaccaucaaagaucgcagucccuaucgaacucugaugagcuguccuauuggcgaggucccaucucccuacaacucccguuuugaaucaguggccuggagcgcaagugccugccacgacggcauaaauuggcuuacaaucgggauuucuggaccugauaacggugcuguagcaguucugaaguauaauggcaucauaaccgacacgauuaaguccuggagaaacaauaucuugaggacucaagagagcgagugugccugcgugaacgggucguguuucaccgucaugacagauggaccaucugacggccaggcuuccuacaaaaucuuucggauugaaaaggguaaaaucgugaagucaguggagaugaaugcccccaacuaucauuacgaagagugcaguuguuacccugauagcuccgagauuacuugcgucugccgcgacaauuggcacgggucuaacagaccauggguuagcuucaaucagaaccucgaauaucagauaggauacaucuguucaggcauuuuuggcgauaauccgaggcccaacgacaaaaccgggaguugcggaccuguguccagcaauggugcgaacggcguaaagggguucucuuuuaaguauggaaacggcguguggaucggucggacaaaaucaaucaguagccgcaauggguucgagaugauuugggauccaaacggcuggaccggaacggacaauaacuuuuccauaaagcaagacaucgucggcauuaaugaauggucuggguacucggggagcuucgugcagcaucccgagcugacuggucuggauuguauccgaccuugcuucuggguugaacucauuagaggcaggccaaaagagaacacaaucuggaccuccgggucaaguauaucuuuuuguggagugaauagcgacacugucggcugguccuggcccgauggugcagaguuaccguucacaaccgacaaguga

SEQ ID NO: 149459 - RNA, 1410 nt, Artificial Sequence; identical to SEQ ID NO: 144786
  derived and/or modified CDS sequence (opt3) from neuraminidase__InfluenzaA__AEW25456

SEQ ID NO: 149460 - RNA, 1410 nt, Artificial Sequence
  derived and/or modified CDS sequence (opt3) from neuraminidase__InfluenzaA__AEW25464
augaaccccaaucagaagaucauuaccauaggcagcgugugcaugacaaucgggauggccaaccugauucuccaaaucggaaauauuaucuccauauggaucucucacucaauucagcuugguaaccagaaucagaucgagacuuguaaccaaagugucauuacguacgaaaauaacaccuggguuaaucagacauaugugaacaucagcaauacuaacuucgcugcaggccaguccguagugucugucaaacuggccggaaauucgucauugugcccugugagcggaugggcgauauacaguaaggacaacuccauuagaaucggcucuaaaggugauguuuuugugauuagggagccauucaucagcuguuccccguuagaaugccggaccuuuuuccugacacagggggcucuacucaaugacaagcauucaaacggaaccaucaaagaucgcagucccuaucgaacucugaugagcuguccuauuggcgaggucccaucucccuacaacucccguuuugaaucaguggccuggagcgcaagugccugccacgacggcauaaauuggcuuacaaucgggauuucuggaccugauaacggugcuguagcaguucugaaguauaauggcaucauaaccgacacgauuaaguccuggagaaacaauaucuugaggacucaagagagcgagugugccugcgugaacgggucguguuucaccgucaugacagauggaccaucugacggccaggcuuccuacaaaaucuuucggauugaaaaggguaaaaucgugaagucaguggagcucaaugcccccaacuaucauuacgaagagugcaguuguuacccugauagcuccgagauuacuugcgucugccgcgacaauuggcacgggucuaacagaccauggguuagcuucaaucagaaccuggaauaucagauaggauacaucuguucaggcauuuuuggcgauaauccgaggcccaacgacaaaaccgggaguugcggaccuguguccagcaauggugcgaacggcguaaagggguucucuuuuaaguauggaaacggcguguggaucggucggacaaaaucaaucaguagccgcaauggguucgagaugauuugggauccaaacggcuggaccggaacggacaauaacuuuuccauaaagcaagacaucgucggcauuaaugaauggucuggguacucggggagcuucgugcagcaucccgagcugacuggucucgauuguauccgaccuugcuucuggguugaauuaauuagaggcaggccaaaagagaacacaaucuggaccuccgggucaaguauaucuuuuuguggagugaauagcgacacugucggcugguccuggcccgauggugcagagcugccguucacaaucgacaaguga

SEQ ID NO: 149461 - RNA, 1410 nt, Artificial Sequence
  derived and/or modified CDS sequence (opt3) from neuraminidase__InfluenzaA__AEW25474
augaaccccaaucagaagaucauuaccauaggcagcgugugcaugacaaucgggauggccaaccugauucuccaaaucggaaauauuaucuccauauggaucucucacucaauucagcuugguaaccagaaucagaucgagacuuguaaccaaagugucauuacguacgaaaauaacaccuggguuaaucagacauaugugaacaucagcaauacuaacuucgcugcaggccaguccguagugucugucaaacuggccggaaauucgucauugugcccugugagcggaugggcgauauacaguaaggacaacuccauuagaaucggcucuaaaggugauguuuuugugauuagggagccauucaucagcuguuccccguuagaaugccggaccuuuuuccugacacagggggcucuacucaaugacaagcauucaaacggaaccaucaaagaucgcagucccuaucgaacucugaugagcuguccuauuggcgaggucccaucucccuacaacucccguuuugaaucaguggccuggagcgcaagugccugccacgacggcauaaauuggcuuacaaucgggauuucuggaccugauaacggugcuguagcaguucugaaguauaauggcaucauaaccgacacgauuaaguccuggagaaacaauaucuugaggacucaagagagcgagugugccugcgugaacgggucguguuucaccgucaugacagauggaccaucugacggccaggcuuccuacaaaaucuuucggauugaaaaggguaaaaucgugaagucaguggagaugaaugcccccaacuaucauuacgaagagugcaguuguuacccugauagcuccgagauuacuugcgucugccgcgacaauuggcacgggucuaacagaccauggguuagcuucaaucagaaccucgaauaucagauaggauacaucuguucaggcauuuuuggcgauaauccgaggcccaacgacaaaaccgggaguugcggaccuguguccagcaauggugcgaacggcguaaagggguucucuuuuaaguauggaaacggcguguggaucggucggacaaaaucaaucaguagccgcaauggguucgagaugauuugggauccaaacggcuggaccggaacggacaauaacuuuuccauaaagcaagacaucgucggcauuaaugaauggucuggguacucggggagcuucgugcagcaucccgagcugacuggucuggauuguauccgaccuugcuucuggguugaacucauuagaggcaggccaaaagagaacacaaucuggaccuccgggucaaguauaucuuuuuguggagugaauagcgacacugucggcugguccuggcccgauggugcagaguuaccgucaacaaucgacaaguga

SEQ ID NO: 149462 - RNA, 1410 nt, Artificial Sequence
  derived and/or modified CDS sequence (opt3) from neuraminidase__InfluenzaA__AEW25484
augaaccccaaucagaagaucauuaccauaggcagcgugugcaugacaaucgggauggccaaccugauucuccaaaucggaaauauuaucuccauauggaucucucacucaauucagcuugguaaccagaaucagaucgagacuuguaaccaaagugucauuacguacgaaaauaacaccuggaucaaucagacauauguuaacauaagcaauacuaacuucgcugcaggccaguccgugguaucugugaaacuggccggaaauucgucauugugcccugucagcggaugggcgauuuacaguaaggacaacuccaucagaauuggcucuaaaggugauguguuuguuaucagggagccauucaucagcuguucccauuuagaaugccggaccuuuuuccugacacagggggcucuacucaaugacaagcacucaaacggaaccauuaaagaucgcaguccguaucgaacucugaugagcugucccauaggcgaggugccuucuccauacaacucccguuuugaaucagucgccuggagcgcaagugccugccaugacggcaucaauuggcuuacaauugggaucucuggacccgaucacggugcuguggcaguacugaaguauaacggcauaauuaccgacacgaucaaguccuggagaaauaacaucuugaggacucaagagagcgagugugccugcguuaaugggucguguuucaccgugaugacagauggaccuucugacggccaggcuuccuacaaaauuuuucggaucgaaaaggguaaaauugucaagucaguggagaugaacgccccaaauuaucauuacgaagagugcaguuguuaccccgauagcuccgagauaacuugcgugugccgcgacaacuggcacgggucuaauagaccuugggucagcuucaaccagaaucucgaauaucagaucggauacauuuguucaggcaucuuuggcgauaacccaaggccgaaugacaaaaccgggaguugcggacccguuuccagcaacggugcgaauggcgugaagggguucucuuuuaaguauggaaacggcguauggaucggucggacaaaaucaauuaguagccgcaacggguucgagaugauaugggauccuaauggcuggaccggaacggacaacaauuuuuccaucaagcaagacauugugggcaucaacgaauggucuggguacucggggagcuucguccagcacccagagcugacuggucuggauuguauucgacccugcuucuggguggaacucaucagaggcaggccuaaagagaauacaauauggaccuccgggucaaguaucucuuuuuguggaguuaacagcgacacugugggcugguccuggccagauggugcagaguuacccuucacaauugacaaguga

SEQ ID NO: 149463 - RNA, 1410 nt, Artificial Sequence
  derived and/or modified CDS sequence (opt3) from neuraminidase__InfluenzaA__AEW25494
augaaccccaaucagaagaucauuaccauaggcagcgugugcaugacaaucgggauggccaaccugauucuccaaaucggaaauauuaucuccauauggaucucucacucaauucagcuugguaaccagaaucagaucgagacuuguaaccaaagugucauuacguacgaaaauaacaccuggguuaaucagacauaugugaacaucagcaauacuaacuucgcugcaggccaguccguagugucugucaaacuggccggaaauucgucauugugcccugugagcgggugggcgauauacaguaaggacaacuccauuagaaucggcucuaaaggugauguuuuugugauuagggagccauucaucagcuguuccccguuagaaugccggaccuuuuuccugacacagggggcucuacucaaugacaagcauucaaacggaaccaucaaagaucgcagucccuaucgaacucugaugagcuguccuauuggcgaggucccaucucccuacaacucccguuuugaaucaguggccuggagcgcaagugccugccacgacggcauaaauuggcuuacaaucgggauuucuggaccugauaacggugcuguagcaguucugaaguauaauggcaucauaaccgacuccauuaagagcuggagaaacaauaucuugaggacgcaagagucggagugugccugcgugaacgggucuuguuucacugucaugaccgauggaccauccgacggccaggcuucauacaaaaucuuucggauugaaaaggguaaaaucgugaagaguguggagaugaaugcccccaacuaucauuacgaagagugcagcuguuacccugauuccucugagauuacaugcgucugccgcgacaauuggcacgggagcaacagaccauggguuucauucaaucagaaccucgaauaucagauaggauacaucuguaguggcacuuuuggcgauaauccgaggcccaacgacaaaaccggguccugcggaccugugagcucuaauggugcgaacggcguaaagggguucucauuuaaguauggaaacggcguguggauuggucggacaaaaaguaucagcucccgcaauggguucgagaugaucugggauccaaacggcuggaccggaacggacaauaacuuuucuauuaagcaagacauagucggcaucaaugaauggucgggguacagcggauccuucgugcagcaucccgagcugacuggucuggauuguauucgaccuugcuucuggguugaacucaucagaggcaggccaaaagagaacacaauuuggaccucagggaguucuaucagcuuuuguggagucaauuccgacacugugggcuggucauggcccgauggugcagaguuaccguucacaauagacaaguga

SEQ ID NO: 149464 - RNA, 1410 nt, Artificial Sequence
  derived and/or modified CDS sequence (opt3) from neuraminidase__InfluenzaA__AEW25503
augaaccccaaucagaagaucauuaccauaggcagcgugugcaugacaaucgggauggccaaccugauucuccaaaucggaaauauuaucuccauauggaucucucacucaauucagcuugguaaccagaaucagaucgagacuuguaaccaaagugucauuacguacgaaaauaacaccuggguuaaucagacauaugugaacaucagcaauacuaacuucgcugcaggccaguccguagugucugucaaacuggccggaaauucgucauugugcccugugagcggaugggcgauauacaguaaggacaacuccauuagaaucggcucuaaaggugauguuuuugugauuagggagccauucaucagcuguuccccguuagaaugccggaccuuuuuccugacacagggggcucuacucaaugacaagcauucaaacggaaccaucaaagaucgcagucccuaucgaacucugaugagcuguccuauuggcgaggucccaucucccuacaacucccguuuugaaucaguggccuggagcgcaagugccugccacgacggcauaaauuggcuuacaaucgggauuucuggaccugauaacggugcuguagcaguucugaaguauaauggcaucauaaccgacacgauuaaguccuggagaaacaauaucuugaggacucaagagagcgagugugccugcgugaacgggucguguuucaccgucaugacagauggaccaucugacggccaggcuuccuacaaaaucuuucggauugaaaaggguaaaaucgugaagucaguggagaugaaugcccccaacuaucauuacgaagagugcaguuguuacccugauagcuccgagauuacuugcgucugccgcgacaauuggcacgggucuaacagaccauggguuagcuucaaucagaaccucgaauaucagauaggauacaucuguucaggcauuuuuggcgauaauccgaggcccaacgacaaaaccgggaguugcggaccuguguccagcaauggugcgaacggcguaaagggguucucuuuuaaguauggaaacggcgcauggaucggucggacaaaaucaaucaguagccgcaauggguucgagaugauuugggauccaaacggcuggaccggaacggacaauaacuuuuccauaaagcaagacaucgugggcauuaaugaauggucuggguacucggggagcuucguccagcaucccgagcugacuggucuggauuguauccgaccuugcuucuggguggaacucauuagaggcaggccaaaagagaacacaaucuggaccuccgggucaaguauaucuuuuuguggaguuaauagcgacacugugggcugguccuggcccgauggugccgaguuaccguucacaaucgacaaguga

SEQ ID NO: 149465 - RNA, 1410 nt, Artificial Sequence
  derived and/or modified CDS sequence (opt3) from neuraminidase__InfluenzaA__AEW25511
augaaccccaaucagaagaucauuaccauaggcagcgugugcaugacaaucgggauggccaaccugauucuccaaaucggaaauauuaucuccauauggaucucucacucaauucagcuugguaaccagaaucagaucgagacuuguaaccaaagugucauuacguacgaaaauaacaccuggguuaaucauacauaugugaacaucagcaauacuaacuucgcugcaggccaguccguagugucugucaaacuggccggaaauucgucauugugcccugugagcggaugggcgauauacaguaaggacaacuccauuagaaucggcucuaaagguguuguguuugucauuagggagccauucaucagcuguuccccguuagaaugccggaccuuuuuccugacacagggggcucuacucaaugauaagcacucaaacggaaccaucaaagaccgcagucccuaucgaacucugaugagcuguccuauuggcgaggugccaucucccuacaacucccguuuugaaucaguagccuggagcgcaagugccugccaugauggcauaaauuggcuuacaaucgggauuucuggaccugacaacggugcuguugcagugcugaaguauaauggcaucauaaccgauacgauuaaguccuggagaaacaauaucuugaggacucaggagagcgagugugccugcgucaacgggucguguuucaccgugaugacagacggaccaucugauggccaggcuuccuacaaaaucuuucggauugaaaaggguaaaaucgugaagucagucgagaugaaugcccccaacuaucacuacgaagagugcaguuguuacccugacagcuccgagauuacuugcguuugccgcgauaauuggcaugggucuaacagaccaugggugagcuucaaucaaaaccucgaauaucagauaggauacaucuguucaggcauuuuuggcgacaauccgaggcccaacgauaaaaccgggaguugcggaccuguauccagcaauggugcgaacggcgugaagggguucucuuuuaaguauggaaacggcgucuggaucggucggacaaaaucaaucaguagccgcaauggguucgagaugauuugggacccaaacggcuggaccggaacggauaauaacuuuuccauaaagcaggacaucgugggcauuaaugaauggucuggguacucggggagcuucguucaacaccccgagcugacuggucuggacuguauccgaccuugcuucuggguggaacucauuagaggcaggccaaaagagaacacaaucuggaccuccgggucaaguauaucuuuuuguggagucaauagcgauacugugggcugguccuggcccgacggugcagaguuaccguucacaaucgauaaguga

SEQ ID NO: 149466 - RNA, 1410 nt, Artificial Sequence
  derived and/or modified CDS sequence (opt3) from neuraminidase__InfluenzaA__AEW25530
augaaccccaaucagaagaucauuaccauaggcagcgugugcaugacaaucgggauggccaaccugauucuccaaaucggaaauauuaucuccauauggaucucucacucaauucagcuugguaaccagaaucagaucgagacuuguaaccaaagugucauuacguacgaaaauaacaccuggguuaaucauacauaugugaacaucagcaauacuaacuucgcugcaggccaguccguagugucugucaaacuggccggaaauucgucauugugcccugugagcggaugggcgauauacaguaaggacaacuccauuagaaucggcucuaaaggugauguuuuugugauuagggagccauucaucagcuguuccccguuagaaugccggaccuuuuuccugacacagggggcucuacucaaugacaagcacucaaacggaaccaucaaagaucgcagucccuaucgaacucugaugagcuguccuauuggcgaggucccaucucccuacaacucccguuuugaaucaguggccuggagcgcaagugccugccaugacggcauaaauuggcuuacaaucgggauuucuggaccugauaacggugcuguagcaguucugaaguauaauggcaucauaaccgacacgauuaaguccuggagauacaacaucuugaggacucaggagagcgagugugccugcgugaaugggucguguuucaccgucaugacagauggaccaucugacggccaggcuuccuauaaaaucuuucggauugaaaaggguaaaaucgugaagucaguggagaugaacgcccccaauuaccacuacgaagagugcaguuguuauccugauagcuccgagauuacuugcgucugccgcgacaacuggcaugggucuaauagaccauggguuagcuucaaccaaaaucucgaauaccagauaggauauaucuguucaggcauuuuuggcgauaacccgaggcccaaugacaaaaccgggaguugcggaccuguguccagcaacggugagaauggcguaaagggguucucuuuuaaguacggaaacggcguguggaucggucggacaaaaucaaucaguagccgcaacggguucgaaaugauuugggauccaaauggcuggaccggaacggacaacaauuuuuccauaaagcaggacaucgucggcauuaacgaguggucuggguauucggggagcuucgugcaacaccccgaacugacuggucuggauuguauccgaccuugcuucuggguugagcucauuagaggcaggccaaaagagaauacaaucuggaccuccgggucaaguauaucuuuuuguggagugaacagcgacacugucggcugguccuggcccgauggugcggaauuaccguucacaaucgacaaguga

SEQ ID NO: 149467 - RNA, 1410 nt, Artificial Sequence
  derived and/or modified CDS sequence (opt3) from neuraminidase__InfluenzaA__AEW25537
augaaccccaaucagaagaucauuaccauaggcagcgugugcaugacaaucgggauggccaaccugauucuccaaaucggaaauauuaucuccauauggaucucucacucaauucagcuugguaaccagaaucagaucgagacuuguaaccaaagugucauuacguacgaaaauaacaccuggguuaaucagacauaugugaacaucagcaauacuaacuucgcugcaggccaguccguagugucugucaaacuggccggaaauucgucauugugcccugugagcggaugggcgauauacaguaaggacaacuccauuagaaucggcucuaaaggugauguuuuugugauuagggagccauucaucagcuguuccccguuagaaugccggaccuuuuuccugacacagggggcucuacucaaugacaagcauucaaacggaaccaucaaagaucgcagucccuaucgaacucugaugagcuguccuauuggcgaggucccaucucccuacaacucccguuuugaaucaguggccuggagcgcaagugccugccacgacggcauaaauuggcuuacaaucgggauuucuggaccugauaacggugcuguagcaguucugaaguauaauggcaucauaaccgacacgauuaaguccuggagaaacaauaucuugaggacucaagagagcgagugugccugcgugaacgggucguguuucaccgucaugacagauggaccaucugacggccaggcuuccuacaaaaucuuucggauugaaaaggguaaaaucgugaagucaguggagaugaaugcccccaaccaucacuaugaagagugcaguuguuacccugauagcuccgagauuacuugcgucugccgcgacaauuggcaugggucuaacagaccauggguuagcuucaaucagaaccucgaauaccagauaggauauaucuguucaggcauuuuuggcgauaauccgaggcccaacgacaaaaccgggaguugcggaccuguguccagcaauggugcgaacggcguaaagggguucucuuuuaaguacggaaacggcguguggaucggucggacaaaaucaaucaguagccgcaauggguucgagaugauuugggauccaaacggcuggaccggaacggacaauaacuuuuccauaaagcaagacaucgucggcauuaaugaauggucuggguauucggggagcuucgugcagcaccccgagcugacuggucuggauuguauccgaccuugcuucuggguugaacucauuagaggcaggccaaaagagaacacaaucuggaccuccgggucaaguauaucuuuuuguggagugaauagcgacacugucggcugguccuggcccgauggugcagaguuaccguucacaaucgacaaguga

SEQ ID NO: 149468 - RNA, 1410 nt, Artificial Sequence; identical to SEQ ID NO: 144786
  derived and/or modified CDS sequence (opt3) from neuraminidase__InfluenzaA__AEW25547

SEQ ID NO: 149469 - RNA, 1410 nt, Artificial Sequence; identical to SEQ ID NO: 144786
  derived and/or modified CDS sequence (opt3) from neuraminidase__InfluenzaA__AEW25556

SEQ ID NO: 149470 - RNA, 1410 nt, Artificial Sequence; identical to SEQ ID NO: 144786
  derived and/or modified CDS sequence (opt3) from neuraminidase__InfluenzaA__AEW25566

SEQ ID NO: 149471 - RNA, 1410 nt, Artificial Sequence
  derived and/or modified CDS sequence (opt3) from neuraminidase__InfluenzaA__AEW25584
augaaccccaaucagaagaucauuaccauaggcagcgugugcaugacaaucgggauggccaaccugauucuccaaaucggaaauauuaucuccauauggaucucucacucaauucagcuugguaaccagaaucagaucgagacuuguaaccaaagugucauuacguacgaaaauaacaccuggguuaaucagacauaugugaacaucagcaauacuaacuucgcugcaggccaguccguagugucugucaaacuggccggaaauucgucauugugcccugugagcgggugggcgauauacaguaaggacaacuccauuagaaucggcucuaaaggugauguuuuugugauuagggagccauucaucagcuguuccccguuagaaugccggaccuuuuuccugacacagggggcucuacucaaugacaagcauucaaacggaaccaucaaagaucgcagucccuaucgaacucugaugagcuguccuauuggcgaggucccaucucccuacaacucccguuuugaaucaguggccuggagcgcaagugccugccacgacggcauaaauuggcuuacaaucgggauuucuggaccugauaacggugcuguagcaguucugaaguauaauggcaucauaaccgacacgauuaaguccuggagaaacaauaucuugaggacucaagagagcgagugugccugcgugaacgggucguguuucaccgucaugacagauggaccaucugacggccaggcuuccuacaaaaucuuucggauugaaaaggguaaaaucgugaagucaguggagaugaaugcccccaacuaucauuacgaagagugcaguuguuacccugauagcuccgagauuacuugcgucugccgcgacaauuggcacgggucuaacagaccauggguuagcuucaaucagaaccucgaauaucagauaggauacaucuguucaggcauuuuuggcgauaauccgaggcccaacgacaaaaccgggaguugcggaccuguguccagcaauggugcgaacggcguaaagggguucucuuuuaaguauggaaacggcguguggaucggucggacaaaaucaaucaguagccgcaauggguucgagaugauuugggauccaaacggcuggaccggaacggacaauaacuuuuccauaaagcaaggcaucgucgggauuaaugaauggucuggauacgguggcucguucgugcagcaucccgagcugacugggcuggacuguauccgaccuugcuucuggguugaacucauuagaggaaggccaaaagagaacacaaucuggaccagcggcuccucaauaaguuuuuguggugucaauucugauacugugggguggagcuggcccgacggcgcagaguuaccguucacaaucgauaaguga

SEQ ID NO: 149472 - RNA, 1410 nt, Artificial Sequence; identical to SEQ ID NO: 144786
  derived and/or modified CDS sequence (opt3) from neuraminidase__InfluenzaA__AEW25592

SEQ ID NO: 149473 - RNA, 1410 nt, Artificial Sequence
  derived and/or modified CDS sequence (opt3) from neuraminidase__InfluenzaA__AEW25602
augaaccccaaucagaagaucauuaccauaggcagcgugugcaugacaaucgggauggccaaccugauucuccaaaucggaaauauuaucuccauauggaucucucacucaauucagcuugguaaccagaaucagaucgagacuuguaaccaaagugucauuacguacgaaaauaacaccuggguuaaucagacauaugugaacaucagcaauacuaacuucgcugcaggccaguccguagugucugucaaacuggccggaaauucgucauugugcccugugagcggaugggcgauauacaguaaggacaacuccauuagaaucggcucuaaaggugauguuuuugugauuagggagccauucaucagcuguuccccguuagaaugccggaccuuuuuccugacacagggggcucuacucaaugacaagcauucaaacggaaccaucaaagaucgcagucccuaucgaacucugaugagcuguccuauuggcgaggucccaucucccuacaacucccguuuugaaucaguggccuggagcgcaagugccugccacgacggcauaaauuggcuuacaaucgggauuucuggaccugauaacggugcuguagcaguucugaaguauaauggcaucauaaccgacacgauuaaguccuggagaaacaauaucuugaggacucaagagagcgagugugccugcgugaacgggucguguuucaccgucaugacagauggaccaucugacggccaggcuuccuacaaaaucuuucggauugaaaaggguaaaaucgugaagucaguggagaugaaugcccccaacuaucauuacgaagagugcaguuguuacccugauagcuccgagauuacuugcgucugccgcgacaauuggcacgggucuaacagaccauggguuagcuucaaucagaaccucgaauaucagauaggauacaucuguucaggcauuuuuggcgauaauccgaggcccaacgacaaaaccgggaguugcggaccuguguccagcaauggugcgaacggcguaaagggguucucuuuuaaguauggaaacggcguguggaucggucggacaaaaucaaucaguagccgcaauggguucgagaugauuugggauccaaacggcuggaccggaacggacaagaauuuuuccauaaaacaagacaucgucggcauuaacgaauggucuggguacucggggagcuucgugcagcaucccgagcugacuggucuggauuguauccgaccuugcuucuggguugaacucauuagaggcaggccaaaggagaauacaaucuggaccuccgggucaaguauaucuuuuuguggagugaacagcgacacugucggcugguccuggcccgauggugcagaguuaccguucacaaucgacaaauga

SEQ ID NO: 149474 - RNA, 1410 nt, Artificial Sequence
  derived and/or modified CDS sequence (opt3) from neuraminidase__InfluenzaA__AEW25612
augaaccccaaucagaagaucauuaccauaggcagcgugugcaugacaaucgggauggccaaccugauucuccaaaucggaaauauuaucuccauauggaucucucacucaauucagcuugguaaccagaaucagaucgagacuuguaaccaaagugucauuacguacgaaaauaacaccuggguuaaucagacauaugugaacaucagcaauacuaacuucgcugcaggccaguccguagugucugucaaacuggccggaaauucgucauugugcccugugagcgggugggcgauauacaguaaggacaacuccauuagaaucggcucuaaaggugauguuuuugugauuagggagccauucaucagcuguuccccguuagaaugccggaccuuuuuccugacacagggggcucuacucaaugacaagcauucaaacggaaccaucaaagaucgcagucccuaucgaacucugaugagcuguccuauuggcgaggucccaucucccuacaacucccguuuugaaucaguggccuggagcgcaagugccugccacgacggcauaaauuggcuuacaaucgggauuucuggaccugauaacggugcuguagcaguucugaaguauaauggcaucauaaccgacacgauuaaguccuggagaaacaauaucuugaggacucaagagagcgagugugccugcgugaacgggucguguuucaccgucaugacagauggaccaucugaccggcaggcuuccuacaaaaucuuucgcauugaaaagggcaaaaucgugaagucaguggagaugaaugcccccaacuaucauuacgaagagugcaguuguuacccugauagcuccgagauuacuugcgucugcagagacaauuggcacgguucuaacaggccauggguuagcuucaaucagaaccucgaauaucagauaggguacaucuguucaggaauuuuuggcgauaauccgcggcccaacgacaaaaccggcaguugcgggccuguguccagcaauggagcgaacgguguaaagggcuucucuuuuaaguaugggaacggaguguggaucggccgcacaaaaucaaucaguagccgaaaugguuucgagaugauuugggauccaaacggguggaccggcacggacaauaacuuuuccauaaagcaagacaucgucggaauuaaugaauggucuggcuacucggggagcuucgugcagcaucccgagcugacuggacuggauuguaucagaccuugcuucuggguugaacucauuaggggucggccaaaagagaacacaaucuggaccuccggcucaaguauaucuuuuuguggggugaauagcgacacugucggaugguccuggcccgauggcgcagaguuaccguucacaaucgacaaguga

SEQ ID NO: 149475 - RNA, 1410 nt, Artificial Sequence
  derived and/or modified CDS sequence (opt3) from neuraminidase__InfluenzaA__AEW25622
augaaccccaaucagaagaucauuaccauaggcagcgugugcaugacaaucgggauggccaaccugauucuccaaaucggaaauauuaucuccauauggaucucucacucaauucagcuugguaaccagaaucagaucgagacuuguaaccaaagugucauuacguacgaaaauaacaccuggguuaaucagacauaugugaacaucagcaauacuaacuucgcugcaggccaguccguagugucugucaaacuggccggaaauucgucauugugcccugugagcggaugggcgauauacaguaaggacaacuccauuagaaucggcucuaaaggugauguuuuugugauuagggagccauucaucagcuguuccccguuagaaugccggaccuuuuuccugacacagggggcucuacucaaugacaagcauucaaacggaaccaucaaagaucgcagucccuaucgaacucugaugagcuguccuauuggcgaggucccaucucccuacaacucccguuuugaaucaguggccuggagcgcaagugccugccacgacggcauaaauuggcuuacaaucgggauuucuggaccugauaacggugcuguagcaguucugaaguauaauggcaucauaaccgacacgauuaaguccuggagaaacaauaucuugaggacucaagagagcgagugugccugcgugaacgggucguguuucaccgucaugacagauggaccaucugacggccaggcuuccuacaaaaucuuucggauugaaaaggguaaaaucgugaagucaguggagaugaaugcccccaacuaucauuacgaagagugcaguuguuacccugauagcuccgagauuacuugcgucugccgcgacaauuggcacgggucuaacagaccauggguuagcuucaaucagaaccucgaauaucagauaggauacaucuguucaggcauuuuuggcgauaauccgaggcccaacgacaaaaccgggaguugcggaccuguguccagcaauggugcgaacggcguaaagggguucucuuuuaaguauggaaacggcguguggaucggucggacaaaaucaaucaguagccgcaauggguucgagaugauuugggauccaaacggcuggaccggaacggacaauaacuuuuccauaaagcaagacaucgucggcauuaaugaauggucuggguacucggggagcuucgugcagcaucccgagcugacuggucuggauuguauccgaccuugcuucuggguugaacucauuagaggcaggccaaaagagaacuccaucuggacaucagggaguucuauauccuuuuguggagugaauagcgacaccgucggcuggucauggcccgauggugcagaguuaccguucacuaucgacaaguga

SEQ ID NO: 149476 - RNA, 1410 nt, Artificial Sequence
  derived and/or modified CDS sequence (opt3) from neuraminidase__InfluenzaA__AEW25631
augaaccccaaucagaagaucauuaccauaggcagcgugugcaugacaaucgggauggccaaccugauucuccaaaucggaaauauuaucuccauauggaucucucacucaauucagcuugguaaccagaaucagaucgagacuuguaaccaaagugucauuacguacgaaaauaacaccuggguuaaucagacauaugugaacaucagcaauacuaacuucgcugcaggccaguccguagugucugucaaacuggccgggaauagcucauugugcccugugagcggaugggcgauauacaguaaggacaacuccauuagaaucggcucuaaaggugauguuuuugugauuagggagccauucaucagcuguuccccguuagaaugccggaccuuuuuccugacacagggggcucuacucaaugacaagcauucaaacggaaccaucaaagaucgcagucccuaucgaacucugaugagcuguccuauuggcgaggucccaucucccuacaacucccguuuugaaucaguggccuggagcgcaagugccugccacgacggcauaaauuggcuuacaaucgggauuucuggaccugauaacggugcuguagcaguucugaaguauaauggcaucauaaccgacacgauuaaguccuggagaaacaauaucuugaggacucaagagagcgagugugccugcgugaacgggucguguuucaccgucaugacagauggaccaucugacggccaggcuuccuacaaaaucuuucggauugaaaaggguaaaaucgugaagucaguggagaugaaugcccccaacuaucauuacgaagagugcaguuguuacccugauagcuccgagauuacuugcgucugccgcgacaauuggcacgggucuaacagaccauggguuagcuucaaucagaaccucgaauaucagauaggauacaucuguucaggcauuuuuggcgauaauccgaggcccaacgacaaaaccgggaguugcggaccuguguccagcaauggugcgucuggcguaaagggguucucauuuaaguauggaaacggcguguggaucggucggacaaaaaguaucagcucccgcaacggguucgagaugauuugggauccaaauggcuggaccggaacggacaacaauuuuucuauaaagcaagacaucgucggcauuaacgaauggucgggguacagcggauccuucgugcagcaucccgagcugacuggucuggauuguauccgaccuugcuucuggguugaacucauuagaggcaggccaaaagagaauacaaucuggaccucagggaguucuauaucguuuuguggagugaacuccgacacugucggcuggucauggcccgauggugcagaguuaccguucacaaucgacaaguga

SEQ ID NO: 149477 - RNA, 1410 nt, Artificial Sequence; identical to SEQ ID NO: 144786
  derived and/or modified CDS sequence (opt3) from neuraminidase__InfluenzaA__AEW25639

SEQ ID NO: 149478 - RNA, 1410 nt, Artificial Sequence
  derived and/or modified CDS sequence (opt3) from neuraminidase__InfluenzaA__AEW25648
augaaccccaaucagaagaucauuaccauaggcagcgugugcaugacaaucgggauggccaaccugauucuccaaaucggaaauauuaucuccauauggaucucucacucaauucagcuugguaaccagaaucagaucgagacuuguaaccaaagugucauuacguacgaaaauaacaccuggguuaaucauacauaugugaacaucagcaauacuaacuucgcugcaggccaguccguagugucugucaaacuggccggaaauucgucauugugcccugugagcggaugggcgauauacaguaaggacaacuccauuagaaucggcucuaaaggugauguuuuugugauuagggagccauucaucagcuguuccccguuagaaugccggaccuuuuuccugacacagggggcucuacucaaugacaagcacucaaacggaaccaucaaagaucgcagucccuaucgaacucugaugagcuguccuauuggcgaggucccaucucccuacaacucccguuuugaaucaguggccuggagcgcaagugccugccaugacggcauaaauuggcuuacaaucgggauuucuggaccugauaacggugcuguagcaguucugaaguauaauggcaucauaaccgacacgauuaaguccuggagaaacaauaucuugaggacucaggagagcgagugugccugcgugaacgggucguguuucaccgucaugacagauggaccaucugacggccaggcuuccuacaaaaucuuucggauugaaaaggguaaaaucgugaagucaguggagaugaaugcccccaacuaucacuacgaagagugcaguuguuacccugauagcuccgagauuacuugcgucugccgcgacaauuggcaugggucuaacagaccauggguuagcuucaaucaaaaccucgaauaucagauaggauacaucuguucaggcauuuuuggcgauaauccgaggcccaacgacaaaaccgggaguugcggaccuguguccagcaauggugcgaacggcguaaagggguucucuuuuaaguauggaaacggcguguggaucggucggacaaaaucaaucaguagccgcaauggguucgagaugauuugggauccaaacggcuggaccggaacggacaauaacuuuuccauaaagcaggacaucgucggcauuaaugaauggucuggguacucggggagcuucgugcaacaccccgagcugacuggucuggauuguauccgaccuugcuucuggguugaacucauuagaggcaggccaaaagagaacacaaucuggaccuccgggucaaguauaucuuuuuguggagugaauagcgacacugucggcugguccuggcccgauggugcagaguuaccguucacaaucgacaaguga

SEQ ID NO: 149479 - RNA, 1410 nt, Artificial Sequence
  derived and/or modified CDS sequence (opt3) from neuraminidase__InfluenzaA__AEW25656
augaaccccaaucagaagaucauuaccauaggcagcgugugcaugacaaucgggauggccaaccugauucuccaaaucggaaauauuaucuccauauggaucucucacucaauucagcuugguaaccagaaucagaucgagacuuguaaccaaagugucauuacguacgaaaauaacaccuggguuaaucagacauaugugaacaucagcaauacuaacuucgcugcaggccaguccguagugucugucaaacuggccggaaauucgucauugugcccugugagcgggugggcgauauacaguaaggacaacuccauuagaaucggcucuaaaggugauguuuuugugauuagggagccauucaucagcuguuccccguuagaaugccggaccuuuuuccugacacagggggcucuacucaaugacaagcauucaaacggaaccaucaaagaucgcagucccuaucgaacucugaugagcuguccuauuggcgaggucccaucucccuacaacucccguuuugaaucaguggccuggagcgcaagugccugccacgacggcauaaauuggcuuacaaucgggauuucuggaccugauaacggugcuguagcaguucugaaguauaauggcaucauaaccgacacgauuaaguccuggagaaacaauaucuugaggacucaagagagcgagugugccugcgugaacgggucguguuucaccgucaugacagauggaccaucugacggccaggcuuccuacaaaaucuuucggauugaaaaggguaaaaucgugaagucaguggagaugaaugcccccaacuaucauuacgaagagugcaguuguuacccugauagcuccgagauuacuugcgucugccgcgacaauuggcacgggucuaacagaccauggguuagcuucaaucagaaccucgaauaucagauaggauacaucuguucaggcauuuuuggcgauaauccgaggcccaacgacaaaaccgggaguugcggaccuguguccagcaauggugcgaacggcguaaagggguucucuuuuaaguauggaaacggcguguggaucggucggacaaaaucaaucaguagccgcaauggguucgagaugauuugggauccaaacggcuggaccggaacggacaauaacuuucccauaaagcaagacaucgucggcauuaaugaaugguccggguacucuggaucguucgugcagcauccugagcugacuggucuggauuguauccgaccaugcuucuggguugaacucauuagaggcaggcccaaagagaacacaaucuggaccagcggguccucaauaaguuuuuguggagucaauucugacacugugggcuggagcuggccggauggugcagaguuaccuuucacaaucgacaaguga

SEQ ID NO: 149480 - RNA, 1410 nt, Artificial Sequence
  derived and/or modified CDS sequence (opt3) from neuraminidase__InfluenzaA__AEW25664
augaaccccaaucagaagaucauuaccauaggcagcgugugcaugacaaucgggauggccaaccugauucuccaaaucggaaauauuaucuccauauggaucucucacucaauucagcuugguaaccagaaucagaucgagacuuguaaccaaagugucauuacguacgaaaauaacaccuggguuaaucagacauaugugaacaucagcaauacuaacuucaccgcuggccaguccguagugucugucaaacuggcaggaaauucgucauugugcccugugagcggaugggccauauacaguaaggacaacuccauuagaaucggcucuaaaggugauguuuuugugauuagggagccauucaucagcuguuccccguuagaaugccggacauuuuuccugacccagggggcgcuacucaaugacaagcauucaaacggaacuaucaaagaucgcagucccuaucgaacacugaugagcuguccuauuggcgaggucccaucucccuacaacucccguuuugaaucaguggcuuggagcgccagugcaugccacgacggcauaaauuggcuuaccaucgggauuucuggaccugauaacggugccguagcuguucugaaguauaauggcaucauaacggacacuauuaaguccuggagaaacaauaucuugaggacccaagagagcgagugugcaugcgugaacgggucguguuucacagucaugacugauggaccaucugacggccaggccuccuacaaaaucuuucggauugaaaaggguaaaaucgugaagucaguggagaugaaugcucccaacuaucauuacgaagagugcaguuguuacccugauagcuccgagauuaccugcgucugccgcgacaauuggcacgggucuaacagaccauggguuagcuucaaucagaaccucgaauaucagauaggauacaucuguucaggcauuuuuggcgauaauccgaggcccaacgacaaaacagggaguugcggaccuguguccagcaauggugccaacggcguaaagggguucucuuuuaaguauggaaacggcguguggaucggucggaccaaaucaaucaguagccgcaauggguucgagaugauuugggauccaaacggcuggacgggaacugacaauaacuuuuccauaaagcaagacaucgucggcauuaaugaauggucuggguacucggggagcuucgugcagcaucccgagcugacaggucuggauuguauccgaccuugcuucuggguugaacucauuagaggcaggccaaaagagaacaccaucuggacuuccgggucaaguauaucuuuuuguggagugaauagcgacacaggcgguugguccuggcccgauggggcggaguuaccguucaccaucgacaaguga

SEQ ID NO: 149481 - RNA, 1410 nt, Artificial Sequence; identical to SEQ ID NO: 149475
  derived and/or modified CDS sequence (opt3) from neuraminidase__InfluenzaA__AEW25671

SEQ ID NO: 149482 - RNA, 1410 nt, Artificial Sequence; identical to SEQ ID NO: 145963
  derived and/or modified CDS sequence (opt3) from neuraminidase__InfluenzaA__AEW25680

SEQ ID NO: 149483 - RNA, 1410 nt, Artificial Sequence
  derived and/or modified CDS sequence (opt3) from neuraminidase__InfluenzaA__AEW25689
augaaccccaaucagaagaucauuaccauaggcagcgugugcaugacaaucgggauggccaaccugauucuccaaaucggaaauauuaucuccauauggaucucucacucaauucagcuugguaaccagaaucagaucgagacuuguaaccaaagugucauuacguacgaaaauaacaccuggguuaaucagacauaugugaacaucagcaauacuaacuucgcugcaggccaguccguagugucugucaaacuggccggaaauucgucauugugcccugugagcggaugggcgauauacaguaaggacaacuccauuagaguuggcucuaaaggugauguguuugucaucagggagccauucauuagcuguuccccguuagaaugccggaccuuuuuccugacacagggggcucuacucaaugacaagcauucaaacggaaccaucaaagaucgcagucccuaucgaacucugaugagcuguccuaucggcgaggugccaucucccuacaacucccguuuugaaucaguagccuggagcgcaagugccugccacgacggcauuaauuggcuuacaauagggaucucuggaccugauaacggugcuguugcagugcugaaguauaauggcauuaucaccgacacgauaaaguccuggagaaacaauauuuugaggacucaagagagcgagugugccugcgucaacgggucguguuucaccgugaugacagauggaccaucugacggccaggcuuccuacaaaaucuuucggaucgaaaaggguaaaauugugaagucagucgagaugaaugcccccaacuaucauuacgaagagugcaguuguuacccugauagcuccgagaucacuugcguuugccgcgacaauuggcacgggucuaacagaccaugggugagcuucaaucagaaccucgaauaucagauuggauacauauguucaggcaucuuuggcgauaauccgaggcccaacgacaaaaccgggaguugcggaccuguauccagcaauggugcgaacggcgugaagggguucucuuuuaaguauggaaacggcgucuggauuggucggacaaaaucaaucaguagccgcaauggguucgagaugaucugggauccaaacggcuggaccggaacggacaauaacuuuuccauuaagcaagacauagugggcaucaaugaauggucuggguacucggggagcuucguucagcaucccgagcugacuggucuggauuguauucgaccuugcuucuggguggaacucaucagaggcaggccaaaagagaacacaauuuggaccuccgggucaaguaucucuuuuuguggagucaauagcgacacugugggcugguccuggcccgauggugcagaguuaccguucacaauagacaaguga

SEQ ID NO: 149484 - RNA, 1410 nt, Artificial Sequence; identical to SEQ ID NO: 149478
  derived and/or modified CDS sequence (opt3) from neuraminidase__InfluenzaA__AEW25698

SEQ ID NO: 149485 - RNA, 1410 nt, Artificial Sequence; identical to SEQ ID NO: 144786
  derived and/or modified CDS sequence (opt3) from neuraminidase__InfluenzaA__AEW25708

SEQ ID NO: 149486 - RNA, 1410 nt, Artificial Sequence; identical to SEQ ID NO: 144786
  derived and/or modified CDS sequence (opt3) from neuraminidase__InfluenzaA__AEX09177

SEQ ID NO: 149487 - RNA, 1413 nt, Artificial Sequence
  derived and/or modified CDS sequence (opt3) from neuraminidase__InfluenzaA__AEX33324
augaaccccaaucagaagaucauuaccauaggcagcaucuccauugccaucgggauuaucucucugaugcuccaaauaggaaacaucauuucaaucugggcuagucacagcauucagacagguucccagaaucauacuggcaucugcaaccagagaauaauuacguacgaaaauucuaccugggugaaccacacauaugucacuaucaauaacaccaauguuguggcagggaaagacaagacaucgguaacccuugccggaaacucaagccuguguaguauuuccggcugggcgaucuacacuaaagauaauucuaucaggauugguagcaagggggacguguucgucauacgggagccuuuuaucuccugcucacauuuggagugucgcacauucuuuuuaacccaaggagcucugcuaaacgauaaacacaguaauggcacggugaaggaccgaagcccauaucgugcccucaugucuugcccgcugggcgaagcacccuccccuuacaacucaaaguucgagagcguugccuggagugcuucugcaugucaugaugggaugggauggcuuacuauugguaucuccggcccagacaauggggccguggcuguccugaaauauaacggaauaauuaccgaaacaaucaagagcuggaaaaagagaaucuugaggacucaggagucggagugcguguguguaaacggcucuugcuuuaccauuaugacagauggucccuccaauggggccgcgucauacaaaaucuucaagauugaaaagggaaaaguuaccaagaguauagagcucaacgcaccuaauuuucacuaugaagaguguagcugcuacccagacacgggcacugugaugugugucugccgggauaacuggcacggcuccaaucgccccugggugucuuucaaccagaaucuggacuaccagaucggguauauuugcagcggaguguuuggugauaacccuagaccaaaagacggcgaggggucauguaauccggucacaguugauggagccgacggcgugaaggguuucaguuacaaauaugggaacggcguauggaucggaaggaccaaguccaaucggcugcgcaaaggcuuugaaaugaucugggaccccaacggguggacugauacagacagcgauuucucugugaagcaagacgucguggcuauuaccgauuggucaggauacagugguagcuuuguucagcauccugagcucacgggcuuagacugcauacgaccauguuucuggguggaacuggucagagggcuucccagggagaauaccacaaucuggacuuccggaucuucgauuagcuucugcggcgugaacuccgauaccgccaauuggucauggccugacggugcagaauugccauuuacaaucgauaaguga

SEQ ID NO: 149488 - RNA, 1413 nt, Artificial Sequence
  derived and/or modified CDS sequence (opt3) from neuraminidase__InfluenzaA__AEX33368
augaaccccaaucagaagaucauuaccauaggcagcaucuccauugccaucgggauuaucucucugaugcuccaaauaggaaacaucauuucaaucugggcuagucacagcauucagacagguucccagaaucauacuggcaucugcaaccagagaauaauuacguacgaaaauucuaccugggugaaccacacauaugucaauaucaacaauacuaacguuguggcagggaaagacaagaccucgguaacacuugccggaaauucaagccugugugcgauuaguggcugggcuaucuacaccaaagauaacuccaucaggauugguucuaagggggacguguucgucauacgggagccuuuuaucagcugcucccauuuggagugucgcacuuucuuuuuaacacaaggagcccugcuaaaugauaaacacucaaacggcaccgugaaggaccgaaguccauaucgugcacucaugagcugcccgcugggcgaagcccccucuccuuacaauuccaaguucgagucaguugcuuggagcgcaagugccugucaugaugggaugggauggcuuacgauugguaucucuggcccagacaacggggcuguggccguccugaaauauaacggaauaauuacugaaaccaucaaguccuggaaaaagagaaucuugaggacacaggagagcgagugcguguguguaaauggcucgugcuuuacuauuaugaccgauggucccucuaacggggcggcauccuacaaaaucuucaagauugaaaagggaaaaguuacaaagucaauagagcucaaugccccuaacuuucacuaugaagaguguaguugcuacccagacaccggcacggugaugugugucugccgggauaauuggcacggcagcaaccgccccuggguguccuucaaucagaaccuggacuaccagaucggguauauuugcucuggaguguuuggugauaauccuagaccaaaagacggcgaggggagcuguaacccggucacuguugauggagcugacggcgugaaggguuucucauacaaauaugggaauggcguauggaucggaaggacaaagaguaaccggcugcgcaaaggcuuugaaaugaucugggaccccaauggguggaccgauacugacuccgauuucagcgugaagcaagacgucguggccauuacagauuggucuggauacucagguaguuuuguucagcauccugagcucaccggcuuagacugcauacgaccauguuucuggguggaacuggucagagggcuucccagggagaacacgaccaucuggacaagcggauccucuauuucguucugcggcgugaauagcgauacugcaaacugguccuggccugacggugcugaauugccauuuaccaucgauaaguga

SEQ ID NO: 149489 - RNA, 1413 nt, Artificial Sequence
  derived and/or modified CDS sequence (opt3) from neuraminidase__InfluenzaA__AEX33379
augaaccccaaucagaagaucauuaccauaggcagcaucuccauugccaucgggauuaucucucugaugcuccaaauaggaaacaucauuucaaucugggcuagucacagcauucagacagguauccagaaucauacuggcauaugcaaccagagaauuaucacguacgaaaauuccaccugggugaaccacacauaugucacuauuaauaacaccaauguuguggcagggaaagacaagacaucuguaacccuugccggaaacucgucacuguguagcaucaguggcugggcgaucuacacuaaagauaauuccauuaggauagguucuaagggggacguguucgucauccgggagccuuuuauuagcugcucccauuuggagugucgcacauucuuuuuaacccaaggagcucugcuaaacgauaaacacucaaauggcacggugaaggaccgaaguccauaucgugcccucaugagcugcccgcugggcgaagcacccucuccuuacaacuccaaguucgagucaguugccuggagcgcuagugcaugucaugaugggaugggauggcuuacuaucgguauaucuggcccagacaauggggccguggcuguccugaaauauaacggaauuaucaccgaaacaaucaaguccuggaaaaagagaauuuugaggacucaggagagcgagugcguguguguaaacggcucgugcuuuaccaucaugacagauggucccucuaauggggccgcguccuacaaaauuuucaagauagaaaagggaaaaguuaccaagucaaucgagcucaacgcaccuaauuuucacuaugaagaguguaguugcuacccagacacgggcacugugaugugugucugccgggauaacuggcacggcagcaaucgccccuggguguccuucaaccagaaucuggacuaccagauuggguauaucugcucuggaguguuuggugauaacccuagaccaagggacggcgaggggagcuguaauccggucacaguugauggagccgacggcgugaaagguuucucauacaaguaugggaacggcguauggaucggacggaccaaaaguaaucgccugcgaaagggcuuugaaaugauuugggaccccaacggguggacugauacagacuccgauuucagcgugaaacaagacgucguggcuauaaccgauuggucuggauacucagguaguuuuguucagcauccugagcucacgggcuuagacugcaucagaccauguuucuggguggaacuggucagggggcuuccccgggagaauaccacaauuuggacuagcggauccucuaucucguucugcggcgugaacagcgauaccgccaauugguccuggccugacggugcagaauugccauuuacaauugauaaguga

SEQ ID NO: 149490 - RNA, 1413 nt, Artificial Sequence; identical to SEQ ID NO: 149489
  derived and/or modified CDS sequence (opt3) from neuraminidase__InfluenzaA__AEX33390

SEQ ID NO: 149491 - RNA, 1413 nt, Artificial Sequence; identical to SEQ ID NO: 149489
  derived and/or modified CDS sequence (opt3) from neuraminidase__InfluenzaA__AEX33401

SEQ ID NO: 149492 - RNA, 1413 nt, Artificial Sequence; identical to SEQ ID NO: 149489
  derived and/or modified CDS sequence (opt3) from neuraminidase__InfluenzaA__AEX33412

SEQ ID NO: 149493 - RNA, 1413 nt, Artificial Sequence; identical to SEQ ID NO: 149489
  derived and/or modified CDS sequence (opt3) from neuraminidase__InfluenzaA__AEX33423

SEQ ID NO: 149494 - RNA, 1413 nt, Artificial Sequence; identical to SEQ ID NO: 149489
  derived and/or modified CDS sequence (opt3) from neuraminidase__InfluenzaA__AEX33434

SEQ ID NO: 149495 - RNA, 1413 nt, Artificial Sequence; identical to SEQ ID NO: 149489
  derived and/or modified CDS sequence (opt3) from neuraminidase__InfluenzaA__AEX33445

SEQ ID NO: 149496 - RNA, 1410 nt, Artificial Sequence
  derived and/or modified CDS sequence (opt3) from neuraminidase__InfluenzaA__AEX33544
augaaccccaaucagaagaucauuaccauaggcagcuucucccugacaaucgccgcuauuugcuuucucaugcaaaucgcaauucuugugacuacggucacccugcacuucaaacagcaugaguguaacucuccuccaaauaaccagguuauguugugcgaaccgacaaucauagagagaaauaucacugaaauuguguacuuaaccaacacaaccaucgagaaggaaauuugucccaaacuggccgaguauaggaauuggucaaagccucagugcaacaucacuggguuugcgccauucaguaaagacaauagcauacggcuauccgcuggaggugauauuuggguaacacgcgagcccuacgugucuugugacccugauaagugcuaucaauuugcccucggccaggggaccacgcugaacaauggacacucgaacgacacuguccaugaucgaaccccauaccguacacuucugaugaaugaauugggcgugcccuuccaccucgguacuagacagguuuguaucgcauggucaagcaguuccugccaugacgggaaggccuggcugcacgugugugucaccggagaugacaaaaacgcuacagcaucuuuuauuuauaauggcaggcugguggauagcaucggcuccuggucaaagaaaauccuccggacccaggagagugaaugcguauguauuaacgggacgugcacuguugugaugacagacggaagcgccucugguaaggcugauaccaaaauauuauucaucgaggagggcaagauuguccacaucuccacucugucagggagcgcccaacauguggaagagugcaguuguuacccucgcuauccaggagugagaugcgucuguagggacaacuggaagggcucuaaucggccgauaguugauauuaacgugaaagacuacuccaucguaagcucguacgugugcucuggucuugucggggacacaccccgcaagaaugauuccuuuucaaguagccacuguuuggacccuaacaaugaagagggaggccauggcgugaaagggugggcguucgaugacggaaacgauguuuggaugggucgaaccaucuccgaaaagcugagaucuggcuaugagacguuuaaagugauugagggguggagcaagccaaauucaaaacuacagaucaacaggcaggucauuguggaacggggaaaucguaguggcuacuccgguauauucagcguagaggggaagucuugcaucaaccgcuguuuuuauguugaacucauuagaggcaggaaggagaaaaccgaagugugguggacaucaaauaguaucgucguguucugcggaacuagcggcaccuacgggacaggauccuggcccgacggugcagauaucaaccugaugccuauuuga

SEQ ID NO: 149497 - RNA, 1410 nt, Artificial Sequence; identical to SEQ ID NO: 142762
  derived and/or modified CDS sequence (opt3) from neuraminidase__InfluenzaA__AEX33555

SEQ ID NO: 149498 - RNA, 1410 nt, Artificial Sequence
  derived and/or modified CDS sequence (opt3) from neuraminidase__InfluenzaA__AEX33610
augaaccccaaucagaagaucauuaccauaggcagcgugucccugacaaucucuacuauuugcuucuuuaugcaaaucgccauucucaucacgaccgucacacuucacuucaaacaguacgaguuuaacccuccaccgaauaaccagguuaugcugugugaacccacuauaaucgagagaaauauuaccgaaaucguguauuugacaaacaccacuauugagaaggaaaucugcccuaaauuagcugaguacaggaauuggucaaagccacagugugacauaacaggguucgcacccuuuaguaaagauaacagcauucggcuguccgccggaggugacaucuggguaacccgcgagccuuaugugucuugcgauccagacaaguguuaccaauucgcgcuaggccaggggacgacucucaauaacguccauucgaaugauaccgugcacgaccgaacacccuaucguacucugcuuaugaacgaacugggaguuccuuuucauuugggcaccaaacaggugugcauugcuuggucaagcaguuccugucacgaugguaaagccuggcuccaugucugcgugacaggggacgauaagaaugcaaccgccucuuucaucuacaacggaagacugguagacagcaucguuuccuggucaaagaagauucugaggacgcaggagagugaaugugugugcauaaauggcacuuguacagucgugaugaccgauggcagcgcuucugggaaagcagacacuaagauccucuuuauugaggagggaaagaucgugcacacauccaccuuaucagguagcgcccaacacgucgaagagugcaguugcuauccacgguacccgggcguucgcugugugugcagagauaacuggaaagggucuaacaggcccauaguagacauuaauaucaaggacuacaacaucguguccagcuaugucuguucgggacuggugggcgauacgccucggaaaaaugacucuuccucaaguagccauugccuugauccaaacaaugaagagggugggcacggaguuaagggcugggcuuucgacgauggcaacgacguguggauggggcgcaccauuuccgaaaaauugcgaucuggauacgagacauuuaaggucaucgguggcuggagcaaucccaacucaaaacugcagauuaauagacaggugauaguagauagggggaaccggaguggauauuccggcaucuucagcguugaggguaagucuuguauuaaucguugcuuuuacguggaacuaauccgcgggagaaaggaggaaacugagguccucuggaccucaaacaguaucguggucuucuguggcacaagcggaacuuauggcaccggguccuggccugacggagccgauauuaaucugaugccaauauga

SEQ ID NO: 149499 - RNA, 1410 nt, Artificial Sequence
  derived and/or modified CDS sequence (opt3) from neuraminidase__InfluenzaA__AEX33828
augaaccccaaucagaagaucauuaccauaggcagcgugucccugacaaucucuacuauuugcuucuuuaugcaaaucgccauucucaucacgaccgucacacuucacuucaaacaguacgaguuuaacccuccaccgaauaaccagguuaugcugugugaacccacuauaaucgagagaaauauuaccgaaaucguguauuugacaaacaccacuauugagaaggaaaucugcccuaaauuagcugaguacaggaauuggucaaagccacagugugacauaacaggguucgcacccuuuaguaaagauaacagcauucggcuguccgccggaggugacaucuggguaacccgcgagccuuaugugucuugcgauccagacaaguguuaccaauucgcgcuaggccaggggacgacucucaauaacguccauucgaaugauaccgugcacgaccgaacacccuaucguacucugcuuaugaacgaacugggaguuccuuuucauuugggcaccaaacaggugugcauugcuuggucaagcaguuccugucacgaugguaaggccuggcuccaugucugcgugacaggggacgauaagaaugcaaccgccucuuucaucuacaacggaagacugguagacagcaucguuuccuggucaaaagagauucugaggacgcaggaaagugagugugugugcauaaauggcacuuguacagucgugaugaccgauggcagcgcuucugggaaggcagacacuaaaauccucuuuauugaggaaggaaagaucgugcacacauccaccuuaucagguagcgcccaacacgucgaggaaugcaguugcuauccacgguacccgggcguucgcugugugugcagagauaacuggaaggggucuaacaggcccauaguagacauuaauaucaaagacuacuccaucgugagcucguaugucuguucuggacuggugggcgauacgccucggaagaacgacuccucaaguagcucccauugccuugauccaaauaacgaggaaggugggcacggaguuaaaggcugggcuuucgacgauggcaaugacguguggauggggcgcaccauuucugagaaguugcgaagcggauacgagacauuuaaagucaucgaagguuggucaaaccccaauaguaagcugcagauuaacagacaggugauaguagauaggggcaaucgguccggguauagcggaaucuucucuguugagggcaaaucauguauuaaccguugcuuuuacguggaacuaauccgcgguagaaaggaggaaacugagguccucuggaccaguaauagcaucguggucuucugugggacauccggcacuuauggaaccggcucuuggccugacggggccgauauuaaccugaugccaauauga

SEQ ID NO: 149500 - RNA, 1410 nt, Artificial Sequence; identical to SEQ ID NO: 142760
  derived and/or modified CDS sequence (opt3) from neuraminidase__InfluenzaA__AEX33839

SEQ ID NO: 149501 - RNA, 1413 nt, Artificial Sequence
  derived and/or modified CDS sequence (opt3) from neuraminidase__InfluenzaA__AEX33861
augaaccccaaucagaagaucauuaccauaggcagcaucuccauugccaucgggacaauuucucugaugcuccaagugggaaacaucauaucaaucugggcuagucacagcauucagacugguucccagaaucauacgggcaucugcaaccagagaauuaucaccuacgaaaauucuacaugggucaaccacacuuauguuaauauaaacaauaccaacgugguagcagggaaagacaagacaucgguggcccuugcgggaaauucaagccuguguaguauuuccggcugggcuaucuacaccaaagauaacucuauuaggaucgguagcaagggggacgucuucgugauccgggagccuuuuauuuccugcucacauuuggagugucgcacuuucuuuuuaacacaaggagcccugcuaaaugauaaacacaguaacggcaccguuaaggaccgaagcccauaucgugcacucaugucuugcccgcugggcgaagcccccuccccuuacaauucaaaguucgagagcguggcuuggagugcaucugccugucaugaugggaugggauggcuuacgauagguaucuccggcccagacaacggggcugucgccgugcugaaauauaacggaauuaucacugaaaccauaaagagcuggaaaaagagaauuuugaggacacaggagucggagugcguauguguuaauggcucuugcuuuacuaucaugaccgauggucccuccaacggggcggcaucauacaaaaucuucaagauugaaaagggacaggugacaaaaagugucgagcucaaugccccuaacuuucacuaugaagaguguagcugcuacccagacaccggcacggugaugugugugugccgggauaauuggcacggcuccaaccgccccugggucucuuucaaucagaaccuggacuaccaaaucggguauauuugcagcggaguuuuuggugauaauccuagaccaaaggacggcaaagggucauguaacccggugacuguagauggagcugacggcgugaaggguuucaguuacaaauaugggaauggcgucuggauaggaaggacaaaguccaaccggcugcgcaaaggcuuugagaugaucugggaccccaauggguggaccgauacugacagcgauuucucugugaagcaggacguuguggccauuacagauuggucaggauacagugguagcuuuguccagcauccugaacucaccggcuuagacugcauccgaccauguuucuggguggagcugguaagagggcuucccagggaaaacacgaccaucuggacauccggaucuucgauuagcuucugcggcguugauuccgacacugcaaauuggucauggccugauggugcugaguugccauuuaccauagacaaguga

SEQ ID NO: 149502 - RNA, 1410 nt, Artificial Sequence
  derived and/or modified CDS sequence (opt3) from neuraminidase__InfluenzaA__AEX33872
augaaccccaaucagaagaucauuaccauaggcagcgugucccugacaaucucuacuauuugcuucuuuaugcaaaucgccauucucaucacgaccgucacacuucacuucaaacaguacgaguuuaacucaccuccaaauaaccagguuaugcagugugaaccgacuauaaucgagagaaauauuaccgaaaucguguaucugacaaacaccacuauugagaaggaaaucugccccaaauuggcugaguacaggaauuggaguaagccucaaugugacauaacaggguucgcaccauuuagcaaagauaacuccauucgguuaucugccggaggugacaucuggguaacccgcgagcccuaugugucgugcgauccugacaaguguuaccaguucgcgcugggccaggggacgacucuaaauaacguccauucaaaugauaccgugcacgaccgaacaccauaucguacucuccugaugaacgaacuuggaguucccuuucaucugggcaccaaacaggugugcauugcuuggagcaguuccucuugucacgaugguaaggccugguugcaugucugcgugacaggggacgauaagaaugcaaccgccagcuucaucuacaacggaagacucguagacuccaucguuucauggaguaaagagauucugaggacgcaagaaagcgagugugugugcauaaauggcacuuguacagucgugaugaccgauggcucugcuuccgggaaggcagacacuaaaauccuguuuauugaggaaggaaagaucgugcacacaucaacccucagcgguagugcccagcacgucgaggaaugcucuugcuauccucgguacccaggcguucgcugugugugcagagauaacuggaagggguccaacaggccgauaguagacauuaauaucaaagacuacagcaucgugucgucuuaugucuguuccggauuagugggcgauacgccccggaagaacgacucaaguagcuccucucauugccugaauccuaacaaugaggaaggugggcacggaguuaaaggcugggcuuucgaugacggcaacgauguguggauggggcgcaccauuagcgagaaacuucgauugggauacgagacauuuaaggucaucgaagguuggucaaauccaaacaguaagcugcagauuaauagacaggugauaguagacaggggcaaccgguccggguauagcggaaucuucucuguugagggcaaaucauguauuaaucguugcuuuuacguggaacuaauccgcgguagaaaggaggaaacugagguccucuggaccaguaacagcaucguggucuucugugggacauccggcacuuauggaaccggcucuuggcccgauggggccgacauuaaucugaugccuauauga

SEQ ID NO: 149503 - RNA, 1410 nt, Artificial Sequence; identical to SEQ ID NO: 142760
  derived and/or modified CDS sequence (opt3) from neuraminidase__InfluenzaA__AEX33883

SEQ ID NO: 149504 - RNA, 1410 nt, Artificial Sequence
  derived and/or modified CDS sequence (opt3) from neuraminidase__InfluenzaA__AEX33894
augaaccccaaucagaagaucauuaccauaggcagcgugucccugacaaucucuacuauuugcuucuuuaugcaaaucgccauucucaucacgaccgucacacuucacuucaaacaguacgaguuuaacucaccuccaaauaaccagguuaugcugugugaaccgacuauaaucgagagaaauauuaccgaaaucguguauuugacaaacaccacuauugagaaggaaaucugccccaaauuagcugaguacaggaauuggaguaagccucaguguaacauaacaggguucgcaccauuuagcaaagacaauuccauucggcugucugccggaggugauaucuggguaacccgcgagcccuaugugucgugcgacccugauaaguguuaccaauucgcgcuaggccaggggacgacucucaacaauguccauucaaacgacaccgugcacgaucgaacaccauaucguacucugcuuaugaaugaacugggaguucccuuucauuugggcaccaaacaggugugcauugcuuggagcaguuccucuugucacgacgguaaggccuggcuccaugucugcgugacaggggaugacaagaacgcaaccgccagcuucaucuacaauggaagacugguagauuccaucguuucauggaguaaagagauucugaggacgcaggaaagcgagugugugugcauagacggcacuuguacagucgugaugaccgauggcucugcuuccgggaaggcagacacuaaaauccucuuuauugaggaaggaaagaucgugcacacaucaaccuuaagcgguagugcccaacacgucgaggaaugcucuugcuauccucgguacccaggcguucgcugugugugcagagauaacuggaagggguccaacaggccgauaguagacauuaauaucaaagacuacagcaucgugucgucuuaugucuguuccggacuggugggcgauacgccccggaagaacgacucaaguagcuccucucauugccuugauccuaauaacgaggaaggugggcacggaguuaaaggcugggcuuucgacgauggcaaugacguguggauggggcgcaccauuagcgagaaguugcgaucaggauacgagacauuuaaagucaucgaagguuggaguaacccaaauuccaagcugcagauuaacagacaggugauaguagauaggggcaaucggagcggguauucuggaaucuucucaguugagggcaaaaguuguauuaaccguugcuuuuacguggaacuaauccgcgguagaaaggaggaaacugagguccucuggaccagcaauuccaucguggucuucugugggacaucuggcacuuauggaaccggcucguggcccgacggggccgauauuaaccugaugccuauauga

SEQ ID NO: 149505 - RNA, 1413 nt, Artificial Sequence
  derived and/or modified CDS sequence (opt3) from neuraminidase__InfluenzaA__AEX33916
augaaccccaaucagaagaucauuaccauaggcagcaucuccauugccaucgggauuaucucucugauacuccaaaucggaaacauuaucucaauuugggcuagucacagcauccagacagguucccagaaucauacuggcauaugcaaccagagaauuaucacguacgaaaauucuaccugggugaacaauacauaugucaacauuaauaacacuaauguuguggcagagaaagacaagaccucgguaacacuugccgggaacucaagccuguguaguaucuccggaugggcgaucuacaccaaagauaauucuauuaggauaggcagcaagggugacguguucgucauccgggagccuuuuauuuccugcucacacuuggaaugucgcacuuucuuuuuaacacaaggggcucugcuaaacgauaaacauaguaauggaaccgugaaggaccgaagcccauaucgugcccucaugucuugcccgcugggcgaggcacccuccccuuacaacucaagauucgaaagcguugccuggagugcuucugcaugucacgauggcaugggguggcuuacgaucggaauauccgguccagacaacggcgccguggcuguccugaaguauaaugggauuaucacugagaccaucaaaagcuggaagaaaaggauuuugcggacacaggagucggaaugcguguguaugaacggaucuugcuuuacuaucaugaccgauggccccuccaauggugccgcgucauacaagauuuucaaaauagagaaggggaagguaacaaaaaccaucgaacucaacgcaccuaauuuucauuaugaggaguguaguugcuacccagacacgggaacuguuaugugugugugccgcgauaacuggcacggcagcaauagacccugggucuccuucaaccagaaucuggacuaccagacaggcuauauuugcucugggguguuuggagauaacccuaggccaaaggacggugaaggcagcuguaauccgaugaccguggauggggccgacggagucaaaggcuucucauacaaguaugguaacgggguuuggaucggccggacuaaaaguaaucgccugcgaaagggauuugagaugaucugggaccccaacggcuggacaaauaccgauuccgacuucagcgugaaacaagauguaguggcuauuacggacuggucuggguacucaggaaguuuuguccagcacccugaacucaccgguuuagauugcauaagaccauguuucuggguggagcugguuaggggccuuccccgggaaaacacaacuaucuggaccagcggguccucuauuucguucugcggagugaacagcggcacagccaauugguccuggccugacggugcagaguugccauuuacuaucgauaaguga

SEQ ID NO: 149506 - RNA, 1413 nt, Artificial Sequence; identical to SEQ ID NO: 143917
  derived and/or modified CDS sequence (opt3) from neuraminidase__InfluenzaA__AEX33927

SEQ ID NO: 149507 - RNA, 1413 nt, Artificial Sequence
  derived and/or modified CDS sequence (opt3) from neuraminidase__InfluenzaA__AEX33938
augaaccccaaucagaagaucauuaccauaggcagcaucuccauugccaucgggauuaucucucugauacuccaaaucggaaacauuaucucaauuugggcuagucacagcauccagacagguucccagaaucauacuggcauaugcaaccagagaauuaucacguacgaaaauucuaccugggugaacaauacauaugucaacauuaauaacacuaauguugugguagagaaagacaagaccucggugacacuugcagggaacucaagccuguguaguaucuccggaugggccaucuacaccaaagauaauucuauuaggauaggcagcaagggugacgucuucgugauccgggagccuuuuauuuccugcucacacuuggaaugucgcacuuucuuuuuaacacaaggggcgcugcuaaacgauaaacauaguaauggaaccguuaaggaccgaagcccauaucgugcucucaugucuugcccgcugggcgaggcccccuccccuuacaacucaagauucgaaagcguggcauggagugccucugcuugucacgauggcaugggguggcuuacgaucggaauauccgguccagacaacggcgcagucgccgugcugaaguauaaugggauuaucacugagaccaucaaaagcuggaagaaaaggauuuugcggacacaggagucggaaugcguauguaugaacggaucuugcuuuacuaucaugaccgauggccccuccaauggugcugccucauacaagauuuucaaaauagagaaggggaagguuacaaaaaccaucgaacucaacgcgccuaauuuucauuaugaggaguguaguugcuacccagacacgggaacugugaugugugucugccgcgauaacuggcacggcagcaauagacccuggguguccuucaaccagaaucuggacuaccagauuggcuauaucugcucugggguguuuggagauaacccuaggccaaaggacggugaaggcagcuguaauccggucacaguugauggggcagacggagugaaaggcuucucauacaaguaugguaacgggguauggaucggccggaccaaaaguaaucgccugcgaaagggauuugagaugauuugggaccccaacggcuggacuaauacagauuccgacuucagcgugaaacaagaugucguggccauaaccgacuggucuggguacucaggaaguuuuguucagcacccugaacucacggguuuagauugcaucagaccauguuucuggguggagcuggucaggggccuuccccgggaaaacaccacaauuuggacuagcggguccucuaucucguucugcggagugaacagcggcaccacaaauugguccuggccugacggugcugaguugccauuuacuauugauaaguga

SEQ ID NO: 149508 - RNA, 1413 nt, Artificial Sequence
  derived and/or modified CDS sequence (opt3) from neuraminidase__InfluenzaA__AEX33949
augaaccccaaucagaagaucauuaccauaggcagcaucuccauugccaucgggauuaucucucugauacuccaaaucggaaacauuaucucaauuugggcuagucacagcauccagacagguucccagaaucauacuggcauaugcaaccagagaauuaucacguacgaaaauucuaccugggugaacaauacauaugucaacauuaauaacacuaauguugugguagagaaagacaagaccucggugacacuugcagggaacucaagccuguguaguaucuccggaugggccaucuacaccaaagauaauucuauuaggauaggcagcaagggugacgucuucgugauccgggagccuuuuauuuccugcucacacuuggaaugucgcacuuucuuuuuaacacaaggggcgcugcuaaacgauaaacauaguaauggaaccguuaaggaccgaagcccauaucgugcucucaugucuugcccgcugggcgaggcccccuccccuuacaacucaagauucgaaagcguggcauggagugccucugcuugucacgauggcaugggguggcuuacgaucggaauauccgguccagacaacggcgcagucgccgugcugaaguauaaugggauuaucacugagaccguaaaaagcuggaagaaaaggaucuugcggacacaggagucggaaugcguuuguaugaacggaucuugcuuuacuauuaugaccgauggccccuccaauggugcugccucauacaagaucuucaaaauugagaaggggaaggugacaaaaaccauagaacucaacgcgccuaauuuucauuaugaggaguguaguugcuacccagacacgggaacugucaugugugugugccgcgauaacuggcacggcagcaauagacccuggguguccuucaaccagaaucuggacuaccagaucggcuauauuugcucuggggucuuuggagauaacccuaggccaaaggacggugaaggcagcuguaauccgguuacaguggauggggcagacggaguaaaaggcuucucauacaaguaugguaacgggguguggaucggccggaccaaaaguaaucgccugcgaaagggauuugagaugaucugggaccccaacggcuggacuaauacagauuccgacuucagcgucaaacaagaugugguugccauuaccgacuggucuggguacucaggaaguuuugugcagcacccugaacucacggguuuagauugcauaagaccauguuucugggucgagcuggugaggggccuuccccgggaaaacaccacaaucuggacuagcggguccucuauuucguucugcggaguaaacagcggcaccgcuaauugguccuggccugacggugccgaguugccauuuacaaucgauaaguga

SEQ ID NO: 149509 - RNA, 1410 nt, Artificial Sequence
  derived and/or modified CDS sequence (opt3) from neuraminidase__InfluenzaA__AEX33971
augaaccccaaucagaagaucauuaccauaggcagcgugucccugacaaucucuacuauuugcuucuuuaugcaaaucgccauucucaucacgaccgucacacuucacuucaaacaguacgaguuuucaaguccuccaaacaaucagguuaugcugugugaaccggcuauaaucgagagaaacauuacugaaaccguguauuugacaaauaccacuacagagaaggaaaucugccccaaauuagcagaguacaggaacuggagcaagccucagugugacauuaccggguucgccccauuuuccaaagauaauucuauccggcugucggcgggaggugacauauggguaacgcgcgagcccuaugugucaugcgauccugacaaguguuaccaauucgcucuaggccaggggacuacccucaacaauguccauagcaacgauacagugcacgaccgaacuccauaucguacccugcuuaugaaugaacugggaguucccuuucauuugggcacaaaacaggugugcauugccuggaguuccucuagcugucacgaugguaaggcauggcuccaugucugcgugaccggggacgauaagaacgccacggcuuccuucaucuacaauggaagacugguagacucaauuguuaguuggagcaaagagauccugaggacucaggaaucugagugugugugcaucaacggcacauguaccgucgugaugacugauggcuccgcaucagggaaggccgacacaaaaauucucuuuauagaggaaggaaagaucgugcacaccagcacguuaagugguucugcucaacacgucgaggaaugcuccugcuauccucgguacccaggcguucgcugugugugcagagauaauuggaaggggagcaacaggccgauuguagacaucaacauaaaagacuacucgauugugucucgguaugucuguuccggaaucgugggcgauacccccaggaagaaugacucaaguagcuccucucauugccuggauccuaacaaugaggaaggugggcacggaguuaaaggcugggccuucgacgauggcaacgacguguggauggggcgaacaaucagcgagaagucaagaaguggauacgagacuuuuaaagucauugaagguugguccaauccaaacagcaaacuucagaucaaucgccaggugauuguagaucggggcaaccguucuggguauucaggaauauucaguguugagggcaagagcuguaucaaucgcugcuuuuacguggaauugauuagagguaggaaggaggaaaccgagguccuguggacauccaacucuaucguggucuucugugggacuucgggcaccuauggaacaggcagcuggcccgacggggcggauaucaaucuaaugccuauuuga

SEQ ID NO: 149510 - RNA, 1410 nt, Artificial Sequence
  derived and/or modified CDS sequence (opt3) from neuraminidase__InfluenzaA__AEX33993
augaaccccaaucagaagaucauuaccauaggcagcgugucccugacaaucucuacuauuugcuucuuuaugcaaaucgccauucucaucacgaccgucacacuucacuucaaacaguacgaguuuaacucaccuccaaauaaccagguuaugcugugugaaccgacuauaaucgagagaaauauuaccgaaaucguguauuugacaaacaccacuauugagaaggaaaucugccccaaauuagcugaguacaggaauuggaguaagccucagugugacauaacaggguucgcaccauuuagcaaagauaacuccauucggcugucugccggaggugacaucuggguaacccgcgagcccuaugugucgugcgauccugacaaguguuaccaauucgcgcuaggccaggggacgacucucaauaacguccauucaaaugauaccgugcgagaccguacaccauauagaacucugcuuaugaacgaacugggaguucccuuucacuugggcaccaaacaggugugcauugcuuggagcaguuccucuugucaugaugguaaggccuggcuccacgucugcaucacaggggacgauaagaaugcaaccgccagcuucaucuacaacggaaggcugguggacuccauuguaucauggaguaaagagauacugcggacgcaggaaagcgaguguguuugcaucaauggcacuuguacaguggucaugaccgauggcucugcuuccggggaggcagacacuaagauucucuuuaucgaagagggaaaaauagugcauacaucaaccuuaagcgguagugcccaacacguggaagagugcucuugcuauccucgcuacccaggcgucagauguguuugcagggauaacuggaagggguccaaccggccgauuguggacaucaauaucaaggaccacagcauuguaucgucuuacguguguuccggacuggucggcgauacgccccgcaaaaacgacucaaguagcuccucucauugccuugauccuaauaacgaagagggugggcacggagugaagggcugggcuuucgacgauggcaaugacguuuggauggggcgaaccaucagcgagaaaucaagauugggauaugaaacauuuaaggugauugaggguuggaguaacccaaaauccaagcugcagauaaauaggcaggucaucguggaucggggcaaccguagcggguacucuggaauuuucucaguagaaggcaaaaguuguaucaaucgcugcuuuuauguugagcuaaucagagguaggaaggaagagacugaggugcucuggaccagcaacuccauugucguguucugugggacaucuggcacuuacggaaccggcucguggcccgacggggccgauauaaaucugaugccugucuga

SEQ ID NO: 149511 - RNA, 1410 nt, Artificial Sequence; identical to SEQ ID NO: 144560
  derived and/or modified CDS sequence (opt3) from neuraminidase__InfluenzaA__AEX34026

SEQ ID NO: 149512 - RNA, 1410 nt, Artificial Sequence
  derived and/or modified CDS sequence (opt3) from neuraminidase__InfluenzaA__AEX34036
augaaccccaaucagaagaucauuaccauaggcagcgugucccugacaaucucuacuauuugcuucuuuaugcaaaucgccauucucaucacgaccgucacacuucacuucaaacaguacgaguuuucaaguccuccaaacaaucagguuaugcugugugaaccgacuauaaucgagagaaacauuaccgaaaucguguauuugacaaauaccacuauugagaaggaaaucugccccaaauuagcugaguacaggaacuggagcaagccucagugugacauaacaggguucgcaccauuuuccaaagauaauucuauucggcugucggccggaggugacaucuggguaacccgcgagcccuaugugucaugcgauccugacaaguguuaccaauucgcgcuaggccaggggacgacucucaacaauguccauagcaacgauaccgugcacggacgaacaccauaucguacucugcuuaugaaugaacugggcguucccuuucauuuggguaccaaacaggugugcauugcuuggaguuccucuagcugucacgacgggaaggccuggcuccaugucugcgugacaggagaugacaagaacgcaaccgccuccuucaucuacaauggcagacugguagauucaaucguuaguuggagcaaagagauucugaggacgcaggaaucugagugugugugcauaaacggcacuugugcugucgugaugacagacggguccgcaucaggaaaggccgauaccaaaauccucuuuauugaggaagguaagaucgugcacacuagcacauuaaguggcucugcucaacacgucgaggaaugcuccugcuauccucgguacccagggguucgcugugugugcagagacaauuggaagggaagcaacaggccgauaguagauauuaacaucaaagacuacucgaucgugucucgguaugucuguuccggccuggugggugacacccccaggaagaaugauucaaguagcuccucucauugccuugacccuaacaaugaggaagggggacacggcguuaaaggcugggccuucgaugacggggaugacguguggaugggacgaacgauuagcgagaagucaagaagugguuacgagaccuuuaaagucaucgaaggcugguccaacccaaauagcaaguugcagauuaaccgccaggugauaguagaucgggggaaucguucuggauauucaggcaucuucaguguugaggguaaaagcuguauuaaccgcugcuuuuacguggaacugaucagagggaggaaggaggaaacagagguccuauggacuuccaauucuaucguggucuucuguggcaccucgggaacauauggcacugggagcuggcccgacggagcggauauuaaccucaugccuauauga

SEQ ID NO: 149513 - RNA, 1410 nt, Artificial Sequence
  derived and/or modified CDS sequence (opt3) from neuraminidase__InfluenzaA__AEX34058
augaaccccaaucagaagaucauuaccauaggcagcgugucccugacaaucucuacuauuugcuucuuuaugcagaucgccauucucaucacgaccgucacacuucacuucaaacaguacgaguuuucaaguccuccaaacaaucagguuaugcugugugaaccggcuauaaucgagagaaacauuacugaaaucguguauuugaccaauacaaccauugagaaggaaaucugccccaaauuaacugaguacaggaacuggagcaagccucagugugacauaacaggguucgcaccauuuuccaaagauaauucuauucggcugucggccggaggugacaucuggguaacccgcgagcccuaugugucaugcgauccugacaaguguuaccaauucgcgcuaggccaggggacgacucucaacaauguccauagcaacgauaccgugcacgaccgaacaccauaucguacucugcuuaugaaugaacugggaguucccuuucauuugggcaccaaacaggugugcauugcuuggaguuccucuagcugucacgaugguaaggccuggcuccaugucugcgugacaggggacgauaagaacgcaaccgccuccuucaucuacaauggaagacugguagacucaaucguuaguuggagcaaagagauucugaggacgcaggaaucugagugugugugcauaaacggcacuuguacagucgugaugaccgauggcuccgcuucagggaaggcagacacuaaaauccucuuuauugaggaaggaaagaucgugcacacaagcaccuuaagugguucugcccaacacgucgaggaaugcuccugcuauccucgguacccaggcguucgcugugugugcagagauaauuggaaggggagcaacaggccgauaguagacauuaacaucaaagacuacucgaucgugucucgguaugucuguuccggacuggugggcgauacgccccgcaagaaugacucaaguagcuccucucauugccuugauccuaacaaugaggaaggugggcacggaguuaaaggcugggcuuucgacgauggcaacgacguguggauggggcgaaccauuagcgagaagucaagaaguggauacgagacauuuaaagucaucgaagguugguccaauccaaacagcaaguugcagauuaauaggcaagugauaguagaucggggcaaccguucuggguauucaggaaucuucaguguugagggcaaaagcuguauuaaucgcugcuuuuacguggaacugaucagagguaggaaggaggaaacugagguccuauggaccuccaacucuaucguggucuucugugggacaucgggcacuuauggaaccggcagcuggcccgacggggccgauauuaaucucaugccuauauga

SEQ ID NO: 149514 - RNA, 1410 nt, Artificial Sequence
  derived and/or modified CDS sequence (opt3) from neuraminidase__InfluenzaA__AEX34103
augaaccccaaucagaagaucauuaccauaggcagcgugucccugacaaucucuacuauuugcuucuuuaugcaaaucgccauucucaucacgaccgucacacuucacuucaaacaguacgaguuuucaaguccuccaaacaaucagguuaugcugugugaaccgacuauaaucgagagaaacauuaccgaaaucguguauuugacaaauaccacuauugagaaggaaguaugccccaaauuagcugaguacaggaacuggagcaagccucagugugacaucacaggguucgcaccauuuuccaaagauaauucuauacggcugucggccggaggugacauuugggugacccgcgagcccuaugucucaugcgauccugacaaguguuaccaauucgcgcuaggccaggggacgacucucaacaaugugcauagcaacgauaccguucacgaccgaacaccauaucguacucugcuuaugaaugaacugggagugcccuuucauuugggcaccaagcaggucugcaucgcuuggaguuccucuagcugucacgaugguaaagccuggcuccaugugugcguaacaggggacgauaagaacgcaaccgccuccuucauuuacaauggaagacugguugacucaaucgugaguuggagcaaagagauccugaggacgcaggaaucugagugugucugcauuaacggcacuuguacaguggugaugaccgauggcuccgcuucagggaaggcagacacuaaaauacucuuuaucgaggaaggaaagauuguccacacaagcaccuuaagugguaaugcccaacacguugaggaaugcucuugcuauccucgguacccaggcgugcgcuguguaugcagagauaacuggaagggguccaacaggccgaucguggacauaaauauuaaagacuacagcaucgucucgcgguauguguguucuggacugguuggcgauacgccccgcaagaacgacuccucaaguagcucccauugccuugauccuaauaacgaggaaggugggcacggagugaaaggcugggcuuucgacgauggcaaugacgucuggauggggcgaaccaucucugaaaagagcagaucaggauacgagacauuuaaagugauugaggguuggaguaacccaaauuccaaguugcagaucaacaggcagguaauuguugaucggggcaaucguagcggguauucuggaauauucucaguggagggcaaaaguuguaucaaccgcugcuuuuacgucgaacugauuagagguaggaaggaggaaacuaaggugcuauggaccagcaauuccaucgucguguucugugggacaucuggcacuuauggaaccggcucguggcccgacggggccgauaucaaccucaugccuauuuga

SEQ ID NO: 149515 - RNA, 1410 nt, Artificial Sequence
  derived and/or modified CDS sequence (opt3) from neuraminidase__InfluenzaA__AEX34114
augaaccccaaucagaagaucauuaccauaggcagcgugucccugacaaucucuacuauuugcuucuuuaugcagaucgccauucucaucacgaccgucacacuucacuucaaacaguacgaguuuucaaguccuccaaacaaucagguuaugcugugugaaccggcuauaaucgagagaaacauuacugaaaucguguaucccaccaauacaaccauugagaaggaaaucugcccuaaauuggcagaguacaggaacuggagcaagccacagugugacauaacuggguucgcccccuuuuccaaagauaauucuauucgguuaucggcgggaggugacaucuggguaacacgcgagccuuaugugucaugcgauccagacaaguguuaccaauucgcucugggccaggggaccacgcuaaacaauguccauagcaacgauacugugcacgaccgaacccccuaucguacacuccugaugaaugaacuuggaguuccuuuucaucugggcacuaaacaggugugcauugccuggaguuccucuagcugucacgaugguaaggcaugguugcaugucugcgugaccggggacgauaagaacgccacagcuuccuucaucuacaauggaagacucguagacucaaucguuaguuggagcaaagagauucugaggacccaggaaucugagugugugugcauaaacggcacguguacugucgugaugacagauggcuccgcaucagggaaggccgacaccaaaauccuguuuauugaggaaggaaagaucgugcacacuagcacacucagugguucugcucaacacgucgaggaaugcuccugcuauccacgguacccgggcguucgcugugugugcagagauaauuggaaggggagcaacaggcccauaguagacauuaacaucaaagacuacucgaucgugucucgguaugucuguuccggauuagugggcgauaccccucgcaagaaugacucaaguagcuccucucauugccuggauccaaacaaugaggaaggugggcacggaguuaaaggcugggccuucgacgauggcaacgacguguggauggggcgaacgauuagcgagaagucaagaaguggauacgagaccuuuaaagucaucgaagguugguccaaucccaacagcaaacuucagauuaauaggcaagugauaguagaucggggcaaccguucuggguauucaggaaucuucaguguugagggcaagagcuguauuaaucgcugcuuuuacguggaauugaucagagguaggaaggaggaaacagagguccuguggacuuccaacucuaucguggucuucugugggaccucgggcacauauggaacuggcagcuggccugacggggcggauauuaaucuaaugccaauauga

SEQ ID NO: 149516 - RNA, 1410 nt, Artificial Sequence
  derived and/or modified CDS sequence (opt3) from neuraminidase__InfluenzaA__AEX34137
augaaccccaaucagaagaucauuaccauaggcagcgugucccugacaaucucuacuauuugcuucuuuaugcaaaucgccauucucaucacgaccgucacacuucacuucaaacaguacgaguuuaacucaccuccaaauaaccagguuaugcugugugaaccgacuauaaucgagagaaauauuaccgaaaucguguauuugacaaacaccacuauugagaaggaaaucugccccaaauuagcugaguacaggaauuggaguaagccucagugugacauaacaggguucgcaccauuuagcaaagauaacuccauucggcugucugccggaggugacaucuggguaacccgcgagcccuaugugucgugcgauccugacaaguguuaccaauucgcgcuaggccaggggacgacucucaauaacguccauucaaaugauaccgugcgaggacguacaccauauagaacucugcuuaugaacgaacugggcguucccuuucacuuggguaccaaacaggugugcauugcuuggagcaguuccucuugucaugacgggaaggccuggcuccacgucugcaucacaggagaugacaagaaugcaaccgccagcuucaucuacaacggcaggcugguggauuccauuguaucauggaguaaagagauacugcggacgcaggaaagcgaguguguuugcaucaauggcacuuguacaguggucaugaccgacgggucugcuuccggaaaggcagauacuaaaauucucuuuaucgaggaagguaagauagugcauacaucaaccuuaagcggcagugcccaacacguggaggaaugcucuugcuauccucgcuacccaggggucagauguguuugcagggacaacuggaagggauccaaccggccgauuguggauaucaauaucaaagaccacagcauuguaucgucuuacguguguuccggccuggucggugacacgccccgcaagaacgauucaaguagcuccucucauugccuugacccuaauaacgaggaagggggacacggcgugaaaggcugggcuuucgaugacgggaaugauguuuggaugggacgaaccaucagcgagaagucaagauuggguuaugagacauuuaaagugauugaaggcuggaguaacccaaaguccaaacugcagauaaauaggcaggucaucguggaccgggggaaccguagcggauacucuggcauuuucucaguagaggguaagaguuguaucaaucgcugcuuuuauguugaacuaaucagagggaggaaggaggaaacugaggugcucuggaccagcaacuccauugucguguucuguggcacaucuggaacuuacggcaccgggucguggcccgauggagccgacauaaaucugaugccuaucuga

SEQ ID NO: 149517 - RNA, 1410 nt, Artificial Sequence
  derived and/or modified CDS sequence (opt3) from neuraminidase__InfluenzaA__AEX34191
augaaccccaaucagaagaucauuaccauaggcagcgugucccugucuaucucaacaauuugcuucuuuaugcaaaucgccauucucaucacuacggucacccuucacuucaaacaguacgaguuuaacaguagcccuaauaaccagguuaugcugugugaaccaacaauaaucgagagaaauauuacugaaaucguguauuugaccaacacaaccauugagaaggaaaucugcccgaaauuagcugaguacaggaauugguccaagccccagugugacauaacuggguucgcaccuuuuucuaaagauaacucgauucggcugucagccggaggugacaucuggguaacacgcgagccauaugugagcugcgaucccgacaaguguuaccaauucgcgcuaggccaggggaccacgcucaauaacguccauaguaauaacacugugcgagaucguaccccuuauagaacacugcuuaugaaugaacugggaguuccauuucacuugggcacuaaacaggugugcauugcuugguccucuagcuccugucaugacgguaaggccuggcuccacgucugcaucaccggggaugacaagaacgcaacagccucauucaucuacaauggaaggcugguggauaguauuguaagcuggucuaaagagauacugcggacccaggaauccgaguguguuugcaucaacggcacguguacuguggucaugacagacggcucagcuagcgggaaggcagauaccaaaauucucuuuaucgaggaaggaaagauagugcauacaaguacuuuaucugguuccgcccaacacguggaggaaugcagcugcuauccccgcuacccuggcgucagauguguuugcagggacaacuggaaggggucgaaucggccaauuguggauaucaacaucaaagaccacucuauuguauccucauacguguguaguggacuggucggcgacaccccgcgcaagaaugauagcuccucuagcucacauugccuugaccccaacaaugaggaaggugggcacggagugaaaggcugggcuuucgaugacggcaacgauguuuggauggggcgaacgaucagugagaaguccagauugggauaugagaccuuuaaagugauugaagguuggagcaauccuaagucuaaacugcagauaaacaggcaggucaucguggaccggggcaaucguucaggguacaguggaauuuucagcguagagggcaaguccuguaucaaccgcugcuuuuauguugaacuaaucagagguaggaaggaggaaacagaggugcucuggacuucuaauucgauugucguguucugugggaccagcggcacauacggaacuggcuccuggccagauggggccgacauaaaccugaugcccaucuga

SEQ ID NO: 149518 - RNA, 1410 nt, Artificial Sequence
  derived and/or modified CDS sequence (opt3) from neuraminidase__InfluenzaA__AEX34224
augaaccccaaucagaagaucauuaccauaggcagcgugucccugacaaucucuacuauuugcuucuuuaugcagaucgccauucucaucacgaccgucacacuucacuucaaacaguacgaguuuucaaguccuccaaacaaucagguuaugcugugugaaccgacuauaaucgagagaaacauuaccgaaaucguguauuugacaaauaccacuauugagaaggaaaucugccccaaauuagcugaguacaggaacuggagcaagccucagugugacauaacaggguucgcaccauuuuccaaagauaauucuauucggcugucggccggaggugacaucuggguaacccgcgagcccuaugugucaugcgauccugacaaguguuaccaauucgcgcuaggccaggggacgacucucaacaauguccauagcaacgauaccgugcacggacgaacaccauaucguacucugcuuaugaaugaacugggcguucccuuucauuuggguaccaaacaggugugcauugcuuggaguuccucuagcugucacgacgggaaggccuggcuccaugucugcgugacaggagaugacaagaacgcaaccgccuccuucaucuacaauggcagacugguagauucaaucguuaguuggagcaaagagauucugaggacgcaggaaucugagugugugugcauaaacggcacuuguacagucgugaugaccgacggguccgcuucaggaaaggcagauacuaaaauccucuuuauugaggaagguaagaucgugcacacaagcaccuuaaguggcucugcccaacacgucgaggaaugcuccugcuauccucgguacccagggguucgcugugugugcagagacaauuggaagggaagcaacaggccgauaguagauauuaacaucaaagacuacucgaucgugucucgguaugucuguuccggccuggugggugacacgccccgcaagaaugauucaaguagcuccucucauugccuugacccuaacaaugaggaagggggacacggcguuaaaggcugggcuuucgaugacgggaacgauguguggaugggacgaaccauuagcgagaaguugagaucagguuacgagacauuuaaagucaucgaaggcuggaguaauccaaacuccaagcugcagauuaauaggcaagugauaguagaccgggggaaccguagcggauauucuggcaucuucucaguugaggguaaaaguuguauuaaucgcugcuuuuacguggaacuaaucagagggaggaaggaggaaacugagguccucuggaccagcaacuccaucguggucuucuguggcacaucuggaacuuauggcaccgggucguggcccgauggagccgacauuaaucugaugccuauauga

SEQ ID NO: 149519 - RNA, 1410 nt, Artificial Sequence
  derived and/or modified CDS sequence (opt3) from neuraminidase__InfluenzaA__AEX34235
augaaccccaaucagaagaucauuaccauaggcagcgugucccugacaaucucuacuauuugcuucuuuaugcaaaucgccauucucaucacgaccgucacacuucacuucaaacaguacgaguuuucaaguccuccaaacaaucagguuaugcugugugaaccggcuauaaucgagagaaacauuacugaaaucguguauuugaccaauacaaccauugagaaggaaaucugccccaaauuagcagaguacaggaacuggagcaagccucagugugacauaacuggguucgccccauuuuccaaagauaauucuauucggcugucggcgggaggugacaucuggguaacacgcgagcccuaugugucaugcgauccugacaaguguuaccaauucgcucuaggccaggggaccacgcucaacaauguccauagcaacgauacugugcacgaccgaaccccauaucguacacugcuuaugaaugaacugggaguucccuuucauuugggcacuaaacaggugugcauugccuggaguuccucuagcugucacgaugguaaggcauggcuccaugucugcgugaccggggacgauaagaacgccacagcuuccuucaucuacaauggaagacugguagacucaaucguuaguuggagcaaagagauucugaggacccaggaaucugagugugugugcauaaacggcacguguacugucgugaugacagauggcuccgcaucagggaaggccgacaccaaaauccucuuuauugaggaaggaaagaucgugcacacuagcacauuaagugguucugcucaacacgucgaggaaugcuccugcuauccucgguacccaggcguucgcugugugugcagagauaauuggaaggggagcaacaggccgauaguagacauuaacaucaaagacuacucgaucgugucucgguaugucuguuccggacuggugggcgauacccccaggaagucagacaguagcuccucuagccauugccuugauccuaauaacgaggaaggugggcacggaguuaaaggcugggccuucgacgauggcaaugacguguggauggggcgaacgauuucagagaagaguagauccggauacgagaccuuuaaagucaucgaagguuggagcaacccaaauucuaaguugcagauuaaccgccaggugauaguagaucggggcaaucguucaggguauaguggaaucuucagcguugagggcaaauccuguauuaaccgcugcuuuuacguggaacugaucagagguaggaaggaggaaacagagguccuauggacuucuaauucgaucguggucuucugugggaccagcggcacauauggaacuggcuccuggcccgacggggcggauauuaaccucaugccuauauga

SEQ ID NO: 149520 - RNA, 1410 nt, Artificial Sequence
  derived and/or modified CDS sequence (opt3) from neuraminidase__InfluenzaA__AEX34246
augaaccccaaucagaagaucauuaccauaggcagcgugucccugacaaucucuacuauuugcuucuuuaugcagaucgccauucucaucacgaccgucacacuucacuucaaacaguacgaguuuaacucaccuccaaauaaccagguuaugcugugugaaccgacuauaaucgagagaaauauuaccgaaaucguguauuugacaaacaccacuauugagaaggaaaucugccccaaauuagcugaguacaggaauuggaguaagccucagugugacauaacaggguucgcaccauuuagcaaagauaacuccauucggcugucugccggaggugacaucuggguaacccgcgagcccuaugugucgugcgauccugacaaguguuaccaauucgcgcuaggccaggggacgacucucaauaacguccauucaaaugauaccgugcgaggacguacaccauauagaacucugcuuaugaacgaacugggcguucccuuucacuuggguaccaaacaggugugcauugcuuggagcaguuccucuugucaugacgggaaggccuggcuccacgucugcaucacaggagaugacaagaaugcaaccgccagcuucaucuacaacggcaggcugguggauuccauuguaucauggaguaaagagauacugcggacgcaggaaagcgaguguguuugcaucaauggcacuuguacaguggucaugaccgacgggucugcuuccggaaaggcagauacuaaaauucucuuuaucgaggaagguaagauagugcauacaucaaccuuaagcggcagugcccaacacguggaggaaugcucuugcuauccucgcuacccaggggucagauguguuugcagggacaacuggaagggauccaaccggccgauuguggauaucaauaucaaagaccacagcauuguaucgucuuacguguguuccggccuggucggugacacgccccgcaagaacgauucaaguagcuccucucauugccuugacccuaauaacgaggaagggggacacggcgugaaaggcugggcuuucgaugacgggaaugauguuuggaugggacgaaccaucagcgagaagucaagauuggguuaugagacauuuaaagugauugaaggcuggaguaacccaaaguccaaacugcaggucaauaggcaagugauaguagaccgggggaaccguagcggauacucuggcaucuucucaguugaggguaagaguuguauuaaucgcugcuuuuauguggaacuaaucagagggaggaaggaggaaacugagguccucuggaccagcaacuccaucguggucuucuguggcacaucuggaacuuacggcaccgggucguggcccgauggagccgacauuaaucugaugccuauauga

SEQ ID NO: 149521 - RNA, 1410 nt, Artificial Sequence
  derived and/or modified CDS sequence (opt3) from neuraminidase__InfluenzaA__AEX34257
augaaccccaaucagaagaucauuaccauaggcagcgugucccugacaaucucuacuauuugcuucuuuaugcaaaucgccauucucaucacgaccgucacacuucacuucaaacaguacgaguuuaacucaaguccuaauaaccagguuaugcugugugaaccaacuauaaucgagagaaauauuaccgaaaucguguauuugacaaacaccacuauugagaaggaaaucugcccgaaauuagcugaguacaggaauuggagcaagccccagugugacauaacaggguucgcaccuuuuuccaaagauaacucuauucggcugucggccggaggugacaucuggguaacccgcgagccauaugugucaugcgaucccgacaaguguuaccaauucgcgcuaggccaggggacgacucucaauaacguccauagcaauaacaccgugcgaaaucguacaccuuauagaacucugcuuaugaacgaacugggaguuccauuucacuugggcaccaaacaggugugcauugcuuggaguuccucuagcugucaugaugguaaggccuggcuccacgucugcaucacaggggacgauaagaaugcaaccgccuccuucaucuacaacggaaggcugguggacucaauuguaaguuggagcaaagagauacugcggacgcaggaaucugaguguguuugcaucaacggcacuuguacaguggucaugaccgauggcuccgcuucagggaaggcagacacuaaaauucucuuuaucgaggaaggaaagauagugcauacaagcaccuuaagugguucugcccaacacguggaggaaugcuccugcuauccccgcuacccuggcgucagauguguuugcagggauaauuggaaggggagcaaccggccaauuguggacaucaauaucaaagaucacucgauuguaucuuccuacguguguucaggacuggucggcgacacgccgcgcaagaacgacaguagcuccucuagccauugccuugaucccaauaacgaggaaggugggcacggagugaaaggcugggcuuucgacgauggcaaugacguuuggauggggcgaaccaucucagagaagaguagauugggauaugagacauuuaaagugauugaagguugguccaacccuaagagcaaacugcagauaaauaggcaggucaucguggaucggggcaaccguucuggguacucaggaauuuucaguguagagggcaagagcuguaucaaucgcugcuuuuauguugaacuaaucagagguaggaaggaggaaacugaggugcucuggaccuccaacucuauugucguguucugugggacaucgggcacuuacggaaccggcagcuggccagacggggccgauauaaaucugaugcccaucuga

SEQ ID NO: 149522 - RNA, 1410 nt, Artificial Sequence
  derived and/or modified CDS sequence (opt3) from neuraminidase__InfluenzaA__AEX34268
augaaccccaauaagaaaaucauuaccauaggcagcgugucccugacaaucucuacuauuugcuucuuuaugcagaucgccauucucaucacgaccgucacacuucacuucaagcaauacgaguuuaacucaccuccaaauaaccagguuaugcugugugaaccgacuauaaucgagagaaauauuaccgaaaucguguauuugacaaacaccacuauugagaaagaaaucugccccaaguuagcugaguacaggaauuggaguaaaccucagugugacauaacaggguucgcaccauuuagcaaggauaacuccauucggcugucugccggaggugacaucuggguaacccgcgagcccuaugugucgugcgauccugacaaguguuaccaguucgcgcuaggccaagggacgacucucaauaacguccauucaaaugauaccgugcgaaaccguacaccauauagaacucugcuuaugaaugaacugggaguucccuuucacuugggcaccaaacaggugugcauugcuuggagcaguuccucuugucaugacgguaaggccuggcuccacgucugcaucacaggggaugacaaaaacgcaaccgccagcuucaucuacaauggaaggcugguggauuccauuguaucauggaguaaggagauacugcggacgcaggaaagcgaguguguuugcaucaacggcacuuguacaguggucaugaccgacggcucugcuuccgggaaagcagauacuaagauucucuuuaucgaggaaggaaagauagugcauacaucaaaauuaagcgguagugcccagcacguggaggaaugcucuugcuauccucgcuacccaggcgucagauguguuugcagggacaacuggaagggguccaaucggccgauuguggauaucaacaucaaagaccacagcauuguaucgucuuacguguguuccggacuggucggcgacacgccccgcaagaaugauucaaguagcuccucucauugccuugacccuaacaaugaggaaggugggcacggagugaaaggcugggcuuucgaugacggcaacgauguuuggauggggcgaaccaucagcgagaagucaagauugggauaugagaccuuuaaagugauugaagguuggaguaauccaaaguccaagcugcaaauaaacaggcaggucaucguggaccggggcaaucguagcggguacucuggaauuuucucaguagagggcaaaaguuguaucaaccgcugcuuuuauguugaacuaaucagagguaggaaggaggaaacagaggugcucuggacuagcaauuccauugucguguucugugggaccucuggcacauacggaacuggcucguggcccgauggggccgacauaaaccugaugccuaucuga

SEQ ID NO: 149523 - RNA, 1410 nt, Artificial Sequence
  derived and/or modified CDS sequence (opt3) from neuraminidase__InfluenzaA__AEX34278
augaaccccaaucagaagaucauuaccauaggcagcgugucccugacaaucucuacuauuugcuucuuuaugcaaaucgccauucucaucacgaccgucacacuucacuucaaacaguacgaguuuucaaguccuccaaacaaucagguuaugcugugugaaccggcuauaaucgagagaaacauuacugaaaucguguauuugaccaauacaaccauugagaaggaaaucugccccaaauuagcagaguacaggaacuggagcaagccucagugugacauaacuggguucgccccauuuuccaaagauaauucuauucggcugucggcgggaggugacaucuggguaacacgcgagcccuaugugucaugcgauccugacaaguguuaccaauucgcucuaggccaggggaccacgcucaacaauguccauagcaacgauacugugcacgaccgaaccccauaucguacacugcuuaugaaugaacugggaguucccuuucauuugggcacuaaacaggugugcauugccuggaguuccucuagcugucacgaugguaaggcauggcuccaugucugcgugaccggggacgauaagaacgccacagcuuccuucaucuacaauggaagacugguagacucaaucguuaguuggagcaaagagauucugaggacccaggaaucugagugugugugcauaaacggcacguguacugucgugaugacagauggcuccgcaucagggaaggccgacaccaaaauccucuuuauugaggaaggaaagaucgugcacacuagcacauuaagugguucugcucaacacgucgaggaaugcuccugcuauccucgguacccaggcguucgcugugugugcagagauaauuggaaggggagcaacaggccgauaguagacauuaacaucaaagacuacucgaucgugucucgguaugucuguuccggacuggugggcgauacccccaggaagaaugacucaaguagcuccucucauugccuugauccuaacaaugagaaaggugggcacggaguuaagggcugggccuucgacgauggcaacgacguguggauggggcgaacgauuagcgaaaaaucaagaaguggauacgagaccuuuaaggucaucgaggguugguccaauccaaacagcaaauugcagauuaaucgccaggugauaguagaucggggcaaccguucuggguauucaggaaucuucaguguugaaggcaagagcuguauuaaucgcugcuuuuacguggagcugaucagagguaggaaggaagagacagaaguccuauggacuuccaacucuaucguggucuucugugggaccucgggcacauauggaacuggcagcuggcccgacggggcggauauuaaucucaugccuauauga

SEQ ID NO: 149524 - RNA, 1413 nt, Artificial Sequence
  derived and/or modified CDS sequence (opt3) from neuraminidase__InfluenzaA__AEX34310
augaaccccaaucagaagaucauuaccauaggcagcaucuccauugccaucgggauuaucucucugaugcuccaaauaggaaacaucauuucaaucugggcuagucacagcauucagacagguacucagaaucauacgggcaucugcaaccagagaauaauuaccuacgagaauaguacaugggugaaccacacuuaugucaauaucaacaauaccaacguuguggcagggaaagacaagacaccuguaacccuugugggaaauucuucgcuguguucaauuagcggcugggccaucuacacuaaagauaacaguaucaggauugguuccaagggggacgucuucgugauacgggaaccauuuaucucuugcagccauuuggaguguaaaacauucuuuuuaacccaaggagcgcugcuaaaugauaagcacuccaacggcacgguuaaggaccgcucaccguaucgagcucucaugaguugcccccugggcgaagccccuagcccauacaauucuaaauucgaguccguggcauggucagccagcgcuugucaugaugggauuggauggcuuacuaucgguauaaguggccccgacaacggggcagucgccgugcugaaguauaaaggaauuaucaccggcacaaucaagucuuggaaaaagcagauuuugcguacucaggaauccgagugcguauguaugaacgguagcugcuuuaccaucaugacagaugggccuucgaauggagcugccucuuacaagauuuucaaaauagagaagggcaaaguuaccaaguccauggaacucaacgcgccaaauuuucacuaugaggaauguucaugcuaccccgacacgggcacugugaugugugucugcagagauaacuggcacgggaguaauaggccuugggugagcuucaaccagaaucuggacuaccaaaucggauauauuugcuccgguguguuuggcgauaacccacggccgaaagaccgcgaggggucuuguaaucccgucacaguugauggagcaaacggcgugaaggguuucagcuacaaauaugggaauggcguauggaucggaagaaccaagucaaacaggauccggaagggcuuugagaugauuugggacccuaauggguggacuaacacagacagugauuucuccgugaaacaggacauagucgccaucaccgauuggagcggauacucugguucauuugugcagcauccagaacugacgggccucgacugcauucgccccuguuucuggguugaguuagugcgagggcugccuggagaaaauaccacaaucuggacuuccggcagcuccauuucuuucugcggugucaacggggauaucgcuaacuggucguggccagacggcgccgagcuucccuuuaccauagauaaguga

SEQ ID NO: 149525 - RNA, 1413 nt, Artificial Sequence
  derived and/or modified CDS sequence (opt3) from neuraminidase__InfluenzaA__AEX34321
augaaccccaaucagaagaucauuaccauaggcagcaucuccauugccaucgggauuaucucucugaugcuccaaauaggaaacaucauuucaaucugggugagucacagcauucagacagguucccagaauaacacuggcaucugcaaucagagaauaauuacguacgagaacucuaccugggugaaucauacauauguuaacaucaauaacacuaaugugguagcuggggaagacaaaaccucggugacacuugcaggaaacucaagccuguguaguauuuccggcugggccaucuacaccaaggauaauucuaucaggauugguagcaaaggggacgucuucgugauacgggagccuuuuaucuccugcucacacuuggaaugucgcacuuucuuuuuaacacaaggagcgcugcuaaacgauaagcauaguaauggcaccguuaaagaccgaagcccauaucgugcucucaugucuugcccgcugggcgaggcccccuccccuuacaacucaaaguucgaaagcguggcauggagugccucugcuugucacgaugggaugggauggcuuacgauugguaucuccggcccagacaacggggcagucgccgugcugaaguauaauggaauaauuacuggcaccaucaaaagcuggaagaaacagaucuugagaacacaggagucggagugcguauguaugaacgguucuugcuuuacuauuaugaccgaugggcccuccaauaaggcugccucauacaaaaucuucaagauugaaaagggaaaaguuacaaagaguauagagcucaacgcgccuaauuuuuauuacgaagaguguagcugcuacccagacaccggcaucgugaugugugucugcagggauaacuggcauggcuccaaucggcccugggugucuuucaaccagaaucuggacuaucaaauuggguacaucugcagcggaguguuuggugauaacccucgcccagaggacggcgaagggucauguaauccggucacgguugauggagcaaacggcgugaaagguuucaguuauaaguacgggaauggcguauggaucggaagaacuaaauccaacaggcugcggaagggcuuugagaugauuugggaccccaauggguggacaaacaccgacagcgauuucucugugaaacaggacgucguggccauaacugauuggucaggauauagugguagcuuuguucagcacccugaacucacaggcuuagacugcauccgcccauguuucuggguggagcugguccgagggcuucccagagaaaacaccacgauuuggaccuccggaucuucgaucagcuucugcggcgucaauuccgauacagcuaacuggucauggccugacggugccgaguugccauuuacuauugauaaguga

SEQ ID NO: 149526 - RNA, 1410 nt, Artificial Sequence; identical to SEQ ID NO: 144105
  derived and/or modified CDS sequence (opt3) from neuraminidase__InfluenzaA__AEX34356

SEQ ID NO: 149527 - RNA, 1410 nt, Artificial Sequence
  derived and/or modified CDS sequence (opt3) from neuraminidase__InfluenzaA__AEX34367
augaaccccaaucagaagaucauuaccauaggcagcgugucccugacaaucucuacuauuugcuucuuuaugcaaaucgccauucucaucacgaccgucacacuucacuucaaacaguacgaguuuaacucaccuccaaauaaccagguuaugcugugugaaccgacuauaaucgagagaaauauuaccgaaaucguguauuugacaaacaccacuauugagaaggaaaucugccccaaauuagcugaguacaggaauuggaguaagccucagugugacauaacaggguucgcaccauuuagcaaagauaacuccauucggcugucugccggaggugacaucuggguaacccgcgagcccuaugugucgugcgauccugacaaguguuaccaauucgcgcuaggccaggggacgacucucaauaacguccauucaaaugauaccgugcgagaccguacaccauauagaacucugcuuaugaacgaacugggaguucccuuucacuugggcaccaaacaggugugcauugcuuggagcaguuccucuugucaugaugguaaggccuggcuccacgucugcaucacaggggacgauaagaaugcaaccgccagcuucaucuacaacggaaggcugguggacuccauuguaucauggaguaaagagauacugcggacgcaggaaagcgaguguguuugcaucaauggcacuuguacaguggucaugaccgauggcucugcuuccgggaaggcagacacuaaaauucucuuuaucgaggaaggaaagauagugcauacaucaaccuuaagcgguagugccaagcacguggaggaaugcucuugcuauccucgccacccaggcgucagauguguuugcagggauaacuggaaaggguccaaccggccgauuguggacaucaauaucaaggaccauagcauuguaucgucuuacguguguuccggacuggucggcgauacgccccgcaaaaacgacucaaguagcuccucucacugccuugauccuaauaacgaggaaggugggcauggagugaagggcugggcuuucgacgauggcaaugacguuuggauggggcgaaccaucagcgagaaaucaagauugggauacgagacauuuaaggugauugaagguuggaguaacccaaaauccaagcugcaaauaaauaggcaggucaucguggaucggggcaaccguagcggguauucuggaauuuucucaguagagggcaagaguuguaucaaucgcugcuuuuacguugaacuaaucagagguaggaaagaggaaacugaggugcucuggaccagcaacuccauugucguguucugugggacaucuggcacuuauggaaccggcucguggcccgacggggccgauauaaaucugaugccuaucuga

SEQ ID NO: 149528 - RNA, 1410 nt, Artificial Sequence
  derived and/or modified CDS sequence (opt3) from neuraminidase__InfluenzaA__AEX34378
augaaccccaaucagaagaucauuaccauaggcagcgugucccugacaaucucuacuauuugcuucuuuaugcaaaucgccauucucaucacgaccgucacacuucacuucaaacaguacgaguuuaacucaccuccaaauaaccagguuaugcugugugaaccgacuauaaucgagagaaauauuaccgaaaucguguauuugacaaacaccacuauugagaaggaaaucugccccaauuuagcugaguacaggaacuggaguaaaccucagugugacauaacaggguucgcaccauuuagcaaggauaauuccauucggcugucugccggaggugacaucuggguaacccgcgagcccuaugugucgugcgauccugacaaauguuaccaauucgcgcuaggccaggggacgacucucaacaauguccauucaaacgauaccgugcgagaccguacaccauauagaacucugcuuaugaaugaacugggaguucccuuucacuugggcaccaaacaggugugcauugcuuggagcaguuccucuugucaugaugguaaggccuggcuccacgucugcaucacaggggacgauaagaacgcaaccgccagcuucaucuacaauggaaggcugguggacuccauuguaucauggaguaaggagauacugcggacgcaggaaagcgaguguguuugcaucaacggcacuuguacaguggucaugaccgauggcucugcuuccgggaaagcagacacuaagauucucuuuaucgaggaaggaaaaauagugcauacaucaaccuuaagcgguagugccaagcacguggaggaaugcucuugcuauccucgccacccaggcgucagauguguuugcagggauaacuggaagggguccaaucggccgauuguggacaucaacaucaaagaccauagcauuguaucgucuuacguguguuccggacuggucggcgauacgccccgcaagaaugacucaaguagcuccucucacugccuugauccuaacaaugaggaaggugggcauggagugaaaggcugggcuuucgacgauggcaacgacguuuggauggggcgaaccaucagcgagaagucaagauugggauacgagacauuuaaagugauugaagguuggaguaauccaaaguccaaacugcaaauaaacaggcaggucaucguggaucggggcaaucguagcggguauucuggaauuuucucaguagagggcaagaguuguaucaaccgcugcuuuuacguugaacuaaucagagguaggaaggaggaaacugaggugcucuggaccagcaauuccauugucguguucugugggacaucuggcacuuauggaaccggcucguggcccgacggggccgauauaaaccugaugccuaucuga

SEQ ID NO: 149529 - RNA, 1410 nt, Artificial Sequence
  derived and/or modified CDS sequence (opt3) from neuraminidase__InfluenzaA__AEX34400
augaaccccaaucagaagaucauuaccauaggcagcgugucccugacaaucucuacuauuugcuucuuuaugcagaucgccauucucaucacgaccgucacacuucacuucaaacaguacgaguuuaacucaccuccaaauaaccagguuaugcugugugaaccgacuauaaucgagagaaauauuaccgaaaucguguauuugacaaacaccacuauugagaaggaaaucugccccaaauuagcugaguacaggaauuggaguaagccucagugugacauaacaggguucgcaccauuuagcaaagauaacuccauucggcugucugccggaggugacaucuggguaacccgcgagcccuaugugucgugcgauccugacaaguguuaccaauucgcgcuaggccaggggacgacucucaauaacguccauucaaaugauaccgugcgaggacguacaccauauagaacucugcuuaugaacgaacugggcguucccuuucacuuggguaccaaacaggugugcauugcuuggagcaguuccucuugucaugacgggaaggccuggcuccacgucugcaucacaggagaugacaagaaugcaaccgccagcuucaucuacaacggcaggcugguggauuccguaguuucauggaguaaagagauucugcggacgcaggaaagcgagugugugugcauaaauggcacuuguacagucgugaugaccgacgggucugcuuccggaaaggcagauacuaaaauccucuuuauuaaggaggguaagaucgugcauacaucaaccuuaagcggcagugcccaacacgucgaagagugcucuugcuauccucgcuacccagggguuagaugugugugcagggacaacuggaaaggauccaaccggccgauaguagauauuaauaucaaggaccacagcaucgugucgucuuacgucuguuccggccuggugggugacacgccccgcaaaaacgauucaaguagcuccucucauugccuugacccuaauaacgaagaagggggacacggcguuaagggcugggcuuucgaugacgggaaugauguguggaugggacgaaccauuagcgagaaaucaagauuggguuaugagacauuuaaggucaucgagggcuggaguaacccaaaauccaagcugcagauuaauaggcaagugauaguagaccgggggaaccguagcggauacucuggcaucuucucaguugaagguaagaguuguauuaaucgcugcuuuuauguggagcuaaucagagggaggaaagaagagacugaaguccucuggaccagcaacuccaucguggucuucuguggcacaucuggaacuuacggcaccgggucguggcccgauggagccgacauuaaucugaugccuauauga

SEQ ID NO: 149530 - RNA, 1413 nt, Artificial Sequence
  derived and/or modified CDS sequence (opt3) from neuraminidase__InfluenzaA__AEX34432
augaaccccaaucagaagaucauuaccauaggcagcaucuccauugccaucgggauuaucucucugauacuccaaaucggaaacauuaucucaauuugggcuagucacagcauccagacagguucccagaaucauacuggcauaugcaaccagagaauuaucacguacgaaaauucuaccugggugaacaauacauaugucaacauuaauaacacuaauguugugguagagaaagacaagaccucggugacacuugcagggaacucaagccuguguaguaucuccggaugggccaucuacaccaaagauaauucuauuaggauaggcagcaagggugacgucuucgugauccgggagccuuuuauuuccugcucacacuuggaaugucgcacuuucuuuuuaacacaaggggcgcugcuaaacgauaaacauaguaauggaaccguuaaggaccgaagcccauaucgugcucucaugucuugcccgcugggcgaggcccccuccccuuacaacucaagauucgaaagcguggcauggagugccucugcuugucacgauggcaugggguggcuuacgaucggaauauccgguccagacaacggcgcagucgccgugcugaaguauaaugggauuaucacugagaccaucaaaagcuggaagaaaaggauuuugcggacacaggagucggaaugcguauguaugaacggaucuugcuuuacuaucaugaccgauggccccuccaaugguacagcuucauacaagauuuucaaaauagagaaggggaagguuaccaaaacgaucgaacucaacgccccuaauuuucauuaugaggaguguaguugcuacccagacacuggaacagugaugugugucugccgcgauaacuggcacggcagcaauagacccuggguguccuucaaccagaaucuggacuaccagauuggcuauaucugcucugggguguuuggagauaacccuaggccaaaggacggugaaggcagcuguaauccggucaccguugauggggcggacggagugaaaggcuucucauacaaguaugguaacgggguauggaucggccggacuaaaaguaaucgccugcgaaagggauuugagaugauuugggaccccaacggcuggacaaauaccgauuccgacuucagcgugaaacaagaugucguggcaauaacggacuggucuggguacucaggaaguuuuguucagcacccugaacucaccgguuuagauugcaucagaccauguuucuggguggagcuggucaggggccuuccccgggaaaacacaacuauuuggaccagcggguccucuaucucguucugcggagugaacagcggcacagccaauugguccuggccugacggugcugaguugccauuuacuauugauaaguga

SEQ ID NO: 149531 - RNA, 1413 nt, Artificial Sequence; identical to SEQ ID NO: 149530
  derived and/or modified CDS sequence (opt3) from neuraminidase__InfluenzaA__AEX34443

SEQ ID NO: 149532 - RNA, 1410 nt, Artificial Sequence; identical to SEQ ID NO: 144651
  derived and/or modified CDS sequence (opt3) from neuraminidase__InfluenzaA__AEX34454

SEQ ID NO: 149533 - RNA, 1413 nt, Artificial Sequence
  derived and/or modified CDS sequence (opt3) from neuraminidase__InfluenzaA__AEX34465
augaaccccaaucagaagaucauuaccauaggcagcaucuccauugccaucgggauuaucucucugaugcuccaaauaggaaacaucauuucaaucugggcuagucacagcauucagacagguucccagaaucauacuggcaucugcaaccagagaauaauuacguacgaaaauucuaccugggugaaccacacauaugucaauaucaacaauacuaacguuguggcagggaaagacaagaccucgguaacacuugccggaaauucaagccuguguaguauuuccggcugggcgaucuacaccaaagauaacucuaucaggauugguagcaagggggacguguucgucauacgggagccuuuuaucuccugcucacauuuggagugucgcacuuucuuuuuaacacaaggagcucugcuaaaugauaaacacaguaacggcaccgugaaggaccgaagcccauaucgugcccucaugucuugcccgcugggcgaagcacccuccccuuacaauucaaaguucgagagcguugccuggagugcuucugcaugucaugaugggaugggauggcuuacgauugguaucuccggcccagacaacggggccguggcuguccugaaauauaacggaauaauuacugaaaccaucaagagcuggaaaaagagaaucuugaggacacaggagucggagugcguguguguaaauggcucuugcuuuacuauuaugaccgauggucccuccaacggggccgcgucauacaaaaucuucaagauugaaaagggaaaaguuacaaagaguauagagcucaaugcaccuaacuuucacuaugaagaguguagcugcuacccagacaccggcacggugaugugugucugccgggauaauuggcacggcuccaaccgccccugggugucuuucaaucagaaccuggacuaccagaucggguauauuugcagcggaguguuuggugauaauccuagaccaaaagacggcgaggggucauguaacccggucacuguugauggagccgacggcaucaaggguuucaguuacaaauaugggaauggcguguggaucggaaggacaaaguccaaccggcugcgcaaaggcuuugaaaugauuugggaccccaauggguggaccgauacugacagcgauuucucuguaaagcaagacguggucgcuauaacagauuggucaggauacagugguagcuuugugcagcauccugagcucaccggcuuagacugcaugcgaccauguuucuggguugaacuggugagagggcuucccagggagaacacgaccaucuggacauccggaucuucgauuagcuucugcggcgucaauuccgauacugccaacuggucauggccugacggugcagaauugccauuuaccaucgauaaguga

SEQ ID NO: 149534 - RNA, 1413 nt, Artificial Sequence; identical to SEQ ID NO: 149487
  derived and/or modified CDS sequence (opt3) from neuraminidase__InfluenzaA__AEX34476

SEQ ID NO: 149535 - RNA, 1413 nt, Artificial Sequence; identical to SEQ ID NO: 149489
  derived and/or modified CDS sequence (opt3) from neuraminidase__InfluenzaA__AEX34487

SEQ ID NO: 149536 - RNA, 1413 nt, Artificial Sequence; identical to SEQ ID NO: 149489
  derived and/or modified CDS sequence (opt3) from neuraminidase__InfluenzaA__AEX34498

SEQ ID NO: 149537 - RNA, 1413 nt, Artificial Sequence; identical to SEQ ID NO: 149489
  derived and/or modified CDS sequence (opt3) from neuraminidase__InfluenzaA__AEX34509

SEQ ID NO: 149538 - RNA, 1413 nt, Artificial Sequence; identical to SEQ ID NO: 149489
  derived and/or modified CDS sequence (opt3) from neuraminidase__InfluenzaA__AEX34520

SEQ ID NO: 149539 - RNA, 1413 nt, Artificial Sequence; identical to SEQ ID NO: 149489
  derived and/or modified CDS sequence (opt3) from neuraminidase__InfluenzaA__AEX34531

SEQ ID NO: 149540 - RNA, 1413 nt, Artificial Sequence; identical to SEQ ID NO: 149489
  derived and/or modified CDS sequence (opt3) from neuraminidase__InfluenzaA__AEX34542

SEQ ID NO: 149541 - RNA, 1413 nt, Artificial Sequence; identical to SEQ ID NO: 149489
  derived and/or modified CDS sequence (opt3) from neuraminidase__InfluenzaA__AEX34553

SEQ ID NO: 149542 - RNA, 1413 nt, Artificial Sequence; identical to SEQ ID NO: 149489
  derived and/or modified CDS sequence (opt3) from neuraminidase__InfluenzaA__AEX34564

SEQ ID NO: 149543 - RNA, 1413 nt, Artificial Sequence; identical to SEQ ID NO: 149489
  derived and/or modified CDS sequence (opt3) from neuraminidase__InfluenzaA__AEX34575

SEQ ID NO: 149544 - RNA, 1413 nt, Artificial Sequence; identical to SEQ ID NO: 149489
  derived and/or modified CDS sequence (opt3) from neuraminidase__InfluenzaA__AEX34586

SEQ ID NO: 149545 - RNA, 1413 nt, Artificial Sequence; identical to SEQ ID NO: 149489
  derived and/or modified CDS sequence (opt3) from neuraminidase__InfluenzaA__AEX34597

SEQ ID NO: 149546 - RNA, 1413 nt, Artificial Sequence; identical to SEQ ID NO: 149489
  derived and/or modified CDS sequence (opt3) from neuraminidase__InfluenzaA__AEX34608

SEQ ID NO: 149547 - RNA, 1413 nt, Artificial Sequence; identical to SEQ ID NO: 149489
  derived and/or modified CDS sequence (opt3) from neuraminidase__InfluenzaA__AEX34619

SEQ ID NO: 149548 - RNA, 1413 nt, Artificial Sequence; identical to SEQ ID NO: 149489
  derived and/or modified CDS sequence (opt3) from neuraminidase__InfluenzaA__AEX34630

SEQ ID NO: 149549 - RNA, 1413 nt, Artificial Sequence; identical to SEQ ID NO: 149489
  derived and/or modified CDS sequence (opt3) from neuraminidase__InfluenzaA__AEX34641

SEQ ID NO: 149550 - RNA, 1413 nt, Artificial Sequence
  derived and/or modified CDS sequence (opt3) from neuraminidase__InfluenzaA__AEX34653
augaaccccaaucagaagaucauuaccauaggcagcaucuccauugccaucgggauuaucucucugaugcuccaagugggaaacauaaucucaauuugggcuagucacagcauccagacagguucccagaaucauacuggcauuugcaaccagagaaucauaacguacgagaauagcaccugggucaaccacacauauguuaauauuaacaauacuaacgugguagcagggaaagacaagaccucgguggcccuugcgggaaauucaagccuguguaguaucuccggcugggcuauuuacacaaaagauaacucuaucaggaucgguagcaagggggacgucuucgugauucgggaaccuuuuauauccugcucacauuuggagugucgcaccuucuuuuuaacucaaggagcccugcuaaaugauaaacacaguaacggcacaguuaaggaccgaagcccauaucgugcacucaugucuugcccgcugggcgaagcccccuccccuuacaauucaaaguucgagagcguggcuuggagugcaucugccugucaugaugggcuuggauggcugaccaucgguauuuccggcccagacaacggggcugucgccguguugaaauauaacggaaucauaacggaaacuauuaagagcuggaaaaagagaauccucaggacccaggagucggagugcguauguguuaauggcucuugcuuuacaaucaugacugauggucccuccaacggggcggcaucauacaaaauuuucaagaucgaaaagggacaggugaccaaaagugucgagcugaaugccccuaacuuucacuaugaagaguguagcugcuacccagacacaggcaccgugaugugugugugccgggauaauuggcacggcuccaaccgccccugggucucuuucaaucaggaccuggauuaccaaauuggguauauaugcagcggaguuuuuggugacaacccuagaccaaaggauggcaaagggucauguaauccggugacgguagacggagcugacggcgugaaggguuucaguuacaaauaugggaacggcgucuggaucggaaggacuaaguccaaucggcuccgcaaaggcuuugagaugauuugggaucccaacggguggacagacaccgauagcgacuucucugugaagcaggauguuguggccaucacugacuggucaggauacagugguagcuuuguccagcauccugaauuaacaggccuggauugcauccgaccauguuucuggguggagcuuguaagaggguugcccagggaaaauaccacgauuuggaccuccggaucuucgauaucuuucugcggcguugacuccgauacagcaaacuggucauggccugacggugcugagcugccauuuacuaucgauaaguga

SEQ ID NO: 149551 - RNA, 1413 nt, Artificial Sequence
  derived and/or modified CDS sequence (opt3) from neuraminidase__InfluenzaA__AEX34664
augaaccccaaucagaagaucauuaccauaggcagcaucuccauugccaucgggauuaucucucugaugcuccaaauaggaaacaucauuucaaucugggcuagucacagcauucagacagguucccagaaucauacuggcaucugcaaccagagaauaauuacguacgaaaauucuaccugggugaaccacacauaugucaauaucaacaauacuaacguuguggcagggaaagacaagaccucgguaacacuugccggaaauucaagccuguguaguauuuccggcugggcgaucuacaccaaagauaacucuaucaggauugguagcaagggggacguguucgucauacgggagccuuuuaucuccugcucacauuuggagugucgcacuuucuuuuuaacacaaggagcucugcuaaaugauaaacacaguaacggcaccgugaaggaccgaagcccauaucgugcccucaugucuugcccgcugggcgaagcacccuccccuuacaauucaaaguucgagagcguugccuggagugcuucugcaugucaugaugggaugggauggcuuacgauugguaucuccggcccagacaacggggccguggcuguccugaaauauaacggaauaauuacugaaaccaucaagagcuggaaaaagagaaucuugaggacacaggagucggagugcguguguguaaauggcucuugcuuuacuauuaugaccgauggucccuccaacggggccgcgucauacaaaaucuucaagauugaaaagggaaaaguuacaaagagucgggagcucaaugcaccuaacuuucacuaugaagaguguagcugcuacccagacaccggcacggugaugugugucugccgcgauaauuggcacggcuccaacagacccugggugucuuucaaucagaaccuggacuaccagauaggguauaucugcagcggaguguuuggugauaauccuaggccaaaagacggcaaggggucauguaacccggucacugccgauggagcugacggcguuaaagguuucaguuacaaguaugggaauggcguguggauuggacggacaaaauccaaccgccugcgaaagggcuuugagaugaucugggaccccaauggguggaccgauacugacagcgauuucucuguaaagcaagacguggucgccaucacagauuggucaggauacagugguagcuuugugcagcauccugaacucaccggcuuagacugcauuagaccauguuucuggguugagcuggugagggggcuuccccgggaaaacacgaccauauggacauccggaucuucgaucagcuucugcggcgucgauuccgacacugcaaauuggucauggccugauggugcugaguugccauuuaccauugacaaauga

SEQ ID NO: 149552 - RNA, 1413 nt, Artificial Sequence; identical to SEQ ID NO: 149530
  derived and/or modified CDS sequence (opt3) from neuraminidase__InfluenzaA__AEX34686

SEQ ID NO: 149553 - RNA, 1413 nt, Artificial Sequence
  derived and/or modified CDS sequence (opt3) from neuraminidase__InfluenzaA__AEX34760
augaaccccaaucagaagaucauuaccauaggcagcaucuccauugccaucgggauuaucucucugauacuccaaaucggaaacauuaucucaauuugggcuagucacagcauccagacagguucccagaaucauacuggcauaugcaaccagagaauuaucacguacgaaaauucuaccugggugaacaauacauaugucaacauuaauaacacuaauguugugguagagaaagacaagaccucggugacacuugcagggaacucaagccuguguaguaucuccggaugggccaucuacaccaaagauaauucuauuaggauaggcagcaagggugacgucuucgugauccgggagccuuuuauuuccugcucacacuuggaaugucgcacuuucuuuuuaacacaaggggcgcugcuaaacgauaaacauaguaauggaaccguuaaggaccgaagcccauaucgugcucucaugucuugcccgcugggcgaggcccccuccccuuacaacucaagauucgaaagcguggcauggagugccucugcuugucacgauggcaugggguggcuuacgaucggaauauccgguccagacaacggcgcagucgccgugcugaaguauaaugggauuaucacugagaccaucaaaagcuggaagaaaaggauuuugcggacacaggagucggaaugcguauguaugaacggaucuugcuuuacuaucaugaccgauggccccuccaauggugcugccucauacaagauuuucaaaauagagaaggggaagguuacaaaaaccaucgaacucaacgcgccuaauuuucauuaugaggaguguaguugcuacccagacacgggaacugugaugugugucugccgcgauaacuggcacggcagcaauagacccuggguguccuucaaccagaaucuggacuaccagauuggcuauaucugcucugggguguuuggagauaacccuaggccaaaggacggugaaggcagcuguaauccggucacaguugauggggcagacggagugaaaggcuucucauacaaguaugguaacgggguauggaucggccggaccaaaaguaaucgccugcgaaagggauuugagaugauuugggaccccaacggcuggacuaauacagauuccgacuucagcgugaaacaagaugucguggccauaaccgacuggucuggguacucaggaaguuuuguucagcacccugaacucacggguuuagauugcaucagaccauguuucuggguggagcuggucaggggccuuccccgggaaaacaccacaauuuggacuagcggguccucuaucucguucugcggagugaacagcggcaccguaaauugguccuggccugacggugcugaguugccauuuacaauugauaaguga

SEQ ID NO: 149554 - RNA, 1413 nt, Artificial Sequence
  derived and/or modified CDS sequence (opt3) from neuraminidase__InfluenzaA__AEX34771
augaaccccaaucagaagaucauuaccauaggcagcaucuccauugccaucgggauuaucucucugauacuccaaaucggaaacauuaucucaauuugggcuagucacagcauccagacagguucccagaaucauacuggcauaugcaaccagagaauuaucacguacgaaaauucuaccugggugaacaauacauaugucaacauuaauaacacuaauguugugguagagaaagacaagaccucggugacacuugcagggaacucaagccuguguaguaucuccggaugggccaucuacaccaaagauaauucuauuaggauaggcagcaagggugacgucuucgugauccgggagccuuuuauuuccugcucacacuuggaaugucgcacuuucuuuuuaacacaaggggcgcugcuaaacgauaaacauaguaauggaaccguuaaggaccgaagcccauaucgugcucucaugucuugcccgcugggcgaggcccccuccccuuacaacucaagauucgaaagcguggcauggagugccucugcuugucacgauggcaugggguggcuuacgaucggaauauccgguccagacaacggcgcagucgccgugcugaaguauaaugggauuaucacugagaccaucaaaagcuggaagaaaaggauuuugcggacacaggagucggaaugcguauguaugaacggaucuugcuuuacuaucaugaccgauggccccuccaauggugcugccucauacaagauuuucaaaauagagaaggggaagguuacaaaaaccaucgaacucaacgcgccuaauuuucauuaugaggaguguaguugcuacccagacacgggaacugugaugugugucugccgcgauaacuggcacggcagcaauagacccuggguguccuucaaccagaaucuggacuaccagauuggcuauaucugcucugggguguuuggagauaacccuaggccaaaggacggugaaggcagcuguaauccggucacaguugauggggcagacggagugaaaggcuucucauacaaguaugguaacgggguauggaucggccggaccaaaaguaaucgccugcgaaagggauuugagaugauuugggaccccaacggcuggacuaauacagauuccgacuucagcgugaaacaagaugucguggccauaaccgacuggucuggguacucaggaaguuuuguucagcacccugaacucacggguuuagauugcaucagaccauguuucuggguggagcuggucaggggccuuccccgggaaaacaccacaauuuggacuagcggguccucuaucucguucugcggagugaacagcggcaccgcuaauugguccuggccugacggugccgaguugccauuuacaauugauaaguga

SEQ ID NO: 149555 - RNA, 1413 nt, Artificial Sequence; identical to SEQ ID NO: 145509
  derived and/or modified CDS sequence (opt3) from neuraminidase__InfluenzaA__AEX34782

SEQ ID NO: 149556 - RNA, 1413 nt, Artificial Sequence
  derived and/or modified CDS sequence (opt3) from neuraminidase__InfluenzaA__AEX34793
augaaccccaaucagaagaucauuaccauaggcagcaucuccauugccaucgggauuaucucucugaugcuccaaauaggaaacaucauuucaaucugggcuagucacagcauucagacagguucccagaaucauacuggcaucugcaaccagagaauaauuacguacgaaaauucuaccugggugaaccacacauaugucaauaucaacaauacuaacguuguggcagggaaagacaagaccccuguaacacuugugggaaauucgucacuguguagcauuaguggcugggccaucuacaccaaagauaacuccaucaggauugguucuaagggggacgucuucgugauacgggagccauuuaucagcugcucccauuuggaguguaaaacuuucuuuuuaacacaaggagcgcugcuaaaugauaagcacucaaacggcaccguuaaggaccgcaguccguaucgagcucucaugagcugcccccugggcgaagccccuucuccauacaauuccaaauucgagucaguggcauggagcgccagugcuugucaugaugggauuggauggcuuacgaucgguauaucuggccccgacaacggggcagucgccgugcugaaguauaaaggaauuaucacuggcaccaucaaguccuggaaaaagcagauuuugcguacacaggaaagcgagugcguauguaugaacgguucgugcuuuacuaucaugaccgaugggccuucuaauggagcugccuccuacaagauuuucaaaauagagaagggcaaaguuacaaagucaauggaacucaacgcgccaaauuuucacuaugaggaauguaguugcuaccccgacaccggcacggugaugugugucugcagagauaacuggcacgggagcaauaggccuuggguguccuucaaccagaaucuggacuaccaaaucggauauauuugcucugguguguuuggcgauaacccacggccgaaagaccgcgaggggagcuguaaucccgucacuguugauggagcaaacggcgugaaggguuucucauacaaauaugggaauggcguauggaucggaagaacaaagaguaacaggauccggaagggcuuugagaugauuugggacccuaauggguggaccaacacugacuccgauuucagcgugaaacaggacauagucgccaucacagauuggucuggauacucagguaguuuugugcagcauccagaacugaccggccucgacugcauucgccccuguuucuggguugaguuagugcgagggcugccuagagaaaauacgaccaucuggacaagcggauccucuauuucguucugcggcgucaacggugauaucgcuaacuggagcuggccagacggggccgagcuucccuuuacuauagauaaguga

SEQ ID NO: 149557 - RNA, 1413 nt, Artificial Sequence; identical to SEQ ID NO: 149556
  derived and/or modified CDS sequence (opt3) from neuraminidase__InfluenzaA__AEX34804

SEQ ID NO: 149558 - RNA, 1413 nt, Artificial Sequence
  derived and/or modified CDS sequence (opt3) from neuraminidase__InfluenzaA__AEX34815
augaaccccaaucagaagaucauuaccauaggcagcaucuccauugccaucgggauuaucucucugaugcuccaaauaggaaacaucauuucaaucugggcuagucacagcauucagacagguucccagaauaacacuggcaucugcaaucagagaauaauuacguacgagaacucuaccugggugaaucauacauaugucaacaucaauaacacuaauguuguggcaggggaagacaaaaccucgguaacacuuaccggaaacucaagccuguguaguauuuccggcugggccaucuacacuaaggauaauucuaucaggauugguagcaaaggggacguguucgucauacgggagccuuuuaucuccugcucacacuuggaaugucgcacauucuuuuuaacccaaggagcgcugcuaaacgauaagcauaguaauggcacggugaaagaccgaagcccauaucgugcucucaugucuugcccgcugggcgaggcccccuccccuuacaacucaaaguucgaaagcguugcauggagugccucugcuugucacgaugggaugggauggcuuacuauugguaucuccggcccagacaacggggcaguggccguccugaaguauaauggaauaauuaccggcacaaucaaaagcuggaagaaacagaucuugagaacucaggagucggagugcguguguaugaacgguucuugcuuuaccauuaugacagaugggcccuccaauaaggcugccucauacaaaaucuucaagauugaaaagggaaaaguaaccaagaguauagagcucaacgcgccuaauuuuuauuacgaagaguguagcugcuacccagacacgggcaucguuaugugugugugcagggauaacuggcauggcuccaaucggcccugggucucuuucaaccagaaucuggacuaucaaauuggguacaucugcagcggaguguuuggugauaacccucgcccagaggacggcgaagggucauguaauccggugacugucgauggagcaaacggcguuaaagguuucaguuauaaguacgggaauggcguguggaucggaagaacaaaauccaacaggcugcggaagggcuuugagaugauuugggaccccaauggguggaccaacacugacagcgauuucucuguaaaacaggacguggucgccauaacagauuggucaggauauagugguagcuuugugcagcacccugaacucaccggcuuagacugcauccgcccauguuucuggguugagcuggugcgagggcuucccagagaaaacacgaccauuuggacauccggaucuucgaucagcuucugcggcgucaauuccgauacugcuaacuggucauggccugacggugccgaguugccauuuaccauugauaaguga

SEQ ID NO: 149559 - RNA, 1413 nt, Artificial Sequence; identical to SEQ ID NO: 149556
  derived and/or modified CDS sequence (opt3) from neuraminidase__InfluenzaA__AEX34826

SEQ ID NO: 149560 - RNA, 1413 nt, Artificial Sequence; identical to SEQ ID NO: 149556
  derived and/or modified CDS sequence (opt3) from neuraminidase__InfluenzaA__AEX34837

SEQ ID NO: 149561 - RNA, 1413 nt, Artificial Sequence
  derived and/or modified CDS sequence (opt3) from neuraminidase__InfluenzaA__AEX34859
augaaccccaaucagaagaucauuaccauaggcagcacauccaucgccauugggaucauuucucugaugcuccaaaucggaaacauaaucucaauuugggcuagucacagcauccagacugguucccagaaucauacgggcauuugcaaccagagaaucauaaccuacgaaaauucuacaugggugaaccacacuuaugucaauauuaacaauaccaacguuguggcagggaaagacaagacaccuguaacccuuaucggaaauucgucacuguguagcauuaguggcugggccaucuacacuaaagauaacuccaucaggauugguucuaagggggacguguucgucauacgggagccauuuaucagcugcucccauuuggaguguaaaacauucuuuuuaacccaaggagcgcugcuaaaugauaagcacucaaacggcacggugaaggaccgcaguccguaucgagcucucaugagcugcccccugggcgaagccccuucuccauacaauuccaaauucgagucaguugcauggagcgccagugcuugucaugaugggauuggauggcuuacuaucgguauaucuggccccgacaacggggcaguggccguccugaaguauaaaggaauuaucaccggcacaaucaaguccuggaaaaagcagauuuugcguacucaggaaagcgagugcguguguaugaacgguucgugcuuuaccaucaugacagaugggccuucuaauggagcugccuccuacaagauuuucaaaauagagaagggcaaaguaaccaagucaauggaacucaacgcgccaaauuuucacuaugaggaauguaguugcuaccccgacacgggcacuguuaugugugugugcagagauaacuggcacgggagcaauaggccuugggucuccuucaaccagaaucuggacuaccaaaucggauauauuugcucugguguguuuggcgauaacccacggccgaaagaccgcgaggggagcuguaaucccgugacagucgauggagcaaacggcguuaaggguuucucauacaaauaugggaauggcguguggaucggaagaaccaagaguaacaggauccggaagggcuuugagaugauuugggacccuaauggguggacuaacacagacuccgauuucagcguaaaacaggacauaguggccaucaccgauuggucuggauacucagguaguuuuguccagcauccagaacugacgggccucgacugcauucgccccuguuucuggguggaguuaguucgagggcugccuagagaaaauaccacaaucuggacuagcggauccucuauuucguucugcggcgugaacggugauaucgcuaacuggagcuggccagacggggccgagcuucccuuuaccauagauaaguga

SEQ ID NO: 149562 - RNA, 1413 nt, Artificial Sequence
  derived and/or modified CDS sequence (opt3) from neuraminidase__InfluenzaA__AEX34870
augaaccccaaucagaagaucauuaccauaggcagcaucuccauugccaucgggauuaucucucugaugcuccaaauaggaaacaucauuucaaucugggcuagucacagcauucagacagguucccagaauaacacuggcaucugcaaucagagaauaauuacguacgagaacucuaccugggugaaucauacauaugucaacaucaauaacacuaauguuguggcaggggaagacaaaauuucgguaacccuugccggaaacucaagccuguguaguaucuccggcugggcgaucuacacaaaggauaauucuauuaggauagguagcaaaggggacguguucgucauccgggagccuuuuauuuccugcucacacuuggaaugucgcaccuucuuuuuaacucaaggagcucugcuaaacgauaagcauaguaauggcacagugaaagaccgaagcccauaucgugcccucaugucuugcccgcugggcgaggcacccuccccuuacaacucaaaguucgaaagcguugccuggagugcuucugcaugucacgaugggaucggauggcuuaccauagguauuuccggcccagacaacggggccguggcuguccugaaguauaauggaaucaucacgggcacuauuaaaagcuggaagaaacagaucuugagaacccaggagucggagugcguguguaugaacgguucuugcuuuacaauuaugacugaugggcccuccaauaaggccgcgucauacaaaauauucaagaucgaaaagggaaaaguaaccaagaguauugagcucaacgcaccuaauuuuuauuacgaagaguguagcugcuacccagacacaggcaucguuaugugugugugcagggauaacuggcauggcuccaaucggcccugggucucuuucaaccagaaucuggacuaucaaaucggguacauuugcagcggaguguuuggugauaacccucgcccagaggacggcgaagggucauguaauccggugaccgucgauggagccaacggcguuaaagguuucaguuauaaguacgggaauggcguguggauaggaagaacgaaauccaacaggcugcggaagggcuuugagaugaucugggaccccaauggguggacuaacacagacagcgauuucucuguaaaacaggacguggucgcuauuaccgauuggucaggauauagugguagcuuugugcagcacccugaacucacuggcuuagacugcauccgcccauguuucuggguugagcuggugcgagggcuucccagagaaaacacaaccauuuggacguccggaucuucgaucagcuucugcggcgucaauuccgauaccgccaacuggucauggccugacggugcagaguugccauuuacaauagauaaguga

SEQ ID NO: 149563 - RNA, 1413 nt, Artificial Sequence
  derived and/or modified CDS sequence (opt3) from neuraminidase__InfluenzaA__AEX34881
augaaccccaaucagaagaucauuaccauaggcagcaucuccauugccaucgggauuaucucucugaugcuccaaauaggaaacaucauuucaaucugggcuagucacagcauucagacagguucccagaaucauacuggcaucugcaaccagagaauaauuacguacgaaaauucuaccugggugaaccacacauaugucaauaucaacaauacuaacguuguggcagggaaagacaaggccccuguaacccuuauuggaaauucgucacuguguagcaucaguggcugggcgaucuacacaaaagauaacuccauuaggauagguucuaagggggacguguucgucauccgggagccauuuauuagcugcucccauuuggaguguaaaaccuucuuuuuaacucaaggagcucugcuaaaugauaagcacucaaacggcacagugaaggaccgcaguccguaucgagcccucaugagcugcccccugggcgaagcaccuucuccauacaauuccaaauucgagucaguugccuggagcgcuagugcaugucaugaugggaucggauggcuuaccauagguauuucuggccccgacaacggggccguggcuguccugaaguauaaaggaaucaucacgggcacuauuaaguccuggaaaaagcagaucuugcguacccaggaaagcgagugcguguguaugaacgguucgugcuuuacaauuaugacugaugggccuucuaauggagccgcguccuacaagauauucaaaaucgagaagggcaaaguaaccaagucaauggaacucaacgcaccaaauuuucacuaugaggaauguaguugcuaccccgacacaggcaccguuaugugugugugcagagauaacuggcacgggagcaauaggccuugggucuccuucaaccagaaucuggacuaccaaauuggauauaucugcucugguguguuuggcgauaacccacggccgaaagaccgcgaggggagcuguaaucccgugacggucgauggagccaacggcguuaaggguuucucauacaaauaugggaauggcguguggaucggaagaacuaagaguaacaggauucggaagggcuuugagaugauaugggacccuaauggguggacaaacaccgacuccgauuucagcguaaaacaggacaucguggcuauuacugauuggucuggauacucagguaguuuuguccagcauccagaacugacaggccucgacugcauccgccccuguuucuggguggaguuaguucgagggcugccuagagaaaauaccacgauuuggaccagcggauccucuaucucguucugcggcgugaacggugauauagccaacuggagcuggccagacggggcagagcuucccuuuacaaucgauaaguga

SEQ ID NO: 149564 - RNA, 1413 nt, Artificial Sequence
  derived and/or modified CDS sequence (opt3) from neuraminidase__InfluenzaA__AEX34892
augaaccccaaucagaagaucauuaccauaggcagcaucuccauugccaucgggauuaucucucugaugcuccaaauaggaaacaucauuucaaucugggcuagucacagcauucagacagguucccagaauaacacuggcaucugcaaucagagaauaauuacguacgagaacucuaccugggugaaucauacauaugucaacaucaauaacacuaauguuguggcaggggaagacaaaaccucgguaacacuugccggaaacucaagccuguguaguauuuccggcugggcgaucuacaccaaggauaauucuaucaggauugguagcaaaggggacguguucgucauacgggagccuuuuaucuccugcucacacuuggaaugucgcacuuucuuuuuaacacaaggagcucugcuaaacgauaagcauaguaauggcaccgugaaagaccgaagcccauaucgugcccucaugucuugcccgcugggcgaggcacccuccccuuacaacucaaaguucgaaagcguugccuggagugcuucugcaugucacgaugggaugggauggcuuacgauugguaucuccggcccagacaacggggccguggcuguccugaaguauaauggaauaauuacuggcaccaucaaaagcuggaagaaacagaucuugagaacacaggagucggagugcguguguaugaacgguucuugcuuuacuauuaugaccgaugggcccuccaauaaggccgcgucauacaaaaucuucaagauugaaaagggaaaaguaacaaagaguauagagcucaacgcaccuaauuuuuauuacgaagaguguagcugcuacccagacaccggcaucguuaugugugugugcagggauaacuggcauggcuccaaucggcccugggucucuuucaaccagaaucuggacuaucaaauuggguacaucugcagcggaguguuuggugauaacccucgcccagaggacggcgaagggucauguaauccggugacggucgauggagccaacggcguuaaagguuucaguuauaaguacgggaauggcguguggaucggaagaacuaaauccaacaggcugcggaagggcuuugagaugauuugggaccccaauggguggacaaacaccgacagcgauuucucuguaaaacagaacguggucgcuauaacugacuggucaggauauagugguagcuuugugcagcacccugaacucacaggcuuagauugcauccgcccauguuucuggguugagcuggugcgagggcuucccagagaaaauaccacgauuuggaccuccggaucuucgaucagcuucugcggcgucaacuccgacacagccaauuggucauggccugauggugcagaguugccauuuacuauugacaaguga

SEQ ID NO: 149565 - RNA, 1413 nt, Artificial Sequence
  derived and/or modified CDS sequence (opt3) from neuraminidase__InfluenzaA__AEX34903
augaaccccaaucagaagaucauuaccauaggcagcaucuccauugccaucgggauuaucucucugaugcuccaaauaggaaacaucauuucaaucugggcuaguagaagcauucagacagguucccagaaucacacuggcaucugcaaccagaggauaauuacguacgaaaauucuaccugggugaaccauacauaugucaauaucaacaauacuaacguuguggcagggaaagacaagaccccuguaacacuugugggaaauucgucacuguguagcauuaguggcugggccaucuacaccaaagauaacuccauccggauugguucuaagggggacgucuucgugauacgcgagccauuuaucagcugcucccacuuggaguguaaaacuuucuuuuuaacacaaggagcgcugcuaaaugauaagcauucaaacggcaccguuaaggaccgaaguccguaucgugcucucaugagcugcccccugggcgaagccccuucuccauacaauuccaaauucgagucaguggcauggagcgccagugcuugucacgaugggauuggauggcuuacgaucgguauaucuggccccgacaacggggcagucgccgugcugaaguauaaaggaauuaucacuggcaccaucaaguccuggaaaaagcagauuuugagaacacaggaaagcgagugcguauguaugaacgguucgugcuuuacuaucaugaccgaugggccuucuaauggagcugccuccuacaagauuuucaaaauagagaagggcaaaguuacaaagucaauggaacucaacgcgccaaauuuucauuaugaggaauguaguugcuaccccgacaccggcacggugaugugugucugcagggauaacuggcacgggagcaaucggccuuggguguccuucaaccagaaucuggacuaccaaaucggauauauuugcucugguguguuuggcgauaacccacgcccgaaagacagagaggggagcuguaaucccgucacuguugauggagcaaacggcgugaaggguuucucauacaaauaugggaauggcguauggaucggaaggacaaagaguaaccggauccgcaagggcuuugagaugauuugggacccuaauggguggaccaacacugacuccgauuucagcgugcgacaggacauagucgccaucacagauuggucuggauacucagguaguuuugugcagcacccagaacugaccggccucgacugcauuagacccuguuucuggguugaguuagugagggggcugccucgggaaaauacgaccaucuggacaagcggauccucuauuucguucugcggcgucaacggugauaucgcuaacuggagcuggccagacggggccgagcuucccuuuacuauagauaaauga

SEQ ID NO: 149566 - RNA, 1413 nt, Artificial Sequence; identical to SEQ ID NO: 145509
  derived and/or modified CDS sequence (opt3) from neuraminidase__InfluenzaA__AEX34914

SEQ ID NO: 149567 - RNA, 1413 nt, Artificial Sequence; identical to SEQ ID NO: 145509
  derived and/or modified CDS sequence (opt3) from neuraminidase__InfluenzaA__AEX34925

SEQ ID NO: 149568 - RNA, 1413 nt, Artificial Sequence; identical to SEQ ID NO: 145509
  derived and/or modified CDS sequence (opt3) from neuraminidase__InfluenzaA__AEX34936

SEQ ID NO: 149569 - RNA, 1413 nt, Artificial Sequence; identical to SEQ ID NO: 145509
  derived and/or modified CDS sequence (opt3) from neuraminidase__InfluenzaA__AEX34947

SEQ ID NO: 149570 - RNA, 1413 nt, Artificial Sequence; identical to SEQ ID NO: 145509
  derived and/or modified CDS sequence (opt3) from neuraminidase__InfluenzaA__AEX34958

SEQ ID NO: 149571 - RNA, 1413 nt, Artificial Sequence; identical to SEQ ID NO: 145509
  derived and/or modified CDS sequence (opt3) from neuraminidase__InfluenzaA__AEX34969

SEQ ID NO: 149572 - RNA, 1413 nt, Artificial Sequence; identical to SEQ ID NO: 145509
  derived and/or modified CDS sequence (opt3) from neuraminidase__InfluenzaA__AEX34980

SEQ ID NO: 149573 - RNA, 1413 nt, Artificial Sequence; identical to SEQ ID NO: 145509
  derived and/or modified CDS sequence (opt3) from neuraminidase__InfluenzaA__AEX34991

SEQ ID NO: 149574 - RNA, 1413 nt, Artificial Sequence
  derived and/or modified CDS sequence (opt3) from neuraminidase__InfluenzaA__AEX35002
augaaccccaaucagaagaucauuaccauaggcagcaucuccauugccaucgggauuaucucucugaugcuccaaauaggaaacaucauuucaaucugggcuagucacagcauucagacagguucccagaaucauacuggcaucugcaaccagagaauaauuacguacgaaaauucuaccugggugaaccacacauaugucaauaucaacaauacuaacguuguggcagggaaagacaagaccccuguaacacuuauuggaaauucgucacuguguagcaucaguggcugggccaucuacaccaaagauaacuccauuaggauagguucuaagggggacguguucgucauccgggagccauuuauuagcugcucccauuuggaguguaaaacuuucuuuuuaacacaaggagcgcugcuaaaugauaagcacucaaacggcaccgugaaggaccgcaguccguaucgagcucucaugagcugcccccugggcgaagccccuucuccauacaauuccaaauucgagucaguugcauggagcgccagugcuugucaugaugggaucggauggcuuacgauagguauuucuggccccgacaacggggcaguggccguccugaaguauaaaggaaucaucacuggcaccauuaaguccuggaaaaagcagaucuugcguacacaggaaagcgagugcguguguaugaacgguucgugcuuuacuauuaugaccgaugggccuucuaauggagcugccuccuacaagauauucaaaaucgagaagggcaaaguaacaaagucaauggaacucaacgcgccaaauuuucacuaugaggaauguaguugcuaccccgacaccggcacgguuaugugugugugcagagauaacuggcacgggagcaauaggccuugggucuccuucaaccagaaucuggacuaccaaauuggauauaucugcucugguguguuuggcgauaacccacggccgaaagaccgcgaggggagcuguaaucccgugacugucgauggagcaaacggcguuaaggguuucucauacaaauaugggaauggcguguggaucggaagaacaaagaguaacaggauucggaagggcuuugagaugauaugggacccuaauggguggaccaacacugacuccgauuucagcguaaaacaggacaucguggccauuacagauuggucuggauacucagguaguuuuguccagcauccagaacugaccggccucgacugcauccgccccuguuucuggguggaguuaguucgagggcugccuagagaaaauacgaccauuuggacaagcggauccucuaucucguucugcggcgugaacggugauauagcuaacuggagcuggccagacggggccgagcuucccuuuacuaucgauaaguga

SEQ ID NO: 149575 - RNA, 1413 nt, Artificial Sequence; identical to SEQ ID NO: 145509
  derived and/or modified CDS sequence (opt3) from neuraminidase__InfluenzaA__AEX35013

SEQ ID NO: 149576 - RNA, 1413 nt, Artificial Sequence; identical to SEQ ID NO: 145509
  derived and/or modified CDS sequence (opt3) from neuraminidase__InfluenzaA__AEX35024

SEQ ID NO: 149577 - RNA, 1413 nt, Artificial Sequence; identical to SEQ ID NO: 145509
  derived and/or modified CDS sequence (opt3) from neuraminidase__InfluenzaA__AEX35035

SEQ ID NO: 149578 - RNA, 1413 nt, Artificial Sequence; identical to SEQ ID NO: 145509
  derived and/or modified CDS sequence (opt3) from neuraminidase__InfluenzaA__AEX35046

SEQ ID NO: 149579 - RNA, 1413 nt, Artificial Sequence; identical to SEQ ID NO: 145509
  derived and/or modified CDS sequence (opt3) from neuraminidase__InfluenzaA__AEX35057

SEQ ID NO: 149580 - RNA, 1413 nt, Artificial Sequence; identical to SEQ ID NO: 145509
  derived and/or modified CDS sequence (opt3) from neuraminidase__InfluenzaA__AEX35068

SEQ ID NO: 149581 - RNA, 1413 nt, Artificial Sequence
  derived and/or modified CDS sequence (opt3) from neuraminidase__InfluenzaA__AEX35079
augaaccccaaucagaagaucauuaccauaggcagcaucuccauugccaucgggauuaucucucugaugcuccaaauaggaaacaucauuucaaugugggcuagucacagcauccagacagguucccagaauaacacuggcauuugcaaucagagaaucauaacguacgagaacucuaccugggugaaucauacauaugucaacauuaauaacacuaauguuguggcaggggaagacaaaaccucgguaacacuugccggaaacucaagccuguguaguaucuccggcugggcgauuuacaccaaggauaauucuaucaggaucgguagcaaaggggacguguucgucauucgggagccuuuuauauccugcucacacuuggaaugucgcacuuucuuuuuaacacaaggagcucugcuaaacgauaagcauaguaauggcaccgugaaagaccgaagcccauaucgugcccucaugucuugcccgcugggcgaggcacccuccccuuacaacucaaaguucgaaagcguugccuggagugcuucugcaugucacgaugggaugggauggcuuacgaucgguauuuccggcccagacaacggggccguggcuguccugaaguauaauggaaucauaacuggcaccauuaaaagcuggaagaaacagaucuugagaacacaggagucggagugcguguguaugaacgguucuugcuuuacuaucaugaccgaugggcccuccaauaaggccgcgucauacaaaauuuucaagaucgaaaagggaaaaguaacaaagaguauugagcucaacgcaccuaauuuuuauuacgaagaguguagcugcuacccagacaccggcauaguuaugugugugugcagggauaacuggcauggcuccaaucggcccugggucucuuucaaccaggaccuggauuaucaaaucggguacauuugcagcggaguguuuggugacaauccucgcccagaggauggcgaagggucauguaacccggugacggucgacggagccaauggcguuaaagguuucaguuauaaguacgggaacggcguguggaucggaagaacuaaauccaauaggcugcggaagggcuuugagaugaucugggaccccaacggguggacaaauaccgauagcgacuucucuguaaaacaggauguggucgcuauuacugacuggucaggauauagugguagcuuugugcagcacccugaacucacaggcuuagauugcauacgcccauguuucuggguugagcuggugcgagggcuucccagagaaaacaccacgaucuggaccuccggaucuucgauuagcuucugcggcgucaacuccgacacagccaauuggucauggccugauggugcagaguugccauuuacuaucgacaaguga

SEQ ID NO: 149582 - RNA, 1413 nt, Artificial Sequence; identical to SEQ ID NO: 149556
  derived and/or modified CDS sequence (opt3) from neuraminidase__InfluenzaA__AEX35090

SEQ ID NO: 149583 - RNA, 1413 nt, Artificial Sequence
  derived and/or modified CDS sequence (opt3) from neuraminidase__InfluenzaA__AEX35101
augaaccccaaucagaagaucauuaccauaggcagcaucuccauugccaucgggauuaucucucugaugcuccaaauaggaaacaucauuucaaucugggcuagucacagcauucagacagguucccagaauaacacuggcaucugcaaucagagaauaauuacguacgagaacucuaccugggugaaucauacauaugucaacaucaauaacacuaauguuguggcaggggaagacaaaaccucgguaacacuugccggaaacucaagccuguguaguauuuccggcugggcgaucuacaccaaggauaauucuaucaggauugguagcaaaggggacguguucgucauacgggagccuuuuaucuccugcucacacuuggaaugucgcacuuucuuuuuaacacaaggagcucugcuaaacgauaagcauaguaauggcaccgugaaagaccgaagcccauaucgugcccucaugucuugcccgcugggcgaggcacccuccccuuacaacucaaaguucgaaagcguugccuggagugcuucugcaugucacgaugggaugggauggcuuacgauugguaucuccggcccagacaacggggccguggcuguccugaaguauaauggaauaauuacuggcaccaucaaaagcuggaagaaacagaucuugagaacacaggagucggagugcguguguaugaacgguucuugcuuuacuauuaugaccgaugggcccuccaauaaggccgcgucauacaaaaucuucaagauugaaaagggaaaaguaacaaagaguauagagcucaacgcaccuaauuuucauuaugaagaguguagcugcuacccagacaccggcaucguuaugugugugugcagggauaacuggcacggcuccaaucggcccugggucucuuucaaccagaaucuggacuaccaaauuggguauaucugcagcggaguguuuggugauaacccucgcccagaggacggcgaagggucauguaauccggugacggucgauggagccaacggcguuaaagguuucaguuacaaguaugacaaugggguguggaucggcagaacuaaauccaacaggcugcggaagggauuugagaugauuugggaccccaauggcuggacaaacaccgauagcguauucucugugaaacaggacgucguggcuauaacugauuggucaggguacaguggauccuuuguucagcacccugaacucacagguuuagacugcauccgcccauguuucuggguggagcugguccgaggccuucccagagaaaacaccacgauuuggaccuccgggucuucgaucagcuucugcggagugaauagcgauacagccaacuggucauggccugacggcgcagaguugccauuuacuauugauaaguga

SEQ ID NO: 149584 - RNA, 1413 nt, Artificial Sequence
  derived and/or modified CDS sequence (opt3) from neuraminidase__InfluenzaA__AEX35112
augaaccccaaucagaagaucauuaccauaggcagcaucuccauugccaucgggauuaucucucugaugcuccaaauaggaaacaucauuucaaucugggcuagucacagcauucagacagguucccagaauaacacuggcaucugcaaucagagaauaauuacguacgagaacucuaccugggugaaucauacauaugucaacaucaauaacacuaauguuguggcaggggaagacaaaaccucgguaacacuugccggaaacucaagccuguguaguauuuccggcugggcgaucuacaccaaggauaauucuaucaggauugguagcaaaggggacguguucgucauacgggagccuuuuaucuccugcucacacuuggaaugucgcacuuucuuuuuaacacaaggagcucugcuaaacgauaagcauaguaauggcaccgugaaagaccgaagcccauaucgugcccucaugucuugcccgcugggcgaggcacccuccccuuacaacucaaaguucgaaagcguugccuggagugcuucugcaugucacgaugggaugggauggcuuacgauugguaucuccggcccagacaacggggccguggcuguccugaaguauaauggaauaauuacuggcaccaucaaaagcuggaagaaacagaucuugagaacacaggagucggagugcguguguaugaacgguucuugcuuuacuauuaugaccgaugggcccuccaauaaggccgcgucauacaaaaucuucaagauugaaaagggaaaaguaacaaagaguauagagcucaacgcaagcaauuuuuauuacgaagaguguuccugcuacccugacaccggcaucguuaugugugugugcagggauaacuggcauggcucuaaucggccaugggucagcuucaaccagaaucuggacuaucaaauuggguacaucugcucaggaguguuuggugauaacccccgcccugaggacggcgaagggaguuguaauccagugacggucgauggagccaacggcguuaaagguuucuccuauaaguacgggaauggcguguggaucggaagaacuaaaagcaacaggcugcggaagggcuuugagaugauuugggacccgaauggguggacaaacaccgacucugauuucucaguaaaacaggacguggucgcuauaacugauuggaguggauauagcgguuccuuugugcagcaccccgaacucacaggcuuagacugcauccgcccuuguuucuggguugagcuggugcgagggcuuccaagagaaaacaccacgauuuggaccucuggaucgagcaucuccuucugcggcgucaauucagauacagccaacuggaguuggcccgacggugcagaguugccuuuuacuauugauaaguga

SEQ ID NO: 149585 - RNA, 1413 nt, Artificial Sequence; identical to SEQ ID NO: 145509
  derived and/or modified CDS sequence (opt3) from neuraminidase__InfluenzaA__AEX35123

SEQ ID NO: 149586 - RNA, 1413 nt, Artificial Sequence
  derived and/or modified CDS sequence (opt3) from neuraminidase__InfluenzaA__AEX35145
augaaccccaaucagaagaucauuaccauaggcagcaucuccauugccaucgggauuaucucucugaugcuccaaauaggaaacaucauuucaaucugggcuagucacagcauucagacagguucccagaauaacacuggcaucugcaaucagagaauaauuacguacgagaacucuaccugggugaaucauacauaugugaacaucaauaacacuaauguuguggcaggggaagacaaaaccucgguaacacuugccggaaacucaagccuguguaguauuuccggcugggcgaucuacaccaaggauaauucuaucaggauugguagcaaaggggacguguucgucauacgggagccuuuuaucuccugcucacacuuggaaugucgcacuuucuuuuuaacacaaggagcucugcuaaacgauaagcauaguaauggcaccgugaaagaccgaagcccauaucgugcccucaugucuugcccgcugggcgaggcacccuccccuuacaacucaaaguucgaaagcguugccuggagugcuucugcaugucacgaugggaugggauggcuuacgauugguaucuccggcccagacaacggggccguggcuguccugaaguauaauggaauaauuacuggcaccaucaaaagcuggaagaaacagaucuugagaacacaggagucggagugcguguguaugaacgguucuugcuuuacuauuaugaccgaugggcccuccaauaaggccgcgucauacaaaaucuucaagauugaaaagggaaaaguaacaaagaguauagagcucaacgcaccuaauuuuuauuacgaagaguguagcugcuacccagacaccggcaucguuaugugugugugcagggauaacuggcauggcuccaaucggcccugggucucuuucaaccagaaucuggacuaucaaauuggguacaucugcagcggaguguuuggugauaacccucgcccagaggacggcgaagggucauguaauccggugacggucgauggagccaacggcguuaaagguuucaguuauaaguacgggaauggcguguggaucggaagaacuaaauccaacaggcugcggaagggcuuugagaugauuugggaccccaauggguggacaaacaccgacagcgauuucucuguaaaacaggacauaguggcuaucacugauuggucaggauauagugguagcuuuguccagcacccugaacucacaggcuuagacugcauucgcccauguuucuggguggagcugguucgagggcuucccagagaaaacaccacgaucuggaccuccggaucuucgauuagcuucugcggcgucaauuccgauacagccaacuggucauggccugacggugcagaguugccauuuacuaucgauaaguga

SEQ ID NO: 149587 - RNA, 1413 nt, Artificial Sequence; identical to SEQ ID NO: 149556
  derived and/or modified CDS sequence (opt3) from neuraminidase__InfluenzaA__AEX35156

SEQ ID NO: 149588 - RNA, 1413 nt, Artificial Sequence; identical to SEQ ID NO: 145509
  derived and/or modified CDS sequence (opt3) from neuraminidase__InfluenzaA__AEX35167

SEQ ID NO: 149589 - RNA, 1413 nt, Artificial Sequence
  derived and/or modified CDS sequence (opt3) from neuraminidase__InfluenzaA__AEX35178
augaaccccaaucagaagaucauuaccauaggcagcaucuccauugccaucgggauuaucucucugaugcuccaaauaggaaacaucauuucaaucugggcuagucacagcauucagacagguucccagaaucauacuggcaucugcaaccagagaauaauuacguacgaaaauucuaccugggugaaccacacauaugucaauaucaacaauacuaacguuguggcagggaaagacaagaccucgguaacacuugccggaaauucaagccuguguaguauuuccggcugggcgaucuacaccaaagauaacucuaucaggauugguagcaagggggacguguucgucauacgggagccuuuuaucuccugcucacauuuggagugucgcacuuucuuuuuaacacaaggagcucugcuaaaugauaaacacaguaacggcaccgugaaggaccgaagcccauaucgugcccucaugucuugcccgcugggcgaagcacccuccccuuacaauucaaaguucgagagcguugccuggagugcuucugcaugucaugaugggaugggauggcuuacgauugguaucuccggcccagacaacggggccguggcuguccugaaauauaacggaauaauuacugaaaccaucaagagcuggaaagagagaaucuugaggacacaggagucggaaugcguguguguaaauggcucuugcuuuacuauuaugaccgauggucccuccaacggggccgcgucauacaagaucuucaaaauugagaagggaaagguuacaaaaagucgggaacucaaugcaccuaacuuucacuaugaggaguguagcugcuacccagacaccggcacggugaugugugucugccgcgauaauuggcacggcuccaacagacccugggugucuuucaaucagaaccuggacuaccagauaggguauaucugcagcggaguguuuggugauaauccuaggccaaaggacggcaaagggucauguaacccggucacugccgauggagcugacggcguuaaggguuucaguuacaaauaugggaauggcguguggauuggacggacaaaguccaaccgccugcgaaaaggcuuugaaaugaucugggaccccaauggguggaccgauacugacagcgauuucucuguaaagcaagacguggucgccaucacagauuggucaggauacagugguagcuuugugcagcauccugagcucaccggcuuagacugcauuagaccauguuucuggguugaacuggugagggggcuuccccgggagaacacgaccauauggacauccggaucuucgaucagcuucugcggcgucgauuccgacacugcaaauuggucauggccugauggugcugaauugccauuuaccauugacaaguga

SEQ ID NO: 149590 - RNA, 1413 nt, Artificial Sequence; identical to SEQ ID NO: 149530
  derived and/or modified CDS sequence (opt3) from neuraminidase__InfluenzaA__AEX35189

SEQ ID NO: 149591 - RNA, 1413 nt, Artificial Sequence; identical to SEQ ID NO: 149530
  derived and/or modified CDS sequence (opt3) from neuraminidase__InfluenzaA__AEX35200

SEQ ID NO: 149592 - RNA, 1413 nt, Artificial Sequence; identical to SEQ ID NO: 145509
  derived and/or modified CDS sequence (opt3) from neuraminidase__InfluenzaA__AEX35211

SEQ ID NO: 149593 - RNA, 1410 nt, Artificial Sequence
  derived and/or modified CDS sequence (opt3) from neuraminidase__InfluenzaA__AEX35222
augaaccccaaucagaagaucauuaccauaggcagcgugucccugacaaucucuacuauuugcuucuuuaugcaaaucgccauucucgucacgaccguuacacuucacuucaaacaguacgaguguaacucaccuccaaauaaccaggugaugcugugcgaaccgacuaucauagagagaaauaucaccgaaauuguauauuugacaaacaccacuaucgagaaggaaauuugucccaaauuagcugaguacaggaauuggaguaagccucagugcaacaucacaggguuugcaccauucagcaaagacaauuccauacggcugucugccggaggugauauuugggugacccgcgagcccuaugucucgugugacccugauaagugcuaccaauuugcgcuaggccaggggacgacucucaacaauggacauucaaacgacaccgugcacgaucgaacaccauaucguacucugcuuaugaaugaacugggcguucccuuccauuuggguaccaaacagguguguaucgcuuggagcaguuccucuugccacgacgggaaggccuggcuccaugucugugugacaggagaugacgagaacgcaaccgccagcuuuauuuacaauggcagacugguagauuccaucggcucauggaguaagaaaauccugaggacgcaggaaagcgagugcguuuguauuaacgggacuugcacaguggucaugaccgacggaucugcuuccgguaaggcagauacuaaaauacucuucaucgaggaaggcaagauugugcacacaucaaccuuaagcgggagugcccaacacguggaggaaugcucuuguuauccucgguacccaggaguccgcugcguuuguagagacaacuggaagggcuccaauaggccgaucguggauauaaacauuaaagacuacagcaucguaucgucuuaugugugcuccggucuggucggggacacgccccggaagaaugauucaaguagcuccucucauugucuugacccuaacaaugaggaaggaggccacggcgugaaagggugggcuuuugaugacggaaacgauguuuggaugggucgcaccaucagcgagaaguugcgaucaggcuacgagacauucaaagugauugaaggguggaguaagccaaauuccaaacugcagaucaacagacaggucauuguggacaggggaaaucggagcggcuauucugguauauuuucaguagaggggaagaguugcaucaaccguuguuucuacguugaacuaauucgcggcagaaagcaggagacugaagugcucuggaccagcaauuccaucgucguguuuugcggaacaucuggcacuuaugggaccggaucguggcccgauggugccgacaucaaccugaugccuauuuga

SEQ ID NO: 149594 - RNA, 1413 nt, Artificial Sequence; identical to SEQ ID NO: 149489
  derived and/or modified CDS sequence (opt3) from neuraminidase__InfluenzaA__AEX35233

SEQ ID NO: 149595 - RNA, 1410 nt, Artificial Sequence
  derived and/or modified CDS sequence (opt3) from neuraminidase__InfluenzaA__AEX35244
augaaccccaaucagaagaucauuaccauaggcagcgugucccugacaaucucuacuauuugcuucuuuaugcaaaucgccauucucaucaacacggucacccuucacuucaaacaguacgaguuuaauucaccuccaaacaaucagguuaugcugugugaaccgacaauaaucgagagaaacauuacugaaaucguguauuugaccaauacaaccauugagaaggaaaucugccccaaauuagcugaguacaggaacuggaguaagccucaguguaauauaacuggguucgcaccauuuagcaaagacaacuccauucggcugucugccggaggugauaucuggguaacacgcgagcccuaugugucgugcgacccugauaaguguuaccaauucgcgcuaggccaggggaccacgcucaauaacguccauucaaaugacacugugcacgaucgaaccccauaucguacacugcuuaugaacgaacugggaguucccuuucauuugggcacuaaacaggugugcauugcuuggagcaguuccucuugucacgacgguaaggccuggcuccaugucugcgugaccggggaugacaagaaugcaacagccagcuucaucuacaacggaagacugguagauuccaucguuucauggaguaaaaagauucugaggacccaggagagcgaaugugugugcauaaacggcacguguacugucgugaugacagacggcucugcuuccgggaaagcagauaccaagauccucuuuauugaggagggaaagaucgugcacacuucaacauuaagcgguagugcccaacacgucgaagagugcucuugcuauccucgguacccaggcguucgcugugugugcagagacaauuggaaaggguccaacaggccgauaguagauauuaauaucaaggacuacagcaucgugucgucuuaugucuguuccggacuggugggcgacacgccccggaaaaacgauucaaguagcuccucucauugccuugacccuaauaacgaagagggugggaauggaguuaagggcugggcuuucgaugacggcaacgauguguggauggggcgcaccauuagcgaaaaauugcgaucaggauacgagaccuuuaaggucaucgaggguuggaguaauccaaacuccaaacugcagauuaauagacaggugauaguagacaggggcaaccggagcggguauucuggaaucuucucaguugaaggcaagaguuguauuaaucguugcuuuuacguggagcuaauccgcgguagaaagcaggaaaacgagguccucuggacaagcaauuccaucguggucuucugugggacuucuggcaccuauggaacaggcucguggcccgauggggccgacauuaaccugaugccuguguga

SEQ ID NO: 149596 - RNA, 1410 nt, Artificial Sequence; identical to SEQ ID NO: 143977
  derived and/or modified CDS sequence (opt3) from neuraminidase__InfluenzaA__AEX35255

SEQ ID NO: 149597 - RNA, 1413 nt, Artificial Sequence; identical to SEQ ID NO: 149489
  derived and/or modified CDS sequence (opt3) from neuraminidase__InfluenzaA__AEX35266

SEQ ID NO: 149598 - RNA, 1413 nt, Artificial Sequence; identical to SEQ ID NO: 149489
  derived and/or modified CDS sequence (opt3) from neuraminidase__InfluenzaA__AEX35277

SEQ ID NO: 149599 - RNA, 1410 nt, Artificial Sequence
  derived and/or modified CDS sequence (opt3) from neuraminidase__InfluenzaA__AEX35288
augaaccccaaucagaagaucauuaccauaggcagcgugucccugacaaucucuacuauuugcuucuuuaugcaaaucgccauucucaucacgaccgucacacuucacuucaaacaguacgaguuuaacucaccuccaaauaaccagguuaugcugugugaaccgacuauaaucgagagaaauauuaccgaaaucguguauuugacaaacaccacuauugagaaggaaaucugccccaaauuagcugaguacaggaauuggaguaagccucagugugacauaacaggguucgcaccauuuagcaaagauaacuccauucggcugucugccggaggugacaucuggguaacccgcgagcccuaugugucgugcgauccugacaaguguuaccaauucgcgcuaggccaggggacgacucucaauaacguccauucaaaugauaccgugcacaaccgaacaccauaucguacucugcuuaugaaugaacugggaguucccuuucauuugggcaccaaacaggugugcauugcuuggagcaguuccucuugucacgacgguaaggccuggcuccaugucugcgugacaggggaugacaagaacgcaaccgccagcuucaucuacaauggaagacugguagauuccaucguuucauggaguaaaaagauucugaggacgcaggagagcgaaugugugugcauaaacggcacuuguacagucgugaugaccgacggcucugcuuccgggaaagcagauacuaagauccucuuuauugaggagggaaagaucgugcacacaucaaccuuaagcgguagugcccaacacgucgaagagugcucuugcuauccucgguacccaggcguucgcugugugugcagagacaacuggaaaggguccaauaggccgauaguagauauuaacaucaaggacuacagcaucgugucgucuuaugucuguuccggacuggugggcgacacgccccggaaaaaugauucaaguagcuccucucauugccuugacccuaacaaugaagagggugggcacggaguuaagggcugggcuuucgaugacggcaacgauguguggauggggcgcaccauuagcgaaaaauugcgaucaggauacgagacauuuaaggucaucgaggguuggaguaauccaaacuccaaacugcagauuaauagacaggugauaguagacaggggcaaccggagcggguauucuggaaucuucucaguugaaggcaagaguuguauuaaucguugcuuuuacguggagcuaauccgcgguagaaaggaagagacugaaguccucuggaccagcaacuccaucguggucuucugugggacaucuggcacuuauggaaccggcucguggcccgauggggccgacauuaaucugaugccuauauga

SEQ ID NO: 149600 - RNA, 1410 nt, Artificial Sequence; identical to SEQ ID NO: 142762
  derived and/or modified CDS sequence (opt3) from neuraminidase__InfluenzaA__AEX35299

SEQ ID NO: 149601 - RNA, 1410 nt, Artificial Sequence
  derived and/or modified CDS sequence (opt3) from neuraminidase__InfluenzaA__AEX35310
augaaccccaaucagaagaucauuaccauaggcagcgugucccugacaaucucuacuauuugcuucuuuaugcaaaucgccauucucaucacgaccgucacacuucacuucaaacaguacgaguuuaacucaccuccaaauaaccagguuaugcugugugaaccgacuauaaucgagagaaauauuaccgaaaucguguauuugacaaacaccacuauugagaaggaaaucugccccaaauuagcugaguacaggaauuggaguaagccucaguguaacauaacaggguucgcaccauuuagcaaagacaauuccauucggcugucugccggaggugauaucuggguaacccgcgagcccuaugugucgugcgacccugauaaguguuaccaauucgcgcuaggccaggggacgacucucaacaauguccauucaaacgacaccgugcacgaucgaacaccauaucguacucugcuuaugaaugaacugggaguucccuuucauuugggcaccaaacaggugugcauugcuuggagcaguuccucuugucacgacgguaaggccuggcuccaugucugcgugacaggggaugacgagaacgcaaccgccagcuucaucuacaauggaagacugguagauuccaucguuucauggaguaagaaaauucugaggacgcaggaaagcgagugugugugcauaaacggcacuuguacagucgugaugaccgacggcucugcuuccgggaaggcagauacuaaaauccucuuuauugaggaaggaaagaucgugcacacaucaaccuuaagcgguagugcccaacacgucgaggaaugcucuugcuauccucgguacccaggcguucgcugugugugcagagacaacuggaagggguccaauaggccgauaguagauauuaacaucaaagacuacagcaucgugucgucuuaugucuguuccggacuggugggcgacacgccccggaagaaugauucaaguagcuccucucauugccuugacccuaacaaugaggaaggugggcacggaguuaaaggcugggcuuucgaugacggcgaugacguguggauggggcgcaccauuagcgagaaguugcgaucaggauacgagacauuuaaagucaucgaagguuggaguaacccaaauuccaagcugcagauuaacagacaggugauaguagauaggggcaaucggagcggguauucuggaaucuucucaguugagggcaaaaguuguauuaaccguugcuuuuacguggaacuaauccgcgguagaaaucaggagacugaaguccucuggaccagcaacuccaucguggucuucugugggacaucuggcacuuauggaaccggcucguggcccgacggggccgauauuaaucugaugccuauauga

SEQ ID NO: 149602 - RNA, 1410 nt, Artificial Sequence; identical to SEQ ID NO: 142762
  derived and/or modified CDS sequence (opt3) from neuraminidase__InfluenzaA__AEX35321

SEQ ID NO: 149603 - RNA, 1410 nt, Artificial Sequence; identical to SEQ ID NO: 143977
  derived and/or modified CDS sequence (opt3) from neuraminidase__InfluenzaA__AEX35332

SEQ ID NO: 149604 - RNA, 1410 nt, Artificial Sequence; identical to SEQ ID NO: 143977
  derived and/or modified CDS sequence (opt3) from neuraminidase__InfluenzaA__AEX35343

SEQ ID NO: 149605 - RNA, 1410 nt, Artificial Sequence
  derived and/or modified CDS sequence (opt3) from neuraminidase__InfluenzaA__AEX35354
augaaccccaaucagaagaucauuaccauaggcagcgugucccugacaaucucuacuauuugcuucuuuaugcaaaucgccauucucaucacgaccgucacacuucacuucaaacaguacgaguuuaacucaccuccaaauaaccagguuaugcugugugaaccgacuauaaucgagagaaauauuaccgaaaucguguauuugacaaacaccacuauugagaaggaaaucugccccaaauuagcugaguacaggaauuggaguaagccucagugugacauaacaggguucgcaccauuuagcaaagauaacuccauucggcugucugccggaggugacaucuggguaacccgcgagcccuaugugucgugcgauccugacaaguguuaccaauucgcgcuaggccaggggacgacucucaauaacguccauucaaaugauaccgugcacgaccgaacaccauaucguacucugcuuaugaacgaacugggaguucccuuucauuugggcaccaaacaggugugcauugcuuggagcaguuccucuugucacgaugguaaggccuggcuccaugucugcgugacaggggacgauaagaaugcaaccgccagcuucaucuacaacggaagacugguagacuccaucguuucauggaguaaaaagauucugaggacgcaggagagcgaaugugugugcauaaauggcacuuguacagucgugaugaccgauggcucuacuuccgggaaagcugacacaaagauccucuuuauugaggagggaaagaucgugcacaccucaacguuaagcgguagugcacaacacgucgaagagugcucuugcuauccucgguacccaggcguucgcugugugugcagagauaacuggaaaggguccaacaggccgauaguagacauuaauaucaaggacuacagcaucgugucgucuuaugucuguuccggacuggugggcgauacaccccggaaaaacgacucaaguagcuccucucauugccuugauccuaauaacgaagagggugggcacggaguuaagggcugggccuucgacgauggcaaugacguguggauggggcgcaccauuagcgaaaaauugcgaucaggauacgagacuuuuaaggucaucgaggguuggaguaacccaaauuccaaacugcagauuaacagacaggugauaguagauaggggcaaucggagcggguauucuggaaucuucucaguugaaggcaagaguuguauuaaccguugcuuuuacguggagcuaauccgcgguagaaaggaagagaccgaaguccucuggacaagcaauuccaucguggucuucugugggacuucuggcaccuauggaacaggcucguggcccgacggggcugauauuaaccugaugccuauauga

SEQ ID NO: 149606 - RNA, 1410 nt, Artificial Sequence; identical to SEQ ID NO: 142762
  derived and/or modified CDS sequence (opt3) from neuraminidase__InfluenzaA__AEX35365

SEQ ID NO: 149607 - RNA, 1410 nt, Artificial Sequence
  derived and/or modified CDS sequence (opt3) from neuraminidase__InfluenzaA__AEX35376
augaaccccaaucagaagaucauuaccauaggcagcgugucccugacaaucucuacuauuugcuucuuuaugcaaaucgccauucucaucacgaccgucacacuucacuucaaacaguacgaguuuaacucaccuccaaauaaccagguuaugcugugugaaccgacuauaaucgagagaaauauuaccgaaaucguguauuugacaaacaccacuauugagaaggaaaucugccccaaauuagcugaguacaggaauuggaguaagccucagugugacauaacaggguucgcaccauuuagcaaagauaacuccauucggcugucugccggaggugacaucuggguaacccgcgagcccuaugugucgugcgauccugacaaguguuaccaauucgcgcuaggccaggggacgacucucaauaacguccauucaaaugauaccgugcacgaacgaacaccauaucguacucugcuuaugaacgagcugggaguucccuuucauuugggcaccaaacaggugugcauugcuuggagcaguuccucuugucacgacgguaaggccuggcuccaugucugcgugacaggggaugacaagaaugcaaccgccagcuucaucuacaacggaagacugguagauuccaucguuucauggaguaaaaagauucugaggacgcaggaaagcgagugugugugcauaaauggcacuuguacagucgugaugaccgacggcucugcuuccgggaaagcagauacuaagauccucuuuauugaggaaggaaagaucgugcacacaucaaccuuaagcgguagugcccaacacgucgaggaaugcucuugcuauccucgguacccaggcguucgcugugugugcagagacaacuggaaaggguccaacaggccgauaguagauauuaauaucaaggacuacagcaucgugucgucuuaugucuguuccggacuggugggcgacacgccccggaaaaacgauucaaguagcuccucucauugccuugacccuaauaacgaggaaggugggcacggaguuaagggcugggcuuucgaugacggcaaugauguguggauggggcgcaccauuagcgagaaauugcgaucaggauacgagacauuuaaggucaucgaagguuggaguaacccaaauuccaaacugcagauuaacagacaggugauaguagacaggggcaaucggagcggguauucuggaaucuucucaguugagggcaagaguuguauuaaccguugcuuuuacguggaacuaauccgcgguagaaaggaggaaacugagguccucuggaccagcaauuccaucguggucuucugugggacaucuggcacuuauggaaccggcucguggcccgauggggccgacauuaaccugaugccuauauga

SEQ ID NO: 149608 - RNA, 1410 nt, Artificial Sequence; identical to SEQ ID NO: 142762
  derived and/or modified CDS sequence (opt3) from neuraminidase__InfluenzaA__AEX35387

SEQ ID NO: 149609 - RNA, 1410 nt, Artificial Sequence
  derived and/or modified CDS sequence (opt3) from neuraminidase__InfluenzaA__AEX35398
augaaccccaaucagaagaucauuaccauaggcagcgugucccugacaaucucuacuauuugcuucuuuaugcaaaucgccauucucaucacgaccgucacacuucacuucaaacaguacgaguuuaacucaccuccaaauaaccagguuaugcugugugaaccgacuauaaucgagagaaauauuaccgaaaucguguauuugacaaacaccacuauugagaaggaaaucugccccaaauuagcugaguacaggaauuggaguaagccucagugugacauaacaggguucgcaccauuuagcaaagauaacuccauucggcugucugccggaggugacaucuggguaacccgcgagcccuaugugucgugcgauccugacaaguguuaccaauucgcgcuaggccaggggacgacucucaauaacguccauucaaaugauaccgugcacgaccgaacaccauaucguacucugcuuaugaacgaacugggaguucccuuucauuugggcaccaaacaggugugcauugcuuggagcaguuccucuugucacgaugguaaggccuggcuccaugucugcgugacaggggacgauaagaaugcaaccgccagcuucaucuacaacggaagacugguagacuccaucguuucauggaguaaaaagauucugaggacgcaggagagcgaaugugugugcauaaauggcacuugugcugucgugaugacagauggcucugcauccgggaaagccgacaccaagauccucuuuauugaggagggaaagaucgugcacacuucaacauuaagcgguagugcucaacacgucgaagagugcucuugcuauccucgguacccaggcguucgcugugugugcagagauaacuggaaaggguccaacaggccgauaguagacauuaauaucaaggacuacagcaucgugucgucuuaugucuguuccggacuggugggcgauacgccccggaaaaacgacucaaguagcuccucucauugccuugauccuaauaacgaagagggugggcacggaguuaagggcugggccuucgacgauggcaaugacguguggauggggcgcaccauuagcgaaaaauugcgaucaggauacgagaccuuuaaggucaucgaggguuggaguaacccaaauuccaaacugcagauuaacagacaggugauaguagauaggggcaaucggagcggguauucuggaaucuucucaguugaaggcaagaguuguauuaaccguugcuuuuacguggagcuaauccgcgguagaaaggaagagacagaaguccucuggacuagcaauuccaucguggucuucugugggaccucuggcacauauggaacuggcucguggcccgacggggcggauauuaaccugaugccuauauga

SEQ ID NO: 149610 - RNA, 1410 nt, Artificial Sequence; identical to SEQ ID NO: 142762
  derived and/or modified CDS sequence (opt3) from neuraminidase__InfluenzaA__AEX35409

SEQ ID NO: 149611 - RNA, 1410 nt, Artificial Sequence; identical to SEQ ID NO: 149599
  derived and/or modified CDS sequence (opt3) from neuraminidase__InfluenzaA__AEX35420

SEQ ID NO: 149612 - RNA, 1410 nt, Artificial Sequence
  derived and/or modified CDS sequence (opt3) from neuraminidase__InfluenzaA__AEX35431
augaaccccaaucagaagaucauuaccauaggcagcgugucccugacaaucucuacuauuugcuucuuuaugcaaaucgccauucucaucacgaccgucacacuucacuucaaacaguacgaguuuaacucaccuccaaauaaccagguuaugcugugugaaccgacuauaaucgagagaaauauuaccgaaaucguguauuugacaaacaccacuauugagaaggaaaucugccccaaauuagcugaguacaggaauuggaguaagccucaguguaacauaacaggguucgcaccauuuagcaaagacaauuccauucggcugucugccggaggugauaucuggguaacccgcgagcccuaugugucgugcgacccugauaaguguuaccaauucgcgcuaggccaggggacgacucucaacaauguccauucaaacgacaccgugcacgaucgaacaccauaucguacucugcuuaugaaugaacugggaguucccuuucauuugggcaccaaacaggugugcauugcuuggagcaguuccucuugucacgacgguaaggccuggcuccaugucugcgugacaggggaugacgagaacgcaaccgccagcuucaucuacaauggaagacugguagauuccaucguuucauggaguaagaaaauucugaggacgcaggaaagcgagugugugugcauaaacggcacuuguacagucgugaugaccgacggcucugcuuccgggaaggcagauacuaaaauccucuuuauugaggaaggaaagaucgugcacacaucaaccuuaagcgguagugcccaacacgucgaggaaugcucuugcuauccucgguacccaggcguucgcugugugugcagagacaacuggaagggguccaauaggccgauaguagauauuaacaucaaagacuacagcaucgugucgucuuaugucuguuccggacuggugggcgacacgccccggaagaaugauucaaguagcuccucucauugccuugacccuaacaaugaggaaggugggcacggaguuaaaggcugggcuuucgaugacggcaacgauguguggauggggcgcaccauuagcgagaaguugcgaucaggauacgagacauuuaaagucaucgaagguuggaguaauccaaacuccaagcugcagauuaauagacaggugauaguagacaggggcaaccggagcggguauucuggaaucuucucaguugagggcaaaaguuguauuaaucguugcuuuuacguggaacuaauccgcgguagaaagaaggagacugaaguccucuggaccagcaacuccaucguggucuucugugggacaucuggcacuuauggaaccggcucguggcccgauggggccgacauuaaucugaugccuauauga

SEQ ID NO: 149613 - RNA, 1410 nt, Artificial Sequence; identical to SEQ ID NO: 142760
  derived and/or modified CDS sequence (opt3) from neuraminidase__InfluenzaA__AEX35453

SEQ ID NO: 149614 - RNA, 1410 nt, Artificial Sequence; identical to SEQ ID NO: 142760
  derived and/or modified CDS sequence (opt3) from neuraminidase__InfluenzaA__AEX35464

SEQ ID NO: 149615 - RNA, 1410 nt, Artificial Sequence; identical to SEQ ID NO: 142760
  derived and/or modified CDS sequence (opt3) from neuraminidase__InfluenzaA__AEX35475

SEQ ID NO: 149616 - RNA, 1410 nt, Artificial Sequence; identical to SEQ ID NO: 142760
  derived and/or modified CDS sequence (opt3) from neuraminidase__InfluenzaA__AEX35486

SEQ ID NO: 149617 - RNA, 1410 nt, Artificial Sequence
  derived and/or modified CDS sequence (opt3) from neuraminidase__InfluenzaA__AEX35497
augaaccccaaucagaagaucauuaccauaggcagcgugucccugacaaucucuacuauuugcuucuuuaugcaaaucgccauucucaucacgaccgucacacuucacuucaaacaguacgaguuuaacucaccuccaaauaaccagguuaugcugugugaaccgacuauaaucgagagaaauauuaccgaaaucguguauuugacaaacaccacuauugagaaggaaaaaugccccaaguuagcugaguacaggaauuggaguaaaccucaguguaacaucacaggguucgcaccauuuagcaaggacaauuccauacggcugucugccggaggugauauuuggguaacccgcgagcccuaugugucgugcgacccugauaaguguuaccaauucgcgcuaggccaggggacgacucucaacaauguccauucaaacgacaccgugcacgaucgaacaccauaucguacucugcuuaugaaugaacugggaguucccuuucauuugggcaccaaacaggugugcaucgcuuggagcaguuccucuugucacgacgguaaggccuggcuccaugucugcgugacaggggaugacaaaaacgcaaccgccagcuucauuuacaauggaagacugguagauuccaucguuucauggaguaaggagauccugaggacgcaggaaagcgagugugugugcauuaacggcacuuguacagucgugaugaccgacggcucugcuuccgggaaagcagauacuaagauacucuuuaucgaggaaggaaagauugugcacacaucaaccuuaagcgguagugcccaacacgucgaggaaugcucuugcuauccucgguacccaggcguucgcugugugugcagagacaacuggaaaggguccaauaggccgaucguagauauaaacauuaaggacuacagcaucgugucgucuuaugucuguuccggacuggugggcgacacgccccggaaaaaugauucaaguagcuccucucauugccuugacccuaacaaugaggaaggugggcacggaguuaagggcugggcuuucgaugacggcaacgauguguggauggggcgcaccaucagcgagaaauugcgaucaggauacgagacauuuaaggucauugaagguuggaguaauccaaacuccaaacugcagaucaauagacaggugauuguagacaggggcaaccggagcggguauucuggaauauucucaguugagggcaagaguuguaucaaucguugcuuuuacguggaacuaauucgcgguagaaaggaggaaacugagguccucuggaccagcaacuccaucguggucuucugugggacaucuggcacuuauggaaccggcucguggcccgauggggccgacaucaaucugaugccuauuuga

SEQ ID NO: 149618 - RNA, 1410 nt, Artificial Sequence; identical to SEQ ID NO: 142760
  derived and/or modified CDS sequence (opt3) from neuraminidase__InfluenzaA__AEX35508

SEQ ID NO: 149619 - RNA, 1410 nt, Artificial Sequence; identical to SEQ ID NO: 149617
  derived and/or modified CDS sequence (opt3) from neuraminidase__InfluenzaA__AEX35519

SEQ ID NO: 149620 - RNA, 1410 nt, Artificial Sequence
  derived and/or modified CDS sequence (opt3) from neuraminidase__InfluenzaA__AEX35530
augaaccccaaucagaagaucauuaccauaggcagcgugucccugacaaucucuacuauuugcuucuuuaugcaaaucgccauucucaucacgaccgucacacuucacuucaaacaguacgaguuuaacucaccuccaaauaaccagguuaugcagugugaaccgacuauaaucgagagaaauauuaccgaaaucguguaucugacaaacaccacuauugagaaggaaaucugccccaaauuggcugaguacaggaauuggaguaagccucaaugugacauaacaggguucgcaccauuuagcaaagauaacuccauucgguuaucugccggaggugacaucuggguaacccgcgagcccuaugugucgugcgauccugacaaguguuaccaguucgcgcugggccaggggacgacucuaaauaacguccauucaaaugauaccgugcacgaccgaacaccauaucguacucuccugaugaacgaacuuggaguucccuuucaucugggcaccaaacaggugugcauugcuuggagcaguuccucuugucacgaugguaaggccugguugcaugucugcgugacaggggacgauaagaaugcaaccgccagcuucaucuacaacggaagacucguagacuccaucguuucauggaguaaagagauucugaggacgcaagaaagcgagugugugugcauaaauggcacuuguacagucgugaugaccgauggcucugcuuccgggaaggcagacacuaaaauccuguuuauugaggaaggaaagaucgugcacacaucaacccucagcgguagugcccagcacgucgaggaaugcucuugcuauccucgguacccaggcguucgcugugugugcagagauaacuggaagggguccaacaggccgauaguagacauuaauacgaaagacuacagcaucgugucgucuuaugucuguuccggauuagugggcgauacaccccggaagaacgacucaaguagcuccucucauugccugaauccuaacaaugaggaaggugggcacggaguuaaaggcugggcuuucgaugacggcaacgauguguggauggggcgcaccaucagcgagaaacuucgauugggauacgagacuuuuaaggucauugaagguuggucaaauccaaacaguaagcugcagaucaauagacaggugauuguagacaggggcaaccgguccggguauagcggaauauucucuguugagggcaaaucauguaucaaucguugcuuuuacguggaacuaauucgcgguagaaaggaggaaaccgagguccucuggacaaguaacagcaucguggucuucugugggacuuccggcaccuauggaacaggcucuuggcccgauggggccgacaucaaucugaugccuauuuga

SEQ ID NO: 149621 - RNA, 1410 nt, Artificial Sequence; identical to SEQ ID NO: 142760
  derived and/or modified CDS sequence (opt3) from neuraminidase__InfluenzaA__AEX35541

SEQ ID NO: 149622 - RNA, 1410 nt, Artificial Sequence
  derived and/or modified CDS sequence (opt3) from neuraminidase__InfluenzaA__AEX35552
augaaccccaaucagaagaucauuaccauaggcagcgccucccugacaaucucuacuauuugcuucuuuaugcaaaucgcuauucucaucacgaccgugacacuucacuucaaacaguacgaguuuaacccuccaccgaauaaccaggcaaugcugugugaacccacuauaaucgagagaaauauuaccgaaaucgucuauuugacaaacaccacuauugagaaggaaaucugcccuaaauuagccgaguacaggaauuggucaaagccacagugugacauaacaggguucgcgcccuuuaguaaagauaacagcauucggcuguccgcuggaggugacaucuggguuacccgcgagccuuaugugucuugcgauccagacaaguguuaccaauucgcccuaggccaggggacgacucucaauaacguacauucgaaugauaccgugcacgaccgaacacccuaucguacucugcuuaugaacgaacugggagucccuuuucauuugggcaccaaacaggugugcauugcauggucaagcaguuccugucacgaugguaaggccuggcuccauguuugcgugacaggggacgauaagaaugcuaccgcaucuuucaucuacaacggaagacuggucgacagcaucguguccuggucaaaagagauucugaggacgcaggaaagugaguguguaugcauaaauggcacuuguacaguugugaugaccgauggcagcgccucugggaaggcugacacuaaaauccucuuuauugaggaaggaaagaucguccacacauccaccuuaucagguagcgcccaacacguggaggaaugcaguugcuauccacgguacccgggcgugcgcugugucugcagagauaacuggaaggggucuaacaggcccauaguugacauuaauaucaaagacuacuccaucgcgagcucguauguguguucuggacugguaggcgauacgccucggaagaacgacuccucaaguagcucccauugccuugauccaaauaacgaggaaggugggcacggagugaaaggcugggcauucgacgauggcaaugacgucuggauggggcgcaccauuucugagaaguugcgaagcggauacgagacauuuaaagugaucgaagguuggucaaaccccaauaguaagcugcagauuaacagacagguuauaguggauaggggcaaucgguccggguauagcggaaucuucucugucgagggcaaaucauguauuaaccguugcuuuuacguggaacuaauccgcgguagaaaggaggaaacugagguacucuggaccaguaauagcaucguuguguucugugggacauccggcacuuauggaaccggcucuuggccugacggggccgauauuaaccugaugccaauauga

SEQ ID NO: 149623 - RNA, 1410 nt, Artificial Sequence
  derived and/or modified CDS sequence (opt3) from neuraminidase__InfluenzaA__AEX35563
augaaccccaaucagaagaucauuaccauaggcagcgugucccugacaaucucuacuauuugcuucuuuaugcaaaucgccauucucaucacgaccgucacacuucacuucaaacaguacgaguuuaacucaccuccaaauaaccagguuaugcugugugaaccgacuauaaucgagagaaauauuaccgaaaucguguauuugacaaacaccacuauugagaaggaaaucugccccaaauuagcugaguacaggaauuggaguaagccucagugugacauaacaggguucgcaccauuuagcaaagauaacuccauucggcugucugccggaggugacaucuggguaacccgcgagcccuaugugucgugcgauccugacaaguguuaccaauucgcgcuaggccaggggacgacucucaauaacguccauucaaaugauaccgugcacgaccgaacaccauaucguacucugcuuaugaacgaacugggaguucccuuucauuugggcaccaaacaggugugcauugcuuggagcaguuccucuugucacgaugguaaggccuggcuccaugucugcgugacaggggacgauaagaaugcaaccgccagcuucaucuacaacggaagacugguagacuccaucguuucauggaguaaagagauucugaggacgcaggaaagcgagugugugugcauaaauggcacuuguacagucgugaugaccgauggcucugcuuccgggaaggcagacacuaaaauccucuuuauugaggaaggaaagaucgugcacacaucaaccuuaagcgguagugcccaacacgucgaggaaugcucuugcuauccucgguacccaggcguucgcugugugugcagagauaacuggaagggguccaacaggccgauaguagacauuaauaucaaagacuacagcaucgugucgucuuaugucuguuccggacuggugggcgauacgccccggaagaacgacucaaguagcuccucucauugccuuaauccuaacaaugaggaaggugggcacggaguuaaaggcugggcuuucgaugacggcaacgauguguggauggggcgcaccauuagcgagaaguugcgacugggauacgagacauuuaaagucaucgaagguuggucaaauccaaacaguaagcuacagauuaauagacaggugauaguagacaggggcaaccgguccggguauagcggaaucuucucuguugagggcaaaucauguauuaaucguugcuuuuacguggaacucauccgcgguagaaaggaggaaacugagguccuguggaccaguaacagcaucguggucuucugugggacauccggcacuuauggaaccggcucuuggcccgauggggccgacauuaaucuuaugccuauauga

SEQ ID NO: 149624 - RNA, 1410 nt, Artificial Sequence; identical to SEQ ID NO: 149504
  derived and/or modified CDS sequence (opt3) from neuraminidase__InfluenzaA__AEX35585

SEQ ID NO: 149625 - RNA, 1410 nt, Artificial Sequence
  derived and/or modified CDS sequence (opt3) from neuraminidase__InfluenzaA__AEX35596
augaaccccaaucagaagaucauuaccauaggcagcgugucccugacaaucucuacuauuugcuucuuuaugcaaaucgccauucucaucacgaccgucacacuucacuucaaacaguacgaguuuaacucaccuccaaauaaccagguuaugcugugugaaccgacuauaaucgagagaaauauuaccgaaaucguguauuugacaaacaccacuauugagaaggaaaucugccccaaauuagcugaguacaggaauuggaguaagccucaguguaacauaacaggguucgcaccauuuagcaaagacaauuccauucggcugucugccggaggugauaucuggguaacccgcgagcccuaugugucgugcgacccugauaaguguuaccaauucgcgcuaggccaggggacgacucucaacaauguccauucaaacgacaccgugcacgaucgaacaccauaucguacucugcuuaugaaugaacugggaguucccuuucauuugggcaccaaacaggugugcauugcuuggagcaguuccucuugucacgacgguaaggccuggcuccaugucugcgugacaggggaugacaagaacgcaaccgccagcuucaucuacaauggaagacugguagauuccaucguuucauggaguaaagagauucugaggacgcaggaaagcgagugugugugcauaaacggcacuuguacagucgugaugaccgacggcucugcuuccgggaaggcagauacuaaaauccucuuuauugaggaaggaaagaucgugcacacaucaaccuuaagcgguagugcccaacacgucgaggaaugcucuugcuauccucgguacccaggcguucgcugugugugcagagacaacuggaagggguccaauaggccgauaguagauauuaacaucaaagacuacagcaucgugucgucuuaugucuguuccggacuggugggcgacacgccccggaagaaugauucaaguagcuccucucauugccuugacccuaacaaugaggaaggugggcacggaguuaaaggcugggcuuucgaugacggcaacgauguguggauggggcgcaccauuagcgagaaguugcgaucaggauacgagacauuuaaagucaucgaagguuggaguaauccagacuccaagcugcagauuaacagacaggugauaguagauaggggcaaucggagcggguauucuggaaucuucucaguugagggcaaaaguuguauuaaccguugcuuuuacguggaacuaauccgcgguagaaaggaggaaacugagguccucuggaccagcaauuccaucguggucuucugugggacaucuggcacuuauggaaccggcucguggcccgacggggccgauauuaaccugaugccuauauga

SEQ ID NO: 149626 - RNA, 1410 nt, Artificial Sequence; identical to SEQ ID NO: 142760
  derived and/or modified CDS sequence (opt3) from neuraminidase__InfluenzaA__AEX35607

SEQ ID NO: 149627 - RNA, 1410 nt, Artificial Sequence
  derived and/or modified CDS sequence (opt3) from neuraminidase__InfluenzaA__AEX35618
augaaccccaaucagaagaucauuaccauaggcagcgugucccugacaaucucuacuauuugcuucuuuaugcaaaucgccauucucaucacgaccgucacacuucacuucaaacaguacgagcugaacucaccuccaaauaaccagguuauguugugugaaccgacuauaaucgagagaaauauuaccgaaaucguguauuuaacaaacaccacuauugagaaggaaacaugccccaaacuggcugaguacaggaauuggaguaagccucaguguuauaucaccggguuugcaccauucagcaaagacaacuccauacggcuaucugccggaggugauauuuggguaacgcgcgagcccuacgugucgugcgacccugauaaguguuaucaauuugcgcucggccaggggacuacccugaauaacguccauucaaaugacacagugcgagaucguacuccauacagaacccuucugaugaacgaauugggaguucccuuccaccucggcacaaaacaggugugcaucgcuuggagcaguuccucuugucaugacgguaaggccuggcugcacgucugcauuaccggggaugacaagaaugcaacggccagcuuuaucuauaacggaaggcugguggauuccaucguaucauggaguaaagagauucuccggacucaggaaagcgaguguguuugcauaaauggcacauguaccguggucaugacugacggcucugcuuccgggaaggcagauacaaaaaucuuauucauugaggaaggaaagaucgugcauaccucaacgcugagcgguagugcccaacacguggaggaaugcucuugcuacccucgcuacccaggcgucagauguguuugcagggacaacuggaagggguccaaccggccgauaguggauauuaauaucaaagaccacagcaucguaucgucuuauguguguuccggacuugucggcgacacaccccgcaagaacgauucaaguagcuccucucauugcuuggacccuaauaacgaggaaggugggcacggagugaaaggcugggcuuuugaugacggcaaugauguuuggauggggcgaaccauuagcgagaagucaagacugggauacgagacuuucaaagugaucgaagguuggaguaacccaaaguccaaacuacagauuaauaggcaggucauaguggaccgggauaaccguagcggcuauucugggaucuuuucaguagagggaaagaguuguauuaaucgcugcuucuacguugaacucaucagaggcaggaaggaggaaaccgaggugcuguggacaagcaacuccaucgucguguuuugugguacuucugggaccuauggcacaggaucguggcccgacggcgccgauauuaaucuuaugccuauauga

SEQ ID NO: 149628 - RNA, 1410 nt, Artificial Sequence
  derived and/or modified CDS sequence (opt3) from neuraminidase__InfluenzaA__AEX35640
augaaccccaaucagaagaucauuaccauaggcagcgugucccugacaaucucuacuauuugcuucuuuaugcaaaucgccauucucaucacgaccgucacacuucacuucaaacaguacgaguuuaacucaccuccaaauaaccagguuaugcugugugaaccgacuauaaucgagagaaauauuaccgaaaucguguauuugacaaacaccacuauugagaaggaaaucugccccaaauuagcugaguacaggaaguggaguaaaccucaguguaauauaacaggguucgcaccauuuagcaaggacaacuccauucggcugucugccggaggugauaucuggguaacccgcgagcccuaugugucgugcgacccugauaaguguuaccaauucgcgcuaggccaggggacgacucucaauaacguccauucaaaugacaccgugcgagaucguacaccauauagaacucugcuuaugaacgaacugggaguucccuuucacuugggcaccaaacaggugugcauugcuuggagcaguuccucuugucaugacgguaaggccuggcuccacgucugcgugacaggggauaauaaaaacgcaaccgccagcuucaucuacaauggaaggcugguagacuccaucguuucauggaguaaggagauucugcggacgcaggaaagcgagugugugugcauaaacggcacuuguacagucgugaugaccgauggcucugcuuccgggaaagcagacacuaagauccucuuuauugaggaaggaaagaucgugcauacaucaaccuuaagcgguagugcccaacacgucgaggaaugcucuugcuauccucgcuacccaggcguuagaugugugugcagggauaacuggcggggguccaaucgcccgauaguagacauuaacaugaaagauuacagcaucgugucgucuuaugucuguuccggacuggugggcgacacgccccgaaagaaugacucaaguagcuccggucacugccuugauccuaacgacgaggaagggggacauggcguuaaaggcugggcuuucgaugacgggaaugauguguggaugggaagaaccaucucugaaaagagcaggucagguuacgagacauuuaaagucauugagggcuggaguaacccaaauuccaaguugcagaucaaccgucaggugauuguagaccgggggaaucgcagcggauauucuggcauauucucaguugaggguaaaaguuguaucaacagaugcuuuuacguggaacugauuagggggcggaaggaggaaacugagguccuauggaccagcaauuccaucguggucuucuguggcacaucuggaacuuauggcaccgggucguggcccgauggagccgacaucaaccucaugccuauuuga

SEQ ID NO: 149629 - RNA, 1410 nt, Artificial Sequence
  derived and/or modified CDS sequence (opt3) from neuraminidase__InfluenzaA__AEX35651
augaaccccaaucagaagaucauuaccauaggcagcgugucccugacaaucucuacuauuugcuucuuuaugcagaucgccauucucaucacgaccgucacacuucacuucaaacaguacgaguuuaacucaccuccaaauaaccagguuaugcugugugaaccgacuauaaucgagagaaauauuaccgaaaucguguauuugacaaacaccacuauugagaaggaaaucugccccaaauuagcugaguacaggaauuggaguaagccucagugugacauaacaggguucgcaccauuuagcaaagauaacuccauucggcugucugccggaggugacaucuggguaacccgcgagcccuaugugucgugcgauccugacaaguguuaccaauucgcgcuaggccaggggacgacucucaauaacguccauucaaaugauaccgugcgagaccguacaccauauagaacucugcuuaugaacgaacugggaguucccuuucacuugggcaccaaacaggugugcauugcuuggagcaguuccucuugucaugaugguaaggccuggcuccacgucugcaucacaggggacgauaagaaugcaaccgccagcuucaucuacaacggaaggcugguggacuccguaguuucauggaguaaagagauucugcggacgcaggaaagcgagugugugugcauaaauggcacuuguacagucgugaugaccgauggcucugcuuccgggaaggcagacacuaaaauccucuuuauugaggaaggaaagaucgugcauacaucaaccuuaagcgguagugcccaacacgucgaggaaugcucuugcuauccucgcuacccaggcguuagaugugugugcagggauaacuggaagggguccaaccggccgauaguagacauuaauaucaaagaccacagcaucgugucgucuuacgucuguuccggacuggugggcgauacgccccgcaagaacgacucaaguagcuccucucauugccuugauccuaauaacgaggaaggugggcacggaguuaaaggcugggcuuucgacgauggcaaugacguguggauggggcgaaccauuagcgagaagucaagauugggauaugagacauuuaaagucaucgaagguuggaguaacccaaaguccaaacugcagauuaauaggcaagugauaguagaucggggcaaccguagcggguacucuggaaucuucucaguugaggacaagaguuguauuaaucgcugcuuuuauguggaacuaaucagaggcaggaaggaggaaacugagguccucuggaccagcaacuccaucguggucuucugugguacaucugggacuuacggcaccggaucguggcccgauggcgccgacauuaaucugaugccuauauga

SEQ ID NO: 149630 - RNA, 1410 nt, Artificial Sequence; identical to SEQ ID NO: 143932
  derived and/or modified CDS sequence (opt3) from neuraminidase__InfluenzaA__AEX36105

SEQ ID NO: 149631 - RNA, 1410 nt, Artificial Sequence
  derived and/or modified CDS sequence (opt3) from neuraminidase__InfluenzaA__AEX36116
augaaccccaaucagaagaucauuaccauaggcagcgugucccugacaaucucuacuauuugcuucuuuaugcaaaucgccauucucaucacgaccgucacacuucacuucaaacaguacgaguuuaacucaccuccaaauaaccagguuaugcugugugaaccgacuauaaucgagagaaauauuaccgaaaucguguauuugacaaacaccacuauugagaaggaaaucugccccaaauuagcugaguacaggaauuggaguaagccucagugugacauaacaggguucgcaccauuuagcaaagauaacuccauucggcugucugccggaggugacaucuggguaacccgcgagcccuaugugucgugcgauccugacaaguguuaccaauucgcgcuaggccaggggacgacucucaauaacguccauucaaaugauaccgugcgaaaccguacaccauauagaacucugcuuaugaaugaacugggaguucccuuucacuugggcaccaaacaggugugcauugcuuggagcaguuccucuugucaugacgguaaggccuggcuccacgucugcaucacaggggaugacaagaacgcaaccgccagcuucaucuacaauggaaggcugguggauuccauuguaucauggaguaaagagauacugcggacgcaggaaagcgaguguguuugcaucaacggcacuuguacaguggucaugaccgacggcucugcuuccggggaggcagauacuaagauucucuuuaucgaagagggaaaaauagugcauacaucaaccuuaagcgguagugcccaacacguggaagagugcucuugcuauccucgcuacccaggcgucagauguguuugcagggacaacuggaagggguccaaucggccgauuguggauaucaacaucaaggaccacagcauuguaucgucuuacguguguuccggacuggucggcgacacgccccgcaaaaaugauucaaguagcuccucucauugccuugacccuaacaaugaagagggugggcacggagugaagggcugggcuuucgaugacggcaacgauguuuggauggggcgaaccaucagcgagaaaucaagauugggauaugaaacauuuaaggugauugaggguuggaguaauccaaaauccaagcugcagauaaacaggcaggucaucguggaccggggcaaucguagcggguacucuggaauuuucucaguagaaggcaaaaguuguaucaaccgcugcuuuuauguugagcuaaucagagguaggaaggaagagacugaggugcucuggaccagcaauuccauugucguguucugugggacaucuggcacuuacggaaccggcucguggcccgauggggccgacauaaaccugaugccuaucuga

SEQ ID NO: 149632 - RNA, 1410 nt, Artificial Sequence
  derived and/or modified CDS sequence (opt3) from neuraminidase__InfluenzaA__AEX36127
augaaccccaaucagaagaucauuaccauaggcagcgugucccugacaaucucuacuauuugcuucuuuaugcagaucgccauucucaucacgaccgucacacuucacuucaaacaguacgaguuuaacucaccuccaaauaaccagguuaugcugugugaaccgacuauaaucgagagaaauauuaccgaaaucguguauuugacaaacaccacuauugagaaggaaaucugccccaaauuagcugaguacaggaauuggcugaagccucagugugacauaacaggguucgcaccauuuaguaaagauaacagcauucggcuauccgccggaggugacaucuggguaacccgcgagcccuaugugucuugcgauccugacaaguguuaccaauucgcgcucggccaggggacgacucugaauaacguccauucgaaugauaccgugcgagaccguacaccauauagaacucuucugaugaacgaauugggaguucccuuucaccucggcaccaaacaggugugcauugcuuggucaagcaguuccugucaugaugguaaggccuggcugcacgucugcaucacaggggacgauaagaaugcaaccgccucuuucaucuacaacggaaggcugguggacagcguaguuuccuggucaaaagagauucuccggacgcaggaaagugagugugugugcauaaauggcacuuguacagucgugaugaccgauggcagcgcuucugggaaggcagacacuaaaaucuuauuuauugaggaaggaaagaucgugcauacauccacccugucagguagcgcccaacacgucgaggaaugcaguugcuauccucgcuacccaggcguuagaugugugugcagggauaacuggaaggggucuaaccggccgauaguagacauuaauaucaaagaccacuccaucgugagcucguacgucuguucuggacuugugggcgauacgccccgcaagaacgacuccucaaguagcucccauugcuuggauccuaauaacgaggaaggugggcacggaguuaaaggcugggcuuucgacgauggcgacgauguguggauggggcgaaccauuucugaaaagagcagacugggauaugagacauuuaaagucaucgaggguuggucaaauccaaagaguaaacuacagauuaacaggcaagugauaguagaccggggcaaucguuccggguacagcggaaucuucucuguugagggcaagucauguauuaaccgcugcuuuuauguggaacucaucagagguaggaaggaggaaacugagguccuguggaccaguaauagcaucguggucuucugugggacauccggcacuuacggaaccggcucuuggcccgauggggccgacauuaaccuuaugccuauauga

SEQ ID NO: 149633 - RNA, 1410 nt, Artificial Sequence
  derived and/or modified CDS sequence (opt3) from neuraminidase__InfluenzaA__AEX36149
augaaccccaaucagaagaucauuaccauaggcagcgugucccugacaaucucuacuauuugcuucuuuaugcagaucgccauucucaucacgaccgucacacuucacuucaaacaguacgaguuuaacucaccuccaaauaaccagguuaugcugugugaaccgacuauaaucgagagaaauauuaccgaaaucguguauuugacaaacaccacuauugagaaggaaaucugccccaaauuagcugaguacaggaauuggaguaagccucagugugacauaacaggguucgcaccauuuagcaaagauaacuccauucggcugucugccggaggugacaucuggguaacccgcgagcccuaugugucgugcgauccugacaaguguuaccaauucgcgcuaggccaggggacgacucucaauaacguccauucaaaugauaccgugcgagaccguacaccauauagaacucugcuuaugaacgaacugggaguucccuuucacuugggcaccaaacaggugugcauugcuuggagcaguuccucuugucaugaugguaaggccuggcuccacgucugcaucacaggggacgauaagaaugcaaccgccagcuucaucuacaacggaaggcugguggacuccguaguuucauggaguaaagagauucugcggacgcaggaaagcgagugugugugcauaaauggcacuuguacagucgugaugaccgauggcucugcuuccgggaaggcagacacuaaaauccucuuuauugaggaaggaaagaucgugcauacaucaaccuuaagcgguagugcccaacacgucgaggaaugcucuugcuauccucgcuacccaggcguuagaugugugugcagggauaacuggaagggguccaaccggccgauaguagacauuaauaucaaagaccacagcaucgugucgucuuacgucuguuccggacuggugggcgauacgccccgcaagaacgacucaaguagcuccucucauugccuugauccuaauaacgaggaaggugggcacggaguuaaaggcugggcuuucgacgauggcaaugacguguggauggggcgaaccauuagcgagaagucaagauugggauaugagacauuuaaagucaucgaagguuggaguaacccaaaguccaaacugcagauuaauaggcaagugauaguagaucggggcaaccguagcggguacucuggaaucuucucaguugaggacaagaguuguauuaaucgcugcuuuuauguggaacuaaucagaggcaggaaggaggaaacugagguccucuggaccacaaacagcaucguggucuucugugguacuuccgggaccuacggcacaggaucuuggcccgauggcgccgacauuaaucugaugccuauauga

SEQ ID NO: 149634 - RNA, 1410 nt, Artificial Sequence; identical to SEQ ID NO: 144560
  derived and/or modified CDS sequence (opt3) from neuraminidase__InfluenzaA__AEX36160

SEQ ID NO: 149635 - RNA, 1410 nt, Artificial Sequence
  derived and/or modified CDS sequence (opt3) from neuraminidase__InfluenzaA__AEX36171
augaaccccaaucagaagaucauuaccauaggcagcgugucccugacaaucucuacuauuugcuucuuuaugcaaaucgccauucucaucacgaccgucacacuucacuucaaacaguacgaguuuucaaguccuccaaacaaucagguuaugcugugugaaccgacuauaaucgagagaaacauuaccgaaaucguguauuugacaaauaccacuauugagaaggaaaucugccccaaauuagcugaguacaggaacuggagcaagccucagugugacauaacaggguucgcaccauuuuccaaagauaauucuauucggcugucggccggaggugacaucuggguaacccgcgagcccuaugugucaugcgauccugacaaguguuaccaauucgcgcuaggccaggggacgacucucaacaauguccauagcaacgauaccgugcacaaucgaacaccauaucguacucugcuuaugaacgaacugggaguucccuuucauuugggcaccaaacaggugugcauugcuuggaguuccucuagcugucacgacgguaaggccuggcuccaugucugcgugacaggggaugacaagaaugcaaccgccuccuucaucuacaacggaagacugguagauucaaucguuaguuggagcaaagagauucugaggacgcaggaaucugagugugugugcauaaauggcacuugugcugucgugaugacagacggcuccgcaucagggaaggccgauaccaaaauccucuuuauugaggaaggaaagaucgugcacacuagcacauuaagugguucugcucaacacgucgaggaaugcuccugcuauccucgguacccaggcguucgcugugugugcagagacaacuggaaggggagcaacaggccgauaguagauauuaauaucaaagacuacucgaucgugucucgguaugucuguuccggacuggugggcgacacccccaggaagaacgauucaaguagcuccucucauugccuugacccuaauaacgaggaaggugggcacggaguuaaaggcugggccuucgaugacggcgaugacguguggauggggcgaacgauuagcgagaagucaagaaguggauacgagaccuuuaaagucaucgaagguugguccaauccaaacagcaaguugcagauuaaucgccaggugauaguagaucggggcaaccguucuggguauucaggaaucuucaguguugagggcaaaagcuguauuaaucgcugcuuuuacguggaacugaucagagguaggaaggaggaaacagagguccuauggacuuccaacucuaucguggucuucugugggaccucgggcacauauggaacuggcagcuggcccgacggggcggauauuaaucucaugccuauauga

SEQ ID NO: 149636 - RNA, 1410 nt, Artificial Sequence
  derived and/or modified CDS sequence (opt3) from neuraminidase__InfluenzaA__AEX36193
augaaccccaaucagaagaucauuaccauaggcagcgugucccugacaaucucuacuauuugcuucuuuaugcaaaucgccauucucaucacgaccgucacacuucacuucaaacaguacgaguuuaacucaaguccuaauaaccagguuaugcugugugaaccaacuauaaucgagagaaauauuaccgaaaucguguauuugacaaacaccacuauugagaaggaaaucugcccgaaauuagcugaguacaggaauuggagcaagccccagugugacauaacaggguucgcaccuuuuuccaaagauaacucuauucggcugucggccggaggugacaucuggguaacccgcgagccauaugugucaugcgaucccgacaaguguuaccaauucgcgcuaggccaggggacgacucucaauaacguccauagcaauaacaccgugcgagaucguacaccuuauagaacucugcuuaugaaugaacugggaguuccauuucacuugggcaccaaacaggugugcauugcuuggaguuccucuagcugucaugacgguaaggccuggcuccacgucugcaucacaggggaugacaagaacgcaaccgccuccuucaucuacaauggaaugcugguggauucaauuguaaguuggagcaaagagauacugaggacgcaggaaucugaguguguuugcaucaacggcacuuguacaguggucaugaccgacggcuccgcuucagggaaggcagauacuaaaauucucuuuaucgaggaaggaaagauagugcauacaagcaccuuaagugguucugcccaacacguggaggaaugcuccugcuauccccgguacccuggcguccgcuguguuugcagagacaacuggaaggggagcaauaggccaauuguggauaucaacaucaaagaccacucgauuguaucuuccuacguguguucaggacuggucggcgacacgccgcggaagaaugauaguagcuccucuagccauugccuugaccccaacaaugaggaaggugggcacggagugaaaggcugggcuuucgaugacggcaacgauguuuggauggggcgcaccaucucagagaagagucgauugggauaugagacauuuaaagugauugaagguugguccaauccuaagagcaaacugcagauaaacagacaggucaucguggacaggggcaaucggucuggguacucaggaauuuucaguguagagggcaagagcuguaucaaccguugcuuuuauguugaacuaauccgcgguagaaaggaggaaacugaggugcucuggaccuccaauucuauugucguguucugugggacaucgggcacuuacggaaccggcagcuggccagauggggccgacauaaaccugaugcccaucuga

SEQ ID NO: 149637 - RNA, 1410 nt, Artificial Sequence
  derived and/or modified CDS sequence (opt3) from neuraminidase__InfluenzaA__AEX36204
augaaccccaaucagaagaucauuaccauaggcagcgugucccugacaaucucuacuauuugcuucuuuaugcaaaucgccauucucaucacgaccgucacacuucacuucaaacaguacgaguuuaacucaccuccaaauaaccagguuaugcugugugaaccggcuauaaucgagagaaauauuacugaaaucguguauuugaccaacacaaccauugagaaggaaaucugccccaaauuagcagaguacaggaauuggaguaagccucagugugacauaacuggguucgccccauuuagcaaagauaacuccauucggcugucugcgggaggugacaucuggguaacacgcgagcccuaugugucgugcgauccugacaaguguuaccaauucgcucuaggccaggggaccacgcucaauaacguccauucaaaugauacugugcacgaacgaaccccauaucguacacugcuuaugaacgagcugggaguucccuuucauuugggcacuaaacaggugugcauugccuggagcaguuccucuugucacgacgguaaggcauggcuccaugucugcgugaccggggaugacaagaaugccacagcuagcuucaucuacaacggaagacugguagauuccaucguuucauggaguaaagaaauucugaggacccaggagagcgagugugugugcauaaauggcacguguacugucgugaugacagacggcucugcauccgggaaggccgauaccaaaauccucuuuauugaagagggaaagaucgugcacacuucaacauuaagcgguagugcucaacacgucgaagagugcucuugcuauccucgguacccaggcguucgcugugugugcagagacaacuggaagggguccaacaggccgauaguagauauuaauaucaaagacuacagcaucgugucgcgguaugucuguucuggacuggugggcgacacccccaggaagaacgauuccucaaguagcucccauugccuugacccuaauaacgaagagggugggcacggaguuaaaggcugggccuucgaugacggcaaugauguguggauggggcgaacgauuucugaaaagagcagaucaggauacgagaccuuuaaagucaucgaggguuggaguaacccaaauuccaaguugcagauuaaccgccaggugauaguagaccggggcaaucguagcggguauucuggaaucuucucaguugaaggcaaaaguuguauuaaccgcugcuuuuacguggagcugaucagagguaggaaggaagagacagagguccuauggacuagcaauuccaucguggucuucugugggaccucuggcacauauggaacuggcucguggcccgauggggcggacauuaaccucaugccuauauga

SEQ ID NO: 149638 - RNA, 1410 nt, Artificial Sequence
  derived and/or modified CDS sequence (opt3) from neuraminidase__InfluenzaA__AEX36215
augaaccccaaucagaagaucauuaccauaggcagcgugucccugacaaucucuacuauuugcuucuuuaugcaaaucgccauucucaucacgaccgucacacuucacuucaaacaguacgaguuuucaaguccuccaaacaaucagguuaugcugugugaaccggcuauaaucgagaagaacauuacugaaaucguguauuugaccaauacaaccauugagaaagaaaucugccccaaguuagcagaguacagaaacuggagcaaaccucagugugacauaacuggguucgccccauuuuccaaggauaauucuauuaggcugucggcgggaggugacaucuggguaacacgggagcccuaugugucaugcgauccugacaaguguuaccaauucgcucuaggccaggggaccacgcucaacaauguccauagcaacgauacugugcacgaacgcaccccauaucgaacacugcuuaugaaugagcugggaguucccuuucauuugggcacuaaacaggugugcauugccuggaguuccucuagcugucacgacgguaaggcauggcuccaugucugcgugaccggggaugacaaaaacgccacagcuuccuucaucuacaauggacgucugguagauucaaucguuaguuggagcaaggaaauucugagaacccaggagucugagugugugugcauaaacggcacguguacugucgugaugacagacggcuccgcaucagggaaagccgauaccaagauccucuuuauugaagagggaaagaucgugcacacuagcacauuaagugguucugcucaacacgucgaagagugcuccugcuauccuagguacccaggcguucggugugugugccgcgacaauuggaaagggagcaacagaccgauaguagauauuaacaucaaggacuacucgaucgugucuagguaugucuguuccggacuggugggcgacacgccccggaaaaaugauucaaguagcuccucucauugccuugacccuaacaaugaagagggugggcacggaguuaagggcugggccuucgaugacggcaacgauguguggauggggcgcaccauuagcgagaaaucacgaaguggauacgaaaccuuuaaggucaucgaggguugguccaauccaaacagcaaauugcagauuaauagacaggugauaguagacaggggcaaccggucuggguauucaggaaucuucaguguugaaggcaagagcuguauuaaucguugcuuuuacguggagcugauccgcgguagaaaggaagagacagagguccuauggacuuccaacucuaucguggucuucugugggaccucgggcacauauggaacuggcagcuggcccgauggggcggacauuaaucucaugccuauauga

SEQ ID NO: 149639 - RNA, 1410 nt, Artificial Sequence
  derived and/or modified CDS sequence (opt3) from neuraminidase__InfluenzaA__AEX36226
augaaccccaaucagaagaucauuaccauaggcagcgugucccugacaaucucuacuauuugcuucuuuaugcaaaucgccauucucaucacgaccgucacacuucacuucaaacaguacgaguuuucaaguccuccaaacaaucagguuaugcugugugaaccggcuauaaucgagagaaacauuacugaaaucguguauuugaccaauacaaccauugagaaggaaaucugccccaaauuagcagaguacaggaacuggagcaagccucagugugacauaacuggguucgccccauuuuccaaagauaauucuauucggcugucggcgggaggugacaucuggguaacacgcgagcccuaugugucaugcgauccugacaaguguuaccaauucgcucuaggccaggggaccacgcucaacaauguccauagcaacgauacugugcacaaucgaaccccauaucguacacugcuuaugaacgaacugggaguucccuuucauuugggcacuaaacaggugugcauugccuggaguuccucuagcugucacgacgguaaggcauggcuccaugucugcgugaccggggaugacaagaaugccacagcuuccuucaucuacaacggaagacugguagauucaaucguuaguuggagcaaagagauucugaggacccaggaaucugagugugugugcauaaauggcacguguacugucgugaugacagacggcuccgcaucagggaaggccgauaccaaaauccucuuuauugaggaaggaaagaucgugcacacuagcacauuaagugguucugcucaacacgucgaggaaugcuccugcuauccucgguacccaggcguucgcugugugugcagagacaacuggaaggggagcaacaggccgauaguagauauuaauaucaaagacuacucgaucgugucucgguaugucuguuccggaauugugggcgacacccccaggaagaacgauucaaguagcuccucucauugccuggacccuaauaacgaggaaggugggcacggaguuaaaggcugggccuucgaugacggcaaugauguguggauggggcgaacgaucagcgagaagucaagaaguggauacgagaccuuuaaagucauugaagguugguccaacccaaauagcaaacuucagauaaaccgccaggugaucguagaccggggcaaucguucuggguauucaggaauuuucaguguugagggcaagagcuguaucaaccgcugcuuuuacguggaauugaucagagguaggaaggaggaaacagagguccuguggacuuccaauucuauuguggucuucugugggaccucgggcacauauggaacuggcagcuggcccgauggggcggacauaaaccuaaugccuaucuga

SEQ ID NO: 149640 - RNA, 1410 nt, Artificial Sequence
  derived and/or modified CDS sequence (opt3) from neuraminidase__InfluenzaA__AEX36237
augaaccccaaucagaagaucauuaccauaggcagcgugucccugacaaucucuacuauuugcuucuuuaugcaaaucgccauucucaucacgaccgucacacuucacuucaaacaguacgaguuuaacucaccuccaaauaaccagguuaugcugugugaaccgacuauaaucgagagaaauauuaccgaaaucguguauuugacaaacaccacuauugagaaggaaaucugccccaaauuagcugaguacaggaaguggaguaaaccucaguguaauauaacaggguucgcaccauuuagcaaggacaacuccauucggcugucugccggaggugauaucuggguaacccgcgagcccuaugugucgugcgacccugauaaguguuaccaauucgcgcuaggccaggggacgacucucaauaacguccauucaaaugacaccgugcgagaacguacaccauauagaacucugcuuaugaacgagcugggaguucccuuucacuugggcaccaaacaggugugcauugcuuggagcaguuccucuugucaugaugguaaggccuggcuccacgucugcgugacaggggacgauaaaaaugcaaccgccagcuucaucuacaacggaaggcugguagacuccaucguuucauggaguaaggaaauucugcggacgcaggagagcgagugugugugcauaaauggcacuuguacagucgugaugaccgauggcucugcuuccgggaaagcagacacuaagauccucuuuauugaagagggaaagaucgugcauacaucaaccuuaagcgguagugcccaacacgucgaagagugcucuugcuauccucgcuacccaggcguuagaugugugugcagggauaacuggcggggguccaaccgcccgauaguagacauuaauaugaaagauuacagcaucgugucgucuuaugucuguuccggacuggugggcgacacgccccgaaagaacgacucaaguagcuccggucacugccuugauccuaaugacgaagaagggggacauggcguuaaaggcugggcuuucgaugacgggaacgauguguggaugggaagaaccaucucugaaaagagcaggucagguuacgagacauuuaaagucauugagggcuggaguaauccaaacuccaaguugcagaucaaucgucaggugauuguagaccgggggaaccgcagcggauauucuggcauauucucaguugaggguaaaaguuguaucaauagaugcuuuuacguggagcugauuagggggcggaaggaagagacugagguccuauggaccagcaacuccaucguggucuucuguggcacaucuggaacuuauggcaccgggucguggcccgauggagccgacaucaaucucaugccuauuuga

SEQ ID NO: 149641 - RNA, 1410 nt, Artificial Sequence
  derived and/or modified CDS sequence (opt3) from neuraminidase__InfluenzaA__AEX36248
augaaccccaaucagaagaucauuaccauaggcagcgugucccugacaaucucuacuauuugcuucuuuaugcaaaucgccauucucaucacgaccgucacacuucacuucaaacaguacgaguuuucaaguccuccaaacaaucagguuaugcugugugaaccggcuauaaucgagagaaacauuacugaaaucguguauuugaccaauacaaccauugagaaggaaaucugccccaaauuagcagaguacaggaacuggagcaagccucagugugacauaacuggguucgccccauuuuccaaagauaauucuauucggcugucggcgggaggugacaucuggguaacacgcgagcccuaugugucaugcgauccugacaaguguuaccaauucgcucuaggccaggggaccacgcucaacaauguccauagcaacgauacugugcacaaucgaaccccauaucguacacugcuuaugaacgaacugggaguucccuuucauuugggcacuaaacaggugugcauugccuggaguuccucuagcugucacgacgguaaggcauggcuccaugucugcgugaccggggaugacaagaaugccacagcuuccuucaucuacaacggaagacugguagauucaaucguuaguuggagcaaagagauucugaggacccaggaaucugagugugugugcauaaauggcacguguacugucgugaugacagacggcuccgcaucagggcgggccgauaccaagauccucuuuauugaggaaggaaaaaucgugcacacuagcacauuaagugguucugcucaacacgucgaggaaugcuccugcuauccucgcuacccaggcguuagaugugugugcagggacaacuggaaggggagcaaccggccgauaguagauauuaauaucaaggacuacucgaucgugucucgcuaugucuguuccggacuggugggcgacacgccccggaaaaacgauucaaguagcuccucucauugccuugacccuaauaacgaggaaggugggcacggaguuaagggcugggccuucgaugacggcaaugauguguggauggggagaaccauuagcgagaaaucaaggaguggauacgagaccuuuaaggucaucgaagguugguccaacccaaauagcaaauugcagauuaaccgacaggugauaguagaccguggcaaucgcucuggguauucaggaaucuucaguguugagggcaagagcuguauuaacagaugcuuuuacguggaacugaucaggggucggaaagaggaaacagagguccuauggacuuccaauucuaucguggucuucugugggaccucgggcacauauggaacuggcagcuggcccgauggggcggacauuaaccucaugccuauauga

SEQ ID NO: 149642 - RNA, 1410 nt, Artificial Sequence; identical to SEQ ID NO: 144560
  derived and/or modified CDS sequence (opt3) from neuraminidase__InfluenzaA__AEX36259

SEQ ID NO: 149643 - RNA, 1410 nt, Artificial Sequence
  derived and/or modified CDS sequence (opt3) from neuraminidase__InfluenzaA__AEX36270
augaaccccaaucagaagaucauuaccauaggcagcgugucccugacaaucucuacuauuugcuucuuuaugcaaaucgccauucucaucacgaccgucacacuucacuucaaacaguacgaguuuucaaguccuccaaacaaucagguuaugcugugugaaccggcuauaaucgagagaaacauuacugaaaucguguauuugaccaauacaaccauugagaaggaaaucugccccaaauuagcagaguacaggaacuggagcaagccucagugugacauaacuggguucgccccauuuuccaaagauaauucuauucggcugucggcgggaggugacaucuggguaacacgcgagcccuaugugucaugcgauccugacaaguguuaccaauucgcucuaggccaggggaccacgcucaacaauguccauagcaacgauacugugcacggacgaaccccauaucguacacugcuuaugaaugaacugggcguucccuuucauuuggguacuaaacaggugugcauugccuggaguuccucuagcugucacgacgggaaggcauggcuccaugucugcgugaccggagaugacaagaacgccacagcuuccuucaucuacaauggcagacugguagauucaaucguuaguuggagcaaagagauucugaggacccaggaaucugagugugugugcauaaacggcacguguacugucgugaugacagacggguccgcaucaggaaaggccgauaccaaaauccucuuuauugaggaagguaagaucgugcacacuagcacauuaaguggcucugcucaacacgucgaggaaugcuccugcuauccucgguacccagggguucgcugugugugcagagacaauuggaagggaagcaacaggccgauaguagauauuaacaucaaagacuacucgaucgugucucgguaugucuguuccggccuggugggugacacccccaggaagaaugauucaaguagcuccucucauugccuugacccuaacaaugaggaagggggacacggcguuaaaggcugggccuucgaugacgggaacgauguguggaugggacgaacgauuagcgagaagucaagaagugguuacgagaccuuuaaagucaucgaaggcugguccaauccaaacagcaaguugcagauuaaucgccaggugauaguagaccgggggaaccguucuggauauucaggcaucuucaguguugaggguaaaagcuguauuaaucgcugcuuuuacguggaacugaucagagggagggaggaagagacaaagguccuauggacuuccaacucuaucguggucuucuguggcaccucgggaacauauggcacugggagcuggcccgauggagcggacauuaaucucaugccuauauga

SEQ ID NO: 149644 - RNA, 1410 nt, Artificial Sequence
  derived and/or modified CDS sequence (opt3) from neuraminidase__InfluenzaA__AEX36281
augaaccccaaucagaagaucauuaccauaggcagcgugucccugacaaucucuacuauuugcuucuuuaugcaaaucgccauucucaucacgaccgucacacuucacuucaaacaguacgaguuuucaaguccuccaaacaaucagguuaugcugugugaaccggcuauaaucgagagaaacauuacugaaaucguguauuugaccaauacaaccauugagaaggaaaucugccccaaauuagcagaguacaggaacuggagcaagccucagugugacauaacuggguucgccccauuuuccaaagauaauucuauucggcugucggcgggaggugacaucuggguaacacgcgagcccuaugugucaugcgauccugacaaguguuaccaauucgcucuaggccaggggaccacgcucaacaauguccauagcaacgauacugugcacggacgaaccccauaucguacacugcuuaugaaugaacugggcguucccuuucauuuggguacuaaacaggugugcauugccuggaguuccucuagcugucacgacgggaaggcauggcuccaugucugcgugaccggagaugacaagaacgccacagcuuccuucaucuacaauggcagacugguagauucaaucguuaguuggagcaaagagauucugaggacccaggaaucugagugugugugcauaaacggcacguguacugucgugaugacagacggguccgcaucaggaaaggccgauaccaaaauccucuuuauugaggaagguaagaucgugcacacuagcacauuaaguggcucugcucaacacgucgaggaaugcuccugcuauccucgguacccagggguucgcugugugugcagagacaauuggaagggaagcaacaggccgauaguagauauuaacaucaaagacuacucgaucgugucucgguaugucuguuccggccuggugggugacacccccaggaagaaugauucaaguagcuccucucauugccuugacccuaacaaugaggaagggggacacggcguuaaaggcugggccuucgaugacgggaacgauguguggaugggacgaacgauuagcgagaagucaagaagugguuacgagaccuuuaaagucaucgaaggcugguccaauccaaacagcaaguugcagauuaaucgccaggugauaguagaccgggggaaccguucuggauauucaggcaucuucaguguugaggguaaaagcuguauuaaucgcugcuuuuacguggaacugaucagagggaggaaggaggaaacagagguccuauggacuuccaacucuaucguggucuucuguggcaccucgggaacauauggcacugggagcuggcccgauggagcggacauuaaucucaugccuauauga

SEQ ID NO: 149645 - RNA, 1410 nt, Artificial Sequence; identical to SEQ ID NO: 149644
  derived and/or modified CDS sequence (opt3) from neuraminidase__InfluenzaA__AEX36292

SEQ ID NO: 149646 - RNA, 1410 nt, Artificial Sequence
  derived and/or modified CDS sequence (opt3) from neuraminidase__InfluenzaA__AEX36303
augaaccccaaucagaagaucauuaccauaggcagcgugucccugacaaucucuacuauuugcuucuuuaugcaaaucgccauucucaucacgaccgucacacuucacuucaaacaguacgaguuuucaaguccuccaaacaaucagguuaugcugugugaaccggcuauaaucgagagaaacauuacugaaaucguguauuugaccaauacaaccauugagaaggaaaucugccccaaauuagcagaguacaggaacuggagcaagccucagugugacauaacuggguucgccccauuuuccaaagauaauucuauucggcugucggcgggaggugacaucuggguaacacgcgagcccuaugugucaugcgauccugacaaguguuaccaauucgcucuaggccaggggaccacgcucaacaauguccauagcaacgauacugugcacgaacgaaccccauaucguacacugcuuaugaaugagcugggaguucccuuucauuugggcacuaaacaggugugcauugccuggaguuccucuagcugucacgacgguaaggcauggcuccaugucugcgugaccggggaugacaagaacgccacagcuuccuucaucuacaauggaagacugguagauucaaucguuaguuggagcaaagaaauucugaggacccaggagucugagugugugugcauaaacggcacguguacugucgugaugacagacggcuccgcaucagggaaggccgauaccaaaauccucuuuauugaagagggaaagaucgugcacacuagcacauuaagugguucugcucaacacgucgaagagugcuccugcuauccucgguacccaggcguucgcugugugugcagagacaauuggaaggggagcaacaggccgauaguagauauuaacaucaaagacuacucgaucgugucucgguaugucuguuccggacuggugggcgacacccccaggaagaaugauucaaguagcuccucucauugccuugacccuaacaaugaagagggugggcacggaguuaaaggcugggccuucgaugacggcaacgauguguggauggggcgaacgauuagcgagaagucaagaaguggauacgaaaccuuuaaagucaucgaggguugguccaauccaaacagcaaguugcagauuaaucgccaggugauaguagaccggggcaaccguucuggguauucaggaaucuucaguguugaaggcaaaagcuguauuaaucgcugcuuuuacguggagcugaucagagguaggaaggaagagacagagguccuauggacuuccaacucuaucguggucuucugugggaccucgggcacauauggaacuggcagcuggcccgauggggcggacauuaaucucaugccuauauga

SEQ ID NO: 149647 - RNA, 1410 nt, Artificial Sequence
  derived and/or modified CDS sequence (opt3) from neuraminidase__InfluenzaA__AEX36314
augaaccccaaucagaagaucauuaccauaggcagcgugucccugacaaucucuacuauuugcuucuuuaugcaaaucgccauucucaucacgaccgucacacuucacuucaaacaguacgaguuuucaaguccuccaaacaaucagguuaugcugugugaaccgacuauaaucgagagaaacauuaccgaaaucguguauuugacaaauaccacuauugagaaggaaaucugccccaaauuagcugaguacaggaacuggagcaagccucagugugacauaacaggguucgcaccauuuuccaaagauaauucuauucggcugucggccggaggugacaucuggguaacccgcgagcccuaugugucaugcgauccugacaaguguuaccaauucgcgcuaggccaggggacgacucucaacaauguccauagcaacgauaccgugcacaaucgaacaccauaucguacucugcuuaugaacgaacugggaguucccuuucauuugggcaccaaacaggugugcauugcuuggaguuccucuagcugucacgacgguaaggccuggcuccaugucugcgugacaggggaugacaagaaugcaaccgccuccuucaucuacaacggaagacugguagauucaaucguuaguuggagcaaagagauucugaggacgcaggaaucugagugugugugcauaaauggcacuugugcugucgugaugacagacggcuccgcaucagggaaggccgauaccaaaauccucuuuauugaggaaggaaagaucgugcacacuagcacauuaagugguucugcucaacacgucgaggaaugcuccugcuauccucgguacccaggcguucgcugugugugcagagacaacuggaaggggagcaacaggccgauaguagauauuaauaucaaagacuacucgaucgugucucgguaugucuguuccggacuggugggcgacacccccaggaagaacgauucaaguagcuccucucauugccuugacccuaauaacgaggaaggugaucacgggguuaaaggaugggccuucgacgauggcaaugacguguggaugggccgaacgauuagcgagaagucaagaaguggguacgagaccuuuaaagucaucgaaggaugguccaacccaaauagcaaguugcagauuaaccgccaggugauaguagaucgggguaaucguucuggcuauucagggaucuucaguguugagggaaaaagcuguauuaaccgcugcuuuuacguggaacugaucagaggcaggaaggaggaaacagagguccuauggacuuccaauucuaucguggucuucugugguaccucggggacauauggcacuggaagcuggcccgacggcgcggagauuaaccucaugccuauauga

SEQ ID NO: 149648 - RNA, 1410 nt, Artificial Sequence; identical to SEQ ID NO: 149644
  derived and/or modified CDS sequence (opt3) from neuraminidase__InfluenzaA__AEX36336

SEQ ID NO: 149649 - RNA, 1410 nt, Artificial Sequence
  derived and/or modified CDS sequence (opt3) from neuraminidase__InfluenzaA__AEX36347
augaaccccaaucagaagaucauuaccauaggcagcgugucccugacaaucucuacuauuugcuucuuuaugcagaucgccauucucaucacgaccgucacacuucacuucaaacaguacgaguuuucaaguccuccaaacaaucagguuaugcugugugaaccgauaaucauugagagaaacaucacugaaauuguguauuugaccaauacaaccaucgagaaggaaauaugccccaaauuagcugaguacaggaacuggagcaagccucagugugacauuacuggguucgcaccauuuuccaaagauaauucuauccggcugucggccggaggugacauuuggguaacacgcgagcccuaugugucaugcgauccugacaaguguuaccaauucgcgcuaggccaggggaccacgcucaacaauguccauagcaacgauacugugcacaaucgaaccccauaucguacacugcuuaugaacgaacugggaguucccuuucauuugggcacuaaacaggugugcaucgcuuggaguuccucuagcugucacgacgguaaggccuggcuccaugucugcgugaccggggaugacaagaaugcaacagccuccuucaucuacaacggaagacugguagauucaauuguuaguuggagcaaagagauacugaggacccaggaaucugagugugugugcaucaauggcacgugugcugucgugaugacugacggcuccgcaucagggaaggccgauacaaaaauucucuuuaucgaggaaggaaagauagugcacgcuagcaccuuaagugguucugcccaacacgucgaggaaugcuccugcuauccucgguacccaggcguucgcugugugugcagagacaacuggaaggggagcaacaggccgauuguagauaucaauaucaaagacuacucgauugugucucgguaugucuguuccggacuggugggcgacacuccccgcaagaacgauucaaguagcuccucucauugccuugacccuaauaacgaggaaggugggcacggaguuaaaggcugggcguucgaugacggcaaugauguguggauggggcgaacaaucagcgagaagucaagaaguggauacgagaccuuuaaagucauugaagguugguccaacccaaauagcaaguugcagauaaacaggcaagugaucguagaccggggcaaucguucuggguauucaggaauuuucaguguugagggcaaaagcuguaucaaccgcugcuuuuacguggaacugaucagagguaggaaggaggaaacggagguccuauggaccuccaauucuauuguggucuucugugggacaucgggcacuuauggaaccggcagcuggcccgauggggcagacauaaaccucaugccuaucuga

SEQ ID NO: 149650 - RNA, 1410 nt, Artificial Sequence; identical to SEQ ID NO: 143932
  derived and/or modified CDS sequence (opt3) from neuraminidase__InfluenzaA__AEX36358

SEQ ID NO: 149651 - RNA, 1410 nt, Artificial Sequence
  derived and/or modified CDS sequence (opt3) from neuraminidase__InfluenzaA__AEX36369
augaaccccaaucagaagaucauuaccauaggcagcgugucccugacaaucucuacuauuugcuucuuuaugcaaaucgccauucucaucacgaccgucacacuucacuucaaacaguacgaguuuaacucaccuccaaauaaccagguuaugcugugugaaccgacuauaaucgagagaaauauuaccgaaaucguguauuugacaaacaccacuauugagaaggaaaucugccccaaauuagcugaguacaggaauuggaguaagccucagugugacauaacaggguucgcaccauuuagcaaagauaacuccauucggcugucugccggaggugacaucuggguaacccgcgagcccuaugugucgugcgauccugacaaguguuaccaauucgcgcuaggccaggggacgacucucaauaacguccauucaaaugauaccgugcgaaaccguacaccauauagaacucugcuuaugaaugaacugggaguucccuuucacuugggcaccaaacaggugugcauugcuuggagcaguuccucuugucaugacgguaaggccuggcuccacgucugcaucacaggggaugacaagaacgcaaccgccagcuucaucuacaauggaaggcugguggauuccauuguaucauggaguaaagagauacugcggacgcaggaaagcgaguguguuugcaucaacggcacuuguacaguggucaugaccgacggcucugcuuccgggaaggcagauacuaaaauucucuuuaucgaggaaggaaagauagugcauacaucaaccuuaagcgguagugcccaacacguggaggaaugcucuugcuauccucgcuacccaggcgucagauguguuugcagggacaacuggaagggguccaaucggccgauuguggauaucaacaucaaagaccacagcauuguaucgucuuacguguguuccggacuggucggcgacacgccccgcaagaaugauucaaguagcuccucucauugccuugacccuaacaaugaggaaggugggcacggagugaaaggcugggcuuucgaugacggcaacgauguuuggauggggcgaaccaucagcgagaagucaagauugggauaugagacauuuaaagugauugaagguuggaguaauccaaaguccaaacugcagauaaacaggcaggucaucguggaccggggcaaucguacuggguacagcggaauuuucucuguagagggcaagucauguaucaaccgcugcuuuuauguugaacuaaucagagguaggaaggaggaaaccgaggugcucuggacaaguaauagcauugucguguucugugggacuuccggcaccuacggaacaggcucuuggcccgauggggccgacauaaaccugaugccuaucuga

SEQ ID NO: 149652 - RNA, 1410 nt, Artificial Sequence
  derived and/or modified CDS sequence (opt3) from neuraminidase__InfluenzaA__AEX36391
augaaccccaaucagaagaucauuaccauaggcagcgugucccugacaaucucuacuauuugcuucuuuaugcaaaucgccauucucaucacgaccgucacacuucacuucaaacaguacgaguuuaacucaccuccaaauaaccagguuaugcugugugaaccgacuauaaucgagagaaauauuaccgaaaucguguauuugacaaacaccacuauugagaaggaaaucugccccaaauuagcugaguacaggaauuggaguaagccucagugugacauagcaggguucgccccauuuagcaaagauaacuccauucggcugucugcgggaggugacaucuggguaacacgcgagcccuaugugucgugcgauccugacaaguguuaccaauucgcucuaggccaggggaccacgcucaauaacguccauucaaaugauacugugcgaaaccguaccccauauagaacacugcuuaugaaugaacugggaguucccuuucacuugggcacuaaacaggugugcauugccuggagcaguuccucuugucaugacgguaaggcauggcuccacgucugcaucaccggggaugacaagaacgccacagcuagcuucaucuacaauggaaggcugguggauuccauuguaucauggaguaaagagauacugcggacccaggaaagcgaguguguuugcaucaacggcacguguacuguggucaugacagacggcucugcauccgggaaggccgauaccaaaauucucuuuaucgaggaaggaaagauagugcauacuucaacauuaagcgguagugcucaacacguggaggaaugcucuugcuauccucgcuacccaggcgucagauguguuugcagggacaacuggaagggguccaaucggccgauuguggauaucaacaucaaagaccacagcauuguaucgucuuacguguguuccggacuggucggcgacacgccccgcaagaaugauucaaguagcuccucucauugccuugacccuaacaaugaggaaggugggcacggagugaaaggcugggccuucgaugacggcaacgauguuuggauggggcgaaccaucagcgagaagucaagauugggauaugagaccuuuaaagugauugaagguuggaguaauccaaaguccaaacugcagauaaacaggcaggucaucguggaccggggcgaucguagcggguacucuggaauuuucucaguagagggcaagaguuguaucaaucgcugcuuuuauguugaacuaaucagagguaggaaggaggaaacagaggugcucuggacuagcaacuccauugucguguucugugggaccucuggcacauacggaacuggcucguggcccgacggggcggauauaaaucugaugccuaucuga

SEQ ID NO: 149653 - RNA, 1410 nt, Artificial Sequence
  derived and/or modified CDS sequence (opt3) from neuraminidase__InfluenzaA__AEX36402
augaaccccaaucagaagaucauuaccauaggcagcgugucccugacaaucucuacuauuugcuucuuuaugcaaaucgccauucucaucacgaccgucacacuucacuucaaacaguacgaguuuaacucaccuccaaauaaccagguuaugcugugugaaccgacuauaaucgagagaaauauuaccgaaaucguguauuugacaaacaccacuauugagaaggaaaucugccccaaauuagcugaguacaggaauuggaguaagccucagugugacauaacaggguucgcaccauuuagcaaagauaacuccauucggcugucugccggaggugacaucuggguaacccgcgagcccuaugugucgugcgauccugacaaguguuaccaauucgcgcuaggccaggggacgacucucaauaacguccauucaaaugauaccgugcgaggacguacaccauauagaacucugcuuaugaacgaacugggcguucccuuucacuuggguaccaaacaggugugcauugcuuggagcaguuccucuugucaugacgggaaggccuggcuccacgucugcaucacaggagaugacaagaaugcaaccgccagcuucaucuacaacggcaggcugguggauuccauuguaucauggaguaaagagauacugcggacgcaggaaagcgaguguguuugcaucaauggcacuuguacaguggucaugaccgacgggucugcuuccggaaaggcagauacuaaaauucucuuuaucgaggaagguaagauagugcauacaucaaccuuaagcggcagugcccaacacguggaggaaugcucuugcuauccucgcuucccaggggucagauguguuugcagggacaacuggaagggauccaaccggccgauuguggauaucaauaucaaagaccacagcauuguaucgucuuacguguguuccggccuggucggugacacgccccgcaagaacgauucaaguagcuccucucauugccuugacccuaauaacgaggaagggggacacggcgugaaaggcugggcuuuugaugacgggaaugauguuuggaugggacgaaccaucagcgagaagucaagauuggguuacgagacauucaaagugauugaaggcuggaguaacccaaaguccaaacugcagauaaauaggcaggucaucguggaccgggggaaccguacuggauauagcggcaucuuuucuguagaggguaagucauguauuaaucgcugcuucuacguugaacuaaucagagggaggaaggaggaaaccgaggugcucuggacaaguaacagcauugucguguucuguggcacuuccggaaccuauggcacagggucuuggcccgauggagccgacauaaaucugaugccuaucuga

SEQ ID NO: 149654 - RNA, 1410 nt, Artificial Sequence; identical to SEQ ID NO: 143932
  derived and/or modified CDS sequence (opt3) from neuraminidase__InfluenzaA__AEX36413

SEQ ID NO: 149655 - RNA, 1410 nt, Artificial Sequence
  derived and/or modified CDS sequence (opt3) from neuraminidase__InfluenzaA__AEX36424
augaaccccaaucagaagaucauuaccauaggcagcgugucccugacaaucucuacuauuugcuucuuuaugcaaaucgccauucucaucacgaccgucacacuucacuucaaacaguacgaguuuaacucaccuccaaauaaccagguuaugcugugugaaccgacuauaaucgagagaaauauuaccgaaaucguguauuugacaaacaccacuauugagaaggaaaucugcaguaaauuagcugaguacaggaauuggagcaagccccagugugacauaacaggguucgcaccuuuuuccaaagauaacucuauucggcugucggccggaggugacaucuggguaacccgcgagccauaugugucaugcgaucccgacaaguguuaccaauucgcgcuaggccaggggacgacucucaauaacguccauagcaaugauaccauucgagaccguacaccuuauagaacucugcuuaugaacgaacugggagugccauuucacuugggcaccaagcagguuugcaucgcuuggaguuccucuagcugucaugaugguaaagccuggcuccacgugugcaucacaggggacgauaagaaugcaaccgccuccuucauuuacaacggaaggcuggucgacucagugguaaguuggagcaaagagauacugcggacgcaggaaucugaguguguuugcaucaauggcacuuguacaguggucaugaccgauggcuccgcuucagggaaggcagacacuaaaauucucuuuaucgaggaaggaaagauagugcauacaagcaccuuaagugguucugcccaacacguggaggaaugcuccugcuauccccgcuacccuggcgucagauguguuugcagggauaacuggaaggggagcaaccggccaauuguggacaucaauaucaaagaccacucgauuguaucuuccuacguguguucaggacuggucggcgauacgccgcgcaagaacgacaguagcuccucuagccauugccuugaucccaauaacgaggaaggugggcacggagugaaaggcugggcuuucgacgauggcaaugacguuuggauggggcgaaccaucucagagaagaguagauugggauaugagacauuuaaagugauugaagguugguccaacccuaagagcaaacugcagauaaauaggcaggucaucguggaucggggcaaccguucuggguacucaggaauuuucaguguagagggcaagagcuguaucaaucgcugcuuuuauguugaacuaaucagagguaggaaggaggaaacugaggugcucuggaccuccaacucuauugucguguucugugggacaucgggcacuuacggaaccggcagcuggccagacggggccgauauaaaucugaugcccaucuga

SEQ ID NO: 149656 - RNA, 1410 nt, Artificial Sequence
  derived and/or modified CDS sequence (opt3) from neuraminidase__InfluenzaA__AEX36435
augaaccccaaucagaagaucauuaccauaggcagcgugucccugacaaucucuacuauuugcuucuuuaugcagaucgccauucucaucacgaccgucacacuucacuucaaacaguacgaguuuaacucaccuccaaauaaccagguuaugcugugugaaccgacuauaaucgagagaaauauuaccgaaaucguguauuugacaaacaccacuauugagaaggaaaucugccccaaauuagcugaguacaggaauuggaguaagccucagugugacauaacaggguucgcaccauuuagcaaagauaacuccauucggcugucugccggaggugacaucuggguaacccgcgagcccuaugugucgugcgauccugacaaguguuaccaauucgcgcuaggccaggggacgacucucaauaacguccauucaaaugauaccgugcgagaccguacaccauauagaacucugcuuaugaacgaacugggaguucccuuucacuugggcaccaaacaggugugcauugcuuggagcaguuccucuugucaugaugguaaggccuggcuccacgucugcaucacaggggacgauaagaaugcaaccgccagcuucaucuacaacggaaggcugguggacuccguaguuucauggaguaaagagauucugcggacgcaggaaagcgagugugugugcauaaauggcacuuguacagucgugaugaccgauggcucugcuuccgggaaggcagacacuaaaauccucuuuauuaaggagggaaagaucgugcauacaucaaccuuaagcgguagugcccaacacgucgaagagugcucuugcuauccucgcuacccaggcguuagaugugugugcagggauaacuggaaaggguccaaccggccgauaguagacauuaauaucaaggaccacagcaucgugucgucuuacgucuguuccggacuggugggcgauacgccccgcaaaaacgacucaaguagcuccucucauugccuugauccuaauaacgaagagggugggcacggaguuaagggcugggcuuucgacgauggcaaugacguguggauggggcgaaccauuagcgaaaaaucaagauugggauaugagacauuuaaggucaucgaggguuggaguaacuccaaaagcaagcugcagauuaauaggcaagugauaguagaucggggcaaccguucuggguacucaggaaucuucaguguugaaggcaagagcuguauuaaucgcugcuuuuauguggagcuaaucagagguaggaaagaagagacugaaguccucuggaccuccaacucuaucguggucuucugugggacaucgggcacuuacggaaccggcagcuggccagacggggccgauauuaaucugaugcccauauga

SEQ ID NO: 149657 - RNA, 1410 nt, Artificial Sequence; identical to SEQ ID NO: 144114
  derived and/or modified CDS sequence (opt3) from neuraminidase__InfluenzaA__AEX36446

SEQ ID NO: 149658 - RNA, 1410 nt, Artificial Sequence; identical to SEQ ID NO: 144114
  derived and/or modified CDS sequence (opt3) from neuraminidase__InfluenzaA__AEX36457

SEQ ID NO: 149659 - RNA, 1410 nt, Artificial Sequence
  derived and/or modified CDS sequence (opt3) from neuraminidase__InfluenzaA__AEX36468
augaaccccaaucagaagaucauuaccauaggcagcgugucccugacaaucucuacuauuugcuucuuuaugcagaucgccauucucaucacgaccgucacacuucacuucaaacaguacgaguuuucaaguccuccaaacaaucagguuaugcugugugaaccgacuauaaucgagagaaacauuaccgaaaucguguauuugacaaauaccacuauugagaaggaaaucugccccaaauuagcugaguacaggaacuggagcaagccucagugugacauaacaggguucgcaccauuuuccaaagauaauucuauucggcugucggccggaggugacaucuggguaacccgcgagcccuaugugucaugcgauccugacaaguguuaccaauucgcgcuaggccaggggacgacucucaacaauguccauagcaacgauaccgugcacaaucgaacaccauaucguacucugcuuaugaacgaacugggaguucccuuucauuugggcaccaaacaggugugcauugcuuggaguuccucuagcugucacgacgguaaggccuggcuccaugucugcgugacaggggaugacaagaaugcaaccgccuccuucaucuacaacggaagacugguagauucaaucguuaguuggagcaaagagauucugaggacgcaggaaucugagugugugugcauaaauggcacuuguacagucgugaugaccgacggcuccgcuucagggaaggcagauacuaaaauccucuuuauugaggaaggaaagaucgugcacacaagcaccuuaagugguaacgcccaacacgucgaggaaugcucuugcuauccucgguacccaggcguucgcugugugugcagagacaacuggaagggguccaauaggccgauaguagauauuaacaucaaagacuacagcaucgugucgcgguaugucuguucuggacuggugggcgacacgccccgcaagaaugauuccucaaguagcucccauugccuugacccuaacaaugaggaaggugggcacggaguuaaaggcugggcuuucgaugacggcaacgauguguggauggggcgaaccauuucugaaaagagcagaucaggauacgagacauuuaaagucaucgaggguuggaguaauccaaacuccaaguugcagauuaauaggcaagugauaguagaccggggcaaccguagcggguauucuggaaucuucucaguugagggcaaaaguuguauuaaucgcugcuuuuacguggaacugaucagagguaggaaggaggaaacuaagguccuauggaccagcaacuccaucguggucuucugugggacaucuggcacuuauggaaccggcucguggcccgauggggccgacauuaaucucaugccuauauga

SEQ ID NO: 149660 - RNA, 1410 nt, Artificial Sequence
  derived and/or modified CDS sequence (opt3) from neuraminidase__InfluenzaA__AEX36479
augaaccccaaucagaagaucauuaccauaggcagcgugucccugacaaucucuacuauuugcuucuuuaugcagaucgccauucucaucacgaccgucacacuucacuucaaacaguacgaguuuucaaguccuccaaacaaucagguuaugcugugugaaccgacuauaaucgagagaaacauuaccgaaaucguguaucccacaaauaccacuacagagaaggaaauuugcccuaaauuggcugaguacaggaacuggagcaagccacagugugacaucaccggguucgcacccuuuuccaaagauaauucuauacgguuaucggccggaggugacauuuggguaacgcgcgagccuuaugugucaugcgauccagacaaguguuaccaauucgcgcugggccaggggacuacccuaaacaauguccauagcaacgauacagugcacgaccgaacucccuaucguacccuccugaugaaugaacuuggaguuccuuuucaucugggcacaaaacaggugugcaucgcuuggaguuccucuagcugucacgaugguaaggccugguugcaugucugcgugaccggggacgauaagaacgcaacggccuccuucauuuacaauggaagacucguagacucaaucguuaguuggagcaaagagauccugaggacucaggaaucugagugugugugcauuaacggcacauguaccgucgugaugacugauggcuccgcuucagggaaggcagacacaaaaauacuguuuaucgaggaaggaaagauugugcacaccagcacgcucagugguucugcccaacacgucgaggaaugcuccugcuauccacgguacccgggcguucgcugugugugcagagauaauuggaaggggagcaacaggcccaucguagacauaaacauuaaagacuacucgaucgugucucgguaugucuguuccggauuagugggcgauaccccucgcaagaaugacucaaguagcuccucucauugccuggauccaaacaaugaggaaggugggcacggaguuaaaggcugggcuuucgacgauggcaacgacguguggauggggcgaacaaucagcgagaaacuuagaucaggauacgagacuuuuaaggucauugaagguuggaguaaucccaacuccaaguugcagaucaauaggcaagugauuguagaucggggcaaccguagcggguauucuggaauauucucaguugagggcaaaaguuguaucaaucgcugcuuuuacguggaacugauuagagguaggaaggaggaaaccgagguccuauggacaagcaacuccaucguggucuucugugggacuucuggcaccuauggaacaggcucguggccugacggggccgauaucaaucucaugccaauuuga

SEQ ID NO: 149661 - RNA, 1410 nt, Artificial Sequence
  derived and/or modified CDS sequence (opt3) from neuraminidase__InfluenzaA__AEX36490
augaaccccaaucagaagaucauuaccauaggcagcgugucccugacaaucucuacuauuugcuucuuuaugcagaucgccauucucaucacgaccgucacacuucacuucaaacaguacgaguuuucauauccuccaaacaaucagguuaugcugugugaaccgacuauaaucgagagaaacauuaccgaaaucguguacuugacaaauaccacuauugagaaggaaaucugccccaaauuagcugaguauaggaacuggaguaagccucagugugacauaacaggguucgcaccauuuagcaaagauaauuccauucggcugucugccggaggugacaucuggguaacccgcgagcccuacgugucgugcgauccugacaaguguuaucaauucgcgcuaggccaggggacgacucucaacaauguccauucaaacgauaccgugcacgaccgaacaccauaccguacucugcuuaugaaugaacugggaguucccuuucauuugggcaccaaacaggugugcauugcuuggagcaguuccucuugucacgaugguaaggccuggcuccaugucugcgugacaggggacgauaagaacgcaaccgccagcuucaucuauaauggaagacugguagacuccaucguuucauggaguaaagagauucugaggacgcaggaaagcgagugugugugcauaaacggcacuuguacagucgugaugaccgauggcucugcuuccgggaaggcagacacuaaaauccucuuuauugaggaaggaaagaucgugcacacaucaaccuuaagcgguaaugcccaacacgucgaggaaugcaguugcuacccucgguacccaggcguucgcugugugugcagagauaacuggaaggggucuaacaggccgauaguagacauuaauaucaaagacuauuccaucgugagccgguacgucuguucgggacuggugggcgauacgccccgcaagaacgacucuuccucaaguagccauugccuugauccuaauaacgaggaaggugggcacggaguuaaaggcugggcuuucgacgauggcaaugacguguggauggggcgaaccauuuccgagaagucuagaagcggauaugagacauuuaaagucaucgaagguuggucaaacccaaauaguaaguugcagauuaacaggcaagugauaguagaucggggcaaucguuccggguacagcggaaucuucucuguugagggcaaaucauguauuaaccgcugcuuuuauguggaacugaucagagguaggaaggaggaaacuaagguccuauggaccaguaauagcaucguggucuucugugggacauccggcacuuacggaaccggcucuuggcccgacggggccgauauuaaccucaugccuauauga

SEQ ID NO: 149662 - RNA, 1410 nt, Artificial Sequence
  derived and/or modified CDS sequence (opt3) from neuraminidase__InfluenzaA__AEX36501
augaaccccaaucagaagaucauuaccauaggcagcgugucccugacaaucucuacuauuugcuucuuuaugcaaaucgccauucucaucacgaccgucacacuucacuucaaacaguacgaguuuucaaguccuccaaacaaucagguuaugcugugugaaccggcuauaaucgagagaaacauuacugaaaucguguauuugaccaauacaaccauugagaaggaaaaaugccccaaguuagcagaguacaggaacuggagcaaaccucagugugacaucacuggguucgccccauuuuccaaggauaauucuauacggcugucggcgggaggugacauuuggguaacacgcgagcccuaugugucaugcgauccugacaaguguuaccaauucgcucuaggccaggggaccacgcucaacaauguccauagcaacgauacugugcacggacgaaccccauaucguacacugcuuaugaaugaacugggcguucccuuucauuuggguacuaaacaggugugcaucgccuggaguuccucuagcugucacgacgggaaggcauggcuccaugucugcgugaccggagaugacaaaaacgccacagcuuccuucauuuacaauggcagacugguagauucaaucguuaguuggagcaaggagauccugaggacccaggaaucugagugugugugcauuaacggcacguguacugucgugaugacagacggguccgcaucaggaaaagccgauaccaagauacucuuuaucgaggaagguaagauugugcacacuagcacauuaaguggcucugcucaacacgucgaggaaugcuccugcuauccucgguacccagggguucgcugugugugcagagacaauuggaaaggaagcaacaggccgaucguagauauaaacauuaaggacuacucgaucgugucucgguaugucuguuccggccuggugggugacacccccaggaaaucagauaguagcuccucuagccauugccuugacccuaauaacgaggaagggggacacggcguuaagggcugggccuucgaugacgggaaugauguguggaugggacgaacgaucucagagaaaaguagauccgguuacgagaccuuuaaggucauugaaggcuggagcaacccaaauucuaaauugcagaucaaccgccaggugauuguagaccgggggaaucguucaggauauaguggcauauucagcguugaggguaaguccuguaucaaccgcugcuuuuacguggaacugauuagagggaggaaggaggaaacagagguccuauggacuucuaauucgaucguggucuucuguggcaccagcggaacauauggcacuggguccuggcccgauggagcggacaucaaccucaugccuauuuga

SEQ ID NO: 149663 - RNA, 1410 nt, Artificial Sequence
  derived and/or modified CDS sequence (opt3) from neuraminidase__InfluenzaA__AEX36512
augaaccccaaucagaagaucauuaccauaggcagcgugucccugacaaucucuacuauuugcuucuuuaugcaaaucgccauucucaucacgaccgucacacuucacuucaaacaguacgaguuuucaaguccuccaaacaaucagguuaugcugugugaaccggcuauaaucgagagaaacauuacugaaaucguguauuugaccaauacaaccauugagaaggaaaucugccccaaauuagcagaguacaggaacuggagcaagccucagugugacauaacuggguucgccccauuuuccaaagauaauucuauucggcugucggcgggaggugacaucuggguaacacgcgagcccuaugugucaugcgauccugacaaguguuaccaauucgcucuaggccaggggaccacgcucaacaauguccauagcaacgauacugugcacgaccgaaccccauaucguacacugcuuaugaaugaacugggaguucccuuucauuugggcacuaaacaggugugcauugccuggaguuccucuagcugucacgaugguaaggcauggcuccaugucugcgugaccggggacgauaagaacgccacagcuuccuucaucuacaauggaagacugguagacucaaucguuaguuggagcaaagagauucugaggacccaggaaucugagugugugugcauaaacggcacguguacugucgugaugacagauggcuccgcaucagggaaggccgacaccaaaauccucuuuauugaggaaggaaagaucgugcacacuagcacauuaagugguucugcucaacacgucgaggaaugcuccugcuauccucgguacccaggcguucgcugugugugcagagauaauuggaaggggagcaacaggccgauaguagacauuaacaucaaagacuacucgaucgugucucgguaugucuguuccggacuggugggcgauacccccaggaagaaugacucaaguagcuccucucauugccuugauccuaacaaugaggaaggugggcacggaguuaaaggcugggccuucgacgauggcaacgacguguggauggggcgaacgauuagcgagaagucaagaaguggauacgagaccuuuaaagucaucgaagguugguccaauccaaacagcaaguugcagauuaaucgccaggugauaguagaucggggcaaccguucuggguauucaggaaucuucaguguugagggcaaaagcuguauuaaucgcugcuuuuacguggaacugaucagagguaggaaggaggaaacagagguccuauggacuuccaacucuaucguggucuucugugggaccucgggcacauauggaacuggcagcuggcccgacggggcggauauuaaucucaugccuauauga

SEQ ID NO: 149664 - RNA, 1410 nt, Artificial Sequence
  derived and/or modified CDS sequence (opt3) from neuraminidase__InfluenzaA__AEX36523
augaaccccaaucagaagaucauuaccauaggcagcgugucccugacaaucucuacuauuugcuucuuuaugcagaucgccauucucaucacgaccgucacacuucacuucaaacaguacgaguuuaacucaccuccaaauaaccagguuaugcugugugaaccgacuauaaucgagagaaauauuaccgaaaucguguauuugacaaacaccacuauugagaaggaaaucugccccaaauuagcugaguacaggaauuggaguaagccucagugugacauaacaggguucgcaccauuuagcaaagauaacuccauucggcugucugccggaggugacaucuggguaacccgcgagcccuaugugucgugcgauccugacaaguguuaccaauucgcgcuaggccaggggacgacucucaauaacguccauucaaaugauaccgugcgagaccguacaccauauagaacucugcuuaugaacgaacugggaguucccuuucacuugggcaccaaacaggugugcauugcuuggagcaguuccucuugucaugaugguaaggccuggcuccacgucugcaucacaggggacgauaagaaugcaaccgccagcuucaucuacaacggaaggcugguggacuccguaguuucauggaguaaagagauucugcggacgcaggaaagcgagugugugugcauaaauggcacuuguacagucgugaugaccgauggcucugcuuccggggaggcagacacuaagauccucuuuauugaagagggaaaaaucgugcauacaucaaccuuaagcgguagugcccaacacgucgaagagugcucuugcuauccucgcuacccaggcguuagaugugugugcagggauaacuggaagggguccaaccggccgauaguagacauuaauaucaaggaccacagcaucgugucgucuuacgucuguuccggacuggugggcgauacgccccgcaaaaacgacucaaguagcuccucucauugccuugauccuaauaacgaagagggugggcacggaguuaagggcugggcuuucgacgauggcaaugacguguggauggggcgaaccauuagcgagaaaucaagauugggauaugaaacauuuaaggucaucgaggguuggaguaacccaaaauccaagcugcagauuaauaggcaagugauaguagaucggggcaaccguagcggguacucuggaaucuucucaguugaaggcaaaaguuguauuaaucgcugcuuuuauguggagcuaaucagagguaggaaggaagagacugagguccucuggaccagcaacuccaucguggucuucugugggacaucuggcacuuacggaaccggcucguggcccgacggggccgauauuaaucugaugccuauauga

SEQ ID NO: 149665 - RNA, 1410 nt, Artificial Sequence; identical to SEQ ID NO: 144647
  derived and/or modified CDS sequence (opt3) from neuraminidase__InfluenzaA__AEX36534

SEQ ID NO: 149666 - RNA, 1410 nt, Artificial Sequence
  derived and/or modified CDS sequence (opt3) from neuraminidase__InfluenzaA__AEX36545
augaaccccaaucagaagaucauuaccauaggcagcgugucccugacaaucucuacuauuugcuucuuuaugcagaucgccauucucaucacgaccgucacacuucacuucaaacaguacgaguuuaacucaccuccaaauaaccagguuaugcugugugaaccgacuauaaucgagagaaauauuaccgaaaucguguauuugacaaacaccacuauugagaaggaaaucugccccaaauuagcugaguacaggaauuggaguaagccucagugugacauaacaggguucgcaccauuuagcaaagauaacuccauucggcugucugccggaggugacaucuggguaacccgcgagcccuaugugucgugcgauccugacaaguguuaccaauucgcgcuaggccaggggacgacucucaauaacguccauucaaaugauaccgugcgagaccguacaccauauagaacucugcuuaugaacgaacugggaguucccuuucacuugggcaccaaacaggugugcauugcuuggagcaguuccucuugucaugaugguaaggccuggcuccacgucugcaucacaggggacgauaagaaugcaaccgccagcuucaucuacaacggaaggcugguggacuccguaguuucauggaguaaagagauucugcggacgcaggaaagcgagugugugugcauaaauggcacuuguacagucgugaugaccgauggcucugcucucgggaaggcagacacuaaaaucuuauuuauugaggaaggaaagaucgugcauacauccacccugucagguagcgcccaacacgucgaggaaugcaguugcuauccucgcuacccaggcguuagaugugugugcagggauaacuggaaggggucuaaccggccgauaguagacauuaauaucaaagaccacuccaucgugagcucguacgucuguucuggacuugugggcgauacgccccgcaagaacgacuccucaaguagcucccauugcuuggauccuaauaacgaggaaggugggcacggaguuaaaggcugggcuuucgacgauggcaaugacguguggauggggcgaaccauuucugaaaagagcagacugggauaugagacauuuaaagucaucgaggguuggucaaacccaaagaguaaacuacagauuaauaggcaagugauaguagaucggggcaaccguuccggguacagcggaaucuucucuguugagggcaagucauguauuaaucgcugcuuuuauguggaacucaucagagguaggaaggaggaaacugagguccuguggaccaguaacagcaucguggucuucugugggacauccggcacuuacggaaccggcucuuggcccgacggggccgauauuaaucuuaugccuauauga

SEQ ID NO: 149667 - RNA, 1410 nt, Artificial Sequence; identical to SEQ ID NO: 144560
  derived and/or modified CDS sequence (opt3) from neuraminidase__InfluenzaA__AEX36556

SEQ ID NO: 149668 - RNA, 1410 nt, Artificial Sequence; identical to SEQ ID NO: 144560
  derived and/or modified CDS sequence (opt3) from neuraminidase__InfluenzaA__AEX36567

SEQ ID NO: 149669 - RNA, 1410 nt, Artificial Sequence
  derived and/or modified CDS sequence (opt3) from neuraminidase__InfluenzaA__AEX36578
augaaccccaaucagaagaucauuaccauaggcagcgugucccugacaaucucuacuauuugcuucuuuaugcagaucgccauucucaucacgaccgucacacuucacuucaaacaguacgaguuuaacucaccuccaaauaaccagguuaugcugugugaaccgacuauaaucgagagaaauauuaccgaaaucguguauuugacaaacaccacuauugagaaggaaaucugccccaaauuagcugaguacaggaauuggaguaagccucagugugacauaacaggguucgcaccauuuagcaaagauaacuccauucggcugucugccggaggugacaucuggguaacccgcgagcccuaugugucgugcgauccugacaaguguuaccaauucgcgcuaggccaggggacgacucucaauaacguccauucaaaugauaccgugcgagaccguacaccauauagaacucugcuuaugaacgaacugggaguucccuuucacuugggcaccaaacaggugugcauugcuuggagcaguuccucuugucaugaugguaaggccuggcuccacgucugcaucacaggggacgauaagaaugcaaccgccagcuucaucuacaacggaaggcugguggacuccguaguuucauggaguaaagagauucugcggacgcaggaaagcgagugugugugcauaaauggcacuuguacagucgugaugaccgauggcucugcuuccgggaaggcagacacuaaaauccucuuuauuaaggagggaaagaucgugcauacaucaaccuuaagcgguagugcccaacacgucgaagagugcucuugcuauccucgcuacccaggcguuagaugugugugcagggauaacuggaaaggguccaaccggccgauaguagacauuaauaucaaggaccacagcaucgugucgucuuacgucuguuccggacuggugggcgauacgccccgcaaaaacgacucaaguagcuccucucauugccuugauccuaauaacgaagagggugggcacggaguuaagggcugggcuuucgacgauggcaaugacguguggauggggcgaaccauuagcgaaaaaucaagauugggauaugagacauuuaaggucaucgaggguuggaguaacccaaaauccaagcugcagauuaauaggcaagugauaguagaucggggcaaccguagcggguacucuggaaucuucucaguugaaggcaagaguuguauuaaucgcugcuuuuauguggagcuaaucagagguaggaaagaagagacugaaguccucuggaccagcaacuccaucguggucuucugugggacaucuggcacuuacggaaccggcucguggcccgacggggccgauauuaaucugaugccuauauga

SEQ ID NO: 149670 - RNA, 1410 nt, Artificial Sequence; identical to SEQ ID NO: 149669
  derived and/or modified CDS sequence (opt3) from neuraminidase__InfluenzaA__AEX36589

SEQ ID NO: 149671 - RNA, 1410 nt, Artificial Sequence
  derived and/or modified CDS sequence (opt3) from neuraminidase__InfluenzaA__AEX36600
augaaccccaaucagaagaucauuaccauaggcagcgugucccugacaaucucuacuauuugcuucuuuaugcagaucgccauucucaucacgaccgucacacuucacuucaaacaguacgaguuuaacucaccuccaaauaaccagguuaugcugugugaaccgacuauaaucgagagaaauauuaccgaaaucguguauuugacaaacaccacuauugagaaggaaaucugccccaaauuagcugaguacaggaauuggaguaagccucagugugacauaacaggguucgcaccauuuagcaaagauaacuccauucggcugucugccggaggugacaucuggguaacccgcgagcccuaugugucgugcgauccugacaaguguuaccaauucgcgcuaggccaggggacgacucucaauaacguccauucaaaugauaccgugcgagaccguacaccauauagaacucugcuuaugaacgaacugggaguucccuuucacuugggcaccaaacaggugugcauugcuuggagcaguuccucuugucaugaugguaaggccuggcuccacgucugcaucacaggggacgauaagaaugcaaccgccagcuucaucuacaacggaaggcugguggacuccguaguuucauggaguaaagagauucugcggacgcaggaaagcgagugugugugcauaaauggcacuuguacagucgugaugaccgauggcucugcuuccgggaaggcagacacuaaaauccucuuuauuaaggagggaaagaucgugcauacaucaaccuuaagcgguagugcccaacacgucgaagagugcucuugcuauccucgcuacccaggcguuagaugugugugcagggauaacuggaaaggguccaaccggccgauaguagacauuaauaucaaggaccacagcaucgugucgucuuacgucuguuccggacuggugggcgauacgccccgcaaaaacgacucaaguagcuccucucauugccuugauccuaauaacgaagagggugggcacggaguuaagggcugggcuuucgacgauggcaauaacguguggauggggcgaaccauuagcgaaaaaucaagauugggauaugagacauuuaaggucaucgaggguuggaguaauccaaaauccaagcugcagauuaacaggcaagugauaguagaccggggcaaucguagcggguacucuggaaucuucucaguugaaggcaagaguuguauuaaccgcugcuuuuauguggagcuaaucagagguaggaaagaagagacugaaguccucuggaccagcaauuccaucguggucuucugugggacaucuggcacuuacggaaccggcucguggcccgauggggccgacauuaaccugaugccuauauga

SEQ ID NO: 149672 - RNA, 1410 nt, Artificial Sequence; identical to SEQ ID NO: 142762
  derived and/or modified CDS sequence (opt3) from neuraminidase__InfluenzaA__AEX36622

SEQ ID NO: 149673 - RNA, 1410 nt, Artificial Sequence
  derived and/or modified CDS sequence (opt3) from neuraminidase__InfluenzaA__AEX63619
augaaccccaaucagaagaucauuaccauaggcagcaucugcaugacaauugggaucgccucccugauucuccaaaucggaaacauaaucucuauuuggaucucacacaguauucagacugagaaucagaaccagccugaaaucuguaaucaaaacgugauaacguacgagaauaacaccugggucaaucagacauauguuaacgugagcaauacuaacuucguagcugaacaggcaguggccuccgucaaacuugcggguaauucuucgcugugcccagugucaggcugggcuauuuacagcaaggacaacaguguuagaaucggguccaaaggagauguguuugucauuagggagccguucaucucuuguagccauuccgaaugccggaccuuuuucuugacacagggcgccuuacugaaugacaagcacucaaacgguaccaucaaagaucgcagucccuaucgaacucuaaugagcuguccuauuggggaggugccaucucccuacaacucccguuuugagucaguagcauggagcgccagugcuugccaugacggaacaucuuggcucaccauaggcaucuccggcccugauaauggggcaguugccgugcugaaguauaacggaauuaucacggacacuauaaagagcuggaggaaaaauauucuuagaacccaagaaucggagugugcuugcgucaacgguucuuguuucacagugaugacugauggcccauccaaugggcaggccucauacaagguguuuaaaaucgaacggggaaaggucguuaaaaguguggagcugaacgcgcccaauuaucacuacgaggaaugcagcuguuacccugaguccucugaaauuaccugcguaugccgcgacaacuggcauggcagcaauagaccaugggugucauucaaccagaauuuggaguaucagauggguuacaucuguagugggaucuuuggagauaacccgaggcccaaugacaagacaggcuccugcggcccugucuucagcaacggggcaaauggagugaaggguuuuucuuucaaauauggcaacgggguuuggauuggacggaccaagucaacgaguagccgcaugggcuuugaaaugauaugggauccagacgguuggacuaaaacagaugacaaguucuccgugaaacaagacaucauugggaucaccgauuggucuggcuacucgggcagcuucguccagcaccccgagcucacuggacuggacuguaugcgaccuugcuuuuggguggagcugaucagagggaggccaaaggaaaacacaauuuggaccuccggaucaaguauaucuuucugugguguaaauagcgauacgguuggcugguccuggcccgacggggccgagcucccguuuaccaucgauaaauga

SEQ ID NO: 149674 - RNA, 1365 nt, Artificial Sequence; identical to SEQ ID NO: 143767
  derived and/or modified CDS sequence (opt3) from neuraminidase__InfluenzaA__AEX92876

SEQ ID NO: 149675 - RNA, 1365 nt, Artificial Sequence; identical to SEQ ID NO: 143767
  derived and/or modified CDS sequence (opt3) from neuraminidase__InfluenzaA__AEX92887

SEQ ID NO: 149676 - RNA, 1365 nt, Artificial Sequence; identical to SEQ ID NO: 143767
  derived and/or modified CDS sequence (opt3) from neuraminidase__InfluenzaA__AEX92904

SEQ ID NO: 149677 - RNA, 1365 nt, Artificial Sequence; identical to SEQ ID NO: 143767
  derived and/or modified CDS sequence (opt3) from neuraminidase__InfluenzaA__AEX96924

SEQ ID NO: 149678 - RNA, 1410 nt, Artificial Sequence; identical to SEQ ID NO: 146517
  derived and/or modified CDS sequence (opt3) from neuraminidase__InfluenzaA__AEY69091

SEQ ID NO: 149679 - RNA, 1410 nt, Artificial Sequence; identical to SEQ ID NO: 144647
  derived and/or modified CDS sequence (opt3) from neuraminidase__InfluenzaA__AEY69101

SEQ ID NO: 149680 - RNA, 1410 nt, Artificial Sequence; identical to SEQ ID NO: 144647
  derived and/or modified CDS sequence (opt3) from neuraminidase__InfluenzaA__AEY69112

SEQ ID NO: 149681 - RNA, 1410 nt, Artificial Sequence
  derived and/or modified CDS sequence (opt3) from neuraminidase__InfluenzaA__AEY69145
augaacaccaaucagaagaucauuacaauaggcagcgugucccugacuaucucuacgauuugcuucuuuaugcagaucgccauucucaucaccacagucacucuucacuucaaacaguacgaguuuaacucacccccuaauaaccagguuaugcugugugaaccaaccauaaucgagagaaauauuacagaaaucguguauuugaccaacacuacaauugagaaggaaaucugcccgaaauuagcugaguacaggaauuggaguaagccccagugugacauaaccggguucgcaccuuuuagcaaagauaacuccauucggcugucugccggaggugacaucuggguaacgcgcgagccauaugugucgugcgaucccgacaaguguuaccaauucgcgcuaggccaggggacuaccauuaauaacguccauucaaauaacacagugcgagaucguacuccuuauagaacccuccugaugaaugaacuuggaguuccauuucaccugggcacaaaacaggugugcaucgcuuggagcaguuccucuugucaugacgguaaggccugguugcacgucugcaucaccggggaugacaagaacgcaacggccagcuucauuuacaauggaaggcucguggauuccguaguuucauggaguaaagagauacugcggacucaggaaagcgagugugugugcaucaacggcacauguaccgucgugaugacugacggcucugcuuccgggaaggcagauacaaaaauucuguuuaucgaggaaggaaagauagugcauaccucaacgcucagcgguagugcccaacacgucgaggaaugcucuugcuauccccgcuacccuggcguuagaugugugugcagggacaacuggaagggguccaaucggccaauuguagauaucaacaugaaagaccacagcaucgugucgucuuacgucuguuccggauuagugggcgacaccccgcgcaagaaugauucaaguagcuccucucauugccuggaccccaacaaugaggaaggugggcacggaguuaaaggcugggcuuucgaugacggcaacgauguguggauggggcgaacaauuagcgagaagucaagacuuggauaugagacuuuuaaagucaucgaagguuggaguaauccuaaguccaaauugcagauuaacaggcaagugauaguagaccggggcaaucguagcggguacucuggaaucuucucaguugagggcaagaguuguauuaaccgcugcuuuuauguggaacugaucagagguaggaaggaggaaaccgagguccuauggacaagcaauuccguggucguguucugugggacuucuggcaccuacggaacaggcucguggccagauggggccgacaucaaccucaugcccauuuga

SEQ ID NO: 149682 - RNA, 1410 nt, Artificial Sequence; identical to SEQ ID NO: 144647
  derived and/or modified CDS sequence (opt3) from neuraminidase__InfluenzaA__AEY69156

SEQ ID NO: 149683 - RNA, 1410 nt, Artificial Sequence
  derived and/or modified CDS sequence (opt3) from neuraminidase__InfluenzaA__AEY69167
augaaccccaaucagaagaucauuaccauaggcagcgugucccugacaaucucuacuauuugcuucuuuaugcagaucgccauucucaucacgaccgucacacuucacuucaaacaguacgaguuuaacucaccuccaaauaaccagguuaugcugugugaaccgacuauaaucgagagaaauauuaccgaaaucguguauuugacaaacaccacuauugagaaggaaaucugccccaaauuagcugaguacaggaauuggaguaagccucagugugacauaacaggguucgcaccauuuagcaaagauaacuccauucggcugucugccggaggugacaucuggguaacccgcgagcccuaugugucgugcgauccugacaaguguuaccaauucgcgcuaggccaggggacgacucucaauaacguccauucaaauaacaccgugcgagaucguacaccauauagaacucugcuuaugaaugaacugggaguucccuuucacuugggcaccaaacaggugugcauugcuuggagcaguuccucuugucaugacgguaaggccuggcuccacgucugcaucacaggggaugacaagaacgcaaccgccagcuucaucuacaauggaaggcugguggauuccguaguuucauggaguaaagagauucugcggacgcaggaaagcgagugugugugcauaaacggcacuuguacagucgugaugaccgacggcucugcuuccgggaaggcagauacuaaaauccucuuuauugaggaaggaaagaucgugcauacaucaaccuuaagcgguagugcccaacacgucgaggaaugcucuugcuauccucgcuacccaggcguuagaugugugugcagggacaacuggaagggguccaaucggccgauaguagauauuaacaucaaagaccacagcaucgugucgucuuacgucuguuccggacuggugggcgacacgccccgcaagaaugauucaaguagcuccucucauugccuugacccuaacaaugaggaaggugggcacggaguuaaaggcugggcuuucgaugacggcaacgauguguggauggggcgaaccauuagcgagaagucaagauugggauaugagacauuuaaagucaucgaagguuggaguaauccaaaguccaaacugcagauuaacaggcaagugauaguagaccggggcaaucguagcggguacucuggaaucuucucaguugagggcaagaguuguauuaaccgcugcuuuuauguggaacuaaucagagguaggaaggaggaaacugagguccucuggaccagcaauuccaucguggucuucugugggacaucuggcacuuacggaaccggcucguggcccgauggggccgacauuaaccugaugccuguguga

SEQ ID NO: 149684 - RNA, 1410 nt, Artificial Sequence; identical to SEQ ID NO: 149683
  derived and/or modified CDS sequence (opt3) from neuraminidase__InfluenzaA__AEY69178

SEQ ID NO: 149685 - RNA, 1410 nt, Artificial Sequence; identical to SEQ ID NO: 149683
  derived and/or modified CDS sequence (opt3) from neuraminidase__InfluenzaA__AEY69189

SEQ ID NO: 149686 - RNA, 1410 nt, Artificial Sequence
  derived and/or modified CDS sequence (opt3) from neuraminidase__InfluenzaA__AEY69211
augaaccccaaucagaagaucauuaccauaggcagcgugucccugacaaucucuacuauuugcuucuuuaugcagaucgccauucucaucacgaccgucacacuucacuucaaacaguacaaguuuaacucaccuccaaauaaccagguuaugcugugugagccgacuauaaucgaaagaaauauuaccgagaucguguauuugacaaacaccacuauugaaaaagagaucugccccaaguuagcugaauacaggaauuggaguaaaccucagugugacauaacaggguucgcaccauuuagcaaggauaacuccauucggcugucugccggaggugacaucuggguaacccgcgagcccuaugugucgugcgauccugacaaguguuaccaauucgcgcuaggccaggggacgacucucaauaacguccauucaaauaacaccgugcgagaucguacaccauauagaacucugcuuaugaaugagcugggaguucccuuucacuugggcaccaaacaggugugcauugcuuggagcaguuccucuugucaugacgguaaggccuggcuccacgucugcaucacaggggaugacaaaaacgcaaccgccagcuucaucuacaauggaaggcugguggauuccguaguuucauggaguaaggaaauucugcggacgcaggagagcgaaugugugugcauaaacggcacuuguacagucgugaugaccgacggcucugcuuccgggaaagcagauacuaagauccucuuuauugaggagggaaagaucgugcauacaucaaccuuaagcgguagugcccaacacgucgaagagugcucuugcuauccucgcuacccaggcguuagaugugugugcagggacaacuggaaaggguccaaucggccgauaguagauauuaacaucaaggaccacagcaucgugucgucuuacgucuguuccggacuggugggcgacacgccccgcaaaaaugauucaaguagcuccucucauugccuugacccuaacaaugaagagggugggcacggaguuaagggcugggcuuucgaugacggcaacgauguguggauggggcgaaccauuagcgaaaaaucaagauugggauaugagacauuuaaggucaucgaggguuggaguaauccaaaauccaagcugcagauuaacaggcaagugauaguagaccggggcaaucguagcggguacucuggaaucuucucaguugaaggcaagaguuguauuaaccgcugcuuuuauguggagcuaaucagagguaggaaagaagagacugaaguccucuggaccagcaauuccaucguggucuucugugggacaucuggcacuuacggaaccggcucguggcccgauggggccgacauuaaccugaugccuguguga

SEQ ID NO: 149687 - RNA, 1410 nt, Artificial Sequence; identical to SEQ ID NO: 149683
  derived and/or modified CDS sequence (opt3) from neuraminidase__InfluenzaA__AEY69233

SEQ ID NO: 149688 - RNA, 1410 nt, Artificial Sequence; identical to SEQ ID NO: 149683
  derived and/or modified CDS sequence (opt3) from neuraminidase__InfluenzaA__AEY69272

SEQ ID NO: 149689 - RNA, 1410 nt, Artificial Sequence; identical to SEQ ID NO: 149683
  derived and/or modified CDS sequence (opt3) from neuraminidase__InfluenzaA__AEY69283

SEQ ID NO: 149690 - RNA, 1410 nt, Artificial Sequence
  derived and/or modified CDS sequence (opt3) from neuraminidase__InfluenzaA__AEY69294
augaaccccaaucagaagaucauuaccauaggcagcgugucccugacaaucucuacuauuugcuucuuuaugcaaacggccauccucauuaccacagucacucuucacuucaaacagugugaguuuaacucaccuccaaauaaccagguuaugcugugcgaaccgaccaucauagagagaaauaucacagaaauuguguacuugaccaacacuacaaucgagaaggaaauuugucccaaauuagcugaguauaggaauuggaguaagccucagugcgacaucaccggguucgcaccauuuagcaaagauaacuccauacggcugucugccggaggugacauuuggguaacgcgcgagcccuacgugucgugugauccugacaagugcuaucaauucgcgcuaggccaggggacuacccucaauaacguccauucaaauaacacagugcgagaucguacuccauacagaacccugcuuaugaaugaacugggaguucccuuucacuugggcacaaaacagguguguaucgcuuggagcaguuccucuugccaugacgguaaggccuggcuccacgucuguauuaccggggaugacaagaacgcaacggccagcuucaucuauaauggaaggcugguggauuccguaguuucauggaguaaagagauccugcggacucaggaaagcgagugcguguguauuaacggcacaugcaccgucgugaugacugacggcucugcuuccgggaaggcagauacaaaaauacucuuuaucgaggaaggaaagauugugcauaccucaacguuaagcgguagugcccaacacgucgaggaaugcucuuguuacccucgcuauccaggcguuagaugcguguguagggacaacuggaagggguccaaucggccgaucguagauauaaacauuaaagaccacagcaucgugucgucuuacgucugcuccggacuggugggcgacacccccaggaagaaugauucaaguagcuccucucauugucuugacccuaacaaugaggaaggugggaacggaguuaaaggcugggcuuucgaugacggcaaugauguguggauggggcgaacaaucagcgagaagucaagauugggauacgagacuuuuaaagucauugaagguuggaguaacccaaaguccaaacugcagaucaaucgccaggugauuguagaccggggcaaccguagcggguauucuggaauauucucaguugagggcaagaguugcaucaaucgcuguuuuuacguggaacuaauuagagguaggaaggaggaaaccgagguccucuggacaagcaacuccaucguggucuucugcgggacuucuggcaccuauggaacaggcucguggcccgauggggccgacaucaaucugaugccuauuuga

SEQ ID NO: 149691 - RNA, 1410 nt, Artificial Sequence; identical to SEQ ID NO: 149690
  derived and/or modified CDS sequence (opt3) from neuraminidase__InfluenzaA__AEY69305

SEQ ID NO: 149692 - RNA, 1410 nt, Artificial Sequence; identical to SEQ ID NO: 149690
  derived and/or modified CDS sequence (opt3) from neuraminidase__InfluenzaA__AEY69316

SEQ ID NO: 149693 - RNA, 1410 nt, Artificial Sequence; identical to SEQ ID NO: 149690
  derived and/or modified CDS sequence (opt3) from neuraminidase__InfluenzaA__AEY69788

SEQ ID NO: 149694 - RNA, 1410 nt, Artificial Sequence; identical to SEQ ID NO: 144647
  derived and/or modified CDS sequence (opt3) from neuraminidase__InfluenzaA__AEY69799

SEQ ID NO: 149695 - RNA, 1410 nt, Artificial Sequence; identical to SEQ ID NO: 144647
  derived and/or modified CDS sequence (opt3) from neuraminidase__InfluenzaA__AEY69810

SEQ ID NO: 149696 - RNA, 1410 nt, Artificial Sequence; identical to SEQ ID NO: 149683
  derived and/or modified CDS sequence (opt3) from neuraminidase__InfluenzaA__AEY69832

SEQ ID NO: 149697 - RNA, 1410 nt, Artificial Sequence
  derived and/or modified CDS sequence (opt3) from neuraminidase__InfluenzaA__AEY69843
augaaccccaaucagaagaucauuaccauaggcagcgugucccugacaaucucuacuauuugcuucuuuaugcaaaucgccauucucaucacgaccgucacacuucacuucaaacaguacgaguuuaacucaccuccaaauaaccagguuaugcugugugaaccgacuauaaucgagagaaauauuaccgaaaucguguauuugacaaacaccacuauugagaaggaaaucugccccaaauuagcugaguacaggaauuggaguaagccucagugugacauaacaggguucgcaccauuuagcaaagauaacuccauucggcugucugccggaggugacaucuggguaacccgcgagcccuaugugucgugcgauccugacaaguguuaccaauucgcgcuaggccaggggacgacucucaauaacguccauucaaauaacaccgugcgagaucguacaccauauagaacucugcuuaugaaugaacugggaguucccuuucacuugggcaccaaacaggugugcauugcuuggagcaguuccucuugucaugacgguaaggccuggcuccacgucugcaucgcaggggaugacaagaacgccacagcuagcuucaucuacaauggaaggcugguggauuccguaguuucauggaguaaagagauucugcggacccaggaaagcgagugugugugcauaaacggcacguguacugucgugaugacagacggcucugcauccgggaaggccgauaccaaaauccucuuuauugaggaaggaaagaucgugcauacuucaacauuaagcgguagugcucaacacgucgaggaaugcucuugcuauccucgcuacccaggcguuagaugugugugcagggacaacuggaagggguccaaucggccgauaguagauauuaacaucaaagaccacagcaucgugucgucuuacgucuguuccggacuggugggcgacacccccaggaagaaugauucaaguagcuccucucauugccuugacccuaacaaugaggaaggugggcacggaguuaaaggcugggccuucgaugacggcaacgauguguggauggggcgaacgauuagcgagaagucaagauugggauaugagaccuuuaaagucaucgaagguuggaguaauccaaaguccaaacugcagauuaaccgccaggugauaguagaccggggcaaucguagcggguacucuggaaucuucucaguugagggcaagaguuguauuaaccgcugcuuuuauguggaacuaaucagagguaggaaggaggaaacagagguccucuggacuagcaauuccaucguggucuucugugggaccucuggcacauacggaacuggcucguggcccgauggggcggacauuaaccugaugccuguguga

SEQ ID NO: 149698 - RNA, 1410 nt, Artificial Sequence; identical to SEQ ID NO: 149683
  derived and/or modified CDS sequence (opt3) from neuraminidase__InfluenzaA__AEY69854

SEQ ID NO: 149699 - RNA, 1410 nt, Artificial Sequence; identical to SEQ ID NO: 149683
  derived and/or modified CDS sequence (opt3) from neuraminidase__InfluenzaA__AEY69876

SEQ ID NO: 149700 - RNA, 1410 nt, Artificial Sequence; identical to SEQ ID NO: 149683
  derived and/or modified CDS sequence (opt3) from neuraminidase__InfluenzaA__AEY69887

SEQ ID NO: 149701 - RNA, 1410 nt, Artificial Sequence; identical to SEQ ID NO: 149683
  derived and/or modified CDS sequence (opt3) from neuraminidase__InfluenzaA__AEY69898

SEQ ID NO: 149702 - RNA, 1410 nt, Artificial Sequence; identical to SEQ ID NO: 144647
  derived and/or modified CDS sequence (opt3) from neuraminidase__InfluenzaA__AEY69909

SEQ ID NO: 149703 - RNA, 1410 nt, Artificial Sequence
  derived and/or modified CDS sequence (opt3) from neuraminidase__InfluenzaA__AEY69942
augaaccccaaucagaagaucauuaccauaggcagcgugucccugacaaucucuacuauuugcuucuuuaugcaaaucgccauucucaucacgaccgucacacuucacuucaaacaguacgaguuuaacucaccuccaaauaaccagguuaugcugugugaaccgacuauaaucgagagaaauauuaccgaaaucguguauuugacaaacaccacuauugagaaggaaaucugccccaaauuagcugaguacaggaauuggaguaagccucagugugacauaacaggguucgcaccauuuagcaaagauaacuccauucggcugucugacggaggugauaucuggguaacccgcgagcccuaugugucgugcgacccugauaaguguuaccaauucgcccuaggccaggggacgacucucaauaacauucauucaaauaacaccguccgagaccguacaccauauagaacucugcuuaugaaugaacugggagugcccuuucacuugggcaccaagcagguuugcaucgcguggagcaguuccucuugucaugaugguaaagcauggcuccacgugugcaucacaggggacgauaagaacgccaccgcuagcuucauuuacaauggaaggcuggucgacuccgugguaucauggaguaaagagauacugcggacgcaggaaagcgaguguguuugcaucaacggcacuuguacaguggucaugaccgauggcucugccuccgggaaggcugacacuaaaauucucuuuaucgaggaaggaaagauagugcauacaucaaccuuaagcgguagugcacaacacguggaggaaugcucuugcuauccucgcuacccaggcgucagauguguuugcagggauaacuggaagggguccaaucggccgauuguggacaucaacaucaaagaccacagcauuguaucgucuuacguguguuccggacuggucggcgauacgccccgcaagaaugacucaaguagcuccucucauugccuugauccuaacaaugaggaaggugggcacggagugaaaggcugggccuucgacgauggcaacgacguuuggauggggcgaaccaucagcgagaagucaagauugggauaugagacauuuaaagugauugaagguuggaguaauccaaaguccaaacugcagauaaacaggcaggucaucguggaucggggcaaucguagcggguacucuggaauuuucucaguagagggcaagaguuguaucaaccgcugcuuuuauguugaacuaaucagagguaggaaggaggaaacugaggugcucuggaccagcaauuccauugucguguucugugggacaucuggcacuuacggaaccggcucguggcccgacggggcugauauaaaccugaugccugucuga

SEQ ID NO: 149704 - RNA, 1410 nt, Artificial Sequence; identical to SEQ ID NO: 149703
  derived and/or modified CDS sequence (opt3) from neuraminidase__InfluenzaA__AEY69953

SEQ ID NO: 149705 - RNA, 1410 nt, Artificial Sequence; identical to SEQ ID NO: 149703
  derived and/or modified CDS sequence (opt3) from neuraminidase__InfluenzaA__AEY69964

SEQ ID NO: 149706 - RNA, 1410 nt, Artificial Sequence; identical to SEQ ID NO: 149683
  derived and/or modified CDS sequence (opt3) from neuraminidase__InfluenzaA__AEY69975

SEQ ID NO: 149707 - RNA, 1410 nt, Artificial Sequence; identical to SEQ ID NO: 149683
  derived and/or modified CDS sequence (opt3) from neuraminidase__InfluenzaA__AEY69986

SEQ ID NO: 149708 - RNA, 1410 nt, Artificial Sequence; identical to SEQ ID NO: 149683
  derived and/or modified CDS sequence (opt3) from neuraminidase__InfluenzaA__AEY69997

SEQ ID NO: 149709 - RNA, 1410 nt, Artificial Sequence; identical to SEQ ID NO: 149683
  derived and/or modified CDS sequence (opt3) from neuraminidase__InfluenzaA__AEY70008

SEQ ID NO: 149710 - RNA, 1410 nt, Artificial Sequence; identical to SEQ ID NO: 149683
  derived and/or modified CDS sequence (opt3) from neuraminidase__InfluenzaA__AEY70019

SEQ ID NO: 149711 - RNA, 1410 nt, Artificial Sequence; identical to SEQ ID NO: 149683
  derived and/or modified CDS sequence (opt3) from neuraminidase__InfluenzaA__AEY70259

SEQ ID NO: 149712 - RNA, 1410 nt, Artificial Sequence; identical to SEQ ID NO: 149683
  derived and/or modified CDS sequence (opt3) from neuraminidase__InfluenzaA__AEY70270

SEQ ID NO: 149713 - RNA, 1410 nt, Artificial Sequence; identical to SEQ ID NO: 149683
  derived and/or modified CDS sequence (opt3) from neuraminidase__InfluenzaA__AEY70281

SEQ ID NO: 149714 - RNA, 1410 nt, Artificial Sequence; identical to SEQ ID NO: 144647
  derived and/or modified CDS sequence (opt3) from neuraminidase__InfluenzaA__AEY70303

SEQ ID NO: 149715 - RNA, 1410 nt, Artificial Sequence; identical to SEQ ID NO: 144647
  derived and/or modified CDS sequence (opt3) from neuraminidase__InfluenzaA__AEY70314

SEQ ID NO: 149716 - RNA, 1410 nt, Artificial Sequence
  derived and/or modified CDS sequence (opt3) from neuraminidase__InfluenzaA__AEY70325
augaaccccaaucagaagaucauuaccauaggcagcgugucccugacaaucucuacuauuugcuucuuuaugcagaucgccauucucaugacgaccgucacacuucacuucaaacaguacgaguuuaacccuccaccgaauaaccagguuaugcugugugaacccacuaucauagagagaaauaucaccgaaauuguguauuugacaaacaccacuaucgagaaggaaauuugcccuaaauuagcugaguacaggaauuggucaaagccacagugugacaucacaggguucgcacccuuuaguaaagauaacagcauacggcuguccgccggaggugacauuuggguaacccgcgagccuuaugugucuugcgauccagacaaguguuaccaauucgcgcuaggccaggggacgacucucaauaacguccauucgaauaacaccgugcgagaucguacacccuauagaacucugcuuaugaaugaacugggaguuccuuuucacuugggcaccaaacaggugugcaucgcuuggucaagcaguuccugucaugacgguaaggccuggcuccacgucugcauuacaggggaugacaagaacgcaaccgccucuuucaucuacaauggaaggcugguggauagcguaguuuccuggucaaaagagauccugcggacgcaggaaagugagugugugugcauuaacggcacuuguacagucgugaugaccgacggcagcgcuucugggaaggcagauacuaaaauacucuuuaucgaggaaggaaagauugugcauacauccaccuuaucagguagcgcccaacacgucgaggaaugcaguugcuauccacgcuacccgggcguuagaugugugugcagggacaacuggaaggggucuaaucggcccaucguagauauaaacauuaaagaccacuccaucgugagcucguacgucuguucuggacuggugggcgacacgccucgcaagaaugauuccucaaguagcucccauugccuugacccaaacaaugaggaaggugggcacggaguuaaaggcugggcuuucgaugacggcaacgauguguggauggggcgaaccaucucugaaaagagcagauugggauaugagacauuuaaagucauugaggguuggucaaaucccaagaguaaacugcagaucaacaggcaagugauuguagaccggggcaaucguuccggguacagcggaauauucucuguugagggcaagucauguaucaaccgcugcuuuuauguggaacuaauuagagguaggaaggaggaaacugagguccucuggaccaguaauagcaucguggucuucugugggacauccggcacuuacggaaccggcucuuggccugauggggccgacaucaaccugaugccaguguga

SEQ ID NO: 149717 - RNA, 1410 nt, Artificial Sequence
  derived and/or modified CDS sequence (opt3) from neuraminidase__InfluenzaA__AEY70336
augaaccccaaucagaagaucauuaccauaggcagcgugucccugacaaucucuacuauuugcuucuuuaugcaaaucgccauucucaucacgaccgucacacuucacuucaaacaguacgaguuuaacucaccuccaaauaaccagguuaugcugugugaaccgacuauaaucgagagaaauauuaccgaaaucguguauuugacaaacaccacuauugagaaggaaaucugccccaaauuagcugaguacaggaauuggaguaagccucagugugacauaacaggguucgcaccauuuagcaaagauaacuccauucggcugucugccggaggugacaucuggguaacccgcgagcccuaugugucgugcgauccugacaaguguuaccaauucgcgcuaggccaggggacgacucucaauaacguccauucaaauaacaccgugcgagaucguacaccauauagaacucugcuuaugaaugaacugggaguucccuuucacuugggcaccaaacaggugugcauugcuuggagcaguuccucuugucaugacgguaaggccuggcuccacgucugcaucacaggggaugacaagaacgcaaccgccagcuucaucuacaauggaaggcugguggauuccguaguuucauggaguaaagagauucugcggacgcaggaaagcgagugugugugcauaaacggcacuuguacagucgugaugaccgacggcucugcuuccgggaaggcagauacuaaaauccucuuuauugaggaaggaaagaucgugcauacaucaaccuuaagcgguagugcccaacacgucgaggaaugcucuugcuauccucgcuacccaggcguuagauguauaugcagggacaacuggaagggguccaaucggccgauuguggauaucaacaucaaagaccacagcauuguaucgucuuacguguguuccggacuggucggcgacacgccccgcaagaaugauucaaguagcuccucucauugccuugacccuaacaaugaggaaggugggcacggagugaaaggcugggcuuucgaugacggcaacgauguuuggauggggcgaaccaucagcgagaagucaagauugggauaugagacauuuaaagugauugaagguuggaguaauccaaaguccaaacugcagauaaacaggcaggucaucguggaccggggcaaucguagcggguacucuggaauuuucucaguagaggauaagaguuguaucaaccgcugcuuuuauguugaacuaaucagaggcaggaaggaggaaacugaggugcucuggaccagcaauuccauugucguguucugugguacaucugggacuuacggcaccggaucguggcccgacggcgccgauauaaaccugaugccugucuga

SEQ ID NO: 149718 - RNA, 1410 nt, Artificial Sequence; identical to SEQ ID NO: 144786
  derived and/or modified CDS sequence (opt3) from neuraminidase__InfluenzaA__AEY70358

SEQ ID NO: 149719 - RNA, 1410 nt, Artificial Sequence; identical to SEQ ID NO: 144647
  derived and/or modified CDS sequence (opt3) from neuraminidase__InfluenzaA__AEY70379

SEQ ID NO: 149720 - RNA, 1410 nt, Artificial Sequence; identical to SEQ ID NO: 146409
  derived and/or modified CDS sequence (opt3) from neuraminidase__InfluenzaA__AFB70139

SEQ ID NO: 149721 - RNA, 1410 nt, Artificial Sequence; identical to SEQ ID NO: 144786
  derived and/or modified CDS sequence (opt3) from neuraminidase__InfluenzaA__AFB70141

SEQ ID NO: 149722 - RNA, 1410 nt, Artificial Sequence; identical to SEQ ID NO: 146409
  derived and/or modified CDS sequence (opt3) from neuraminidase__InfluenzaA__AFB70147

SEQ ID NO: 149723 - RNA, 1410 nt, Artificial Sequence; identical to SEQ ID NO: 144786
  derived and/or modified CDS sequence (opt3) from neuraminidase__InfluenzaA__AFB70153

SEQ ID NO: 149724 - RNA, 1410 nt, Artificial Sequence; identical to SEQ ID NO: 144786
  derived and/or modified CDS sequence (opt3) from neuraminidase__InfluenzaA__AFB70155

SEQ ID NO: 149725 - RNA, 1410 nt, Artificial Sequence; identical to SEQ ID NO: 145756
  derived and/or modified CDS sequence (opt3) from neuraminidase__InfluenzaA__AFB70157

SEQ ID NO: 149726 - RNA, 1410 nt, Artificial Sequence; identical to SEQ ID NO: 144786
  derived and/or modified CDS sequence (opt3) from neuraminidase__InfluenzaA__AFB70159

SEQ ID NO: 149727 - RNA, 1410 nt, Artificial Sequence
  derived and/or modified CDS sequence (opt3) from neuraminidase__InfluenzaA__AFB70161
augaaccccaaucagaagaucauuaccauaggcagcgugugcaugacaaucgggauggccaaccugauucuccaaaucggaaauauuaucuccauauggaucucucacucaauucagcuugguaaccagaaucagaucgagacuuguaaccaaagugucauuacguacgaaaauaacaccuggguuaaucagacauaugugaacaucagcaauacuaacuucgcugcaggccaguccguagugucugucaaacuggccggaaauucgucauugugcccugugagcggaugggcgauauacaguaaggacaacuccauuagaaucggcucuaaaggugauguuuuugugauuagggagccauucaucagcuguuccccguuagaaugccggaccuuuuuccugacacagggggcucuacucaaugacaagcauucaaacggaaccaucaaagaucgcagucccuaucgaacucugaugagcuguccuauuggcgaggucccaucucccuacaacucccguuuugaaucaguggccuggagcgcaagugccugccacgacggcauaaauuggcuuacaaucgggauuucuggaccugauaacggugcuguagcaguucugaaguauaauggcaucauaaccgacacgauuaaguccuggagaaacaauaucuugaggacucaagagagcgagugugccugcgugaacgggucguguuucaccgucaugacagauggaccaucugacggccaggcuuccuacaaaaucuuucggauugaaaaggguaaaaucgugaagucaguggagaugaaugcccccaacuaucauuacgaagagugcaguuguuacccugauagcuccgagauuacuugcgucugccgcgacaauuggcacgggucuaacagaccauggguuagcuucaaucagaaccucgaauaucagauaggauacaucuguucaggcauuuuuggcgauaauccgaggcccaacgacaaaaccgggaguugcggaccuguguccagcaauggugcgaacggcguaaagggguucucuuuuaaguauggaaacggcguguggaucggucggacaaaaucaaucaguagccgcaauggguucgagaugauuugggauccaaacggcuggaccggaacggacaauaacuuuuccacuaagcaagacauagucggcaucaaugaauggucuggguacucggggagcuucgugcagcaucccgagcugacaggucuggauuguauucgaccuugcuucuggguugaacucaucagaggcaggccaaaagagaacaccauuuggacuuccgggucaaguaucucuuuuuguggagugaauagcgacacagucggcugguauuggcccgauggugcagaguuaccguucaccauagacaaguga

SEQ ID NO: 149728 - RNA, 1410 nt, Artificial Sequence
  derived and/or modified CDS sequence (opt3) from neuraminidase__InfluenzaA__AFB70163
augaaccccaaucagaagaucauuaccauaggcagcgugugcaugacaaucgggauggccaaccugauucuccaaaucggaaauauuaucuccauauggaucucucacucaauucagcuugguaaccagaaucagaucgagacuuguaaccaaagugucauuacguacgaaaauaacaccuggguuaaucagacauaugugaacaucagcaauacuaacuucgcugcaggccaguccguagugucugucaaacuggccggaaauucgucauugugcccugugagcggaugggcgauauacaguaaggacaacuccauuagaaucggcucuaaaggugauguuuuugugauuagggagccauucaucagcuguuccccguuagaaugccggaccuuuuuccugacacagggggcucuacucaaugacaagcauucaaacggaaccaucaaagaucgcagucccuaucgaacucugaugagcuguccuauuggcgaggucccaucucccuacaacucccguuuugaaucaguggccuggagcgcaagugccugccacgacggcauaaauuggcuuacaaucgggauuucuggaccugauaacggugcuguagcaguucugaaguauaauggcaucauaaccgacacgauuaaguccuggagaaacaauaucuugaggacucaagagagcgagugugccugcgugaacgggucguguuucaccgucaugacagauggaccaucugacggccaggcuuccuacaaaaucuuucggauugaaaaggguaaaaucgugaagucaguggagaugaaugcccccaacuaucauuacgaagagugcaguuguuacccugauagcuccgagauuacuugcgucugccgcgacaauuggcacgggucuaacagaccauggguuagcuucaaucagaaccucgaauaucagauaggauacaucuguucaggcauuuuuggcgauaauccgaggcccaacgacaaaaccgggaguugcggaccuguguccagcaauggugcgaacggcguaaagggguucucuuuuaaguauggaaacggcguguggaucggucggacaaaaucaaucaguagccgcaauggguucgagaugauuugggauccaaacggcuggaccggaacggacaauaacuuuuccauaaagcaagacaucgucggcauuaaugaauggucuggguacucggggagcuucgugcagcaucccgagcugacuggucuggauuguauccgaccuugcuucuggguugaacucauuagaggcaggccaaaagagaacgcaaucuggacauccgggucaaguauaucuuuuuguggagugaauagcgacaccgucggcugguccuggcccgauggugccgaguuaccguucacuaucgacaaguga

SEQ ID NO: 149729 - RNA, 1410 nt, Artificial Sequence
  derived and/or modified CDS sequence (opt3) from neuraminidase__InfluenzaA__AFB70169
augaaccccaaucagaagaucauuaccauaggcagcgugugcaugacaaucgggauggccaaccugauucuccaaaucggaaauauuaucuccauauggaucaaccacucuauucagcuugguaaucagaaccagaucgagacuuguaaucaaucagucauuacguacgaaaacaauaccuggguuaaccagacauaugugaauaucaguaacacuaauuucgcugcaggccagagcguaguguccgucaaacuggccgggaacucuucguugugcccugugucaggaugggcgauauacagcaaggacaauaguauuagaaucggcuccaaaggugauguuuuugugauuagggagccauucaucucuuguagcccguuagaaugccggaccuuuuuccugacacagggggcucuacucaacgacaagcauuccaacggaaccaucaaagaucgcucacccuaucgaacucugaugaguuguccuauuggcgaggucccaagccccuacaauucucguuuugaauccguggccuggucagcaagcgccugccacgacggcauaaacuggcuuacaaucgggauuaguggaccugauaauggugcuguagcaguucugaaguauaacggcaucauaaccgacacgauuaagucuuggagaaauaacaucuugaggacucaagaguccgagugugccugcgugaaugggagcuguuucaccgucaugacagauggaccaucggacggccaggcuucuuacaaaaucuuucggauugaaaaggguaaaaucgugaaguccguggagaugaacgcccccaauuaucauuacgaagagugcucauguuacccugauaguagcgagauuacuugcgucugccgcgacaacuggcacggguccaauagaccauggguuucuuucaaccagaaucucgaauaucagauaggauacaucuguagcggcauuuuuggcgauaacccgaggcccaaugacaaaaccgggucaugcggaccugugaguuccaacggugcgaacggcguaaagggguucagcuuuaaguauggaaauggcguguggaucggucggacaaaaucuaucucaagucgcaacggguucgagaugauuugggauccaaauggcuggaccggaacggacaacaauuuuagcauaaagcaagacaucgucggcauuaacgaaugguccggguacucuggaucguucgugcagcaucccgagcugacuggucuggauuguauccgaccuugcuucuggguugaacucauuagaggcaggccaaaagagaauacaaucuggaccagcggguccucaauaaguuuuuguggagugaacucugacacugucggcuggagcuggcccgauggugcagaguuaccguucacaaucgacaaguga

SEQ ID NO: 149730 - RNA, 1410 nt, Artificial Sequence; identical to SEQ ID NO: 144786
  derived and/or modified CDS sequence (opt3) from neuraminidase__InfluenzaA__AFB70199

SEQ ID NO: 149731 - RNA, 1410 nt, Artificial Sequence; identical to SEQ ID NO: 144786
  derived and/or modified CDS sequence (opt3) from neuraminidase__InfluenzaA__AFB70209

SEQ ID NO: 149732 - RNA, 1410 nt, Artificial Sequence; identical to SEQ ID NO: 144786
  derived and/or modified CDS sequence (opt3) from neuraminidase__InfluenzaA__AFB70219

SEQ ID NO: 149733 - RNA, 1410 nt, Artificial Sequence; identical to SEQ ID NO: 144786
  derived and/or modified CDS sequence (opt3) from neuraminidase__InfluenzaA__AFB70229

SEQ ID NO: 149734 - RNA, 1410 nt, Artificial Sequence; identical to SEQ ID NO: 144786
  derived and/or modified CDS sequence (opt3) from neuraminidase__InfluenzaA__AFB70239

SEQ ID NO: 149735 - RNA, 1410 nt, Artificial Sequence; identical to SEQ ID NO: 144786
  derived and/or modified CDS sequence (opt3) from neuraminidase__InfluenzaA__AFB70249

SEQ ID NO: 149736 - RNA, 1410 nt, Artificial Sequence; identical to SEQ ID NO: 144786
  derived and/or modified CDS sequence (opt3) from neuraminidase__InfluenzaA__AFB70259

SEQ ID NO: 149737 - RNA, 1410 nt, Artificial Sequence; identical to SEQ ID NO: 145756
  derived and/or modified CDS sequence (opt3) from neuraminidase__InfluenzaA__AFB70269

SEQ ID NO: 149738 - RNA, 1410 nt, Artificial Sequence; identical to SEQ ID NO: 144786
  derived and/or modified CDS sequence (opt3) from neuraminidase__InfluenzaA__AFB70279

SEQ ID NO: 149739 - RNA, 1410 nt, Artificial Sequence; identical to SEQ ID NO: 144786
  derived and/or modified CDS sequence (opt3) from neuraminidase__InfluenzaA__AFB70289

SEQ ID NO: 149740 - RNA, 1410 nt, Artificial Sequence; identical to SEQ ID NO: 144786
  derived and/or modified CDS sequence (opt3) from neuraminidase__InfluenzaA__AFB70299

SEQ ID NO: 149741 - RNA, 1410 nt, Artificial Sequence; identical to SEQ ID NO: 144786
  derived and/or modified CDS sequence (opt3) from neuraminidase__InfluenzaA__AFB70309

SEQ ID NO: 149742 - RNA, 1410 nt, Artificial Sequence; identical to SEQ ID NO: 146409
  derived and/or modified CDS sequence (opt3) from neuraminidase__InfluenzaA__AFB70319

SEQ ID NO: 149743 - RNA, 1410 nt, Artificial Sequence; identical to SEQ ID NO: 144786
  derived and/or modified CDS sequence (opt3) from neuraminidase__InfluenzaA__AFB70329

SEQ ID NO: 149744 - RNA, 1410 nt, Artificial Sequence; identical to SEQ ID NO: 144786
  derived and/or modified CDS sequence (opt3) from neuraminidase__InfluenzaA__AFB70349

SEQ ID NO: 149745 - RNA, 1410 nt, Artificial Sequence; identical to SEQ ID NO: 144786
  derived and/or modified CDS sequence (opt3) from neuraminidase__InfluenzaA__AFB70359

SEQ ID NO: 149746 - RNA, 1410 nt, Artificial Sequence; identical to SEQ ID NO: 144786
  derived and/or modified CDS sequence (opt3) from neuraminidase__InfluenzaA__AFB70369

SEQ ID NO: 149747 - RNA, 1410 nt, Artificial Sequence; identical to SEQ ID NO: 144786
  derived and/or modified CDS sequence (opt3) from neuraminidase__InfluenzaA__AFB70379

SEQ ID NO: 149748 - RNA, 1410 nt, Artificial Sequence; identical to SEQ ID NO: 144786
  derived and/or modified CDS sequence (opt3) from neuraminidase__InfluenzaA__AFB70389

SEQ ID NO: 149749 - RNA, 1410 nt, Artificial Sequence; identical to SEQ ID NO: 144786
  derived and/or modified CDS sequence (opt3) from neuraminidase__InfluenzaA__AFB70399

SEQ ID NO: 149750 - RNA, 1410 nt, Artificial Sequence; identical to SEQ ID NO: 144786
  derived and/or modified CDS sequence (opt3) from neuraminidase__InfluenzaA__AFB70409

SEQ ID NO: 149751 - RNA, 1410 nt, Artificial Sequence
  derived and/or modified CDS sequence (opt3) from neuraminidase__InfluenzaA__AFB77614
augcaccccaaccaggaggugaucagcauugucuccguuugcaugaccauaggcauggccaaucugauccuccaaauugggaacaucauuucuaucuggauaucacauaguauccagcuuggaaaucagaaccagauugaaacauguaaucaaagcgugaucacuuacgagaacaauacguggguaaaccagaccuaugugaauauuuccaacacaaauuucgcugcaggucagucugucgugucgguuaagcuggccggcaacagcagcuugugcccugugagugggugggcgaucuacuccaaagacaauucuauaagaauuggaagcaagggcgaugucuuugugaucagggaaccauucauuuccuguucaccguuagagugccggaccuuuuuccugacucagggugcucuacucaacgacaaacacaguaaugggacaaucaaggaucgcagccccuaucgaacccugaugucuuguccuaucggagaaguaccaucccccuacaacucacguuuugagagcguugccuggagugcaucugccugccaugacggcauuaacuggcuuacuauaggcaucuccgggccugauaauggagcuguggcaguccugaaauauaacgguauuaucacagacaccauaaagagcuggagaaauaacauuuugaggacgcaagagucggaaugugccugcgugaauggcucuuguuucacuaucaugaccgaugggccauccgacggacaggcuucauacaagaucuuucggauugagaaaggcaagaucgugaaaagugucgaaaugaacgcccccaauuaucacuacgaggagugcagcuguuacccugauuccucugaaauuacaugcguuugccgcgacaacuggcaugguagcaauagaccaugggugucauucaaccagaaucucgaguaucagauaggguacaucuguaguggaauuuuuggcgauaacccgaggcccaaugacaagacuggcuccugcgggccuguaagcucuaacggagcgaauggugugaaaggcuucucauuuaaguaugggaacggagucuggaucggccggaccaagaguaucagcucccgcaaagguuucgaaaugauuugggauccaaacggguggacaggcaccgacaauaacuuuucuauaaagcaagacaucgugggaauuaaugaguggucgggcuacagcggguccuucguucagcaccccgaacugacgggacuggauuguauccgaccuugcuucuggguggagcucauuagagguaggccaaaagagaacacuaucuggacaucaggcaguucuauaucauuuuguggggucaauuccgacaccgugggaugguucuggcccgauggcgcagaauuaccguuuacuaucgacaaguga

SEQ ID NO: 149752 - RNA, 1410 nt, Artificial Sequence
  derived and/or modified CDS sequence (opt3) from neuraminidase__InfluenzaA__AFB77615
augcaccccaaccaggagaucauuaccuucgugagcgucugcaugacaauaggcauggccaaucugauccuccaaauugggaacaucauuuccaucuggauaucucauucaauccagcuuggaaaucagaaccagauugaaacuuguaaucaaaguguuaucacguacgagaacaauaccugggugaaccagacauauguaaauauuagcaacacuaauuuugcugcaggucaguccguggucucugugaagcuggccggcaacucgucauugugcccuguuagcgggugggcgaucuacaguaaagacaauuccauaagaauuggaucuaagggcgauguguucgucaucagggaaccauuuauuagcuguuccccguuagagugccggaccuucuuucugacacagggugcucuacucaacgacaaacacucaaaugggaccaucaaggaucgcagucccuaucgaacucugaugagcuguccuaucggagaagugccaucucccuacaacucccguuucgagucaguagccuggagcgcaagugccugccaugacggcauuaacuggcuuacaauaggcaucucugggccugauaauggagcuguugcagugcugaaauauaacgguauuaucaccgacacgauaaaguccuggagaaauaacauuuugaggacucaagagagcgaaugugccugcgucaauggcucguguuuuaccaucaugacagaugggccaucugacggacaggcuuccuacaagaucuuccggauugagaaaggcaagaucgugaaaucaguggaaaugaacgcccccaauuaucacuacgaggagugcaguuguuacccugauagcuccgaaauuacuugcgucugccgcgacaacuggcaugguucuaauagaccauggguuagcuuuaaccagaaucucgaguaucagauaggguacaucuguucaggaauuuucggcgauaacccgaggcccaaugacaagaccggcaguugcgggccuguguccagcaacggagcgaaugguguaaaaggcuuuucuuucaaguaugggaacggaguguggaucggccggacaaagucaaucaguagccgcaaagguuuugaaaugauuugggauccaaacggguggaccggcacggacaauaacuucuccauaaagcaagacaucgucggaauuaaugaguggucuggcuacucggggagcuucgugcagcaccccgaacugacuggacuggauuguauccgaccuugcuuuuggguugagcucauuagagguaggccaaaagagaacacaaucuggaccuccggcucaaguauaucuuucuguggggugaauagcgacacugucggaugguccuggcccgauggcgcagaauuaccguuuacaaucgacaaguga

SEQ ID NO: 149753 - RNA, 1410 nt, Artificial Sequence
  derived and/or modified CDS sequence (opt3) from neuraminidase__InfluenzaA__AFB78128
augaaccccaaucagaagaucauuaccauaggcagcgugucccugacaaucgccacuauuugcuuccucaugcaaaucgucauucuuguuacgaccgugacacugcacuuuaaacagcaugaguguaacucuccuccaaauaaccagguaauguugugcgaaccgacuaucauagagagaaauaucaccgaaauuguguacuuaacaaacaccacuaucgagaaggaaauuugucccaaacuggcugaguauaggaauuggucaaagccucagugcaaaaucacaggguucgcaccauuuaguaaggacaacagcauacggcuauccgccggaggugauauuugggucacccgcgagcccuacgugucuugugacccugauaagugcuaucaauucgcgcucggccaggggacgacucugaauaaccgacacucgaaugacaccguucaugaucguacaccauacagaacucuucugaugaacgaauugggagugcccuuucaccucggcaccaaacaggucuguaucgcuuggucaagcaguuccugccaugacgguaaggccuggcugcacguguguguaacagggcacgaugagaaugcaaccgccucuuucauuuaugacggaaggcugguugauagcaucggcuccuggaguaaaaagauccuccggacgcaggaaucagagugcguguguauuaacggcacuugcacagucgugaugaccgacgggagcgcuucuggacgcgcagauacuaaaauauuauuuaucgaggaagguaagauugugcauacauccaagcugucaggcagcgcccaacacgucgaggaaugcaguuguuacccuagauauccagggguuaggugcgugugucgggacaauuggaaaggaucuaaccgcccgaucguagauauaaacgugaaggacuacuccauugucagcucguacgugugcucuggccuuguuggugacacccccagaaagaaugauuccucaaguagcucccauuguuuggacccuaacaaugaggaagggggacacggcgugaaaggcugggcuuucgaugacgggaacgaugucuggaugggacgaacgaucucugagaaaagcaggucagguuaugagaccuuuaaggugaucgaaggcuggaguaaaccaaauuccaagcugcagauuaaccggcagguaaucguugagcgugggaauaugagcggauacucuggcauuuucucaguggaagguaagaguugcauaaaccgcuguuuuuaugucgagcuaaucagagggaggaaacaggaaacagaggugugguggacuagcaauuccauugucguguucugcggcaccucuggaacauacggcacugggucguggcccgacggagccgauaucaaccucaugccuaucuga

SEQ ID NO: 149754 - RNA, 1410 nt, Artificial Sequence
  derived and/or modified CDS sequence (opt3) from neuraminidase__InfluenzaA__AFC62078
augaaccccaaucagaagaucauuaccauaggcagcgugugcaugacaaucgggauggccaaccugauucuccaaaucggaaauauuaucuccauauggaucucucacucaauucagcuugguaaccagagucagaucgagacuuguaaucaaagcgucauuacguacgaaaacaauaccuggguuaaccagacauaugugaauaucuccaacacuaauuucgcugcaggccagucuguagugucggucaaacuggccgggaacagcucauugugcccugugaguggaugggcgauauacuccaaggacaauucuauuagaaucggcagcaaaggugauguuuuugugauuagggaguuauucaucuccuguucaccacuggaaugccggaccuuuuuccuaacacagggggcucuccugaacgacaagcauaguaauggaaccaucaaagaucgcagcccguaucgaacucuuaugucuugucccauuggcgaggucccuuccccauacaacucacguuuugaaagcguggccuggagugcaucugccugccacgacggcauaaacuggcugacaaucgggauuuccggacccgauaauggugcuguagcaguuuugaaguauaacggcaucauaaccgacacgauuaagagcuggagaaaugauauccucaggacucaagagucggagugugccugcgugaacgggucuuguuucaccaucaugacagacggaccuuccgauggccaggcuucauacaaaauuuuucggaucgaaaaggguaaaauugucaagaguguggagaugaaugccccaaacuaucauuacgaagagugcagcuguuaccccgacuccucugagauaacuugcgugugccgcgauaauuggcacgggagcaacagaccuugggucucauucaaucagaaccuggaauaucagaucggauacauuuguaguggcaucuuuggcgacaauccaaggccgaacgauaaaaccggguccugcggacccguuagcucuaauggugcgaacggcgugaagggguucucauuuaaguauggaaauggcguauggaucggucggacaaaaaguauuagcucccgcaagggguucgagaugauaugggacccuaacggcuggaccggaacggacaacaauuuuucuaucaaacaagauauugugggcaucaacgaauggucgggguacagcggauccuucguccagcauccagagcugacugguauggacuguauucgacccugcuucuggguggaacucaucagaggcaggccuaaggagaauacaauauggaccucagggaguucuaucagcuuuuguggaguuaacuccgauacugugggcuggucauggccagacggugcagaguuacccuucacaauugauaaauga

SEQ ID NO: 149755 - RNA, 1410 nt, Artificial Sequence
  derived and/or modified CDS sequence (opt3) from neuraminidase__InfluenzaA__AFC62079
augaaccccaaucagaagaucauuaccauaggcagcgugugcaugacaaucgggauggccaaccugauucuccaaaucggaaauauuaucuccauauggaucucucacucaauucagcuugguaaccagaaucagaucgagacuuguaaccaaagugucauuacguacgaaaauaacaccuggguuaaucagacauaugugaacaucagcaauacuaacuucgcugcaggccaguccguagugucugucaaacuggccggaaauucgucauugugcccugugagcggaugggcgauauacaguaaggacaacuccauuagaaucggcucuaaaggugauguuuuugugauuagggagccauucaucagcuguuccccguuagaaugccggaccuuuuuccugacacagggggcucuacucaaugacaagcauucaaacggaaccaucaaagaucgcagucccuaucgaacucugaugagcuguccuauuggcgaggucccaucucccuacaacucccguuuugaaucaguggccuggagcgcaagugccugccacgacggcauaaauuggcuuacaaucgggauuucuggaccugauaacggugcuguagcaguucugaaguauaauggcaucauaaccgacacgauuaaguccuggagaaacaauaucuugaggacucaagagagcgagugugccugcgugaacgggucguguuucaccgucaugacagauggaccaucugacggccaggcuuccuacaaaaucuuucggauugaaaaggguaaaaucauuaagucaguggagaugaaugcccccaacuaucauuacgaagagugcaguuguuacccugauagcuccgagauaacuugcgugugccgcgacaauuggcacgggucuaacagaccaugggucagcuucaaucagaaccucgaauaucagaucggauacauuuguucaggcauccugggcgauaauccgaggcccaacgacaaaaccgggaguugcggaccuguuuccagcaauggugcgaacggcgugaagggguuuucuuucaaguauggaaacggcguaugggugggucggacaaaaucaaucaguagccgcaauggguuugagaugauuugggauccaaacggcuggaccggaacggacaauaacuucuccauaaagcaagacaucgucggcauuaaagaauggucuggguacucggggagcuuugugcagcaucccgagcugacuggucucgauuguauccgaccuugcuucuggguugaauuaauuagaggcaggccaaaggagaauacaaucuggaccuccgggucaauaaucaguuucuguggagugaacucugacacugucggcuggagcuggcccgauggugcagagcugccguuuacaauugacaaauga

SEQ ID NO: 149756 - RNA, 1410 nt, Artificial Sequence
  derived and/or modified CDS sequence (opt3) from neuraminidase__InfluenzaA__AFC62080
augaaccccaaucagaagaucauuaccauaggcagcgugugcaugacaaucgggauggccaaccugauucuccaaaucggaaauauuaucuccauauggaucucucacucaauucagcuugguaaccagagucagaucgagacuuguaaucaaagcgucauuacguacgaaaacaauaccuggguuaaccagacauaugugaauaucuccaacacuaauuucgcugcaggccagucuguagugucggucaaacuggccgggaacagcucauugugcccugugaguggaugggcgauauacuccaaggacaauucuauuagaaucggcagcaaaggugauguuuuugugauuagggagccauucaucuccuguucaccguuagaaugccggaccuuuuuccugacacagggggcucuacucaacgacaagcauaguaauggaaccaucaaagaucgcagccccuaucgaacucugaugucuuguccuauuggcgaggucccaucccccuacaacucacguuuugaaagcguggccuggagugcaucugccugccacgacggcauaaacuggcuuacaaucgggauuuccggaccugauaauggugcuguagcaguucugaaguauaacggcaucauaaccgacacgauuaagagcuggagaaauaacaucuugaggacucaagagucggagugugccugcgugaaugggucuuguuucaccaucaugacagauggaccauccgacggccaggcuucauacaaaauuuuucggaucgaaaaggguaaaauugucaagaguguggagaugaacgcccccaauuauuacuacgaagagugcagcuguuauccugauuccucugagauaacuugcgugugccgcgacaacuggcaugggagcaauagaccaugggucucauucaaccagaaucucgaauaccagaucggauauauuuguaguggcaucuuuggcgauaacccgaggcccaaugacaaaaccggguccugcggaccuguuagcucuaacggugcgaauggcgugaagggguucucauuuaaguacggaaacggcguauggaucggucggacaaaaaguauuagcucccgcaagggguucgagaugauaugggauccaaacggcuggaccggaacggacaauaacuuuucuaucaaacaagacauugugggcaucaaugaauggucgggguauagcggauccuucguccagcaccccgagcugacugguaugggcuguauucgaccuugcuucuggguggaacugaucagagggaggccaaaggagaacacaauauggaccucaggaaguucuaucagcuuuuguggcguuaauuccgauacuguggguuggucauggcccgacggggcagagcucccguucacaauugauaaauga

SEQ ID NO: 149757 - RNA, 1410 nt, Artificial Sequence
  derived and/or modified CDS sequence (opt3) from neuraminidase__InfluenzaA__AFC62082
augaaccccaaucagaagaucauuaccauaggcagcgugucccugacaaucucuacuauuugcuucuuuaugcagaucgccauucucaucacgaccgucacacuucacuucaaacaguacgaguuuaacucaccuccaaauaaccagguuaugcugugugaaccgacuauaaucgagagaaauauuaccgaaaucguguauuugacaaacaccacuauugagaaggaaaucugccccaaauuagcugaguacaggaauuggaguaagccucagugugacauaacaggguucgcaccauuuagcaaagauaacuccauucggcugucugccggaggugacaucuggguaacccgcgagcccuaugugucgugcgauccuaauaaguguuaccaauucgcgcuaggccaggggacgacucucaacaauguccauucaaacaauaccgugcgaggacguacaccauauagaacucugcuuaugaacgaacugggcguucccuuucacuuggguaccaaacaggugugcauugcuuggagcaguuccucuugucaugacgggaaggccuggcuccacgucugcaucacaggagaugacaagaaugcaaccgccagcuucaucuacaacggcaggcugguggauuccguaguuucauggaguaaagagauucugcggacgcaggaaagcgagugugugugcauaaacggcacuuguacagucgugaugaccgacgggucugcuuccggaaaggcagauacuaaaauccucuuuauugaggaagguaagaucgugcauacaucaaccuuaagcggcagugcccaacacgucgaggaaugcucuugcuauccucgcuacccagggguuagaugugugugcagggacaauuggaagggauccaaccggccgauaguagauauuaauaugaaagaccacagcaucgugucgucuuacgucuguuccggccuggugggugauacgccccgcaagaacgacucaaguagcuccucucauugcuucgacccuaaugaugaggaagggggacacggcguuaaaggcugggcuuuugacgaugggaacgacguguggaugggacgaaccaucagcgagaagucaagacuugguuaugagacauucaaagucauugaaggcuggaguaauccaaaguccaaauugcagaucaacaggcaagugauuguagaucguggggaccggagcggauacucuggcauauuuucaguugaggguaagaguuguaucaaucgcugcuucuauguggaacugauuagagggagcaaggaggaaacugagguccuauggaccuccaacucuaucguggucuucuguggcacaucgggaacuuacggcaccgggagcuggcccgauggagccgacaucaaucucaugccuauuuga

SEQ ID NO: 149758 - RNA, 1410 nt, Artificial Sequence; identical to SEQ ID NO: 142273
  derived and/or modified CDS sequence (opt3) from neuraminidase__InfluenzaA__AFD63529

SEQ ID NO: 149759 - RNA, 1410 nt, Artificial Sequence; identical to SEQ ID NO: 142273
  derived and/or modified CDS sequence (opt3) from neuraminidase__InfluenzaA__AFD63540

SEQ ID NO: 149760 - RNA, 1410 nt, Artificial Sequence
  derived and/or modified CDS sequence (opt3) from neuraminidase__InfluenzaA__AFD63551
augaaccccaaucagaagaucauuaccauaggcagcgugucccugacaaucgccgcuauuugcuuccucaugcagaucgcaauucuugucacuacgguuacccugcacuuuaaacagcaugaguguaacccuccaccgaauaaccaggugauguugugcgaacccacaaucauagagagaaauaucacugaaauuguauacuuaaccaacacaaccaucgagaaggaaauuuguccuaaacuggccgaguauaggaauuggucuaagccacagugcaacaucacuggguucgcgcccuuuucaaaagacaauaguauacggcuaagcgcuggaggugauauuugggugacacgcgagccuuacgucuccugugacccagauaagugcuaucaauucgcccucggccaggggaccacgcugaacaauggacacucuaacgacacugugcauggccgaacccccuaccguacacuucugaugaaugaauuggguguuccuuuucaccucgggacuagacagguguguaucgcauggucgucaagcaguugccaugauggaaaggccuggcugcacgucugugugaccggcgacgauaaaaacgcuacagcauccuucauuuauaauggcaggcugguagacucuaucgggagcugguccaagaaaauccuccggacccaggagucagaaugcguuuguauuaacggaacgugcacuguggucaugacagaugguagugccagcggcaaggcugacaccaaaauauuauuuaucgaggaggggaagauugugcacaucucuacucuguccggaucagcccaacauguggaagagugcagcuguuacccacgcuauccgggcgucagaugcguuuguagggauaacuggaaggguaguaaucggcccauaguggacauuaacguaaaagauuacucuaucguguccagcuacgucugcucggggcuugugggagacacaccucgcaagaaugacucuuucuccucaagucacuguuuggauccaaacaaugaagagggcggccaugggguuaaaggaugggcguuugacgaugguaacgacguguggaugggccgaaccaucagcgaaaagcugagauccggguaugagacguucaaagucauugagggauggucuaagcccaauagcaaacuacagaucaacaggcaagugauuguagaacggggcaaucguucagguuacagugggauauuuuccguugagggcaagagcugcaucaaccgcuguuucuauguggaacucauuagaggaaggaaggaggaaaccgaggucugguggacaucuaauucaaucguggucuuuugcggcaccagugggacuuacggaacagguagcuggccugauggcgcagacaucaaccugaugccaauuuga

SEQ ID NO: 149761 - RNA, 1410 nt, Artificial Sequence; identical to SEQ ID NO: 142273
  derived and/or modified CDS sequence (opt3) from neuraminidase__InfluenzaA__AFD63562

SEQ ID NO: 149762 - RNA, 1410 nt, Artificial Sequence
  derived and/or modified CDS sequence (opt3) from neuraminidase__InfluenzaA__AFD63573
augaaccccaaucagaagaucauuaccauaggcagcgugucccugacaaucgccacuauuugcuuccucaugcaaaucgcuauucuugucacgaccguuacacugcacuuuaaacagcaugaguguaacucuccuccaaauaaccaggugauguugugcgaaccgacuaucauagggagaaauaucaccgagauuguauacuuaacaaacaccacuaucgaaaaggagauuugucccaaacuggcagaauauaggaauuggucaaagccucagugcaacaucacaggauucgccccauuuaguaaagacaauagcauacggcuauccgcggguggcgauauuugggugacccgcgagcccuacgucucuugugacccugauaagugcuaucaauucgcucucgggcagggaacgacucugaacaauggccacucgaacgacaccgugcaugaucgaacaccauaccguacucuucugaugaaugaguuggguguucccuuucaccucgggaccagacagguguguaucgccuggucaagcaguuccugccaugacggaaaggcauggcugcacgucugugugacaggcgaugacaaaaacgccaccgcuucuuucauuuauaauggcaggcugguagauagcaucggguccuggucaaagaaaauccuccggacgcaggaaagugagugcguuuguauuaacggaacuugcacaguggucaugaccgacgguagcgcaucuggcaaggccgauacuaaaauauuauuuaucgaagaggggaagauugugcacaucuccacacugucaggaagcgcucaacauguggaggaaugcaguuguuacccucgcuauccaggcgucagaugcguuuguagggacaacuggaaggguucuaaucggccgauaguggauauuaacguaaaagacuacuccaucgugagcucguacgucugcucugggcuugugggagacacccccaggaagaaugauuccuucucaaguagccacuguuuggacccuaacaaugaggaaggcggccaugggguuaaaggaugggccuuugaugacgguaacgauguguggaugggccgaacgaucuccgagaagcugagaucuggguaugaaaccuucaaagucauugagggauggagcaagccaaauucaaaacuacagaucaaccgccaggugauuguagagcggggcaaucguagugguuacuccgggauauuuagcguugaaggcaagucuugcaucaaccgcuguuucuauguggagcucauuagaggaaggaaggaagagacagaagucugguggacuucaaauaguaucguggucuuuugcggcaccagcgggacauacggaacugguuccuggcccgacggcgcggauaucaaccugaugccuauuuga

SEQ ID NO: 149763 - RNA, 1410 nt, Artificial Sequence
  derived and/or modified CDS sequence (opt3) from neuraminidase__InfluenzaA__AFD63584
augaaccccaaucagaagaucauuaccauaggcagcgugucccugacaaucgccacuauuugcuuccucaugcaaaucgcuauucuugucacgaccguuacacugcacuuuaaacaguacgaguguaacucuccuccaaauaaccaggugauguugugcgaaccgacuaucauagagagaaauaucaccgaaauuguauauuuaacaaacaccacuaucgagaaggaaauuugucccaaacuggcagaguacaggaauuggucaaagccucagugcaacaucacaggguucgccccauuuaguaaagacaauagcauacggcuauccgcgggaggugauauuugggugacccgcgagcccuaugucucuugugacccugauaagugcuaccaauucgcucucggccaggggacgacucugaacaauggacauucgaacgacaccgugcacgaacgaacaccauaucguacucuucugaugaaugaguugggcguucccuuucaucucgguaccagacagguguguaucgccuggucaagcaguuccugccacgaugggaaggcauggcugcaugucugugugacaggagacgauaaaaacgccaccgcuucuuucauuuacaauggcaggcugguagacagcaucggcuccuggucaaagaaaauccuccggacgcaggaaagugagugcguuuguauuaacgggacuugcacaguggucaugaccgauggaagcgcaucugguaaggccgacacuaaaauauuauuuaucgaggaaggcaagauuauccacauauccacacugucagggagcgcucaacacguggaggaaugcaguuguuauccucgcuacccaggagugagaugcgucuguagggauaacuggaagggcucuaaucggccgauuguugacaucaacgugaaagauuacuccaucguaagcucguaugugugcucuggucuugucggggacacuccccgcaagaaugacuccucaaguagcucccauuguuuggauccuaacaaugaggaaggaggccacggcgugaaagggugggccuucgacgauggaaacgacguuuggaugggucgaacgauuucugagaagcugagaagcggcuacgagaccuuuaaagugaucgaaggguggucaaagccaaauaguaaacuacagauuaacaggcaggucauaguggagcggggaaaucguuccggcuauagcgguaucuucucuguagaagggaagucaugcauuaaccgcuguuuuuacguugagcucaucagaggcaggaaggaagagacagaggugugguggaccaguaauagcaucgucguguucugcggaaccuccggcacauaugggacuggaucuuggcccgauggugcggacauuaaccugaugccuauauga

SEQ ID NO: 149764 - RNA, 1410 nt, Artificial Sequence
  derived and/or modified CDS sequence (opt3) from neuraminidase__InfluenzaA__AFD63595
augaaccccaaucagaagaucauuaccauaggcagcgugucccugacaaucgccgcuauuugcuuccucaugcaaaucgcaauucuugucacuacgguuacccugcacuuuaaacagcaugaguguaacucuccuccaaauaaccaggugauguugugcgaaccgacaaucauagagagaaauaucacugaaauuguauacuuaaccaacacaaccaucgagaaggaaauuugucccaaacuggccgaguauaggaauuggucaaagccucagugcaacaucacuggguucgcgccauuuaguaaagacaauagcauacggcuauccgcuggaggugauauuugggugacacgcgagcccuacgucucuugugacccugauaagugcuaucaauucgcccucggccaggggaccacgcugaacaauggacacucgaacgacacugugcaugaucgaaccccauaccguacacuucugaugaaugaauugggcguucccuuucaccucgguacuagacagguguguaucgcauggucaagcaguuccugccaugacgggaaggccuggcugcacgucugugugaccggagaugacaaaaacgcuacagcaucuuucauuuauaauggcaggcugguagauagcaucggcuccuggucaaagaaaauccuccggacccaggagagugaaugcguuuguauuaacgggacgugcacuguggucaugacagacggaagcgccucugguaaggcugauaccaaaauauuauuuaucgaggagggcaagauugugcacaucuccacucugucagggagcgcccaacauguggaagagugcaguuguuacccucgcuauccaggagucagaugcguuuguaaggacaacuggaaaggcucuaauaggccgauaguggauauuaacguaaaggacuacuccaucgugagcucguacgucugcucuggucuugugggggacacaccccggaaaaaugauuccuucucaaguagccacuguuuggacccuaacaaugaagagggaggccauggcguuaaggggugggcguuugaugacggaaacgauguguggaugggucgcaccaucuccgaaaaacugcgaucuggcuaugagacguucaaggucauugagggguggagcaaaccaaauucaaagcuacagaucaacagacaggugauuguagaaaggggaaaucggaguggcuacuccgguauauuuagcguugaggggaagucuugcaucaaccguuguuucuauguggaacucauucgcggcagaaaagaggaaaccgaggucugguggacaucaaauaguaucguggucuuuugcggaacuagcggcaccuacgggacaggauccuggcccgacggugcagauaucaaccugaugccuauuuga

SEQ ID NO: 149765 - RNA, 1410 nt, Artificial Sequence; identical to SEQ ID NO: 142273
  derived and/or modified CDS sequence (opt3) from neuraminidase__InfluenzaA__AFD63606

SEQ ID NO: 149766 - RNA, 1410 nt, Artificial Sequence; identical to SEQ ID NO: 142193
  derived and/or modified CDS sequence (opt3) from neuraminidase__InfluenzaA__AFD63628

SEQ ID NO: 149767 - RNA, 1410 nt, Artificial Sequence; identical to SEQ ID NO: 142273
  derived and/or modified CDS sequence (opt3) from neuraminidase__InfluenzaA__AFD63639

SEQ ID NO: 149768 - RNA, 1410 nt, Artificial Sequence; identical to SEQ ID NO: 142273
  derived and/or modified CDS sequence (opt3) from neuraminidase__InfluenzaA__AFD63650

SEQ ID NO: 149769 - RNA, 1410 nt, Artificial Sequence
  derived and/or modified CDS sequence (opt3) from neuraminidase__InfluenzaA__AFD63661
augaaccccaaucagaagaucauuaccauaggcagcgugucccugacaaucgccgcuauuugcuuccucaugcagaucgcaauucuugucacuacgguuacccugcacuuuaaacagcaugaguguaacucuccuccaaauaaccaggugauguugugcgaaccgacaaucauagagagaaauaucacugaaauuguauacuuaaccaacucaacaaucgagaaggaaauuugucccaaacuggccgaguauaggaauuggaguaagccucagugcaacaucaccggguucgcgccauuuagcaaagacaauuccauacggcuaucugcuggaggugauauuugggugacucgcgagcccuacgucucgugugacccugauaagugcuaucaauucgcccucggccaggggacaacccugaacaauggacacucaaacgacacggugcaugaucgaacuccauaccguacccuucugaugaaugaauugggcguucccuuucaccucgguacaagacagguguguaucgcauggagcaguuccucuugccaugacgggaaggccuggcugcacgucugugugacuggagaugacaaaaacgcuaccgccagcuucauuuauaauggcaggcugguagauuccaucggcucauggaguaagaaaauccuccggacacaggagagcgaaugcguuuguauuaacgggaccugcacgguggucaugacugacggaucugcauccgguaaggcugauacaaaaauauuauuuaucgaggagggcaagauugugcacaucucaacccugagcgggagugcccaacauguggaagagugcucuuguuacccucgcuauccaggagucagaugcguuuguagggacaacuggaagggcuccaaucggccgauaguggauauuaacguaaaagacuacagcaucgugucgucuuacgucugcuccggucuugugggggacacuccccgcaagaaugauucauucaguagcucccacuguuuggacccuaacaaugaagagggaggccauggcguuaaagggugggcguuugaugacggaaacgauguguggaugggucgaacaaucucugaaaagcugagaagcggcuaugagaccuucaaagucauugagggguggucaaagccaaauaguaaacuacagaucaacaggcaagugauuguagaacggggaaaucguuccggcuacagcgguauauuuucuguugaggggaagucaugcaucaaccgcuguuucuauguggaacucauuagaggcaggaaggaggaaacggaggucugguggaccaguaauagcaucguggucuuuugcggaacauccggcacuuacgggaccggaucuuggcccgacggugcagauaucaaccugaugccuauuuga

SEQ ID NO: 149770 - RNA, 1410 nt, Artificial Sequence; identical to SEQ ID NO: 143979
  derived and/or modified CDS sequence (opt3) from neuraminidase__InfluenzaA__AFD63672

SEQ ID NO: 149771 - RNA, 1410 nt, Artificial Sequence
  derived and/or modified CDS sequence (opt3) from neuraminidase__InfluenzaA__AFD63683
augaaccccaaucagaagaucauuaccaugggcagcgugucccugacaauagccacuaucugcuuccucaugcaaauugcuauccuugucacgaccguuacacugcacuuuaaacaguacgaguguaacucuccuccaaauaaccaggugauguugugcgaaccgacuauuaucgagagaaauauaaccgaaaucguauauuuaacaaacaccacuauugagaaggaaaucugucccaaacuggcagaguacaggaauuggucaaagccucagugcaacauuacaggguucgccccauuuaguaaagacaauagcauccggcuauccgcgggaggugauauaugggugacccgcgagcccuaugucucuugugacccugauaagugcuaccaauucgcucucggccaggggacgacucugaacaauggacauucgaacgacaccgugcacggccgaacaccauaucguacucuucugaugaaugaauuggguguucccuuucaucucgggaccagacagguguguauugccuggucaagcaguuccugccacgauggaaaggcauggcugcaugucugugugacaggcgacgauaaaaacgccaccgcuucuuucaucuacaauggcaggcugguagacagcauuggguccuggucaaagaaaauccuccggacgcaggagagugaaugcguuuguaucaacggaacuugcacaguggucaugaccgaugguagcgcaucuggcaaggccgacacuaaaauuuuauuuauagaggaggggaagaucauucacaucuccacacugucaggaagcgcucaacacguggaagagugcaguuguuauccucgcuacccaggcgugagaugcgucuguagggauaacuggaaggguucuaaucggccgauaguugacauuaacgugaaagauuacuccaucguaagcucguaugugugcucugggcuugucggagacacuccccgcaagaaugacuccucaaguagcucccauuguuuggauccuaacaaugaagagggcggccacggggugaaaggaugggccuucgacgaugguaacgacguuuggaugggccgaacgaucucugaaaagcugagaagcggguacgagaccuuuaaagugauugagggauggucaaagccaaauaguaaacuacagaucaacaggcaggucauuguggaacggggcaaucguuccgguuauagcgggauauucucuguagagggcaagucaugcaucaaccgcuguuuuuacguugaacucauuagaggaaggaaggaggaaacagaggugugguggaccaguaauagcaucgucguguucugcggcaccuccgggacauauggaacugguucuuggcccgauggcgcggacaucaaccugaugccuauuuga

SEQ ID NO: 149772 - RNA, 1410 nt, Artificial Sequence
  derived and/or modified CDS sequence (opt3) from neuraminidase__InfluenzaA__AFD63694
augaaccccaaucagaagaucauuaccauaggcagcgugucccugacaaucgccacuauuugcuuccucaugcaaaucgcuauucuugucacgaccaucacacugcacuuuaaacagcaugaguguaacucuccuccaaauaaccagguuauguugugcgaaccgacuauaaucgagagaaauauuaccgaaaucguguacuuaacaaacaccacuauugagaaggaaaucugucccaaacuggcagaguauaggaauuggucaaagccucagugcaacauaacaggguucgccccauuuaguaaagacaauagcauucggcuauccgcgggaggugauaucuggguaacccgcgagcccuacgugucuugugacccugauaagugcuaucaauucgcucucggccaggggacgacucugaacaauggacacucgaacgacaccguccaugaucgaacaccauaccguacucuucugaugaaugaauugggcgugcccuuucaccucgguaccagacagguuuguauugccuggucaagcaguuccugccaugacgggaaggcauggcugcacgugugugucacaggagaugacaaaaacgccaccgcuucuuucaucuauaauggcaggcugguggauagcaucggcuccuggucaaagaaaauucuccggacgcaggagagugaaugcguauguauaaacgggacuugcacaguugugaugaccgacggaagcgcaucugguaaggccgauacuaaaaucuuauuuauugaggagggcaagaucguccacauauccacacugucagggagcgcucaacauguggaagagugcaguuguuacccucgcuauccaggagugagaugcgucuguagggacaacuggaagggcucuaaucggccgauuguugauaucaacgugaaagacuacuccaucguaagcucguacgugugcucuggucuugucggggacacgccccgcaagaaugauuccuucucaaguagccacuguuuggacccuaacaaugaagagggaggccauggcgugaaagggugggccuuugaugacggaaacgauguuuggaugggucgaaccauuuccgaaaagcugagaucuggcuaugagaccuucaaagugaucgagggguggagcaagccaaauucaaaacuacagauuaacaggcaggucauaguggaacggggaaaucguaguggcuacuccgguaucuuuagcguagaggggaagucuugcauuaaccgcuguuucuauguugaacucaucagaggcaggaaggaggaaacagaggugugguggacuucaaauaguaucgucguguuuugcggaaccagcggcacauacgggacuggauccuggcccgacggugcggauauuaaccugaugccuauauga

SEQ ID NO: 149773 - RNA, 1410 nt, Artificial Sequence
  derived and/or modified CDS sequence (opt3) from neuraminidase__InfluenzaA__AFD63705
augaaccccaaucagaagaucauuaccauaggcagcgugucccugacaaucgccgcuauuugcuuccucaugcagaucgcaauucuugucacuacgguuacccugcacuuuaaacagcaugaguguaacucuccuccaaauaaccaggugauguugugcgaaccgacaaucauagagagaaauaucacugaaauuguauacuuaaccaacacaaccaucgagaaggaaauuugucccaaacuggccgaguauaggaauuggucaaagccucagugcaacaucacuggguucgcgccauuuaguaaagacaauagcauacggcuauccgcuggaggugauauuugggugacacgcgagcccuacgucucuugugacccugauaagugcuaucaauucgcccucggcaaggggaccacgcugaacaauggacacucgaacgacacugugcaugaucgaaccccauaccguacacuucugaugaaugaauugggcguucccuuucaccucgguacuagacagguguguaucgcauggucaagcaguuccugccaugacgggaaagccuggcugcacgucugugugaccggagaugacaagaacgcuacagcaucuuucauuuauaauggcaggcugguagauagcaucggcuccuggaguaaaaagauccuccggacccaggagucagaaugcguuuguauuaacgggacgugcacuguggucaugacagacggaagcgccucugguaaagcugauaccaagauauuauuuaucgaggagggcaagauugugcacaucuccacucugucagggagcgcccagcauguggaagagugcaguuguuacccucgcuauccaggagucagaugcguuuguagggacaacuggaaaggcucuaaucggccgauaguggauauuaacguaaaggacuacuccaucgugagcucguacgucugcucuggucuugugggggacacaccccgcaaaaaugauuccuucucaaguagccacuguuuggacccuaacaaugaagagggaggccauggcguuaaggggugggcguuugaugacggaaacgauguguggaugggucgaaccaucuccgaaaaacugagaucuggcuaugagacguucaaggucauugagggguggagcaaaccaaauucaaagcuacaaaucaacaggcaagugauuguagaacggggaaaucguaguggcuacuccgguauauuuagcguugaggggaagucuugcaucaaccgcuguuucuauguggaacucauuagaggcaggaaagaggaaaccgaggucugguggacaucaaauaguaucguggucuuuugcggaacuagcggcaccuacgggacaggauccuggcccgacggugcagauaucaaccugaugccuauuuga

SEQ ID NO: 149774 - RNA, 1410 nt, Artificial Sequence
  derived and/or modified CDS sequence (opt3) from neuraminidase__InfluenzaA__AFD63716
augaaccccaaucagaagaucauuaccauaggcagcgugucccugacaaucgccgcuauuugcuuccucaugcagaucgcaauucuugucacuacgguuacccugcacuuuaaacagcaugaguguaacucuccuccaaauaaccaggugauguugugcgaaccgacaaucauagagagaaauaucacugaaauuguauacuuaaccaacacaaccaucgagaaggaaauuugucccaaacuggccgaguauaggaauuggucaaagccucagugcaacaucacuggguucgcgccauuuaguaaagacaauagcauacggcuauccgcuggaggugauauuugggugacacgcgagcccuacgucucuugugacccugauaagugccaccaauucgcccucggccaggggaccacgcugaacaauggacauucgaacgacacugugcacgaucgaaccccauaucguacacuucugaugaaugaauugggcguucccuuucaucucgguacuagacagguguguaucgcauggucaagcaguuccugccacgacgggaaggccuggcugcacgucugugugaccggagaugacaaaaacgcuacagcaucuuucauuuacaauggcaggcugguagauagcaucggcuccuggucaaagaaaauccuccggacccaggagagugaaugcguuuguauuaacgggacgugcacuguggucaugacagacggaagcgccucugguaaggcugauaccaaaauauuauuuaucgaggagggcaagauugugcauaucuccacucugucagggagcgcccaacacguggaagagugcaguuguuauccucgcuacccaggagucagaugcguuuguagggacaacuggaagggcucuaaucggccgauaguggauauuaacguaaaagacuauuccaucgugagcucguacgucugcucuggucuugugggggacacaccccgcaagaaugauuccuucucaaguagccauuguuuggacccuaacaaugaagagggaggccacggcguuaaagggugggcguuugaugacggaaacgauguguggaugggucgaaccaucuccgaaaagcugagaucuggcuacgagacguucaaagucauugagggguggagcaagccaaauucaaaacuacagaucaacaggcaagugauuguagaacggggaaaucguaguggcuauuccgguauauuuagcguugaggggaagucuugcaucaaccgcuguuucuacguggaacucauuagaggcaggaaggaggaaaccgaggucugguggacaucaaauaguaucguggucuuuugcggaacuagcggcaccuaugggacaggauccuggcccgacggugcagauaucaaccugaugccuauuuga

SEQ ID NO: 149775 - RNA, 1410 nt, Artificial Sequence; identical to SEQ ID NO: 142273
  derived and/or modified CDS sequence (opt3) from neuraminidase__InfluenzaA__AFD63727

SEQ ID NO: 149776 - RNA, 1410 nt, Artificial Sequence; identical to SEQ ID NO: 142273
  derived and/or modified CDS sequence (opt3) from neuraminidase__InfluenzaA__AFD63738

SEQ ID NO: 149777 - RNA, 1410 nt, Artificial Sequence
  derived and/or modified CDS sequence (opt3) from neuraminidase__InfluenzaA__AFD63749
augaaccccaaucagaagaucauuaccauaagcuccgugucucugacaaucgccacuauuugcuuccucaugcaaaucgcuauucuugucacgaccguuacacugcacuuuaaacagcaugaguguaacucaccuccaaauaaccaggugauguugugcgaaccgacuaucauagagagaaauaucaccgaaauuguauacuuaacaaacaccacuaucgagaaggaaauuugucccaaacuggcagaguauaggaauuggaguaagccucagugcaacaucacaggcuucgccccauuuagcaaagacaauuccauacggcuaucugcugggggagauauuugggugacccgcgagcccuacgucucgugugacccugauaagugcuaucaauucgcgcucggucagggcacgacucugaacaaugggcacucaaacgacaccgugcaugaucgaacaccauaccguacucuucugaugaaugaauugggaguucccuuucaccucggcaccagacagguguguaucgccuggagcaguuccucuugccaugacgguaaggcauggcugcacgucugugugacaggggaugacaaaaacgccaccgcuagcuucauuuauaauggaaggcugguagauuccaucggcucauggaguaagaaaauccuccggacgcaggagagcgaaugcguuuguauuaacggcacuugcacaguggucaugaccgacgggucugcauccggaaaggccgauacuaaaauauuauuuaucgaggaggguaagauugugcacaucucaacacugagcggcagugcucaacauguggaagagugcucuuguuacccucgcuauccaggggucagaugcguuuguagggacaacuggaagggauccaaucggccgauaguggauauuaacguaaaagacuacagcaucgugucgucuuacgucugcuccggccuugugggugacacccccaggaagaaugauucauucaguagcucccacuguuuggacccuaacaaugaagaagggggacauggcguuaaaggcugggccuuugaugacgggaacgauguguggaugggacgaacgaucucugagaagcugagaagcgguuaugagaccuucaaagucauugagggcuggucaaagccaaauaguaaacuacagaucaaccgccaggugauuguagaacgggggaaucguuccggauacagcggcauauuuucuguugaggguaagucaugcaucaaccgcuguuucuauguggaacucauuagagggaggaaggaggaaacagaggucugguggaccaguaauagcaucguggucuuuugcggcacuuccggaacauacggcacugggucuuggcccgacggagcggauaucaaccugaugccuauuuga

SEQ ID NO: 149778 - RNA, 1410 nt, Artificial Sequence
  derived and/or modified CDS sequence (opt3) from neuraminidase__InfluenzaA__AFD63760
augaaccccaaucagaagaucauuaccauaggcagcgugucccugacaaucgccacuauuugcuuccucaugcaaaucgcuauucuugucacgaccguuacacugcacuuuaaacaguacgaguguaacucuccuccaaauaaccaggugauguugugcgaaccgacuaucauagagagaaauaucaccgaaauuguauauuuaacaaacaccacuaucgagaaggaaauuugucccaaacuggcagaguacaggaauuggucaaagccucagugcaacaucacaggguucgccccauuuaguaaagacaauagcauacggcuauccgcgggaggugauauuugggugacccgcgagcccuaugucucuugugacccugauaagugcuaccaauucgcucucggccaggggacgacucugaacaauggacauucgaacgacaccgugcacgaucgaacaccauaucguacucuucugaugaaugaauugggcguucccuuucaucucgguaccagacagguguguaucgccuggucaagcaguuccugccacgacgggaaggcauggcugcaugucugugugacaggagaugacaaaaacgccaccgcuucuuucauuuacaauggcaggcugguagauagcaucggcuccuggucaaagaaaauccuccggacgcaggagagugaaugcguuuguauuaacgggacuugcacaguggucaugaccgacggaagcgcaucugguaaggccgauacuaaaauauuauuuaucgaggagggcaagauuauccacauauccacacugucagggagcgcucaacacguggaagagugcaguuguuauccucgcuacccaggagugagaugcgucuguagggacaacuggaagggcucuaaucggccgauuguugauaucaacgugaaagacuacuccaucguaagcucguaugugugcucuggucuugucggggacacuccccgcaagaaugauuccucaaguagcucccauuguuuggacccuaacaaugaagagggaggccacggcgugaaagggugggccuucgaugacggaaacgauguuuggaugggucgaacgauuucugaaaagcugagaagcggcuacgagaccuuuaaagugaucgagggguggucaaagccaaauaguaaacuacagauuaacaggcaggucauaguggaacggggaaaucguuccggcuauagcgguaucuucucuguagaggggaagucaugcauuaaccgcuguuuuuacguugaacucaucagaggcaggaaggaggaaacagaggugugguggaccaguaauagcaucgucguguucugcggaaccuccggcacauaugggacuggaucuuggcccgacggugcggauauuaaccugaugccuauauga

SEQ ID NO: 149779 - RNA, 1410 nt, Artificial Sequence; identical to SEQ ID NO: 142273
  derived and/or modified CDS sequence (opt3) from neuraminidase__InfluenzaA__AFD63771

SEQ ID NO: 149780 - RNA, 1410 nt, Artificial Sequence; identical to SEQ ID NO: 142273
  derived and/or modified CDS sequence (opt3) from neuraminidase__InfluenzaA__AFD63782

SEQ ID NO: 149781 - RNA, 1410 nt, Artificial Sequence; identical to SEQ ID NO: 149778
  derived and/or modified CDS sequence (opt3) from neuraminidase__InfluenzaA__AFD63793

SEQ ID NO: 149782 - RNA, 1410 nt, Artificial Sequence; identical to SEQ ID NO: 142273
  derived and/or modified CDS sequence (opt3) from neuraminidase__InfluenzaA__AFD63804

SEQ ID NO: 149783 - RNA, 1410 nt, Artificial Sequence; identical to SEQ ID NO: 142273
  derived and/or modified CDS sequence (opt3) from neuraminidase__InfluenzaA__AFD63815

SEQ ID NO: 149784 - RNA, 1410 nt, Artificial Sequence; identical to SEQ ID NO: 142273
  derived and/or modified CDS sequence (opt3) from neuraminidase__InfluenzaA__AFD63826

SEQ ID NO: 149785 - RNA, 1410 nt, Artificial Sequence; identical to SEQ ID NO: 149778
  derived and/or modified CDS sequence (opt3) from neuraminidase__InfluenzaA__AFD63837

SEQ ID NO: 149786 - RNA, 1410 nt, Artificial Sequence
  derived and/or modified CDS sequence (opt3) from neuraminidase__InfluenzaA__AFD63848
augaaccccaaucagaagaucauuaccauaggcagcgugucccugacaaucgccgcuauuugcuuccucaugcaaaucgcaauucuugucacuacgguuacccugcacuuuaaacagagagaguguaacucuccuccaaauaaccaggugauguugugcgaaccgacaaucauagagaggaauaucacugaaauuguauacuuaaccaacacaaccaucgagaaggaaauuugucccaaacuggccgaguaucggaauuggucaaagccucagugcaacaucacuggguucgcgccauuuaguaaagacaauagcauacgccuauccgcuggaggugauauuugggugacacgagagcccuacgucucuugugacccugauaagugcuaucaauucgcccucggccaggggaccacgcugaacaauggacauucgaacgacacugugcacgaucguaccccauacagaacacuucugaugaaugaauugggcguucccuuucaucucgguacuaggcaaguguguaucgcauggucaagcaguuccugccacgacgggaaggccuggcugcaugucugugugaccggagaugacaaaaacgcuacagcaucuuucauuuauaauggccggcugguagauagcaucggcuccuggucaaagaaaauccuccgcacccaggagagugaaugcguuuguauuaacgggacgugcacuguggucaugacagacggaagcgccucugguaaggcugauaccaaaauauuauuuaucgaggagggcaagauugugcacaucuccacucugucagggagcgcccagcacguggaagagugcaguuguuacccuagauauccaggagucaggugcguuugucgggacaacuggaagggcucuaaucgcccgauaguggauauuaacguaaaagacuacuccaucgugagcucguacgucugcucuggucuugugggggacacaccccgaaagaaugauuccuucucaaguagccauuguuuggacccuaacaaugaagagggaggccacggcguuaaagggugggcguuugaugacggaaacgauguguggauggguagaaccaucuccgaaaagcugaggucuggcuaugagacguucaaagucauugagggguggagcaagccaaauucaaaacuacagaucaaccgucaggugauuguagaacggggaaaucgcaguggcuacuccgguauauuuagcguugaggggaagucuugcaucaacagauguuucuauguggaacucauuaggggccggaaggagaaaaccgaagucugguggacaucaaauaguaucguggucuuuugcggaacuagcggcaccuacgggacaggauccuggcccgacggugcagauaucaaccugaugccuauuuga

SEQ ID NO: 149787 - RNA, 1410 nt, Artificial Sequence; identical to SEQ ID NO: 142193
  derived and/or modified CDS sequence (opt3) from neuraminidase__InfluenzaA__AFD63859

SEQ ID NO: 149788 - RNA, 1410 nt, Artificial Sequence; identical to SEQ ID NO: 142193
  derived and/or modified CDS sequence (opt3) from neuraminidase__InfluenzaA__AFD63870

SEQ ID NO: 149789 - RNA, 1410 nt, Artificial Sequence; identical to SEQ ID NO: 142273
  derived and/or modified CDS sequence (opt3) from neuraminidase__InfluenzaA__AFD63881

SEQ ID NO: 149790 - RNA, 1410 nt, Artificial Sequence; identical to SEQ ID NO: 142273
  derived and/or modified CDS sequence (opt3) from neuraminidase__InfluenzaA__AFD63892

SEQ ID NO: 149791 - RNA, 1410 nt, Artificial Sequence
  derived and/or modified CDS sequence (opt3) from neuraminidase__InfluenzaA__AFD63903
augaaccccaaucagaagaucauuaccauaggcagcgugucccugacaaucgccgcuauuugcuuccucaugcagaucgcaauucuugucacuacgguuacccugcacuuuaaacagcaugaguguaacucuccuccaaauaaccaggugauguugugcgaaccgacaaucauagagagaaauaucacugggauuguauacuuaaccaacacaaccaucgaaaaggagauuugucccaaacuggccgaauauaggaauuggucaaagccucagugcaacaucacuggauucgcgccauuuaguaaagacaauagcauacggcuauccgcugguggcgauauuugggugacacgcgagcccuacgucucuugugacccugauaagugcuaucaauucgcccucgggcagggaaccacgcugaacaauggccacucgaacgacacugugcaugaucgaaccccauaccguacacuucugaugaaugaguuggguguucccuuucaccucgggacuagacagguguguaucgcauggucaagcaguuccugccaugacggaaaggccuggcugcacgucugugugaccggcgaugacaaaaacgcuacagcaucuuucauuuauaauggcaggcugguagauagcaucggguccuggucaaagaaaauccuccggacccaggaaagugagugcguuuguauuaacggaacgugcacuguggucaugacagacgguagcgccucuggcaaggcugauaccaaaauauuauuuaucgaagaggggaagauugugcacaucuccacucugucaggaagcgcccaacauguggaggaaugcaguuguuacccucgcuauccaggcgucagaugcguuuguagggacaacuggaaggguucuaaucggccgauaguggauauuaacguaaaagacuacuccaucgugagcucguacgucugcucugggcuugugggagacacaccccgcaagaaugauuccuucucaaguagccacuguuuggacccuaacaaugaggaaggcggccaugggguuaaaggaugggcguuugaugacgguaacgauguguggaugggccgaaccaucuccgagaagcugagaucuggguaugaaacguucaaagucauugagggauggagcaagccaaauucaaaacuacagaucaacaggcaagugauuguagagcggggcaaucguagugguuacuccgggauauuuagcguugaaggcaagucuugcaucaaccgcuguuucuauguggagcucauuagaggaaggaaggaagagaccgaagucugguggacaucaaauaguaucguggucuuuugcggcacuagcgggaccuacggaacagguuccuggcccgacggcgcagauaucaaccugaugccuauuuga

SEQ ID NO: 149792 - RNA, 1410 nt, Artificial Sequence
  derived and/or modified CDS sequence (opt3) from neuraminidase__InfluenzaA__AFD63914
augaaccccaaucagaagaucauuaccauaggcagcgugucccugacaaucgccgcuauuugcuuccucaugcagaucgcaauucuugucacuacgguuacccugcacuuuaaacagcaugaguguaacucuccuccaaauaaccaggugauguugugcgaaccgacaaucauagagagaaauaucacugaaauuguauacuuaaccaacacaaccaucgagaaggaaauuugucccaaacuggccgaguauaggaauuggucaaagccucagugcaacaucacuggguucgcgccauuuaguaaagacaauagcauacggcuauccgcuggaggugauauuugggugacacgcgagcccuacgucucuugugacccugauaagugcuaucaauucgcccucggccaggggaccacgcugaacaauggacacucgaacgacacugugcaugaucgaaccccauaccguacacuucugaugaaugaauugggcguucccuuucaccucgguacuagacagguguguaucgcauggucaagcaguuccugccaugacgggaaggccuggcugcacgucugugugaccggagaugacaaaaacgcuacagcaucuuucauuuauaauggcaggcugguagauagcaucggcuccuggucaaagaaaauccuccggacccaggagagugaaugcguuuguauuaacgggacgugcacuguggucaugacagacggaagcgccucugguaaggcugauaccaaaauauuauuuaucgaggagggcaagauugugcacaucuccacucugucagggagcgcccaacauguggaagagugcaguuguuacccucgcuauccaggagucagaugcguuuguagggacaacuggaagggcucuaaucggccgauaguggauauuaacguaaaagacuacuccaucgugagcucguacgucugcucuggucuugugggggacacaccccgcaagaaugauuccuucucaaguagccacuguuuggacccuaacaaugaagagggaggccauggcguuaaagggugggcguuugaugacggaaacgauguguggaugggucgaaccaucuccgaaaagcugagaucuggcuaugagacguucaaagucauugagggguggagcaagccaaauucaaaacuacagaucaacaggcaagugauuguagaacggggaaaucguaguggcuacuccgguauauuuagcguugaggggaagucuugcaucaaccgcuguuucuauguggaacucauuagaggcaggaaggagaaaaccgaagucugguggacaucaaauaguaucguggucuuuugcggaacuagcggcaccuacgggacaggauccuggcccgacggugcagauaucaaccugaugccuauuuga

SEQ ID NO: 149793 - RNA, 1410 nt, Artificial Sequence; identical to SEQ ID NO: 149778
  derived and/or modified CDS sequence (opt3) from neuraminidase__InfluenzaA__AFD63925

SEQ ID NO: 149794 - RNA, 1410 nt, Artificial Sequence
  derived and/or modified CDS sequence (opt3) from neuraminidase__InfluenzaA__AFD63936
augaaccccaaucagaagaucauuaccauaggcagcgugucccugacaaucgccacuauuugcuuccucaugcagaucgcuauucuugucacgaccguuacacugcacuuuaaacagcaugaguguaacccuccaccgaauaaccaggugauguugugcgaacccacuaucauagagagaaauaucaccgaaauuguauacuuaacaaacaccacuaucgagaaggaaauuuguccuaaacuggcagaguauaggaauuggucuaagccacagugcaacaucacaggguucgcccccuuuucaaaagacaauaguauacggcuaagcgcgggaggugauauuugggugacccgcgagccuuacgucuccugugacccagauaagugcuaucaauucgcucucggccaggggacgacucugaacaauggacacucuaacgacaccgugcaugaucgaacacccuaccguacucuucugaugaaugaauugggcguuccuuuucaccucgguaccagacagguguguaucgccuggucgucaagcaguugccaugacgggaaggcauggcugcacgucugugugacaggagaugacaaaaacgccaccgcuuccuucauuuauaauggcaggcugguagauucuaucggcagcugguccaagaaaauccuccggacgcaggagucagaaugcguuuguauuaacgggacuugcacaguggucaugaccgacggaagugcaagcgguaaggccgauacuaaaauauuauuuaucgaggagggcaagauugugcacaucucuacacuguccgggucagcucaacauguggaagagugcagcuguuacccacgcuauccgggagucagaugcguuuguagggacaacuggaagggcaguaaucggcccauaguggauauuaacguaaaagacuacucuaucguguccagcuacgucugcucgggucuugugggggacaccccucgcaagaaugauucuuucuccucaagucacuguuuggacccaaacaaugaagagggaggccauggcguuaaagggugggccuuugaugacggaaacgauguguggaugggucgaacgaucagcgaaaagcugagauccggcuaugagaccuucaaagucauugagggguggucuaagcccaauagcaaacuacagaucaacaggcaagugauuguagaacggggaaaucguucaggcuacagugguauauuuuccguugagggcaagagcugcaucaaccgcuguuucuauguggaacucauuagagggaggaaggaggaaacagaggucugguggacuucuaauucaaucguggucuuuugcggaaccaguggcacauacgggacuggaagcuggccugacggugcggauaucaaccugaugccaauuuga

SEQ ID NO: 149795 - RNA, 1410 nt, Artificial Sequence; identical to SEQ ID NO: 142273
  derived and/or modified CDS sequence (opt3) from neuraminidase__InfluenzaA__AFD63947

SEQ ID NO: 149796 - RNA, 1410 nt, Artificial Sequence; identical to SEQ ID NO: 142273
  derived and/or modified CDS sequence (opt3) from neuraminidase__InfluenzaA__AFD63958

SEQ ID NO: 149797 - RNA, 1410 nt, Artificial Sequence; identical to SEQ ID NO: 142273
  derived and/or modified CDS sequence (opt3) from neuraminidase__InfluenzaA__AFD63969

SEQ ID NO: 149798 - RNA, 1410 nt, Artificial Sequence; identical to SEQ ID NO: 142273
  derived and/or modified CDS sequence (opt3) from neuraminidase__InfluenzaA__AFD63980

SEQ ID NO: 149799 - RNA, 1410 nt, Artificial Sequence
  derived and/or modified CDS sequence (opt3) from neuraminidase__InfluenzaA__AFD64002
augaaccccaaucagaagaucauuaccauaggcagcgugucccugacaaucgccgcuauuugcuuccucaugcagaucgcaauucuugucacuacgguuacccugcacuuuaaacagcaugaguguaacucuccuccaaauaaccaggugauguugugcgaaccgacaaucauagagagaaauaucacugaaauuguauacuuaaccaacacaaccaucgagaaggaaauuugucccaaacuggccgaguauaggaauuggucaaagccucagugcaacaucacuggguucgcgccauuuaguaaagacaauagcauacggcuauccgcuggaggugauauuugggugacacgcgagcccuacgucucuugugacccugauaagugcuaucaauucgcccucggccaggggaccacgcugaacaauggacacucgaacgacacugugcaugaucgaaccccauaccguacacuucugaugaaugaauugggcguucccuuucaccucgguacuagacagguguguaucgcauggucaagcaguuccugccaugacgggaaggccuggcugcacgucugugugaccggagaugacaaaaacgcuacagcaucuuucauuuauaauggcaggcugguagauagcaucggcuccuggucaaagaaaauccuccggacccaggagagugaaugcguuuguauuaacgggacgugcacuguggucaugacagacggaagcgccucugguaaggcugauaccaaaauauuauuuaucgaggagggcaagauugugcacaucuccacucugucagggagcgcccaacauguggaagagugcaguuguuacccucgcuauccaggagucagaugcguuuguagggacaacuggaagggcucuaaucggccgauaguggauauuaacguaaaagacuacuccaucgugagcucguacgucugcucuggucuugugggggacacaccccgcaagaccgauuccuucucaaguagccacuguuuggacccuaauaacgaagagggaggccauggcguuaaagggugggcguuugaugacggaaaugauguguggaugggucgaacgaucuccgaaaagcugagaucuggcuaugagaccuucaaagucauugagggguggagcaagccaaacucaaaacuacagaucaauaggcaagugauuguagaacggggaaaccguaguggcuacuccgguauauuuagcguugaggggaagucuugcaucaaucgcuguuucuauguggaacucauuagaggcaggaaggaggaaacagaggucugguggacuucaaacaguaucguggucuuuugcggaaccagcggcacauacgggacuggauccuggcccgacggugcagauaucaaucugaugccuauuuga

SEQ ID NO: 149800 - RNA, 1410 nt, Artificial Sequence; identical to SEQ ID NO: 142183
  derived and/or modified CDS sequence (opt3) from neuraminidase__InfluenzaA__AFD64013

SEQ ID NO: 149801 - RNA, 1410 nt, Artificial Sequence
  derived and/or modified CDS sequence (opt3) from neuraminidase__InfluenzaA__AFD64024
augaaccccaaucagaagaucauuaccauaggcagcgugucccugacaaucgccgcuauuugcuuccucaugcaaaucgcaauucuugucacuacgguuacccugcacuuuaaacagcaugaguguaacucuccuccaaauaaccaggugauguugugcgaaccgacaaucauagagaagaauaucacugaaauuguauacuuaaccaacacaaccaucgagaaagaaauuugucccaagcuggccgaguauagaaauuggucaaaaccucagugcaacaucacuggguucgcgccauuuaguaaggacaauagcauaaggcuauccgcuggaggugauauuugggugacacgggagcccuacgucucuugugacccugauaagugcuaucaauucgcccucggccaggggaccacgcugaacaauggacacucgaacgacacugugcaugaucgcaccccauaccgaacacuucugaugaaugaauugggcguucccuuucaccucgguacucgucagguguguaucgcauggucaagcaguuccugccaugacgggaaagccuggcugcacgucugugugaccggagaugacaagaacgcuacagcaucuuucauuuauaauggcagacugguagauagcaucggcuccuggaguaaaaagauccucaggacccaggagucagaaugcguuuguauuaacgggacgugcacuguggucaugacagacggaagcgccucugguaaagcugauaccaagauauuauuuaucgaggagggcaagauugugcacaucuccacucugucagggagcgcccaacauguggaagagugcaguuguuacccucgguauccaggaguccgcugcguuuguagagacaacuggaaaggcucuaauaggccgauaguggauauuaacguaaaggacuacuccaucgugagcucguacgucugcucuggucuugugggggacacaccccggaaaaaugauuccuucucaaguagccacuguuuggacccuaacaaugaagagggaggccauggcguuaaggggugggcguuugaugacggaaacgauguguggaugggucgcaccaucuccgaaaaacugcgaucuggcuaugagacguucaaggucauugagggguggagcaaaccaaauucaaagcuacagaucaacagacaggugauuguagaaaggggaaaucggaguggcuacuccgguauauuuagcguugaggggaagucuugcaucaaccguuguuucuauguggaacucauucgcggcagaaaagaggaaaccgaggucugguggacaucaaauaguaucguggucuuuugcggaacuagcggcaccuacgggacaggauccuggcccgacggugcagauaucaaccugaugccuauuuga

SEQ ID NO: 149802 - RNA, 1410 nt, Artificial Sequence
  derived and/or modified CDS sequence (opt3) from neuraminidase__InfluenzaA__AFD64035
augaaccccaaucagaagaucauuaccauaggcagcgugucccugacaaucgccgcuauuugcuuccucaugcagaucgcaauucuugucacuacgguuacccugcacuuuaaacagcaugaguguaacucuccuccaaauaaccaggugauguugugcgaaccgacaaucauagagagaaauaucacugaaauuguauacuuaaccaacacaaccaucgagaaggaaauuugucccaaacuggccgaguauaggaauuggucaaagccucagugcaacaucacuggguucgcgccauuuaguaaagacaauagcauacggcuauccgcuggaggugauauuugggugacacgcgagcccuacgucucuugugacccugauaagugcuaucaauucgcccucggccaggggaccacgcugaacaauggacacucgaacgacacugugcaugaucgaaccccauaccguacacuucugaugaaugaauugggcguucccuuucaccucgguacuagacagguguguaucgcauggucaagcaguuccugccaugacgggaaggccuggcugcacgucugugugaccggagaugacaaaaacgcuacagcaucuuucauuuauaauggcaggcugguagauagcaucggcuccuggucaaagaaaauccuccggacccaggagagugaaugcguuuguauuaacgggacgugcacuguggucaugacagacggaagcgccucugguaaggcugauaccaaaauauuauuuaucgaggagggcaagauugugcacaucuccacucugucagggagcgcccaacauguggaagagugcaguuguuacccucgcuauccaggagucagaugcguuuguagggacaacuggaagggcucuaaucggccgauaguggauauuaacguaaaagacuacuccaucgugagcucguacgucugcucuggucuugugggggacacaccccgcaagaaugauuccuucucaaguagccacuguuuggacccuaacaaugaagagggaggccauggcguuaaagggugggcguuugaugacggaaacgauguguggaugggucgaaccaucuccgaaaagcugagaucuggcuaugagacguucaaagucauugagggguggagcaagccaaauucaaaacuacagaucaacaggcaagugauuguagaacggggaaaucguaguggcuacuccgguauauuuagcguugaggggaagucuugcaucaaccgcuguuucuauguggaacucauuagaggcaggaaggaggaaaccgaggucugguggacaucaaauaguguggucguguuuugcggaacuagcggcaccuacgggacaggauccuggcccgacggugcagauaucaaccugaugccuaucuga

SEQ ID NO: 149803 - RNA, 1410 nt, Artificial Sequence
  derived and/or modified CDS sequence (opt3) from neuraminidase__InfluenzaA__AFD64046
augaaccccaaucagaagaucauuaccauaggcagcgugucccugacaaucgccacuauuugcuuccucaugcaaaucgcuauucuugucacgaccguuacacugcacuuuaaacagcaugaguguaacucuccuccaaauaaccaggugauguugugcgaaccgacuaucauagagagaaauaucaccgaaauuguauacuuaacaaacaccacuaucgagaaggaaauuugucccaaacuggcagaguauaggaauuggucaaagccucagugcaacaucacaggguucgccccauuuaguaaagacaauagcauacggcuauccgcgggaggugauauuugggugacccgcgagcccuacgucucuugugacccugauaagugcuaucaauucgcucucggccaggggacgacucugaacaauggacacucgaacgacaccgugcaugaacgaacaccauaccguacucuucugaugaaugaguugggcguucccuuucaccucgguaccagacagguguguaucgccuggucaagcaguuccugccaugaugggaaggcauggcugcacgucugugugacaggagacgauaaaaacgccaccgcuucuuucauuuauaauggcaggcugguagacagcaucggcuccuggucaaagaaaauccuccggacgcaggaaagugagugcguuuguauuaacgggacuugcacaguggucaugaccgauggaagcgcaucugguaaggccgacacuaaaauauuauuuaucgaggaaggcaagauugugcacaucuccacacugucagggagcgcucaacauguggaggaaugcaguuguuacccucgcuauccaggagucagaugcguuuguagggauaacuggaagggcucuaaucggccgauaguggacauuaacguaaaagauuacuccaucgugagcucguacgucugcucuggucuugugggggacacccccaggaagaaugacuccuucucaaguagccacuguuuggauccuaacaaugaggaaggaggccauggcguuaaagggugggccuuugacgauggaaacgacguguggaugggucgaacgaucuccgagaagcugagaucuggcuaugagaccuucaaagucauugaaggguggagcaagccaaauucaaaacuacagaucaaccgccaggugauuguagagcggggaaaucguaguggcuacuccgguauauuuagcguugaagggaagucuugcaucaaccgcuguuucuauguggagcucauuagaggcaggaaggaagagacagaggucugguggacuucaaauaguaucguggucuuuugcggaaccagcggcacauacgggacuggauccuggcccgauggugcggacaucaaccugaugccuauuuga

SEQ ID NO: 149804 - RNA, 1410 nt, Artificial Sequence; identical to SEQ ID NO: 149778
  derived and/or modified CDS sequence (opt3) from neuraminidase__InfluenzaA__AFD64057

SEQ ID NO: 149805 - RNA, 1410 nt, Artificial Sequence
  derived and/or modified CDS sequence (opt3) from neuraminidase__InfluenzaA__AFD64068
augaaccccaaucagaagaucauuaccauaggcagcgugucccugacaaucucuacuauuugcuucuuuaugcaaaucgccauucucaucacgaccgucacacuucacuucaaacaguacgaguuuaacucaccuccaaauaaccagguuaugcugugugaaccgacuauaaucgagagaaauauuaccgaaaucguguauuugacaaacaccacuauugagaaggaaaucugccccaaauuagcugaguacaggaauuggaguaagccucagugugacauaacaggguucgcaccauuuagcaaagauaacuccauucggcugucugccggaggugacaucuggguaacccgcgagcccuaugugucgugcgauccugacaaguguuaccaauucgcgcuaggccaggggacgacucucaauaacguccauucaaaugauaccgugcacaaccgaacaccauaucguacucugcuuaugaaugaacugggaguucccuuucauuugggcaccaaacaggugugcauugcuuggagcaguuccucuugucacgacgguaaggccuggcuccaugucugcgugacaggggaugacaagaacgcaaccgccagcuucaucuacaauggaagacugguagauuccaucguuucauggaguaaaaagauucugaggacgcaggagagcgaaugugugugcauaaacggcacuuguacagucgugaugaccgacggcucugcuuccgggaaagcagauacuaagauccucuuuauugaggagggaaagaucgugcacacaucaaccuuaagcgguagugcccaacacgucgaagagugcucuugcuauccucgguacccaggcguucgcugugugugcagagacaacuggaaaggguccaauaggccgauaguagauauuaacaucaaggacuacagcaucgugucgucuuaugucuguuccggacuggugggcgacacgccccggaaaaaugauucaaguagcuccucucauugccuugacccuaacaaugaagagggugggcacggaguuaagggcugggcuuucgaugacggcaacgauguguggauggggcgcaccauuagcgaaaaaucacgaaguggauacgagacauuuaaggucaucgaggguugguccaauccaaacagcaaauugcagauuaauagacaggugauaguagacaggggcaaccggucuggguauucaggaaucuucaguguugaaggcaagagcuguauuaaucguugcuuuuacguggagcugauccgcgguagaaaggaagagacugaaguccuauggaccuccaacucuaucguggucuucugugggacaucgggcacuuauggaaccggcagcuggcccgauggggccgacauuaaucucaugccuauauga

SEQ ID NO: 149806 - RNA, 1410 nt, Artificial Sequence
  derived and/or modified CDS sequence (opt3) from neuraminidase__InfluenzaA__AFD64079
augaaccccaaucagaagaucauuaccauaggcagcgugucccugacaaucgccgcuauuugcuuccucaugcagaucgcaauucuugucacuacgguuacccugcacuuuaaacagcaugaguguaacucuccuccaaauaaccaggugauguugugcgaaccgacaaucauagagagaaauaucacugaaauuguauacuuaaccaacacaaccaucgagaaggaaauuugucccaaacuggccgaguauaggaauuggucaaagccucagugcaacaucacuggguucgcgccauuuaguaaagacaauagcauacggauuuccgcuggaggugauaucugggugacacgcgagcccuacgucucuugugacccugauaagugcuaucaauucgcccuaggccaggggaccacgcucaacaauggacacucgaacgacacugugcaugaucgaaccccauaccguacacugcuuaugaaugaacugggcguucccuuucacuuggguacuagacagguguguauugcauggucaagcaguuccugccaugacgggaaggccuggcuccacgucugugugaccggagaugacaaaaacgcuacagcaucuuucaucuauaauggcaggcugguagauagcaucggcuccuggucaaagaaaauucugcggacccaggagagugaaugcguuuguauaaacgggacgugcacuguggucaugacagacggaagcgccucugguaaggcugauaccaaaauccucuuuauugaggagggcaagaucgugcacauauccacuuuaucagggagcgcccaacauguggaagagugcaguuguuacccucgcuauccaggagucagaugcguuuguagggacaacuggaagggcucuaaucggccgauuguggauaucaacguaaaagacuacuccaucgugagcucguacgucugcucuggucuggugggggacacaccccgcaagaaugauuccuucucaaguagccacugucuugacccuaacaaugaagagggaggccauggcguuaaagggugggcguuugaugacggaaacgauguguggaugggucgaaccauuuccgaaaaguugagaucuggcuaugagacguucaaagucaucgagggguggagcaagccaaauucaaaacugcagauuaacaggcaagugauaguagaacggggaaaucguaguggcuacuccgguaucuuuagcguugaggggaagucuugcauuaaccgcuguuucuauguggaacuaaucagaggcaggaaggaggaaaccgaggucugguggacaucaaauaguaucguggucuuuugcggaacuagcggcaccuacgggacaggauccuggcccgacggugcagauauuaaccucaugccuauauga

SEQ ID NO: 149807 - RNA, 1410 nt, Artificial Sequence; identical to SEQ ID NO: 142273
  derived and/or modified CDS sequence (opt3) from neuraminidase__InfluenzaA__AFD64090

SEQ ID NO: 149808 - RNA, 1410 nt, Artificial Sequence
  derived and/or modified CDS sequence (opt3) from neuraminidase__InfluenzaA__AFD64101
augaaccccaaucagaagaucauuaccauaggcagcgugucccugacaaucgccgcuauuugcuuccucaugcagaucgcaauucuugucacuacgguuacccugcacuuuaaacagcaugaguguaacucuccuccaaauaaccaggugauguugugcgaaccgacaaucauagagagaaauaucacugaaauuguauacuuaaccaacacaaccaucgagaaggaaauuugucccaaacuggccgaguauaggaauuggucaaagccucagugcaacaucacuggguucgcgccauuuaguaaagacaauagcauacggcuauccgcuggaggugauauuugggugacacgcgagcccuacgucucuugugacccugauaagugcuaucaauucgcccucggccaggggaccacgcugaacaauggacacucgaacgacacugugcauggccgaaccccauaccguacacuucugaugaaugaauuggguguucccuuucaccucgggacuagacagguguguaucgcauggucaagcaguuccugccaugauggaaaggccuggcugcacgucugugugaccggcgacgauaaaaacgcuacagcaucuuucauuuauaauggcaggcugguagacagcaucggguccuggucaaagaaaauccuccggacccaggagagugaaugcguuuguauuaacggaacgugcacuguggucaugacagaugguagcgccucuggcaaggcugacaccaaaauauuauuuaucgaggaggggaagauugugcacaucuccacucugucaggaagcgcccaacauguggaagagugcaguuguuacccucgcuauccaggcgucagaugcguuuguagggauaacuggaaggguucuaaucggccgauaguggacauuaacguaaaagauuacuccaucgugagcucguacgucugcucugggcuugugggagacacaccccgcaagaaugacuccuucucaaguagccacuguuuggauccuaacaaugaagagggcggccaugggguuaaaggaugggcguuugacgaugguaacgacguguggaugggccgaaccaucuccgaaaagcugagaucuggguaugagacguucaaagucauugagggauggagcaagccaaauucaaaacuacagaucaacaggcaagugauuguagaacggggcaaucguagugguuacuccgggauauuuagcguugagggcaagucuugcaucaaccgcuguuucuauguggaacucauuagaggaaggaaggaggaaaccgaggucugguggacaucaaauaguaucguggucuuuugcggcacuagcgggaccuacggaacagguuccuggcccgauggcgcagacaucaaccugaugccuauuuga

SEQ ID NO: 149809 - RNA, 1410 nt, Artificial Sequence
  derived and/or modified CDS sequence (opt3) from neuraminidase__InfluenzaA__AFD64112
augaaccccaaucagaagaucauuaccauaggcagcgugucccugacaaucgccacuauuugcuuccucaugcaaaucgcuauucuugucacgaccguuacacugcacuuuaaacaguacgaguguaacucuccuccaaauaaccaggugauguugugcgaaccgacuaucauagagagaaauaucaccgaaauuguauauuuaacaaacaccacuaucgagaaggaaauuugucccaaacuggcagaguacaggaauuggucaaagccucagugcaacaucacaggguucgccccauuuaguaaagacaauagcauacggcuauccgcgggaggugauauuugggugacccgcgagcccuaugucucuugugacccugauaagugcuaccaauucgcucucggccaggggacgacucugaacaauggacauucgaacgacaccgugcacgaucgaacaccauaucguacucuucugaugaaugaauugggcguucccuuucaucucgguaccagacagguguguaucgccuggucaagcaguuccugccacgacgggaaggcauggcugcaugucugugugacaggagaugacaaaaacgccaccgcuucuuucauuuacaauggcaggcugguagauagcaucggcuccuggucaaagaaaauccuccggacgcaggagagugaaugcguuuguauuaacgggacuugcacaguggucaugaccgacggaagcgcaucugguaaggccgauacuaaaauauuauuuaucgaggagggcaagauuauccacauauccacacugucagggagcgcucaacacguggaagagugcaguuguuauccucgcuacccaggagugagaugcgucuguagggacaacuggaagggcucuaaucggccgauuguugauaucaacgugaaagacuacuccaucguaagcucguaugugugcucuggucuugucggggacacuccccgcaagaaugauuccucaaguagcucccauuguuuggacccuaacaaugaagagggaggccacggcgugaaagggugggccuucgaugacggaaacgauguuuggaugggucgaacgauuucugaaaagcugagaagcggcuacgagaccuuuaaagugaucgagggguggucaaagccaaauaguaaacuacagauuaacaggcaggucauaguggaacgggacaaucguuccggauauagcggcaucuucucuguagaggguaagucaugcauuaaccgcuguuuuuacguugaacucaucagagggaggaaggaggaaacagaggugugguggaccaguaauagcaucgucguguucugcggcaccuccggaacauauggcacugggucuuggcccgauggagcggacauuaaccugaugccuauauga

SEQ ID NO: 149810 - RNA, 1410 nt, Artificial Sequence; identical to SEQ ID NO: 143979
  derived and/or modified CDS sequence (opt3) from neuraminidase__InfluenzaA__AFD64123

SEQ ID NO: 149811 - RNA, 1410 nt, Artificial Sequence; identical to SEQ ID NO: 142273
  derived and/or modified CDS sequence (opt3) from neuraminidase__InfluenzaA__AFD64134

SEQ ID NO: 149812 - RNA, 1410 nt, Artificial Sequence; identical to SEQ ID NO: 142273
  derived and/or modified CDS sequence (opt3) from neuraminidase__InfluenzaA__AFD64145

SEQ ID NO: 149813 - RNA, 1410 nt, Artificial Sequence; identical to SEQ ID NO: 142273
  derived and/or modified CDS sequence (opt3) from neuraminidase__InfluenzaA__AFD64156

SEQ ID NO: 149814 - RNA, 1410 nt, Artificial Sequence; identical to SEQ ID NO: 142193
  derived and/or modified CDS sequence (opt3) from neuraminidase__InfluenzaA__AFD64167

SEQ ID NO: 149815 - RNA, 1410 nt, Artificial Sequence; identical to SEQ ID NO: 142273
  derived and/or modified CDS sequence (opt3) from neuraminidase__InfluenzaA__AFD64181

SEQ ID NO: 149816 - RNA, 1410 nt, Artificial Sequence
  derived and/or modified CDS sequence (opt3) from neuraminidase__InfluenzaA__AFD64192
augaaccccaaucagaagaucauuaccauaggcagcgugucccugacaaucgccgcuauuugcuuccucaugcaaaucgcaauucuugucacuacgguuacccugcacuuuaaacagcaugaguguaacucuccuccaaauaaccaggugauguugugcgaaccgacaaucauagagagaaauaucacugaaauuguauacuuaaccaacacaaccaucgagaaggaaauuugucccaaacuggccgaguauaggaauuggucaaagccucagugcaacaucacuggguucgcgccauuuaguaaagacaauagcauacggcuauccgcuggaggugauauuugggugacacgcgagcccuacgucucuugugacccugauaagugcuaucaauucgcccucggccaggggaccacgcugaacaauggacacucgaacgacacugugcaugaucgaaccccauaccguacacuucugaugaaugaauugggcguucccuuucaccucgguacuagacagguguguaucgcauggucaagcaguuccugccaugacgggaaggccuggcugcacgucugugugaccggagaugacaaaaacgcuacagcaucuuucauuuauaauggcaggcugguagauagcaucggcuccuggucaaagaaaauccuccggacccaggagagugaaugcguuuguauuaacgggacgugcacuguggucaugacagacggaagcgccucugguaaggcugauaccaaaauauuauuuaucgaggagggcaagauugugcacguguccacucugucagggagcgcccaacaugucgaagagugcaguuguuacccucgcuauccaggaguuagaugcguguguagggacaacuggaagggcucuaaucggccgaucguagauauaaacgugaaagacuacuccauugucagcucguacgugugcucuggucuuguuggggacacaccccgcaagaaugauuccuucucaaguagccacuguuuggacccuaacaaugaagagggaggccauggcgugaaagggugggcguuugaugacggaaacgaugucuggaugggucgaaccaucuccgaaaagcugagaucuggcuaugagacguucaaagugaucgagggguggagcaagccaaauucaaaacuacagauuaacaggcagguaaucguugaacggggaaaucguaguggcuacuccgguauuuuuagcguggaggggaagucuugcauaaaccgcuguuucuaugucgaacucaucagaggcaggaaggaggaaaccgaggugugguggacaucaaauaguauugucguguuuugcggaacuagcggcaccuacgggacaggauccuggcccgacggugcagauaucaaccugaugccuaucuga

SEQ ID NO: 149817 - RNA, 1410 nt, Artificial Sequence
  derived and/or modified CDS sequence (opt3) from neuraminidase__InfluenzaA__AFD64203
augaaccccaaucagaagaucauuaccauaggcagcgugucccugacaaucgccgcuauuugcuuccucaugcaaaucgcaauucuugucacuacgguuacccugcacuuuaaacagcaugaguguaacucuccuccaaauaaccaggugauguugugcgaaccgacaaucauagagagaaauaucacugaaauuguauacuuaaccaacacaaccaucgagaaggaaauuugucccaaacuggccgaguauaggaauuggucaaagccucagugcaacaucacuggguucgcgccauuuaguaaagacaauagcauacggcuauccgcuggaggugauauuugggugacacgcgagcccuacgucucuugugacccugauaagugcuaucaauucgcccucggccaggggaccacgcugaacaaucgacacucgaacgacacugugcaugaucguaccccauacagaacacuucugaugaaugaauugggaguucccuuucaccucggcacuaggcaaguguguaucgcauggucaagcaguuccugccaugacgguaaggccuggcugcacgucugugugaccggggaugacaaaaacgcuacagcaucuuucauuuauaauggacggcugguagauagcaucggcuccuggucaaagaaaauccuccgcacccaggagagugaaugcguuuguauuaacggcacgugcacuguggucaugacagacgggagcgccucuggaaaggcugauaccaaaauauuauuuaucgaggaggguaagauugugcacaucuccacucugucaggcagcgcccagcauguggaagagugcaguuguuacccuagauauccaggggucaggugcguuugucgggacaacuggaagggaucuaaucgcccgauaguggauauuaacguaaaagacuacuccaucgugagcucguacgucugcucuggccuugugggugacacaccccgaaagaaugauuccuucucaaguagccacuguuuggacccuaacaaugaagaagggggacauggcguuaaaggcugggcguuugaugacgggaacgauguguggaugggaagaacccuguccgagaagcuaaggucugguuaugagacguucaaagucaucgagggcuggagcaagccaaauucaaaacuccagauuaaccgucaggugaucguagaacgggggaaucgcaguggauacuccggcauuuuuagcguugaggguaagucuugcauaaacagauguuucuauguggaacugaucagggggcggaaggaggaaaccgaggucugguggacaucaaauaguauuguggucuuuugcggcacuagcggaaccuacggcacaggguccuggcccgacggagcagauaucaaccuuaugccuaucuga

SEQ ID NO: 149818 - RNA, 1410 nt, Artificial Sequence; identical to SEQ ID NO: 149778
  derived and/or modified CDS sequence (opt3) from neuraminidase__InfluenzaA__AFD64214

SEQ ID NO: 149819 - RNA, 1410 nt, Artificial Sequence; identical to SEQ ID NO: 143977
  derived and/or modified CDS sequence (opt3) from neuraminidase__InfluenzaA__AFD64225

SEQ ID NO: 149820 - RNA, 1410 nt, Artificial Sequence; identical to SEQ ID NO: 142273
  derived and/or modified CDS sequence (opt3) from neuraminidase__InfluenzaA__AFD64317

SEQ ID NO: 149821 - RNA, 1410 nt, Artificial Sequence; identical to SEQ ID NO: 143979
  derived and/or modified CDS sequence (opt3) from neuraminidase__InfluenzaA__AFD64328

SEQ ID NO: 149822 - RNA, 1410 nt, Artificial Sequence; identical to SEQ ID NO: 149778
  derived and/or modified CDS sequence (opt3) from neuraminidase__InfluenzaA__AFD64339

SEQ ID NO: 149823 - RNA, 1410 nt, Artificial Sequence; identical to SEQ ID NO: 142273
  derived and/or modified CDS sequence (opt3) from neuraminidase__InfluenzaA__AFD64350

SEQ ID NO: 149824 - RNA, 1410 nt, Artificial Sequence; identical to SEQ ID NO: 149778
  derived and/or modified CDS sequence (opt3) from neuraminidase__InfluenzaA__AFD64361

SEQ ID NO: 149825 - RNA, 1410 nt, Artificial Sequence; identical to SEQ ID NO: 149778
  derived and/or modified CDS sequence (opt3) from neuraminidase__InfluenzaA__AFD64372

SEQ ID NO: 149826 - RNA, 1410 nt, Artificial Sequence; identical to SEQ ID NO: 142273
  derived and/or modified CDS sequence (opt3) from neuraminidase__InfluenzaA__AFD64383

SEQ ID NO: 149827 - RNA, 1410 nt, Artificial Sequence; identical to SEQ ID NO: 149778
  derived and/or modified CDS sequence (opt3) from neuraminidase__InfluenzaA__AFD64394

SEQ ID NO: 149828 - RNA, 1410 nt, Artificial Sequence; identical to SEQ ID NO: 142273
  derived and/or modified CDS sequence (opt3) from neuraminidase__InfluenzaA__AFD64405

SEQ ID NO: 149829 - RNA, 1410 nt, Artificial Sequence; identical to SEQ ID NO: 142273
  derived and/or modified CDS sequence (opt3) from neuraminidase__InfluenzaA__AFD64416

SEQ ID NO: 149830 - RNA, 1410 nt, Artificial Sequence; identical to SEQ ID NO: 142273
  derived and/or modified CDS sequence (opt3) from neuraminidase__InfluenzaA__AFD64427

SEQ ID NO: 149831 - RNA, 1410 nt, Artificial Sequence
  derived and/or modified CDS sequence (opt3) from neuraminidase__InfluenzaA__AFD64438
augaaccccaaucagaagaucauuaccauaggcagcgugucccugacaaucgccgcuauuugcuuccucaugcagaucgcaauucuugucacuacgguuacccugcacuuuaaacagcaugaguguaacucuccuccaaauaaccaggugauguugugcgaaccgacaaucauagagagaaauaucacugaaauuguauacuuaaccaacacaaccaucgagaaggaaauuugucccaaucuggccgaguauaggaacuggucaaaaccucagugcaauaucacuggguucgcgccauuuaguaaggacaacagcauacggcuauccgcuggaggugauauuugggugacacgcgagcccuacgucucuugugacccugauaaaugcuaucaauucgcccucggccaggggaccacgcugaauaacggacacucgaaugacacugugcaugaucgaaccccauaccguacacuucugaugaacgaauugggcguucccuuucaccucgguacuagacagguguguaucgcauggucaagcaguuccugccaugacgggaaggccuggcugcacgucugugugaccggagaugacaagaaugcuacagcaucuuucauuuauaacggcaggcugguagauagcaucggcuccuggaguaaaaagauccuccggacccaggagucagaaugcguuuguauuaacgggacgugcacuguggucaugacagacggaagcgccucugguaaagcugauaccaagauauuauuuaucgaggagggcaaaauugugcacaucuccacucugucagggagcgcccaacauguggaagagugcaguuguuacccucgcuauccaggagucagaugcguuuguagggacaauuggaagggcucuaaccggccgauaguggauauuaauguaaaggacuacuccaucgugagcucguacgucugcucuggucuugugggggacacaccccgcaaaaacgauuccuucucaaguagccacuguuuggacccuaauaacgaagagggaggccauggcguuaaggggugggcguuugaugacggaaaugauguguggaugggucgaaccaucuccgaaaaacugagaucuggcuaugagacguucaaggucauugagggguggagcaaaccaaacucaaagcuacagaucaauaggcaagugauuguagaacggggaaaccguaguggcuacuccgguauauuuagcguugaggggaaaucuugcaucaaucgcuguuucuauguggaacucauuagaggcaggaaggaggaaaccgaggucugguggacaucaaacaguaucguggucuuuugcggaacuagcggcaccuacgggacaggauccuggcccgacggugcagauaucaaucugaugccuauuuga

SEQ ID NO: 149832 - RNA, 1410 nt, Artificial Sequence; identical to SEQ ID NO: 142273
  derived and/or modified CDS sequence (opt3) from neuraminidase__InfluenzaA__AFD64449

SEQ ID NO: 149833 - RNA, 1410 nt, Artificial Sequence; identical to SEQ ID NO: 142193
  derived and/or modified CDS sequence (opt3) from neuraminidase__InfluenzaA__AFD64460

SEQ ID NO: 149834 - RNA, 1410 nt, Artificial Sequence; identical to SEQ ID NO: 149191
  derived and/or modified CDS sequence (opt3) from neuraminidase__InfluenzaA__AFD98098

SEQ ID NO: 149835 - RNA, 1410 nt, Artificial Sequence
  derived and/or modified CDS sequence (opt3) from neuraminidase__InfluenzaA__AFD98120
augaaccccaaucagaagaucauuaccauaggcagcgugucccugacaaucucuacuauuugcuucuuuaugcagaucgccauucucaucacgaccgucacacuucacuucaaacaguacgaguuuaacucaccuccaaauaaccagguuaugcugugugaaccgacuauaaucgagagaaauauuaccgaaaucguguauuugacaaacaccacuauugagaaggaaaucugccccaaauuagcugaguacaggaauuggaguaagccucagugugacauaacaggguucgcaccauuuagcaaagauaacuccauucggcugucugccggaggugacaucuggguaacccgcgagcccuaugugucgugcgauccugacaaguguuaccaauucgcgcuaggccaggggacgacucucaauaacguccauucaaauaacaccgugcgagaucguacaccauauagaacucugcuuaugaaugaacugggaguucccuuucacuugggcaccaaacaggugugcauugcuuggagcaguuccucuugucaugacgguaaggccuggcuccacgucugcaucacaggggaugacaagaacgcaaccgccagcuucaucuacaauggaaggcugguggauuccguaguuucauggaguaaagagauucugcggacgcaggaaagcgagugugugugcauaaacggcacuuguacagucgugaugaccgacggcucugcuuccgggaaggcagauacuaaaauccucuuuauugaggaaggaaagaucgugcauacaucaaccuuaagcgguagugcccaacacgucgaggaaugcucuugcuauccucgcuacccaggcguuagaugugugugcagggacaacuggaagggguccaaucggccgauaguagauauuaacaucaaagaccacagcaucgugucgucuuacgucuguuccggacuggugggcgacacgccccgcaagaaugauucaaguagcuccucucauugccuugacccuaacaaugaggaaggugggcacggaguuaaaggcugggcuuucgaugacggcaacgauguguggauggggcgaaccauuaaugagacaagcagauugggauaugagacuuuuaaggucaucgaagguuggucaaacccaaaaaguaagcugcagauuaauaggcaagugauaguagacaaaggcaaccgguccggguacagcggaaucuucucuguugagggcaagucauguauuaaucguugcuuuuauguggaacuaauccgcgguagaaaggaggaaaccgagguccucuggacaaguaacagcaucguggucuucugugggacuuccggcaccuacggaacaggcucuuggcccgauggggccgaccugaaucuuaugccuauuuga

SEQ ID NO: 149836 - RNA, 1410 nt, Artificial Sequence; identical to SEQ ID NO: 147566
  derived and/or modified CDS sequence (opt3) from neuraminidase__InfluenzaA__AFD98131

SEQ ID NO: 149837 - RNA, 1410 nt, Artificial Sequence; identical to SEQ ID NO: 149191
  derived and/or modified CDS sequence (opt3) from neuraminidase__InfluenzaA__AFD98142

SEQ ID NO: 149838 - RNA, 1410 nt, Artificial Sequence; identical to SEQ ID NO: 149835
  derived and/or modified CDS sequence (opt3) from neuraminidase__InfluenzaA__AFD98164

SEQ ID NO: 149839 - RNA, 1410 nt, Artificial Sequence
  derived and/or modified CDS sequence (opt3) from neuraminidase__InfluenzaA__AFD98175
augaaccccaaucagaagaucauuaccauaggcagcgugucccugacaaucucuacuauuugcuucuuuaugcaaaucgccauucucaucacgaccgucacacuucacuucaaacaguacgaguuuaacucaccuccaaauaaccagguuaugcugugugaaccgacuauaaucgagagaaauauuaccgaaaucguguauuugacaaacaccacuauugagaaggaaaucugccccaaauuagcugaguacaggaauuggaguaagccucagugugacauaacaggguucgcaccauuuagcaaagauaacuccauucggcugucugccggaggugacaucuggguaacccgcgagcccuaugugucgugcgauccugacaaguguuaccaauucgcgcuaggccaggggacgacucucaauaacguccauucaaauaacaccgugcacgaucgaacaccauaucguacucugcuuaugaaugaacugggaguucccuuucauuugggcaccaaacaggugugcauugcuuggagcaguuccucuugucacgacgguaaggccuggcuccaugucugcaucacaggggaugacaagaacgcaaccgccagcuucaucuacaauggaagacugguggauuccguaguuucauggaguaaagagauucugaggacgcaggaaagcgagugugugugcauaaacggcacuuguacagucgugaugaccgacggcucugcuuccgggaaggcagauacuaaaauccucuuuauugaggaaggaaagaucgugcacacaucaaccuuaagcgguagugcccaacacgucgaggaaugcucuugcuauccucgguacccaggcguucgcugugugugcagagacaacuggaagggguccaauaggccgauaguagauauuaacaucaaagaccauagcaucgugucgucuuacgucuguuccggacuggugggcgacacgccccggaagaaugauucaaguagcuccucucacugccuugacccuaacaaugaggaaggugggcauggaguuaaaggcugggcuuucgaugacggcaacgauguguggauggggcgcaccauuaaugagacaagccgauugggauaugagacuuuuaaggucaucgaagguuggucaaacccaaaaaguaagcugcagauuaauagacaggugauaguagacaaaggcaacagguccggguacagcggaaucuucucuguugagggcaagucauguauuaaucggugcuuuuauguggaacuaauccguggucgcaaggaggaaaccgagguccucuggacaaguaacagcaucguggucuucugugggacuuccggcaccuacggaacaggcucuuggcccgauggggccgaccugaaucuuaugccuauuuga

SEQ ID NO: 149840 - RNA, 1410 nt, Artificial Sequence
  derived and/or modified CDS sequence (opt3) from neuraminidase__InfluenzaA__AFD98186
augaaccccaaucagaagaucauuaccauaggcagcgugucccugacaaucucuacuauuugcuucuuuaugcaaaucgccauucucaucacgaccgucacacuucacuucaaacaguacgaguuuaacucaccuccaaauaaccagguuaugcugugugaaccgacuauaaucgagagaaauauuaccgaaaucguguauuugacaaacaccacuauugagaaggaaaucugccccaaauuagcugaguacaggaauuggaguaagccucagugugacauaacaggguucgcaccauuuagcaaagauaacuccauucggcugucugccggaggugacaucuggguaacccgcgagcccuaugugucgugcgauccugacaaguguuaccaauucgcgcuaggccaggggacgacucucaauaacguccauucaaauaacaccgugcgagaucguacaccauauagaacucugcuuaugaaugaacugggaguucccuuucacuugggcaccaaacaggugugcauugcuuggagcaguuccucuugucaugacgguaaggccuggcuccacgucugcaucacaggggaugacaagaacgcaaccgccagcuucaucuacaauggaaaacugguggauuccguaguuucauggaguaaggagauucugaggacgcaggaaagcgagugugugugcauaaacggcacuuguacagucgugaugaccgacggcucugcuuccgggaaagcagauacuaagauccucuuuguggaggaaggaaagauuguccauacaucaaccuuaagcgguagugcccaacacguugaggaaugcucuugcuauccucgguacccaggcgugcgcuguguaugcagagacaacuggaaaggguccaauaggccgaucguggauauaaacauuaaggaccacagcaucaucucgucuuacgucuguuccggacuggugggcgacacgccccggaaaaaugauucaaguagcuccucucauugccuugacccuaacaaugaggaaggugggcacggaguuaagggcugggcuuucgaugacggcaacgauguguggauggggcgcaccauuaaugagacaagccgauugggauaugagacuuuuaaagucaucgaagguuggucaaacccaaagaguaaacugcagauuaauagacaggugauaguagacaggggcaaccgguccggguacagcggaaucuucucuguugagggcaagucauguauuaaucguugcuuuuauguggaacuaauccgcgguagaaaggaggaaaccgagguccucuggacaaguaacagcaucguggucuucugugggacuuccggcaccuacggaacaggcucuuggcccgauggggccgaccugaaucuuaugccuauuuga

SEQ ID NO: 149841 - RNA, 1410 nt, Artificial Sequence; identical to SEQ ID NO: 147566
  derived and/or modified CDS sequence (opt3) from neuraminidase__InfluenzaA__AFD98197

SEQ ID NO: 149842 - RNA, 1410 nt, Artificial Sequence; identical to SEQ ID NO: 148303
  derived and/or modified CDS sequence (opt3) from neuraminidase__InfluenzaA__AFD98208

SEQ ID NO: 149843 - RNA, 1410 nt, Artificial Sequence
  derived and/or modified CDS sequence (opt3) from neuraminidase__InfluenzaA__AFD98218
augaaccccaaucagaagaucauuaccauaggcagcgugucccugacaaucucuacuauuugcuucuuuaugcagaucgccauucucaucacgaccgucacacuucacuucaaacaguacgaguuuaacucaccuccaaauaaccagguuaugcugugugaaccgacuauaaucgagagaaauauuaccgaaaucguguauuugacaaacaccacuauugagaaggaaaucugccccaaaccugcugaguacaggaauuggaguaagccacagugugacauaacaggguucgcacccuuuagcaaagauaacuccauucgguuaucugccggaggugacaucuggguaacccgcgagccuuaugugucgugcgauccagacaaguguuaccaauucgcgcugggccaggggacgacucuaaauaacguccauucaaauaacaccgugcgagaucguacacccuauagaacucuccugaugaaugaacuuggaguuccuuuucaccugggcaccaaacaggugugcauugcuuggagcaguuccucuugucaugacgguaaggccugguugcacgucugcaucacaggggaugacaagaacgcaaccgccagcuucaucuacaauggaaggcucguggauuccguaguuucauggaguaaagagauucugcggacgcaggaaagcgagugugugugcauaaacggcacuuguacagucgugaugaccgacggcucugcuuccgggaaggcagauacuaaaauccuguuuauugaggaaggaaagaucgugcauacaucaacccucagcgguagugcccaacacgucgaggaaugcucuugcuauccacgcuacccgggcguuagaugugugugcagggacaacuggaagggguccaaucggcccauaguagauauuaacaucaaagaccacagcaucgugucgucuuacgucuguuccggauuagugggcgacacgccucgcaagaaugauucaaguagcuccucucauugccuggacccaaacaaugaggaaggugggcacggaguuaaaggcugggcuuucgaugacggcaacgauguguggauggggcgaaccauugacgagacaagcagacuuggauaugagacuuuuaaggucaucgaagguuggucaaaucccaaaaguaaguugcagauuaacaggcaagugauaguagauaaaggcaaucgguccggguacagcggaaucuucucuguugagggcaagucauguauuaaccguugcuuuuauguggaacugauccgcgguagaaaggaggaaaccgagguccuauggacaaguaauagcaucguggucuccugugggacuucuggcaccuacggaacaggcucguggccugacggggccgaucucaaccugaugccaauuuga

SEQ ID NO: 149844 - RNA, 1410 nt, Artificial Sequence; identical to SEQ ID NO: 147566
  derived and/or modified CDS sequence (opt3) from neuraminidase__InfluenzaA__AFD98229

SEQ ID NO: 149845 - RNA, 1410 nt, Artificial Sequence; identical to SEQ ID NO: 147566
  derived and/or modified CDS sequence (opt3) from neuraminidase__InfluenzaA__AFD98240

SEQ ID NO: 149846 - RNA, 1410 nt, Artificial Sequence; identical to SEQ ID NO: 149835
  derived and/or modified CDS sequence (opt3) from neuraminidase__InfluenzaA__AFD98251

SEQ ID NO: 149847 - RNA, 1410 nt, Artificial Sequence; identical to SEQ ID NO: 149835
  derived and/or modified CDS sequence (opt3) from neuraminidase__InfluenzaA__AFD98262

SEQ ID NO: 149848 - RNA, 1410 nt, Artificial Sequence; identical to SEQ ID NO: 148757
  derived and/or modified CDS sequence (opt3) from neuraminidase__InfluenzaA__AFD98273

SEQ ID NO: 149849 - RNA, 1410 nt, Artificial Sequence; identical to SEQ ID NO: 148305
  derived and/or modified CDS sequence (opt3) from neuraminidase__InfluenzaA__AFD98283

SEQ ID NO: 149850 - RNA, 1410 nt, Artificial Sequence; identical to SEQ ID NO: 147566
  derived and/or modified CDS sequence (opt3) from neuraminidase__InfluenzaA__AFD98293

SEQ ID NO: 149851 - RNA, 1410 nt, Artificial Sequence; identical to SEQ ID NO: 148757
  derived and/or modified CDS sequence (opt3) from neuraminidase__InfluenzaA__AFD98313

SEQ ID NO: 149852 - RNA, 1410 nt, Artificial Sequence; identical to SEQ ID NO: 148305
  derived and/or modified CDS sequence (opt3) from neuraminidase__InfluenzaA__AFD98323

SEQ ID NO: 149853 - RNA, 1410 nt, Artificial Sequence; identical to SEQ ID NO: 148757
  derived and/or modified CDS sequence (opt3) from neuraminidase__InfluenzaA__AFD98333

SEQ ID NO: 149854 - RNA, 1410 nt, Artificial Sequence; identical to SEQ ID NO: 149835
  derived and/or modified CDS sequence (opt3) from neuraminidase__InfluenzaA__AFD98343

SEQ ID NO: 149855 - RNA, 1410 nt, Artificial Sequence
  derived and/or modified CDS sequence (opt3) from neuraminidase__InfluenzaA__AFD98354
augaaccccaaucagaagaucauuaccauaggcagcgugucccugacaaucucuacuauuugcuucuuuaugcagaucgccauucucaucacgaccgucacacuucacuucaaacaguacgaguuuaacucaccuccaaauaaccagguuaugcugugugaaccgacuauaaucgagagaaauauuaccgaaaucguguauuugacaaacaccacuauugagaaggaaaucugccccaaauuagcugaguacaggaauuggaguaagccucagugugacauaacaggguucgcaccauuuagcaaagauaacuccauucggcugucugccggaggugacaucuggguaacccgcgagcccuaugugucgugcgauccugacaaguguuaccaauucgcgcuaggccaggggacgacucucaauaacguccauucaaauaacaccgugcgagaucguacaccauauagaacucugcuuaugaaugaacugggaguucccuuucacuugggcaccaaacaggugugcauugcuuggagcaguuccucuugucaugacgguaaggccuggcuccacgucugcaucacaggggaugacaagaacgcaaccgccagcuucaucuacaauggaaggcugguggauuccguaguuucauggaguaaagagauucugcggacgcaggaaagcgagugugugugcauaaacggcacuuguacagucgugaugaccgacggcaacgcuucugggaaggcagauacuaaaauccucuuuauugaggaaggaaagaucgugcauacauccaccuuacuggguucagcccaacacgucgaggaaugcagcugcuauccucgcuacccaggcguuagaugugugugcagggacaauuggaaggggaguaaccggccgauaguagauauuaauaucaaagaccacucuaucguguccagcuacgucuguucgggacuugugggcgacacgccccgcaagaacgauucuuccucaaguagccauugcuuggacccuaauaacgaggaaggugggcacggaguuaaaggcugggcuuucgaugacggcaaugauguguggauggggcgaaccauuaacgagacauccagacugggauaugagacuuuuaaggucaucgaagguuggucuaauccaaaaagcaagcuacagauuaacaggcaagugauaguagacaaaggcaaucggucaggguacaguggaaucuucuccguugagggcaagagcuguauuaaccguugcuuuuauguggaacucauccgcgguagaaaggaggaaaccgagguccuguggacaucuaauucaaucguggucuucugugggaccaguggcacuuacggaacaggcagcuggcccgauggggccgaccuuaaccugaugccuauuuga

SEQ ID NO: 149856 - RNA, 1410 nt, Artificial Sequence
  derived and/or modified CDS sequence (opt3) from neuraminidase__InfluenzaA__AFD98365
augaaccccaaucagaagaucauuaccauaggcagcgugucccugacaaucucuacuauuugcuucuuuaugcagaucgccauucucaucacgaccgucacacuucacuucaaacaguacgaguuuuauucaccuccaaacaaucagguuaugcugugugaaccgacuauaaucgagagaaacauuaccgaaaucguguacuugacaaauaccacuauugagaaggaaaucugccccaaauuagcugaguauaggaacuggaguaagccucagugugacauaacaggguucgcaccauuuagcaaagauaauuccauucggcugucugccggaggugacaucuggguaacccgcgagcccuacgugucgugcgauccugacaaguguuaucaauucgcgcuaggccaggggacgacucucaacaauguccauucaaacaauaccgugcgagaucguacaccauacagaacucugcuuaugaacgaacugggaguucccuuucacuugggcaccaaacaggugugcauugcuuggagcaguuccucuugucaugacgguaaggccuggcuccacgucugcaucacaggggaugacaagaaugcaaccgccagcuucaucuauaacggaaggcugguggauuccguaguuucauggaguaaagagauucugcggacgcaggaaagcgagugugugugcauaaauggcacuuguacagucgugaugaccgacggcucugcuuccgggaaggcagauacuaaaauccucuuuauugaggaaggaaagaucgugcauacaucaaccuuaagcgguagugcccaacacgucgaggaaugcucuugcuacccucgcuacccaggcguuagaugugugugcagggacaacuggaagggguccaaccggccgauaguagauauuaauaucaaagaccacagcaucgugucgucuuaugucuguuccggacuggugggcgacacgccccgcaagaacgauucaaguagcuccucucauugccuugacccuaauaacgaggaaggugggcacggaguuaaaggcugggcuuucgaugacggcaaugauguguggauggggcgaaccauuaacgagacaagcagauugggauacgagacuuuuaaggucaucgaagguuggucaaauccaaaaaguaagcugcagauuaacaggcaagugauaguagaccggggcaaucguuccggguauagcggaaucuucucuguugagggcaaaucauguauuaaccgcugcuuuuacguggaacuaaucagagguaggaaggaggaaaccaagguccucuggacaaguaauagcaucguggucuucugugggacuuccggcaccuauggaacaggcucuuggcccgauggggccgaccugaaccuuaugccuauuuga

SEQ ID NO: 149857 - RNA, 1410 nt, Artificial Sequence
  derived and/or modified CDS sequence (opt3) from neuraminidase__InfluenzaA__AFD98376
augaaccccaaucagaagaucauuaccauaggcagcgugucccugacaaucucuacuauuugcuucuuuaugcagaucgccauucucaucacgaccgucacacuucacuucaaacaguacgaguuuaacuucccuccaaauaaccagguuaugcugugugaaccgacuauaaucgagagaaauauuaccgaaaucguguauuugacaaacaccacuauugagaaggaaaucugccccaaauuagcugaguacaggaauuggucaaagccucagugugacauaacaggguuugcaccauucaguaaagauaacagcauucggcuguccgccggaggugacaucuggguaacccgcgagcccuaugugucuugcgauccugacaaguguuaccaauuugcgcuaggccaggggacgacucucaauaacguccauucgaauaacaccgugcgagaucguacaccauauagaacucugcuuaugaaugaacugggaguucccuuccacuugggcaccaaacaggugugcauugcuuggucaagcaguuccugucaugacgguaaggccuggcuccacgucugcaucacaggggaugacaagaacgcaaccgccucuuuuaucuacaauggaaggcugguggauagcguaguuuccuggucaaaagagauucugcggacgcaggaaagugagugugugugcauaaacggcacuuguacagucgugaugaccgacggcagcgcuucugggaaggcagauacuaaaauccucuucauugaggaaggaaagaucgugcauacauccaccuuaucagguagcgcccaacacgucgaggaaugcaguugcuauccucgcuacccaggcguuagaugugugugcagggacaacuggaaggggucuaaucggccgauaguagauauuaacaucaaagaccacuccaucgugagcucguacgucuguucuggacuggugggcgacacgccccgcaagaaugauuccucaaguagcggucauugccuugacccuaacaaugaggaagggggacacggcguuaaaggcugggcuuuugaugacgggaacgauguguggaugggacgaaccauuaaugagacauccagauuggguuaugagacuuucaaggucaucgaaggcuggucuaacccaaaaagcaagcugcagauuaauaggcaagugauaguagacaaagggaaccggucaggauacaguggcaucuuuuccguugaggguaagagcuguauuaaucguugcuucuauguggaacuaauccgcgggagaaaggaggaaaccgagguccucuggacaucuaacucaaucguggucuucuguggcaccaguggaacuuacggcacagggagcuggcccgauggagccgaccugaaucuuaugccuauuuga

SEQ ID NO: 149858 - RNA, 1410 nt, Artificial Sequence
  derived and/or modified CDS sequence (opt3) from neuraminidase__InfluenzaA__AFD98387
augaaccccaaucagaagaucauuaccauaggcagcgugucccugacaaucucuacuauuugcuuccucaugcagaucgccauucuuaucacgaccgucacacugcacuuuaaacaguacgaguucaacucaccuccaaauaaccagguuauguugugugaaccgacuauaaucgagagaaauauuaccgaaaucguguauuuaacaaacaccacuauugagaaggaaaucugccccaaacuggcugaguacagggacuggaguaagccucagugugauauaacaggguuugcaccauucagcaaagacaauuccauucggcuaucugccggaggugauaucuggguaacccgcgagcccuaugugucgugcgacccugauaaguguuaccaauuugcgcucggccaggggacgacucugaacaauguccauucaaacaauaccgugcgagaccguacaccauauagaacucuucugaugaacgaauugggaguucccuuccaccucggcaccaaacaggugugcauugcuuggagcaguuccucuugucaugaugguaaggccuggcugcacgucugcaucacaggggacgauaagaaugcaaccgccagcuuuaucuacaacggaaaacugguggacuccguaguuucauggaguaaggagauucucaggacgcaggaaagcgagugugugugcauaaauggcacuuguacagucgugaugaccgauggcucugcuuccgggaaagcagacacuaagaucuuauucauugaggaaggaaagaucgugcauacaucaacccugagcgguagugcccaacacgucgaggaaugcucuugcuauccucgguacccaggcguucgcugugugugcagagauaacuggaaaggguccaacaggccgauaguagacauuaauaucaaggaccacagcaucgugucgucuuacgucuguuccggacuugugggcgauacgccccggaaaaacgaccgcucaaguaauagccauugcuuggauccuaacaaugaggaaggugggcacggaguuaagggcugggcuuuugacgauggcaacgacguguggauggggcgaaccauuaaugagacauccagacugggauaugagacuuucaaagucaucgaagguuggucuaacccaaagagcaaacuacagauuaauaggcaagugauaguagaucggggcaaccguucaggguacaguggaaucuuuuccguugagggcaagagcuguauuaaucgcugcuucuauguggaacucaucagagguaggaaggaggaaaccgagguccuguggacaucuaacucaaucguggucuuuugugggaccaguggcacuuacggaacaggcagcuggcccgacggggccgaucuuaaucugaugccuauuuga

SEQ ID NO: 149859 - RNA, 1410 nt, Artificial Sequence
  derived and/or modified CDS sequence (opt3) from neuraminidase__InfluenzaA__AFD98398
augaaccccaaucagaagaucauuaccauaggcagcgugucccugacaaucucuacuauuugcuucuuuaugcaaaucgccauucucaucacgaccgucacacuucacuucaaacaguacgaguuuaacucaccuccaaauaaccagguuaugcugugugaaccgacuauaaucgagagaaauauuaccgaaaucguguauuugacaaacaccacuauugagaaggaaaucugccccaaauuagcugaguacaggaauuggaguaagccucagugugacauaacaggguucgcaccauuuagcaaagauaacuccauucggcugucugccggaggugacaucuggguaacccgcgagcccuaugugucgugcgauccugacaaguguuaccaauucgcgcuaggccaggggacgacucucaauaacguccauucaaauaacaccgugcgagaucguacaccauauagaacucugcuuaugaaugaacugggaguucccuuucacuugggcacccgacaggugugcauugcuuggagcaguuccucuugucaugacgguaaggccuggcuccacgucugcaucacaggggaugacaaaaacgcaaccgccagcuucaucuacaauggacggcugguggauuccguaguuucauggaguaaggagauucugcgcacgcaggaaagcgagugugugugcauaaacggcacuuguacagucgugaugaccgacggcucugcuuccgggaaagcagauacuaagauccucuuuauugaggaaggaaaaaucgugcauacaucaaccuuaagcgguagugcccaacacgucgaggaaugcucuugcuauccuagauacccaggcguuaggugugugugccgggacaacuggaagggguccaaucgcccgauaguagauauuaacaucaaggaccacagcaucgugucgucuuacgucuguuccggacuggugggcgacacgcccaggaaaaaugauucaaguagcuccucucauugccuugacccuaacaaugaggaaggugggcacggaguuaagggcugggcuuucgaugacggcaacgauguguggauggggagaaccauuaaugagacaagcagguugggauaugagacuuuuaaagucaucgaagguuggucaaacccaaagaguaaacugcagauuaaucgucaggugauaguagacaagggcaaccgguccggguacagcggaaucuucucuguugagggcaaaucauguauuaaucgcugcuuuuauguggaacuaaucagagguaggaaggaggaaaccgagguccucuggacaaguaacagcaucguggucuucugugggacuuccggcaccuacggaacaggcucuuggcccgauggggccgaccugaaucuuaugccuauuuga

SEQ ID NO: 149860 - RNA, 1410 nt, Artificial Sequence
  derived and/or modified CDS sequence (opt3) from neuraminidase__InfluenzaA__AFD98409
augaaccccaaucagaagaucauuaccauaggcagcgugucccugacaaucucuacuauuugcuucuuuaugcagaucgccauucucaucacgaccgucacacuucacuucaaacaguacgaguuuaacucaccuccaaauaaccagguuaugcugugugaaccgacuauaaucgagagaaauauuaccgaaaucguguauuugacaaacaccacuauugagaaggaaaucugccccaaauuagcugaguacaggaauuggaguaagccucagugugacauaacaggguucgcaccauuuagcaaagauaacuccauucggcugucugccggaggugacaucuggguaacccgcgagcccuaugugucgugcgauccugacaaguguuaccaauucgcgcuaggccaggggacgacucucaauaacguccauucaaauaacaccgugcgagaucguacaccauauagaacucugcuuaugaaugaacugggaguucccuuucacuugggcaccaaacaggugugcauugcuuggagcaguuccucuugucaugacgguaaggccuggcuccacgucugcaucacaggggaugacaagaacgcaaccgccagcuucaucuacaauggaaggcugguggauuccguaguuucauggaguaaagagauucugcggacgcaggaaagcgagugugugugcauaaacggcacuuguacagucgugaugaccgacggcucugcuuccgggaaggcagauacuaaaauccucuuuauugaggaaggaaagaucgugcauacaucaaccuuaagcgguagugcccaacacgucgaggaaugcucuugcuauccucgcuacccaggcguuagaugugugugcagggacaacuggaagggguccaaucggccgauaguagauauuaacaucaaagaccacagcaucgugucgucuuacgucuguuccggacuggugggcgacacgccccgcaagaaugauucaaguagcuccggucauugccuugacccuaacaaugaggaagggggacacggcguuaaaggcugggcuuucgaugacgggaacgauguguggaugggacgaaccauuaaugagacaucuagauuggguuaugagacuuuuaaggucaucgaaggcuggagcaacccaaaaucaaagcugcagauuaauaggcaagugauaguagacaaagggaaccggaguggauacuccggcaucuucagcguugaggguaagucuuguauuaaucguugcuuuuauguggaacuaauccgcgggagaaaggaggaaaccgagguccucuggacaucaaacaguaucguggucuucuguggcacuagcggaaccuacggcacaggguccuggcccgauggagccgaccugaaucuuaugccuauuuga

SEQ ID NO: 149861 - RNA, 1410 nt, Artificial Sequence; identical to SEQ ID NO: 149835
  derived and/or modified CDS sequence (opt3) from neuraminidase__InfluenzaA__AFD98420

SEQ ID NO: 149862 - RNA, 1410 nt, Artificial Sequence
  derived and/or modified CDS sequence (opt3) from neuraminidase__InfluenzaA__AFD98431
augaaccccaaucagaagaucauuaccauaggcagcgugucccugacaaucucuacuauuugcuucuuuaugcagaucgccauucucaucacgaccgucacacuucacuucaaacaguacgaguuuaacucaccuccaaauaaccagguuaugcugugugaaccgacuauaaucgagagaaauauuaccgaaaucguguauuugacaaacaccacuauugagaaggaaaucugccccaaauuagcugaguacaggaauuggaguaagccucagugugacauaacaggguucgcaccauuuagcaaagauaacuccauucggcugucugccggaggugacaucuggguaacccgcgagcccuaugugucgugcgauccugacaaguguuaccaauucgcgcuaggccaggggacgacucucaauaacguccauucaaauaacaccgugcgagaucguacaccauauagaacucugcuuaugaaugaacugggaguucccuuucacuugggcaccaaacaggugugcauugcuuggagcaguuccucuugucaugacgguaaggccuggcuccacgucugcaucacaggggaugacaagaacgcaaccgccagcuucaucuacaauggaaggcugguggauuccguaguuucauggaguaaagagauucugcggacgcaggaaagcgagugugugugcauaaacggcacuuguacagucgugaugaccgacggcucugcuuccgggaaggcagauacuaaaauccucuuuauugaggaaggaaagaucgugcauacaucaaccuuaagcgguagugcccaacacgucgaggaaugcucuugcuauccucgcuacccaggcguuagaugugugugcagggacaacuggaagggguccaaucggccgauaguagauauuaacaucaaagaccacagcaucgugucgucuuacgucuguuccggacuggugggcgacacgccccgcaagaaugauucaaguagcuccucucauugccuugacccuaacaaugaggaaggugggcacggaguuaaaggcugggcuuucgaugacggcaacgauguguggauggggcgaaccauuaaugagacaagcagauugggauaugagacuuuuaaggucaucgaagguuggucaaacccaaaaaguaagcugcagauuaauaggcaagugauaguaggccgggggaaccguuccggauacagcggcaucuucucuguugaggguaaaucauguauuaaucgcugcuuuuauguggaacuaaucagagggaggaaggaggaaaccgagguccucuggacaaguaacagcaucguggucuucuguggcacuuccggaaccuacggcacagggucuuggcccgacggagccgaucugaaucuuaugccuauuuga

SEQ ID NO: 149863 - RNA, 1410 nt, Artificial Sequence
  derived and/or modified CDS sequence (opt3) from neuraminidase__InfluenzaA__AFD98442
augaaccccaaucagaagaucauuaccauaggcagcgugugcaugacaaucgggauggccaaccugauucuccaaaucggaaauauuaucuccauauggaucucucacucaauucagcuugguaaccagaaucagaucgagacuuguaaccaaagugucauuacguacgaaaauaacaccuggguuaaucagacauaugugaacaucagcaauacuaacuucgcugcaggccaguccguagugucugucaaacuggccggaaauucgucauugugcccugugagcgggugggcgauauacaguaaggacaacuccauuagaaucggcucuaaaggugauguuuuugugauuagggagccauucaucagcuguuccccguuagaaugccggaccuuuuuccugacacagggggcucuacucaaugacaagcauucaaacggaaccaucaaagaucgcagucccuaucgaacucugaugagcuguccuauuggcgaggucccaucucccuacaacucccguuuugaaucaguggccuggagcgcaagugccugccacgacggcauaaauuggcuuacaaucgggauuucuggaccugauaacggugcuguagcaguucugaaguauaauggcaucauaaccgacacgauuaaguccuggagaaacaauaucuugaggacucaagagagcgagugugccugcgugaacgggucguguuucaccaucaugacagauggaccaucugacggccaggcuuccuacaaaauuuuucggaucgaaaaggguaaaauugucaagucaguggagaugaaugcccccaacuaucauuacgaagagugcaguuguuacccugauagcggggagauaacuugcgugugccgcgacaauuggcacggauccaacagaccaugggucucuuucaaucagaaccucgaauaucagaucggcuacauuuguagcggcaucuuuggggauaauccgaggcccaacgacaaaaccggaucaugcgguccuguuaguuccaauggcgcgaacggggugaagggauucagcuuuaaguauggcaacgguguauggaucgggcggacaaaaucuauuucaagucgcaagggcuucgagaugauaugggauccaaauggauggaccggcacggacaacaauuuugcaaucaaacaagacauuguggggaucaacgaauggagcggauacuccgguucuuucguccagcaucccgagcugacuggccuggauuguauucgaccuugcuucuggguggaacucaucagagggaggccaaaggagaauacaauauggaccucgggaagcuccaucucauuuuguggcguuaacagugacacuguggguuggucuuggcccgauggggccgaguuaccguucacaauugacaaauga

SEQ ID NO: 149864 - RNA, 1410 nt, Artificial Sequence
  derived and/or modified CDS sequence (opt3) from neuraminidase__InfluenzaA__AFD98452
augaaccccaaucagaagaucauuacccugggcagcgugucccucacaauaucuacuaucugcuucuuuauucagaucgccauucuuaucacgaccgucacacugcacuucaaacaguacgaguuuaacucaccuccaaauaaccagguuauguugugugaaccgacuauaaucgagagaaauauuaccgaaaucguguauuuaacaaacaccacuauugagaaggaaaucugccccaaacuggcugaguacaggaauuggaguaagccucagugugacauaacaggguucgcaccauuuagcaaagauaacuccauucggcuaucugccggaggugacaucuggguaacccgcgagcccuaugugucgugcgauccugacaaguguuaccaauucgcgcucggccaggggacgacucugaauaacguccauucaaauaacaccgugcgagaucguacaccauauagaacucuucugaugaaugaauugggaguucccuuucaccucggcaccaaacaggugugcauugcuuggagcaguuccucuugucaugacgguaaggccuggcugcacgucugcaucacaggggaugacaagaacgcaaccgccagcuucaucuacaauggaaggcugguggauuccguaguuucauggaguaaagagauucuccggacgcaggaaagcgagugugugugcauaaacggcacuuguacagucgugaugaccgacggcucugcuuccgggaaggcagauacuaaaaucuuauuuauugaggaaggaaagaucgugcauacaucaacccugagcgguagugcccaacacgucgaggaaugcucuugcuauccucgcuacccaggcguuagaugugugugcagggacaacuggaagggguccaaucggccgauaguagauauuaacaucaaagaccacagcaucgugucgucuuacgucuguuccggacuugugggcgacacgccccgcaagaaugauucaaguagcuccucucauugcuuggacccuaacaaugaggaaggugggcacggaguuaaaggcugggcuuucgaugacggcaacgauguguggauggggcgaaccauuaaugagacaagcagacugggauaugagacuuuuaaggucaucgaagguuggucaaacccaaaaaguaagcuacagauuaauaggcaagugauaguagaccggggcaaccguuccggguacagcggaaucuucucuguugagggcaaaucauguauuaaucgcugcuuuuauguggaacucaucagagguaggaaggaggaaaccgagguccuguggacaaguaacagcaucguggucuucugugggacuuccggcaccuacggaacaggcucuuggcccgauggggccgaccuuaaucugaugccuauuuga

SEQ ID NO: 149865 - RNA, 1410 nt, Artificial Sequence; identical to SEQ ID NO: 149835
  derived and/or modified CDS sequence (opt3) from neuraminidase__InfluenzaA__AFD98463

SEQ ID NO: 149866 - RNA, 1410 nt, Artificial Sequence
  derived and/or modified CDS sequence (opt3) from neuraminidase__InfluenzaA__AFD98474
augaaccccaaucagaagaucauuaccauaggcagcgugugcaugacaaucgggauggccaaccugauucuccaaaucggaaauauuaucuccauauggaucucucacucaauucagcuugguaaccagaaucagaucgagacuuguaaccaaagugucauuacguacgaaaauaacaccuggguuaaucagacauaugugaacaucagcaauacuaacuucgcugcaggccaguccguagugucugucaaacuggccggaaauucgucauugugcccugugagcggaugggcgauauacaguaaggacaacuccauuagaaucggcucuaaaggugauguuuuugugauuagggagccauucaucagcuguuccccguuagaaugccggaccuuuuuccugacacagggggcucuacucaaugacaagcauucaaacggaaccaucaaagaucgcagucccuaucgaacucugaugagcuguccuauuggcgaggucccaucucccuacaacucccguuuugaaucaguggccuggagcgcaagugccugccacgacggcauaaauuggcuuacaaucgggauuucuggaccugauaacggugcuguagcaguucugaaguauaauggcaucauaaccgacacgauuaaguccuggagaaacaauaucuugaggacucaagagagcgagugugccugcgugaacgggucguguuucaccaucaugacagauggaccaucugacggccaggcuuccuacaaaauuuuucggaucgaaaaggguaaaauugucaagucaguggagaugaaugcccccaacuaucauuacgaagagugcaguuguuacccugauagcuccgagauaacuugcgugugccgcgacaauuggcacgggucuaacagaccaugggucagcuucaaucagaaccucgaauaucagaucggauacauuuguucaggcaucuuuggcgauaauccgaggcccaacgacaaaaccgggaguugcggaccuguuuccagcaauggugcgaacggcgugaagggguucucuuuuaaguauggaaacggcguauggaucggucggacaaaaucaauuaguagccgcaagggguucgagaugauaugggauccaaauggcuggaccggaacggacaacaauuuuuccaucaaacaagacauuaucggcauuaacgaauggucuggguacucggggagcuucgugcagcaucccgagcugacuggucuggauuguauccgaccuugcuucugggucgaacucauaagaggcaggccaaaggagaauacaaucuggaccuccgggucaaguauuucuuuuuguggagugaacagcgacacuguuggcugguccuggcccgauggugcagaguuaccguucacaaucgacaaauga

SEQ ID NO: 149867 - RNA, 1410 nt, Artificial Sequence
  derived and/or modified CDS sequence (opt3) from neuraminidase__InfluenzaA__AFD98484
augaaccccaaucagaagaucauuaccauaggcagcgugucccugacaaucucuacuauuugcuucuuuaugcagaucgccauucucaucacgaccgucacacuucacuucaaacaguacgaguuuaacucaccuccaaauaaccagguuaugcugugugaaccgacuauaaucgagagaaauauuaccgaaaucguguauuugacaaacaccacuauugagaaggaaaucugccccaaauuagcugaguacaggaauuggaguaagccucagugugacauaacaggguucgcaccauuuagcaaagauaacuccauucggcugucugccggaggugacaucuggguaacccgcgagcccuaugugucgugcgauccugacaaguguuaccaauucgcgcuaggccaggggacgacucucaauaacguccauucaaauaacaccgugcgagaucguacaccauauagaacucugcuuaugaaugaacugggaguucccuuucacuugggcaccaaacaggugugcauugcuuggagcaguuccucuugucaugacgguaaggccuggcuccacgucugcaucacaggggaugacaagaacgcaaccgccagcuucaucuacaauggaaggcugguggauuccguaguuucauggaguaaagagauucugcggacgcaggaaagcgagugugugugcauaaacggcacuuguacagucgugaugaccgacggcucugcuuccgggaaggcagauacuaaaauccucuuuauugaggaaggaaagaucgugcauacaucaaccuuaagcgguagugcccaacacgucgaggaaugcucuugcuauccucgcuacccaggcguuagaugugugugcagggacaacuggaagggguccaaucggccgauaguagauauuaacaucaaagaccacagcaucgugucgucuuacgucuguuccggacuggugggcgacacgccccgcaagaaugauucaaguagcuccucucauugccuugacccuaacaaugaggaaggugggcacggaguuaaaggcugggcuuucgaugacggcaacgauguguggauggggcgaaccauuaaugagacaagcagauugggauaugagacuuuuaaggucaucgaagguuggucaaacccaaaaaguaagcugcagaugaauaggcaagugauuguagaccggggcaaccguuccggguacagcggaauauucucuguugagggcaaaucauguaucaaucgcugcuuuuauguggaacuaauuagagguaggaaggaggaaaccgagguccucuggacaaguaacagcaucguggucuucugugggacuuccggcaccuacggaacaggcucuuggcccgauggggccgaccugaaucuuaugccuaucuga

SEQ ID NO: 149868 - RNA, 1410 nt, Artificial Sequence
  derived and/or modified CDS sequence (opt3) from neuraminidase__InfluenzaA__AFD98495
augaaccccaaucagaagaucauuaccauaggcagcgugucccugacaaucucuacuauuugcuucuuuaugcaaaucgccauucucaucacgaccgucacacuucacuucaaacaguacgaguuuaacucaccuccaaauaaccagguuaugcugugugaaccgacuauaaucgagagaaauauuaccgaaaucguguauuugacaaacaccacuauugagaaggaaaucugccccaaauuagcugaguacaggaauuggaguaagccucagugugacauaacaggguucgcaccauuuagcaaagauaacuccauucggcugucugccggaggugacaucuggguaacccgcgagcccuaugugucgugcgauccugacaaguguuaccaauucgcgcuaggccaggggacgacucucaauaacguccauucaaauaacaccgugcgagaucguacaccauauagaacucugcuuaugaaugaacugggaguucccuuucacuugggcaccaaacaggugugcauugcuuggagcaguuccucuugucaugacgguaaggccuggcuccacgucugcaucacaggggaugacaagaacgcaaccgccagcuucaucuacaauggaaaacugguggauuccguaguuucauggaguaaggagauucugaggacgcaggaaagcgagugugugugcauaaacggcacuuguacagucgugaugaccgacggcucugcuuccgggaaagcaaacacuaagauccucuuuauugaggaaggaaagaucgugcauacaucaaccuuaagcgguagugcccaacacgucgaggaaugcucuugcuauccucgguacccaggcguucgcugugugugcagagauaauuggaaaggguccaacaggccgauaguagacauuaauaucaaggaucacagcaucgugucgucuuacgucuguuccggacuggugggcgacacgccccggaaaaacgacucaaguagcuccucucauugccuugauccuaauaacgaggaaggugggcacggaguuaagggcugggcuuucgacgauggcaaugacguguggauggggcgcaccauuaacgagacaagccgauugggauaugagacuuuuaaagucaucgaagguuggucaaauccaaagaguaaacugcagauuaacagacaggugauaguagauaggggcaaucgguccggguacagcggaaucuucucuguugagggcaagucauguauuaaccguugcuuuuauguggaacuaauccgcgguagaaaggaggaaaccgagguccucuggacaaguaauagcaucguggucuucugugggacuuccggcaccuacggaacaggcucuuggcccgacggggccgaucugaaccuuaugccuauuuga

SEQ ID NO: 149869 - RNA, 1410 nt, Artificial Sequence; identical to SEQ ID NO: 149835
  derived and/or modified CDS sequence (opt3) from neuraminidase__InfluenzaA__AFD98506

SEQ ID NO: 149870 - RNA, 1410 nt, Artificial Sequence
  derived and/or modified CDS sequence (opt3) from neuraminidase__InfluenzaA__AFD98517
augaaccccaaucagaagaucauuaccauaggcagcgugucccugacaaucucuacuauuugcuucuuuaugcaaaucgccauucucaucacgaccgucacacuucacuucaaacaguacgaguuuaacucaccuccaaauaaccagguuaugcugugugaaccgacuauaaucgagagaaauauuaccgaaaucguguauuugacaaacaccacuauugagaaggaaaucugccccaaauuagcugaguacaggaauuggaguaagccucagugugacauaacaggguucgcaccauuuagcaaagauaacuccauucggcugucugccggaggugacaucuggguaacccgcgagcccuaugugucgugcgauccugacaaguguuaccaauucgcgcuaggccaggggacgacucucaauaacguccauucaaauaacaccgugcgagaucguacaccauauagaacucugcuuaugaaugaacugggaguucccuuucacuugggcaccaaacaggugugcauugcuuggagcaguuccucuugucaugacgguaaggccuggcuccacgucugcaucacaggggaugacaagaacgcaaccgccagcuucaucuacaauggaaaacugguggauuccguaguuucauggaguaaggagauucugaggacgcaggaaagcgagugugugugcauaaacggcacuuguacagucgugaugaccgacggcucugcuuccgggaaagcagauacuaagauccucuuuauuaaggagggaaaaaucgugcauacaucaaccuuaagcgguagugcccaacacgucgaagagugcucuugcuauccucgguacccaggcguucgcugugugugcagagacaacuggaagggguccaauaggccgauaguagauauuaacaucaaagaccacagcaucgugucgucuuacgucuguuccggacuggugggcgacacgccccggaagaaugauucaaguagcuccucucauugccuugacccuaacaaugaagagggugggcacggaguuaaaggcugggcuuucgaugacggcaacgauguguggauggggcgcaccauuaaugaaacaagccgauugggauaugagacuuuuaaggucaucgaggguuggucaaacccaaaaaguaagcugcagauuaauagacaggugauaguagacaggggcaaccgguccggguacagcggaaucuucucuguugaaggcaagucauguauuaaucguugcuuuuauguggagcuaauccgcgguagaaaagaagagaccgaaguccucuggacaaguaacagcaucguggucuucugugggacuuccggcaccuacggaacaggcucuuggcccgauggggccgaccugaaucuuaugccuauuuga

SEQ ID NO: 149871 - RNA, 1410 nt, Artificial Sequence; identical to SEQ ID NO: 147566
  derived and/or modified CDS sequence (opt3) from neuraminidase__InfluenzaA__AFD98528

SEQ ID NO: 149872 - RNA, 1410 nt, Artificial Sequence; identical to SEQ ID NO: 149835
  derived and/or modified CDS sequence (opt3) from neuraminidase__InfluenzaA__AFD98539

SEQ ID NO: 149873 - RNA, 1410 nt, Artificial Sequence; identical to SEQ ID NO: 149835
  derived and/or modified CDS sequence (opt3) from neuraminidase__InfluenzaA__AFD98550

SEQ ID NO: 149874 - RNA, 1410 nt, Artificial Sequence
  derived and/or modified CDS sequence (opt3) from neuraminidase__InfluenzaA__AFD98561
augaaccccaaucagaagaucauuaccauaggcagcgugucccugacaaucucuacuauuugcuucuuuaugcaaaucgccauucucaucacgaccgucacacuucacuucaaacaguacgaguuuaacucaccuccaaauaaccagguuaugcugugugaaccgacuauaaucgagagaaauauuaccgaaaucguguauuugacaaacaccacuauugagaaggaaaucugccccaaauuagcugaguacaggaauuggaguaagccucagugugacauaacaggguucgcaccauuuagcaaagauaacuccauucggcugucugccggaggugacaucuggguaacccgcgagcccuaugugucgugcgauccugacaaguguuaccaauucgcgcuaggccaggggacgacucucaauaacguccauucaaauaacaccgugcgagaucguacaccauauagaacucugcuuaugaaugaacugggaguucccuuucacuugggcaccaaacaggugugcauugcuuggagcaguuccucuugucaugacgguaaggccuggcuccacgucugcaucacaggggaugacaagaacgcaaccgccagcuucaucuacaauggaaggcugguggauuccguaguuucauggaguaaagagauucugcggacgcaggaaagcgagugugugugcauaaacggcacuugugcugucgugaugacagacggcucugcauccgggaaggccgauaccaaaauccucuuuauugaggaaggaaagaucgugcauacuucaacauuaagcgguagugcucaacacgucgaggaaugcucuugcuauccucgcuacccaggcguuagaugugugugcagggacaacuggaagggguccaaucggccgauaguagauauuaacaucaaagaccacagcaucgugucgucuuacgucuguuccggacuggugggcgacacccccaggaagucagauaguagcuccucuagccauugccuugacccuaauaacgaggaaggugggcacggaguuaaaggcugggccuucgaugacggcaaugauguguggauggggcgaacgauuaacgagaccucaagauugggauaugagacauuuaaggucaucgaagguuggaguaauccaaaauccaagcugcagauuaaccgccaggugauaguagaccggggcaaucguagcggguacucuggaaucuucucaguugagggcaaaaguuguauuaaccgcugcuuuuauguggaacuaaucagagguaggaaggaggaaacugagguccucuggaccagcaauuccaucguggucuucugugggacaucuggcacuuacggaaccggcucguggcccgauggggcggaccugaaccuuaugccuauuuga

SEQ ID NO: 149875 - RNA, 1410 nt, Artificial Sequence
  derived and/or modified CDS sequence (opt3) from neuraminidase__InfluenzaA__AFD98572
augaaccccaaucagaagaucauuaccauaggcagcgugucccugacaaucucuacuauuugcuucuuuaugcagaucgccauucucaucacgaccgucacacuucacuucaaacaguacgaguuuaacucaccuccaaauaaccagguuaugcugugugaaccgacuauaaucgagagaaauauuaccgaaaucguguauuugacaaacaccacuuuagagaaggaaauuugccccaaacuggcugaguacaggaauuggaguaagccucagugugacaucacaggguucgcaccauuuagcaaagauaacuccauacggcuaucugccggaggugacauuuggguaacccgcgagcccuaugugucgugcgauccugacaaguguuaccaauucgcgcucggccaggggacgacucugaauaacguccauucaaauaacaccgugcgagaucguacaccauauagaacucuucugaugaaugaauugggaguucccuuucaccucggcaccaaacaggugugcaucgcuuggagcaguuccucuugucaugacgguaaggccuggcugcacgucugcauuacaggggaugacaagaacgcaaccgccagcuucaucuacaauggaaggcugguggauuccguaguuucauggaguaaagagauccuccggacgcaggaaagcgagugugugugcauuaacggcacuuguacagucgugaugaccgacggcucugcuuccgggaaggcagauacuaaaauauuauuuaucgaggaaggaaagauugugcauacaucaacccugagcgguagugcccaacacgucgaggaaugcucuugcuauccucgcuacccaggcguuagaugugugugcagggacaacuggaagggguccaaucggccgaucguagauauaaacauuaaagaccacagcaucgugucgucuuacgucuguuccggacuugugggcgacacgccccgcaagaaugauucaaguagcuccucucauugcuuggacccuaacaaugaggaaggugggcacggaguuaaaggcugggcuuucgaugacggcaacgauguguggauggggcgaaccaucaaugagacaagcagacugggauaugagacuuuuaaggucauugaagguuggucaaacccaaaaaguaagcuacagaucaauaggcaagugauuguagaccggggcaaccguuccggguacagcggaauauucucuguugagggcaaaucauguaucaaucgcugcuuuuauguggaacucauuagagguaggaaggaggaaaccgagguccuguggacaaguaacagcaucguggucuucugugggacuuccggcaccuacggaacaggcucuuggcccgauggggccgaccuuaaucugaugccuaucuga

SEQ ID NO: 149876 - RNA, 1410 nt, Artificial Sequence
  derived and/or modified CDS sequence (opt3) from neuraminidase__InfluenzaA__AFD98583
augaaccccaaucagaagaucauuaccauaggcagcgugucccugacaaucucuacuauuugcuucuuuaugcaaaucgccauucucaucacgaccgucacacuucacuucaaacaguacgaguuuaacucaccuccaaauaaccagguuaugcugugugaaccgacuauaaucgagagaaauauuaccgaaaucguguauuugacaaacaccacuauugagaaggaaaucugccccaaauuagcugaguacaggaauuggaguaagccucagugugacauaacaggguucgcaccauuuagccgggauaacuccauucgccugucugccggaggugacaucuggguaacccgagagcccuaugugucgugcgauccugacaaauguuaccaauucgcgcuaggccaggggacgacucucaauaacguccauucaaauaacaccgugcgugauagaacaccauauaggacucugcuuaugaaugaacugggaguucccuuucacuugggcaccaaacaggugugcauugcuuggagcaguuccucuugucaugacgguaaggccuggcuccacgucugcaucacaggggaugacaagaacgcaaccgccagcuucaucuacaauggacggcugguggauuccguaguuucauggaguaaggagauucugcgcacgcaggaaagcgagugugugugcauaaacggcacuuguacagucgugaugaccgacggcucugcuuccgggaaagcagauacuaagauccucuuuauugaggaaggaaaaaucgugcauacaucaaccuuaagcgguagugcccaacacgucgaggaaugcucuugcuauccuagauacccaggcguuaggugugugugccgggacaacuggaagggguccaaucgcccgauaguagauauuaacaucaaggaccacagcaucgugucgucuuacgucuguuccggacuggugggcgacacgccccgaaaaucagauaguagcuccucuagccauugccuugacccuaauaacgaggaaggugggcacggaguuaagggcugggcuuucgaugacggcaaugauguguggauggggagaaccauuaacgagacaucaagguugggauaugagacuuuuaaagucaucgaagguuggaguaauccaaaguccaaacugcagauuaaccgucaggugauaguagaccggggcaaucgcagcggguacucuggaaucuucucaguugagggcaagaguuguauuaacagaugcuuuuauguggaacuaaucaggggucggaaagaggaaaccgagguccucuggacaagcaauuccaucguggucuucugugggacuucuggcaccuacggaacaggcucguggcccgauggggccgaccugaaccuuaugccuauuuga

SEQ ID NO: 149877 - RNA, 1410 nt, Artificial Sequence
  derived and/or modified CDS sequence (opt3) from neuraminidase__InfluenzaA__AFE02944
augaaccccaaucagaagaucauuaccauaggcagcgugugcaugacaaucgggauggccaaccugauucuccaaaucggaaauauuaucuccauauggaucucucacucaauucagcuugguaaccagaaucagaucgagacuuguaaccaaagugucauuacguacgaaaauaacaccuggguuaaucagacauaugugaacaucagcaauacuaacuucgcugcaggccaguccguagugucugucaaacuggccggaaauucgucauugugcccugugagcggaugggcgauauacaguaaggacaacuccauuagaaucggcucuaaaggugauguuuuugugauuagggagccauucaucagcuguuccccguuagaaugccggaccuuuuuccugacacagggggcucuacucaaugacaagcauucaaacggaaccaucaaagaucgcagucccuaucgaacucugaugagcuguccuauuggcgaggucccaucucccuacaacucccguuuugaaucaguggccuggagcgcaagugccugccacgacggcauaaauuggcuuacaaucgggauuucuggaccugauaacggugcuguagcaguucugaaguauaauggcaucauaaccgacacgauuaaguccuggagaaacaauaucuugaggacucaagagagcgagugugccugcgugaacgggucguguuucaccgucaugacagauggaccaucugacggccaggcuuccuacaaaaucuuucggauugaaaaggguaaaaucgugaagucaguggagaugaaugcccccaacuaucauuacgaagagugcaguuguuacccugauagcuccgagauuacuugcgucugccgcgacaauuggcacgggucuaacagaccauggguuagcuucaaucagaaccucgaauaucagauaggauacaucuguucaggcauuuuuggcgauaauccgaggcccaacgacaaaaccgggaguugcggaccuguguccagcaauggugcgaacggcguaaagggguucucuuuuaaguauggaaacggcguguggaucggucggacaaaaucaaucaguagccgcaauggguucgagaugauuugggauccaaacggcuggaccggaacggacaauaacuuuuccauaaagcaagacaucgucggcauuaaugaauggucuggguacucggggagcuucgugcagcaucccgagcugacuggucugaacuguauccgaccuugcuucuggguugaacucauuagaggcaggccaaaagagaauacaguguggaccuccgggucaaguaucucuuuuuguggagucaacagcgauacugugggcugguccuggcccgacggugcagaguuaccguucacaauagauaaguga

SEQ ID NO: 149878 - RNA, 1410 nt, Artificial Sequence
  derived and/or modified CDS sequence (opt3) from neuraminidase__InfluenzaA__AFE47627
augaaccccaaucagaagaucauuaccauaggcagcgugucccugacaaucgccacuauuugcuuccucaugcaaaucgcuauucuugucacgaccguuacacugcacuuuaaacaguacgaguguaacucuccuccaaauaaccaggugauguugugcgaaccgacuaucauagagagaaauaucaccgaaauuguauauuuaacaaacaccacuaucgagaaggaaauuugucccaaacuggcagaguacaggaauuggucaaagccucagugcaacaucacaggguucgccccauuuaguaaagacaauagcauacggcuauccgcgggaggugauauuugggugacccgcgagcccuaugucucuugugacccugauaagugcuaccaauucgcucucggccaggggacgacucugaacaauggacauucgaacgacaccgugcacgaucgaacaccauaucguacucuucugaugaaugaauugggcguucccuuucaucucgguaccaaacagguguguaucgccuggucaagcaguuccugccacgacgggaaggcauggcugcaugucugugugacaggagaugacgagaacgccaccgcuucuuucauuuacaauggcagacugguagauagcaucggcuccuggucaaagaaaauccucaggacgcaggaaagugagugcguuuguauuaacgggacuugcacaguggucaugaccgacggaagcgcaucugguaaggccgauacuaaaauauuauuuaucgaggaaggcaagauugugcacacauccucacugagcgggagugcucaacacguggaggaaugcucuuguuauccucgguacccaggaguccgcugcguuuguagagacaacuggaagggcuccaauaggccgaucguggauauaaacguaaaagacuacagcauugugucgucuuaugucugcuccggucuugugggggacacgccccggaagaaugauucaaguagcuccucucauuguuuggacccuaacaaugaggaaggaggccacggcguuaaagggugggccuucgaugacggaaacgauguguggaugggucgcaccaucagcgagaagcugcgaucaggcuacgagaccuuuaaagucaucgaaggguggaguaagccaaauuccaaacuacagacaaacagacaggugauuguagacaggggaaaucggagcggcuauucugguaucuucucaguugagaguaagagcugcauuaaccguuguuuuuacguggaacucauacgcgggagaaagcaggagacugaaguccuguggaccuccaauucuaucguggucuucugcggcacaucgggaacuuauggcaccgggagcuggcccgauggagcggacauuaaccuuaugccuaucuga

SEQ ID NO: 149879 - RNA, 1410 nt, Artificial Sequence; identical to SEQ ID NO: 149191
  derived and/or modified CDS sequence (opt3) from neuraminidase__InfluenzaA__AFF18509

SEQ ID NO: 149880 - RNA, 1410 nt, Artificial Sequence
  derived and/or modified CDS sequence (opt3) from neuraminidase__InfluenzaA__AFF57129
augaaccccaaucagaagaucauuaccauaggcagcgugugcaugacaaucgggauggccaaccugauucuccaaaucggaaauauuaucuccauauggaucucucacucaauucagcuugguaaccagaaucagaucgagacuuguaaccaaagugucauuacguacgaaaauaacaccuggguuaaucagacauaugugaacaucagcaauacuaacuucgcugcaggccaguccguagugucugucaaacuggccggaaauucgucauugugcccugugagcggaugggcgauauacaguaaggacaacuccauuagaaucggcucuaaaggugauguuuuugugauuagggagccauucaucagcuguuccccguuagaaugccggaccuuuuuccugacacagggggcucuacucaaugacaagcauucaaacggaaccaucaaagaucgcagucccuaucgaacucugaugagcuguccuauuggcgaggucccaucucccuacaacucccguuuugaaucaguggccuggagcgcaagugccugccacgacggcauaaauuggcuuacaaucgggauuucuggaccugauaacggugcuguagcaguucugaaguauaauggcaucauaaccgacacgauuaaguccuggagaaacaauaucuugaggacucaagagagcgagugugccugcgugaacgggucguguuucaccaucaugacagauggaccaucugacggccaggcuuccuacaaaauuuuucggaucgaaaaggguaaaauugucaagucaguggagaugaaugcccccaacuaucauuacgaagagugcaguuguuacccugauagcuccgagauaacuugcgugugccgcgacaauuggcacgggucuaacagaccaugggucagcuucaaucagaaccucgaauaucagaucggauacauuuguucaggcaucuuuggcgauaauccgaggcccaacgacaaaaccgggaguugcggaccuguuuccagcaauggugcgaacggcgugaagggguucucuuuuaaguauggaaacggcguauggaucggucggacaaaaucaauuaguagccgcaagggguucgagaugauaugggauccaaauggcuggaacggaaccgacaauaacuuuuccaucaaacaagacauugugggcaucaaugaauggucuggguacucggggagcuucguccagcaucccgagcugacgggucuggauuguauucgaccuugcuucuggguggaacucaucagaggcaggccaaaggagaacacuauauggacauccgggucaaguaucucuuuuuguggaguuaauagcgacaccgugggcugguccuggcccgauggugcagaguuaccguucacuauugacaaauga

SEQ ID NO: 149881 - RNA, 1410 nt, Artificial Sequence
  derived and/or modified CDS sequence (opt3) from neuraminidase__InfluenzaA__AFF57133
augaaccccaaucagaagaucauuaccauaggcagcgugugcaugacaaucgggauggccaaccugauucuccaaaucggaaauauuaucuccauauggaucucucacucaauucagcuugguaaccagagucagaucgagacuuguaaucaaagcgucauuacguacgaaaacaauaccuggcugaaccagacauauguuaauaucuccaacacuaauuucgcugcaggccagucugugguaucggugaaauuggccgggaacucaucauuaugcccugucaguggaugggcgauauacuccaaggacaauucuauuagaaucggcagcaaaggugauguguuuguuauuagggagccauucaucuccuguucaccgagugaaugccggaccuuuuuccugacacagggggcucuacucaacgacaagcauagcaauggaaccaucaaagaucgcucucccuaucgaacucugauguccuguccuauuggcgaggugccaucacccuacaacagccguuuugaaagugucgccuggucugcauccgccugccacgacggcauaaacuggcuuacaaucgggauuagcggaccugauaauggugcuguggcaguacugaaguauaacggcaucauaaccgacacgauuaagucguggagaaauaacaucuugaggacucaagagucugagugugccugcguuaauggguccuguuucaccaucaugacagauggaccaucagacggccaggcuaguuacaaaauuuuucggaucgaaaaggguaaaauugucaagagcguggagaugaacgcccccaauuaucauuacgaagagugcuccuguuacccugauucuagcgagauaacuugcgugugccgcgacaacuggcacgggucaaauagaccaugggugaguuucaaccagaaucucgaauaucagaucggauacauuuguuccggcaucuuuggcgauaacccgaggcccaaugacaaaaccgggagcugcggaccugucucuucaaacggugcgaauggcguuaagggguucaguuuuaaguauggaaacggcguguggaucggucggacaaaaagcauuuccucucgcaagggguucgagaugauaugggauccaaacggcuggaccggaacggacaauaacuuuucgaucaaacaagacauuguaggcaucaaugaauggagcggguacuccggaucauucgugcagcaucccgagcugacuggucuggauuguauucgaccuugcuucugggucgaacucaucagaggcaggccaaaggagaacacaauauggaccagugggucuagcaucuccuuuuguggagugaauagcgacacuguuggcuggagcuggcccgauggugcagaguuaccguucacaauugacaaauga

SEQ ID NO: 149882 - RNA, 1410 nt, Artificial Sequence; identical to SEQ ID NO: 144941
  derived and/or modified CDS sequence (opt3) from neuraminidase__InfluenzaA__AFF57137

SEQ ID NO: 149883 - RNA, 1410 nt, Artificial Sequence; identical to SEQ ID NO: 144941
  derived and/or modified CDS sequence (opt3) from neuraminidase__InfluenzaA__AFF57141

SEQ ID NO: 149884 - RNA, 1410 nt, Artificial Sequence; identical to SEQ ID NO: 144941
  derived and/or modified CDS sequence (opt3) from neuraminidase__InfluenzaA__AFF57145

SEQ ID NO: 149885 - RNA, 1410 nt, Artificial Sequence; identical to SEQ ID NO: 144941
  derived and/or modified CDS sequence (opt3) from neuraminidase__InfluenzaA__AFF57149

SEQ ID NO: 149886 - RNA, 1410 nt, Artificial Sequence; identical to SEQ ID NO: 144941
  derived and/or modified CDS sequence (opt3) from neuraminidase__InfluenzaA__AFF57153

SEQ ID NO: 149887 - RNA, 1410 nt, Artificial Sequence; identical to SEQ ID NO: 144941
  derived and/or modified CDS sequence (opt3) from neuraminidase__InfluenzaA__AFF57157

SEQ ID NO: 149888 - RNA, 1410 nt, Artificial Sequence; identical to SEQ ID NO: 144941
  derived and/or modified CDS sequence (opt3) from neuraminidase__InfluenzaA__AFF57161

SEQ ID NO: 149889 - RNA, 1410 nt, Artificial Sequence; identical to SEQ ID NO: 144941
  derived and/or modified CDS sequence (opt3) from neuraminidase__InfluenzaA__AFF57165

SEQ ID NO: 149890 - RNA, 1410 nt, Artificial Sequence; identical to SEQ ID NO: 144941
  derived and/or modified CDS sequence (opt3) from neuraminidase__InfluenzaA__AFF57169

SEQ ID NO: 149891 - RNA, 1410 nt, Artificial Sequence; identical to SEQ ID NO: 144941
  derived and/or modified CDS sequence (opt3) from neuraminidase__InfluenzaA__AFF57173

SEQ ID NO: 149892 - RNA, 1410 nt, Artificial Sequence; identical to SEQ ID NO: 144941
  derived and/or modified CDS sequence (opt3) from neuraminidase__InfluenzaA__AFF57177

SEQ ID NO: 149893 - RNA, 1410 nt, Artificial Sequence; identical to SEQ ID NO: 144941
  derived and/or modified CDS sequence (opt3) from neuraminidase__InfluenzaA__AFF57181

SEQ ID NO: 149894 - RNA, 1410 nt, Artificial Sequence; identical to SEQ ID NO: 144941
  derived and/or modified CDS sequence (opt3) from neuraminidase__InfluenzaA__AFF57185

SEQ ID NO: 149895 - RNA, 1410 nt, Artificial Sequence; identical to SEQ ID NO: 144941
  derived and/or modified CDS sequence (opt3) from neuraminidase__InfluenzaA__AFF57189

SEQ ID NO: 149896 - RNA, 1350 nt, Artificial Sequence
  derived and/or modified CDS sequence (opt3) from neuraminidase__InfluenzaA__AFF60789
augaaccccaauaagaaaaucauuaccauaggcagcaucugcauggugacagggauggucucccugaugcuccagauuggaaaccuuaucucuauuuggguuucacacaguauccauacugguaaucaacacaaggccgagccuauaagcaacacgaauuuccugaccgaaaaagcuguggcauccguaaaguuggccggcaacucuucguuauguccaaucaaugggugggcgguguacucaaaagacaacagcauuagaaucggaaguaagggcgaugucuuugugauuagggagccguucaucuccugcucucaucuggaaugucggacauuuuuccuaacucagggugcucuccugaaugacaagcacagcaacgggaccguuaaagaucgcucaccccaucgaacacuuauguccugcccugugggagaggccccaagucccuauaauagccguuuugaaucugucgcaugguccgccucagcuugucacgacggcaccagcuggcugacuauaggcauuagugggccugauaacggagcaguggccguauugaaguacaaugguaucauuacagacaccaucaaaucuuggagaaacaauauccucaggacgcaggaguccgagugcgcuuguguuaacggcagcugcuucacugugaugaccgaugggccaucgaacggacaggccucucacaagauuuuuaaaauggaaaagggcaaggucgugaaauccguggagcuggacgcgcccaauuaucauuacgaagaguguucaugcuauccugaugccggugagauaacaugugucugccgggacaacuggcacgggaguaaucgcccauggguuagcuucaaccaaaaucuggaauaccagaucggauauauuugcuccggcguguuuggcgauaacccgagacccaaugacgggacuggaucuugugguccuguaagcucaaacggcgcauacggggugaagggauucaguuuuaaauacggcaauggugucuggaucgggaggaccaaguccacaaacagccggucuggcuucgagaugauaugggauccaaauggauggaccgaaacggacucaaguuuuagcgugaaacaggacauuguugcuaucacugauugguccggcuauucugggucguucgugcagcaucccgagcucacaggauuagacugcauccgcccuuguuucugggucgaacugauucgagguagaccaaaggagagcaccaucuggacuuccggcucaaguauuucuuuuugcggggugacaagcgauaccguaggaugguccuggcccgacggcgccgagcuuccguucacgauagauaaauga

SEQ ID NO: 149897 - RNA, 1410 nt, Artificial Sequence
  derived and/or modified CDS sequence (opt3) from neuraminidase__InfluenzaA__AFG29043
augaaccccaaucagaagaucauuaccauaggcagcgugugcaugacaaucgggauggccaaccugauucuccaaaucggaaauauuaucuccauauggaucucucacucaauucagcuugguaaccagaaucagaucgagacuuguaaccaaagugucauuacguacgaaaauaacaccuggguuaaucagacauaugugaacaucagcaauacuaacuucgcugcaggccaguccguagugucugucaaacuggccggaaauucgucauugugcccugugagcggaugggcgauauacaguaaggacaacuccauuagaaucggcucuaaaggugauguuuuugugauuagggagccauucaucagcuguuccccguuagaaugccggaccuuuuuccugacacagggggcucuacucaaugacaagcauucaaacggaaccauccgcgaucgaagucccuaucguacucugaugagcuguccuauuggcgaggucccaucucccuacaacuccagauuugaaucaguggccuggagcgcaagugccugccacgacggcauaaauuggcuuacaaucgggauuucuggaccugauaacggugcuguagcaguucugaaauauaauggcaucauaaccgacacgauuaaguccuggaggaacaauaucuugcggacucaagagagcgagugugccugcgugaacgggucguguuucaccgucaugacagauggaccaucugacggccaggcuuccuacaagaucuuucgcauugaaaaagguaagaucgugaaaucaguggagaugaaugcccccaacuaucauuacgaagagugcaguuguuacccugauagcuccgagauuacuugcgucugcagagacaauuggcacgggucuaacaggccauggguuagcuucaaucagaaccucgaauaucagauaggauacaucuguucaggcauuuuuggcgauaauccgcggcccaacgacaagaccgggaguugcggaccuguguccagcaauggugcgaacggcguaaaaggguucucuuuuaaguauggaaacggcguguggaucggucgcacaaagucaaucaguagccgaaauggguucgagaugauuugggauccaaacggcuggaccggaacggacaauaacuuuuccauaaaacaagacaucgucggcauuaaugaauggucuggguacucggggagcuucgugcagcaucccgagcugacuggucuggauuguaucagaccuugcuucuggguugaacucauuaggggccggccaaaggagaacacaaucuggaccuccgggucaaguauaucuuuuuguggagugaauagcgacacugucggcugguccuggcccgauggugcagaguuaccguucacaaucgacaaauga

SEQ ID NO: 149898 - RNA, 1410 nt, Artificial Sequence; identical to SEQ ID NO: 146567
  derived and/or modified CDS sequence (opt3) from neuraminidase__InfluenzaA__AFG29045

SEQ ID NO: 149899 - RNA, 1410 nt, Artificial Sequence; identical to SEQ ID NO: 146699
  derived and/or modified CDS sequence (opt3) from neuraminidase__InfluenzaA__AFG31063

SEQ ID NO: 149900 - RNA, 1410 nt, Artificial Sequence; identical to SEQ ID NO: 144786
  derived and/or modified CDS sequence (opt3) from neuraminidase__InfluenzaA__AFG31073

SEQ ID NO: 149901 - RNA, 1410 nt, Artificial Sequence
  derived and/or modified CDS sequence (opt3) from neuraminidase__InfluenzaA__AFG31083
augaaccccaaucagaagaucauuaccauaggcagcgugugcaugacaaucgggauggccaaccugauucuccaaaucggaaauauuaucuccauauggaucucucacucaauucagcuugucaaccagaaucagaucgagacuuguaaccaaaguguuauuacguacgaaaauaacaccugggugaaucagacauauguaaacaucagcaauacuaacuucgcugcaggucaguccguggucucugugaaacuggccggcaauucgucauugugcccuguuagcgggugggcgauauacaguaaggacaacuccgugagaauuggaucuaaaggcgaugucuuugugaucagggagccauucauuagcuguuccccguuagaaugccggaccuuuuuccugacacagggugcucuacucaaugacaagcauucaaacgggaccaucaaagaucgcagucccuaucgaacucugaugagcuguccuaucggagagguaccaucucccuacaacucccguuuugaaucaguugccuggagcgcaagugccugccacgacggcauuaauuggcuuacaauaggcaucucugggccugauaacggagcuguggcaguccugaaguauaaugguauuaucaccgacacgauaaaguccuggagaaacaauauuuugaggacucaagagagcgagugugccugcgugaacggcucguguuucaccgugaugacagaugggccaucuaauggacaggcuuccuacaaaaucuuucggaucgaaaagggcaaaauugucaagucaguugagaugaacgcccccaauuaucauuacgaagagugcaguuguuacccugacagcuccgagaucacuugcgugugccgcgauaacuggcacgguucuaauagaccaugggugagcuucaaccagaaucucgaauaucagauuggguacauauguucaggaaucuuuggcgacaacccgaggcccaaugauaaaaccggcaguugcgggccuguauccagcaacggagcgaacggugucaagggcuucucuuuuaaguaugggaauggaguguggauuggccggacaaaaucaaucaguagccgcaacgguuucgagaugaucugggacccaaauggguggaccggcacggauaacaauuuuuccauuaagcaagacauaguuggaaucaacgaauggucuggcuacucggggagcuucgugcagcaucccgagcugacuggacuggacuguauucgaccuugcuucugggucgaacucaucagagguaggccaaaagagaauacaauuuggaccuccggcucaaguaucucuuuuuguggggugaacagcgauacuguaggaugguccuggcccgacggcgcagaguuaccguucacaauagauaaguga

SEQ ID NO: 149902 - RNA, 1410 nt, Artificial Sequence; identical to SEQ ID NO: 144786
  derived and/or modified CDS sequence (opt3) from neuraminidase__InfluenzaA__AFG31093

SEQ ID NO: 149903 - RNA, 1410 nt, Artificial Sequence; identical to SEQ ID NO: 144786
  derived and/or modified CDS sequence (opt3) from neuraminidase__InfluenzaA__AFG31103

SEQ ID NO: 149904 - RNA, 1410 nt, Artificial Sequence; identical to SEQ ID NO: 144786
  derived and/or modified CDS sequence (opt3) from neuraminidase__InfluenzaA__AFG31113

SEQ ID NO: 149905 - RNA, 1410 nt, Artificial Sequence; identical to SEQ ID NO: 144786
  derived and/or modified CDS sequence (opt3) from neuraminidase__InfluenzaA__AFG31123

SEQ ID NO: 149906 - RNA, 1410 nt, Artificial Sequence; identical to SEQ ID NO: 144786
  derived and/or modified CDS sequence (opt3) from neuraminidase__InfluenzaA__AFG31133

SEQ ID NO: 149907 - RNA, 1410 nt, Artificial Sequence; identical to SEQ ID NO: 144786
  derived and/or modified CDS sequence (opt3) from neuraminidase__InfluenzaA__AFG31143

SEQ ID NO: 149908 - RNA, 1410 nt, Artificial Sequence; identical to SEQ ID NO: 144786
  derived and/or modified CDS sequence (opt3) from neuraminidase__InfluenzaA__AFG31153

SEQ ID NO: 149909 - RNA, 1410 nt, Artificial Sequence; identical to SEQ ID NO: 144786
  derived and/or modified CDS sequence (opt3) from neuraminidase__InfluenzaA__AFG31163

SEQ ID NO: 149910 - RNA, 1410 nt, Artificial Sequence
  derived and/or modified CDS sequence (opt3) from neuraminidase__InfluenzaA__AFG31173
augaaccccaaucagaagaucauuaccauaggcagcgugugcaugacaaucgggauggccaaccugauucuccaaaucggaaauauuaucuccauauggaucucucacucaauucagcuugguaaccagaaucagaucgagacuuguaaccaaagugucauuacguacgaaaauaacaccuggguuaaucagacauaugugaacaucagcaauacuaacuucgcugcaggccaguccguagugucugucaaacuggccggaaauucgucauugugcccugugagcggaugggcgauauacaguaaggacaacuccauuagaaucggcucuaaaggugauguuuuugugauuagggagccauucaucagcuguuccccguuagaaugccggaccuuuuuccugacacagggggcucuacucaaugacaagcauucaaacggaaccaucaaagaucgcagucccuaucgaacucugaugagcuguccuauuggcgaggucccaucucccuacaacucccguuuugaaucaguggccuggagcgcaagugccugccacgacggcauaaauuggcuuacaaucgggauuucuggaccugauaacggugcuguagcaguucugaaguauaauggcaucauaaccgacacgauuaaguccuggagaaacaauaucuugaggacucaagagagcgagugugccugcgugaacgggucguguuucaccgucaugacagauggaccaucugacggccaggcuuccuacaaaaucuuucggauugaaaaggguaaaaucgugaagucaguggagaugaaugcccccaacuaucauuacgaagagugcaguuguuacccugauagcuccgagauuacuugcgucugccgcgacaauuggcacgggucuaacagaccauggguuagcuucaaucagaaccucgaauaucagauaggauacaucuguucaggcauuuuuggcgauaauccgaggcccaacgacaaaaccgggaguugcggaccuguguccagcaauggugcgaacggcguaaagggguucucuuuuaaguauggaaacggcguguggaucggucggacaaaaucaaucaguagccgcaauggguucgagaugauuugggauccaaacggcuggaccggaacggacaauaacuuuuccauaaagcaagacaucgucggcauuaaugaauggucuggguacucggggagcuucgugcagcaucccgagcugacuggucuggauuguauccgaccuugcuucuggguugaacucauuagaggcuuaccaaaagagaacacaaucuggaccuccgggucaaguauaucuuuuuguggagugaauagcgacacugucggcugguccuggcccgauggugcagagcugccguucacaaucgacaaguga

SEQ ID NO: 149911 - RNA, 1410 nt, Artificial Sequence; identical to SEQ ID NO: 149910
  derived and/or modified CDS sequence (opt3) from neuraminidase__InfluenzaA__AFG31183

SEQ ID NO: 149912 - RNA, 1410 nt, Artificial Sequence; identical to SEQ ID NO: 144786
  derived and/or modified CDS sequence (opt3) from neuraminidase__InfluenzaA__AFG31193

SEQ ID NO: 149913 - RNA, 1410 nt, Artificial Sequence; identical to SEQ ID NO: 144786
  derived and/or modified CDS sequence (opt3) from neuraminidase__InfluenzaA__AFG31203

SEQ ID NO: 149914 - RNA, 1410 nt, Artificial Sequence; identical to SEQ ID NO: 144786
  derived and/or modified CDS sequence (opt3) from neuraminidase__InfluenzaA__AFG31213

SEQ ID NO: 149915 - RNA, 1410 nt, Artificial Sequence; identical to SEQ ID NO: 144786
  derived and/or modified CDS sequence (opt3) from neuraminidase__InfluenzaA__AFG31223

SEQ ID NO: 149916 - RNA, 1410 nt, Artificial Sequence; identical to SEQ ID NO: 144786
  derived and/or modified CDS sequence (opt3) from neuraminidase__InfluenzaA__AFG31233

SEQ ID NO: 149917 - RNA, 1410 nt, Artificial Sequence
  derived and/or modified CDS sequence (opt3) from neuraminidase__InfluenzaA__AFG31243
augaaccccaaucagaagaucauuaccauaggcagcgugugcaugacaaucgggauggccaaccugauucuccaaaucggaaauauuaucuccauauggaucucucacucaauucagcuugguaaccagaaucagaucgagacuuguaaccaaagugucauuacguacgaaaauaacaccuggguuaaucagacauaugugaacaucagcaauacuaacuucguagcuggccaguccguggucucugugaaacuggcaggaaauucgucauugugcccuguuagcggaugggccauauacaguaaggacaacuccauuagaaucggcucuaaaggugauguguuugucauuagggagccauucaucagcuguuccccguuagaaugccggaccuuuuuccugacacagggggcgcuacucaaugacaagcauucaaacggaaccaucaaagaucgcagucccuaucgaacucugaugagcuguccuauuggcgaggugccaucucccuacaacucccguuuugaaucaguagcuuggagcgccagugcaugccacgacggcauaaauuggcuuacaaucgggauuucuggaccugauaacggugccguugcugugcugaaguauaauggcaucauaaccgacacgauuaaguccuggagaaacaauaucuugaggacucaagagagcgagugugcaugcgucaacgggucguguuucaccgugaugacagauggaccaucugacggccaggccuccuacaaaaucuuucggauugaaaaggguaaaaucgugaagucagucgagaugaaugcucccaacuaucauuacgaagagugcaguuguuacccugauagcuccgagauuacuugcguuugccgcgacaauuggcacgggucuaacagaccaugggugagcuucaaucagaaccucgaauaucagauaggauacaucuguucaggcauuuuuggcgauaauccgaggcccaacgacaaaaccgggaguugcggaccuguauccagcaauggugccaacggcgugaagggguucucuuuuaaguauggaaacggcgucuggaucggucggacaaaaucaaucaguagccgcaauggguucgagaugauuugggauccaaacggcuggaccggaacggacaauaacuuuuccauaaagcaagacaucgugggcauuaaugaauggucuggguacucggggagcuucguucagcaucccgagcugacuggucuggauuguauccgaccuugcuucuggguggaacucauuagaggcaggccaaaagagaacacaaucuggaccuccgggucaaguauaucuuuuuguggagucaauagcgacacugugggcugguccuggcccgauggugcggaguuaccguucacaaucgacaaguga

SEQ ID NO: 149918 - RNA, 1410 nt, Artificial Sequence; identical to SEQ ID NO: 147778
  derived and/or modified CDS sequence (opt3) from neuraminidase__InfluenzaA__AFG31253

SEQ ID NO: 149919 - RNA, 1410 nt, Artificial Sequence; identical to SEQ ID NO: 144786
  derived and/or modified CDS sequence (opt3) from neuraminidase__InfluenzaA__AFG31263

SEQ ID NO: 149920 - RNA, 1410 nt, Artificial Sequence; identical to SEQ ID NO: 144786
  derived and/or modified CDS sequence (opt3) from neuraminidase__InfluenzaA__AFG31273

SEQ ID NO: 149921 - RNA, 1410 nt, Artificial Sequence; identical to SEQ ID NO: 144786
  derived and/or modified CDS sequence (opt3) from neuraminidase__InfluenzaA__AFG31283

SEQ ID NO: 149922 - RNA, 1410 nt, Artificial Sequence; identical to SEQ ID NO: 144786
  derived and/or modified CDS sequence (opt3) from neuraminidase__InfluenzaA__AFG31293

SEQ ID NO: 149923 - RNA, 1410 nt, Artificial Sequence; identical to SEQ ID NO: 144786
  derived and/or modified CDS sequence (opt3) from neuraminidase__InfluenzaA__AFG31303

SEQ ID NO: 149924 - RNA, 1410 nt, Artificial Sequence; identical to SEQ ID NO: 144786
  derived and/or modified CDS sequence (opt3) from neuraminidase__InfluenzaA__AFG31313

SEQ ID NO: 149925 - RNA, 1410 nt, Artificial Sequence; identical to SEQ ID NO: 144786
  derived and/or modified CDS sequence (opt3) from neuraminidase__InfluenzaA__AFG31326

SEQ ID NO: 149926 - RNA, 1410 nt, Artificial Sequence; identical to SEQ ID NO: 144786
  derived and/or modified CDS sequence (opt3) from neuraminidase__InfluenzaA__AFG31336

SEQ ID NO: 149927 - RNA, 1410 nt, Artificial Sequence; identical to SEQ ID NO: 147778
  derived and/or modified CDS sequence (opt3) from neuraminidase__InfluenzaA__AFG31346

SEQ ID NO: 149928 - RNA, 1410 nt, Artificial Sequence; identical to SEQ ID NO: 147778
  derived and/or modified CDS sequence (opt3) from neuraminidase__InfluenzaA__AFG31356

SEQ ID NO: 149929 - RNA, 1410 nt, Artificial Sequence; identical to SEQ ID NO: 147778
  derived and/or modified CDS sequence (opt3) from neuraminidase__InfluenzaA__AFG31366

SEQ ID NO: 149930 - RNA, 1410 nt, Artificial Sequence; identical to SEQ ID NO: 147778
  derived and/or modified CDS sequence (opt3) from neuraminidase__InfluenzaA__AFG31379

SEQ ID NO: 149931 - RNA, 1410 nt, Artificial Sequence; identical to SEQ ID NO: 147778
  derived and/or modified CDS sequence (opt3) from neuraminidase__InfluenzaA__AFG31389

SEQ ID NO: 149932 - RNA, 1410 nt, Artificial Sequence; identical to SEQ ID NO: 147778
  derived and/or modified CDS sequence (opt3) from neuraminidase__InfluenzaA__AFG31399

SEQ ID NO: 149933 - RNA, 1410 nt, Artificial Sequence; identical to SEQ ID NO: 147778
  derived and/or modified CDS sequence (opt3) from neuraminidase__InfluenzaA__AFG31409

SEQ ID NO: 149934 - RNA, 1410 nt, Artificial Sequence; identical to SEQ ID NO: 144786
  derived and/or modified CDS sequence (opt3) from neuraminidase__InfluenzaA__AFG31419

SEQ ID NO: 149935 - RNA, 1410 nt, Artificial Sequence; identical to SEQ ID NO: 144786
  derived and/or modified CDS sequence (opt3) from neuraminidase__InfluenzaA__AFG31429

SEQ ID NO: 149936 - RNA, 1410 nt, Artificial Sequence; identical to SEQ ID NO: 144786
  derived and/or modified CDS sequence (opt3) from neuraminidase__InfluenzaA__AFG31439

SEQ ID NO: 149937 - RNA, 1410 nt, Artificial Sequence; identical to SEQ ID NO: 144786
  derived and/or modified CDS sequence (opt3) from neuraminidase__InfluenzaA__AFG31449

SEQ ID NO: 149938 - RNA, 1410 nt, Artificial Sequence; identical to SEQ ID NO: 144786
  derived and/or modified CDS sequence (opt3) from neuraminidase__InfluenzaA__AFG31459

SEQ ID NO: 149939 - RNA, 1410 nt, Artificial Sequence; identical to SEQ ID NO: 144786
  derived and/or modified CDS sequence (opt3) from neuraminidase__InfluenzaA__AFG31469

SEQ ID NO: 149940 - RNA, 1410 nt, Artificial Sequence; identical to SEQ ID NO: 144786
  derived and/or modified CDS sequence (opt3) from neuraminidase__InfluenzaA__AFG31479

SEQ ID NO: 149941 - RNA, 1410 nt, Artificial Sequence; identical to SEQ ID NO: 144786
  derived and/or modified CDS sequence (opt3) from neuraminidase__InfluenzaA__AFG31499

SEQ ID NO: 149942 - RNA, 1410 nt, Artificial Sequence; identical to SEQ ID NO: 146677
  derived and/or modified CDS sequence (opt3) from neuraminidase__InfluenzaA__AFG31509

SEQ ID NO: 149943 - RNA, 1410 nt, Artificial Sequence; identical to SEQ ID NO: 147778
  derived and/or modified CDS sequence (opt3) from neuraminidase__InfluenzaA__AFG31519

SEQ ID NO: 149944 - RNA, 1410 nt, Artificial Sequence; identical to SEQ ID NO: 144786
  derived and/or modified CDS sequence (opt3) from neuraminidase__InfluenzaA__AFG31529

SEQ ID NO: 149945 - RNA, 1410 nt, Artificial Sequence; identical to SEQ ID NO: 146677
  derived and/or modified CDS sequence (opt3) from neuraminidase__InfluenzaA__AFG31539

SEQ ID NO: 149946 - RNA, 1410 nt, Artificial Sequence; identical to SEQ ID NO: 144786
  derived and/or modified CDS sequence (opt3) from neuraminidase__InfluenzaA__AFG31549

SEQ ID NO: 149947 - RNA, 1410 nt, Artificial Sequence; identical to SEQ ID NO: 144786
  derived and/or modified CDS sequence (opt3) from neuraminidase__InfluenzaA__AFG31559

SEQ ID NO: 149948 - RNA, 1410 nt, Artificial Sequence; identical to SEQ ID NO: 147778
  derived and/or modified CDS sequence (opt3) from neuraminidase__InfluenzaA__AFG31569

SEQ ID NO: 149949 - RNA, 1410 nt, Artificial Sequence; identical to SEQ ID NO: 144786
  derived and/or modified CDS sequence (opt3) from neuraminidase__InfluenzaA__AFG31579

SEQ ID NO: 149950 - RNA, 1410 nt, Artificial Sequence; identical to SEQ ID NO: 144786
  derived and/or modified CDS sequence (opt3) from neuraminidase__InfluenzaA__AFG31589

SEQ ID NO: 149951 - RNA, 1410 nt, Artificial Sequence; identical to SEQ ID NO: 144786
  derived and/or modified CDS sequence (opt3) from neuraminidase__InfluenzaA__AFG31599

SEQ ID NO: 149952 - RNA, 1410 nt, Artificial Sequence; identical to SEQ ID NO: 144786
  derived and/or modified CDS sequence (opt3) from neuraminidase__InfluenzaA__AFG31609

SEQ ID NO: 149953 - RNA, 1410 nt, Artificial Sequence; identical to SEQ ID NO: 144786
  derived and/or modified CDS sequence (opt3) from neuraminidase__InfluenzaA__AFG31619

SEQ ID NO: 149954 - RNA, 1410 nt, Artificial Sequence; identical to SEQ ID NO: 144786
  derived and/or modified CDS sequence (opt3) from neuraminidase__InfluenzaA__AFG31629

SEQ ID NO: 149955 - RNA, 1410 nt, Artificial Sequence; identical to SEQ ID NO: 147778
  derived and/or modified CDS sequence (opt3) from neuraminidase__InfluenzaA__AFG31639

SEQ ID NO: 149956 - RNA, 1410 nt, Artificial Sequence; identical to SEQ ID NO: 144786
  derived and/or modified CDS sequence (opt3) from neuraminidase__InfluenzaA__AFG31649

SEQ ID NO: 149957 - RNA, 1410 nt, Artificial Sequence; identical to SEQ ID NO: 144786
  derived and/or modified CDS sequence (opt3) from neuraminidase__InfluenzaA__AFG31659

SEQ ID NO: 149958 - RNA, 1410 nt, Artificial Sequence; identical to SEQ ID NO: 144786
  derived and/or modified CDS sequence (opt3) from neuraminidase__InfluenzaA__AFG31669

SEQ ID NO: 149959 - RNA, 1410 nt, Artificial Sequence; identical to SEQ ID NO: 142143
  derived and/or modified CDS sequence (opt3) from neuraminidase__InfluenzaA__AFG71868

SEQ ID NO: 149960 - RNA, 1410 nt, Artificial Sequence; identical to SEQ ID NO: 142143
  derived and/or modified CDS sequence (opt3) from neuraminidase__InfluenzaA__AFG71890

SEQ ID NO: 149961 - RNA, 1410 nt, Artificial Sequence; identical to SEQ ID NO: 142143
  derived and/or modified CDS sequence (opt3) from neuraminidase__InfluenzaA__AFG71901

SEQ ID NO: 149962 - RNA, 1410 nt, Artificial Sequence; identical to SEQ ID NO: 142162
  derived and/or modified CDS sequence (opt3) from neuraminidase__InfluenzaA__AFG71912

SEQ ID NO: 149963 - RNA, 1410 nt, Artificial Sequence
  derived and/or modified CDS sequence (opt3) from neuraminidase__InfluenzaA__AFG71934
augaaccccaaucagaagaucauuaccauaggcagcgugucccugacaaucgccacugucugcuuccucaugcaaauugcuauccuuauuacgaccguuacacugcacuuuaaacaguacgagugugacucuccugcaaacaaucaggugaugccaugcgaaccgaucauaaucgagagaaacauuacugaaaucguauauuugaccaauacaaccauugagaaggaaaucugucccaaauuaguggaguacaggaacuggucaaagccucagugcaaaauaacuggguucgccccauuuaguaaggauaauagcauucggcuguccgcgggaggugacaucugggucacacgcgagcccuaugugucuugugauccuggcaagugcuaccaauucgcucuagggcagggaaccacgcucgacaacaaacauucgaaugauacuauucacgaccgaaucccacaucguacccugcuuaugaacgaacugggcguucccuuucacuuggguacaagacagguguguaucgccuggucaagcaguuccugccaugaugggaaggcauggcuccacgucugugugacuggagacgauaaaaaugccaccgcuucuuucauuuaugacggcaggcugguagauagcauaggcuccuggucacagaacauccugcggacacaagagagugaaugcguuuguauuaaugggaccugcacgguggucaugacugacggaagcgcaucuggucgcgccgauacaagaauccucuuuauagaggagggcaagauugugcacaucuccccuuuaucagggagcgcucagcauguggaagagugcaguuguuacccaagguauccgggaguccggugcaucugucgcgacaacuggaaaggcucuaaucgacccguuguggacauuaacguaaaggauuacuccaucgacagcagauacgugugcucgggucuggucggggauaccccuaggaacaaugaccgguucucuaacuccaauugucguaacccaaauaacgaacgcggaaaucacggcgugaagggcugggccuuugaugacgggaacgauguuuggaugggaagaacuauuucaaaagacaguaggagcgguuaugagacauucaaggugauaggcgggugguccacccccaauucuaaaagccagaucaaccggcaggucauuguggauucagacaaucgaaguggauacuccggcaucuuuagcguagaagguaagucuugcaucaaccgcuguuucuauguugagcuuauuagagggagggagcaagaaacgcgggugugguggaccucaaauaguauagucguguuuugcggcacaagcggaacuuacggcaccggguccuggccugauggagcggacaucaacuugaugccaauuuga

SEQ ID NO: 149964 - RNA, 1410 nt, Artificial Sequence
  derived and/or modified CDS sequence (opt3) from neuraminidase__InfluenzaA__AFG71945
augaaccccaaucagaagaucauuaccauaggcagcgugucccugacaaucgccacugucugcuuccucaugcaaauugcuauccuuguuacgaccgugacacugcacuuuaaacaguacgagugugacucuccugcaaacaaucagguaaugccaugcgaaccgauuaucauagagagaaacaucacugaaauuguguauuugaccaauacaaccaucgagaaggaaauuugucccaaauuagucgaguacaggaacuggucaaagccucagugcaaaaucacuggguucgccccauuuaguaaggauaauagcauacggcuguccgcgggaggugacauuugggugacacgcgagcccuauguuucuugugauccuggcaagugcuaccaauucgcucuagggcagggaaccacgcucgacaacaaacauucgaaugauacuauccacgaccgaaucccacaucguacccugcuuaugaacgaacugggcgugcccuuucacuuggguacaagacaggucuguauugccuggucaagcaguuccugccaugaugggaaggcauggcuccacguguguguaacuggagacgaugagaaugccaccgcuucuuucaucuaugacggcaggcugguugauagcauuggcuccuggucacagaacauacugcggacacaagaaagugagugcguguguaucaaugggaccugcacggucgugaugacugacggaagcgcaucuggucgcgccgauacaaggauucucuuuaucgaggaaggcaaaauagugcacauuuccccuuuaucagggagcgcucagcaugucgaggaaugcaguuguuacccaagauauccgggaguucggugcaucugucgcgacaacuggaagggcucuaaucgacccgugguagacaucaacgugaaagauuacuccauugacagcagauacgucugcucgggucuggugggggauaccccuaggaacaaugacaagucuuccaacucaaauugucggaacccaaauaacgauaagggaaaucacggcguuaaaggcugggccuucgacgaugggaacgacguguggaugggacguacuaucaguaaggauagccgcuccgguuaugagacauuuaaagucauuggcggguggucuacccccaauagcaagucacagauaaacagacaggugaucguagacagugauaauagguccggauacagcggcauuuucucuguugaagguaaaucaugcaucaaccgguguuuuuauguggagcuuauccgagggcgcgagcaagaaacgaaggucugguggaccaguaauagcauuguggucuucugcggcacauccggaacuuacggcaccgggucuuggccugacggagcggacauaaacuugaugucgaucuga

SEQ ID NO: 149965 - RNA, 1410 nt, Artificial Sequence; identical to SEQ ID NO: 142166
  derived and/or modified CDS sequence (opt3) from neuraminidase__InfluenzaA__AFG71967

SEQ ID NO: 149966 - RNA, 1410 nt, Artificial Sequence; identical to SEQ ID NO: 142166
  derived and/or modified CDS sequence (opt3) from neuraminidase__InfluenzaA__AFG71978

SEQ ID NO: 149967 - RNA, 1410 nt, Artificial Sequence
  derived and/or modified CDS sequence (opt3) from neuraminidase__InfluenzaA__AFG71988
augaaccccaaucagaagaucauuaccauaggcagcgugucccugacaaucgccacuauuugcuuccucaugcaaaucgcuauucuugucacgaccguuacacugcacuuuaaacaguacgagugugacucuccugcaaacaaucaggugaugccaugcgaaccgaucauaaucgagagaaacauuacugaaaucguauauuugaccaauacaaccauugagaaggaaaucugucccaaauuaguggaguacaggaacuggucaaagccucagugcaaaauaacuggguucgccccauuuaguaaggauaauagcauucggcuguccgcgggaggugacaucugggucacacgcgagcccuaugugucuugugauccuggcaagugcuaccaauucgcucuagggcagggaaccacgcucgacaacaaacauucgaaugauacuauucacgaccgaaccccacaucguacacugcuuaugaacgaacugggcguucccuuucacuuggguacuagacagguguguaucgccuggucaagcaguuccugccaugaugggaaggcauggcuccacgucugugugaccggauaugacaaaaaugccacagcuucuuucaucuacgauggcaggcugguagacagcauuggcuccuggucacagaacauacugcggacccaagagagugaaugcaucuguauuaaugggacgugcacuguugugaugacagauggaagcgcaucuggucgcgccgacaccaagauccucuuuauagaggagggcaaaauuguccacaucuccccuuuaucagggagcgcucagcauguggaagagugcaguuguuauccaagauacccgggagugaggugcaucugucgggauaacuggaagggcucuaaucgccccgucguugacauuaacgugaaggacuacuccaucgauagcucguauguaugcucuggucuggugggggacacuccucgaaacaaugauagauccucaaacaguuacuguaggaauccaaacaaugaaaaaggaaaccacggcgucaagggcugggccuucgacgaugggaaugacguguggaugggacggacaauuagcgaggauucccguucugguuaugaaaccuuuaaaguuauaggcggguggagcacgcccaacucaaaacuucagaucaaucgccaggugauugucgacagugauaacagauccggauacagcggcaucuucucuguggaggguaagucaugcaucaauagguguuuuuauguagaguugauucgggggcgagaacaagagacccgcguuugguggacaaguaacagcauaguggucuucugcggcacuuccggaaccuacggcacagggucuuggccugacggagcggauaucaaucugaugccaauuuga

SEQ ID NO: 149968 - RNA, 1410 nt, Artificial Sequence; identical to SEQ ID NO: 142166
  derived and/or modified CDS sequence (opt3) from neuraminidase__InfluenzaA__AFG71999

SEQ ID NO: 149969 - RNA, 1410 nt, Artificial Sequence; identical to SEQ ID NO: 142624
  derived and/or modified CDS sequence (opt3) from neuraminidase__InfluenzaA__AFG72021

SEQ ID NO: 149970 - RNA, 1410 nt, Artificial Sequence
  derived and/or modified CDS sequence (opt3) from neuraminidase__InfluenzaA__AFG72032
augaaccccaaucagaagaucauuaccauaggcagcgugucccugacaaucgccacuauuugcuuccucaugcaaaucgcuauucuugucacgaccguuacacugcacuuuaaacaguacgaguguucuucaccuccaaacaaucaggugaugccgugcgaacccaucauaaucgagagaaacauuacugaaaucguauauuugaccaauacaaccauugagaaggaaaucuguccuaaauuaguggaguacaggaacuggaguaagccacagugcaaaauaacuggguucgcacccuuuagcaaggacaauuccauucggcugucugccggaggugauaucugggucacacgcgagccuuaugugucgugugacccaggcaagugcuaccaauucgcgcuagggcagggaaccacgcucgauaacaaacauucaaaugacacuauucacgaucgaacccccuaucguacacugcuuaugaacgaacugggcguuccuuuucauuuggguacuagacagguguguaucgcuuggagcaguuccucuugccacgacgggaaggccuggcuccaugucugugugaccggauacgauaaaaaugcaacagccagcuucaucuaugacggcaggcugguagauuccauuggcucauggaguaagaacauacugcggacccaggagagcgaaugcguuuguaucaaugggacgugcacuguggucaugacagacggaucugcuuccgagcgcgcagauaccaaaauucucuuuaucgaggaagguaagauagugcacauuucaccauuaagcggcagugcccaacacguggaggaaugcucuuguuacccgagauaccccggggucaggugcguuugucgggacaacuggaagggauccaaucgcccugugguagauaucaacgugaaagacuauagcaucgucucgucuuacgugugcuccggccugguuggugacacuccacgaaagaacgauagaucaaguagcuccuauuguaggaaucccaacaaugagaaagggaaccauggagugaagggcugggcuuucgacgauggcaaugacgucuggauggggcggacaauuucugaagagagccguucaggauacgagaccuuuaaagugaucgguggcuggaguacgccuaacuccaaacuucagauuaaucgccagguaauaguugauagcgacaacagaucuggguauucaggaaucuucaguguggaaggcaagagcugcauuaauagguguuuuuacgucgaguugauccggggucgagaacaggagacccgcgugugguggacauccaacucuaucgucguguucugcgggacuucgggcaccuauggaacaggcagcuggccagauggggccgacauuaaucugaugcccauauga

SEQ ID NO: 149971 - RNA, 1410 nt, Artificial Sequence; identical to SEQ ID NO: 142861
  derived and/or modified CDS sequence (opt3) from neuraminidase__InfluenzaA__AFG72088

SEQ ID NO: 149972 - RNA, 1410 nt, Artificial Sequence
  derived and/or modified CDS sequence (opt3) from neuraminidase__InfluenzaA__AFG72121
augaaccccaaucagaagaucauuaccauaggcagcgugucccugacaaucgccacuauuugcuuccucaugcaaaucgcuauucuugucacgaccguuacacugcacuuuaaacaguacgaguguucuucaccuccaaacaauagagugaugccgugcgaacccacuaucauagagaggaacaucaccgaaauuguauauuugacaaauaccacuaucgagaaggaaauuuguccuaaauuaguggaguaccggaacuggaguaagccacagugcaaaaucacaggguucgcacccuuuagcaaggacaauuccauacgccugucugccggaggugauauuugggucacccgagagccuuaugugucgugugacccaggcaagugcuaccaguucgcgcuagggcaaggaacgacucucaacaaucgucauucaaacgauaccguucacgacagaacacccuauaggacucugcuuaugaaugaacugggcgugccuuuucauuuggguaccaaacaggucuguauggcuuggagcaguuccucuugccacgaugggaaggccuggcuccauguguguguaacaggacacgacgagaacgcaaccgccagcuucaucuacgauggccggcugguugacuccauuggcucauggaguaaaaauauccugcgcacgcaggaaagcgagugcguguguaucaacgggacuugcacagucgugaugaccgauggaucugcuuccgagagagcagacacuaagauucucuuuauagaagaggguaaaaucgugcacauuucaccauuaagcggcagugcccagcaugucgaagagugcucuuguuauccgagguaccccgggguucggugcgugugucgcgauaauuggaagggauccaaccgaccuaucguagacauaaacgugaaggauuacagcauugucucgucuuaugugugcuccggccugguuggugacacaccaaggaaaaaugacagaucaaguagcuccuacugucggaaccccaauaacgaaaaggggucucacggagugaaaggcugggcuuucgaugacggcaaugaugucuggauggggcguaccaucggagaggagcuucgcagcgguuaugaaacguuuaaggugaucggcggguggucaaccccuaacaguaaauugcaaauuaauagacagguaaucguugacuccggaaacaggagcggcuacucugguauuuucucaguggaggggaagaguugcauaaaucgguguuuuuaugucgaacugauccgaggccgcaaacaggagacaagagugugguggacuagcaacuccauugucguguucugcggaaccucuggcacauacgggacuggaucguggccagauggugccgacaucaaucuaaugcccaucuga

SEQ ID NO: 149973 - RNA, 1410 nt, Artificial Sequence
  derived and/or modified CDS sequence (opt3) from neuraminidase__InfluenzaA__AFG72143
augaaccccaaucagaagaucauuaccauaggcagcgugucccugacaaucgccacuauuugccuccuuaugcaaaucgcuauucuggucacgaccguuacauugcacuucaaacaguacgaguguucuucaccuccaaacaaucaggugaugccgugcgaacccacuaucauagagagaaacaucaccgaaauuguauauuuaacaaauaccacuaucgagaaggaaauuuguccuaaacugguggaguacaggaacuggaguaagccacagugcaaaaucacaggguuugcacccuucagcaaggacaauuccauacggcuaucugccggaggugauauuugggucacccgcgagccuuaugugucgugugacccaggcaagugcuaccaauuugcgcucgggcagggaacgacucugaacaaucgacauucaaacgauaccguucacgaccguacacccuauagaacucuucugaugaaugaauugggcgugccuuuccaucucgguaccaaacaggucuguaucgcuuggagcaguuccucuugccacgaugggaaggccuggcugcauguguguguaacaggacacgacgagaacgcaaccgccagcuuuauuuacgauggcaggcugguugacuccaucggcucauggaguaaaaauauccuccggacgcaggaaagcgagugcguguguauuaacgggacuugcacagucgugaugaccgauggaucugcuuccgagcgcgcagacacuaagauauuauucaucgaagaggguaaaauugugcacaucucaccacugagcggcagugcccaacaugucgaagagugcucuuguuauccgagauaccccgggguuaggugcgugugucgggauaauuggaagggauccaaccgcccuauaguagacauuaacgugaaggauuacagcaucgucucgucuuaugugugcuccggccuuguuggugacacaccacgaaagaaugacucaaguagcuccucuuacuguagaaaccccaauaacgaaaaggggagccacggagugaaaggcugggcuuuugaugacggcaaugaugucuggauggggaggaccaucggagaggaguugcggucagguuaugaaacguucaaggugauuggcggguggaguaccccuaacuccaaacugcagaucaaucgucagguaauuguugacagcggaaaccgcucuggcuacucagguauauuuaguguggaggggaaaagcugcaucaauagauguuucuaugucgaacuaauuaggggccggaaacaggagacaaaggugugguggacuuccaacucuaucgucguguuuugcggaaccucgggcacauacgggacuggaagcuggccagauggugccgacaucaaucucaugcccauuuga

SEQ ID NO: 149974 - RNA, 1410 nt, Artificial Sequence
  derived and/or modified CDS sequence (opt3) from neuraminidase__InfluenzaA__AFG72165
augaaccccaaucagaagaucauuaccauaggcagcgugucccugacaaucgccacuauuugcuuccucaugcaaaucgcuauucuugucacgaccguuacacugcacuuuaaacaguacgaguguaacucuccuccaaauaaccaggugaugccgugcgaacccacuaucauagagagaaauaucaccgaaauuguauauuugacaaacaccacuaucgagaaggaaauuuguccuaaauuaguggaguacaggaauuggucaaagccacagugcaaaaucacaggguucgcacccuuuaguaaggacaacagcauacggcuguccgccggaggugauauuugggucacccgcgagccuuaugugucuugugacccaggcaagugcuaccaauucgcgcuagggcagggaacgacucucaauaaccgacauucgaaugauaccguucacgaccguacacccuauagaacucugcuuaugaacgaacugggcgugccuuuucauuuggguaccaaacaggucuguaucgcuuggucaagcaguuccugccacgaugggaaggccuggcuccauguguguguaacaggacacgacgagaaugcaaccgccucuuucauuuacgauggcaggcugguugacagcaucguguccuggaguaaaaacauccugcggacgcaggaaucagagugcgucuguauuaauggcacuugcacaguggugaugaccgaugggagcgcuucugagcgcgcagacacuaagauacucuuuaucgaagagggaaaaauuguccacaucuccccauuaucagguagcgcccaacauguugaagagugcaguuguuauccgagauaccccggcgugaggugcguaugucgggauaacuggaaggggucuaaccgcccuauaguggacauuaaugucaaggauuacuccaucgugagcucguauguuugcucuggacuggugggcgacacaccacgaaagaacgacuccucaaguagcuccuacuguagaaaucccaacaaugaaaaagguucucacggggucaaaggaugggcuuucgaugacggcaacgauguguggaugggcaggaccaucggggaggagcuucggagcggauaugaaacguuuaagguaauugguggcuggucaaccccuaauaguaaauugcagacaaaccgucagguuaucguggaccgcgggaauagauccggauacagcggcauuuucucugucgaggguaagucaugcauaaacagguguuuuuauguggaacugauccgggggcgaaaacaggagacuaaggucugguggaccaguaauagcauugugguuuucugcggcacauccggaacuuacggcaccgggucuuggccagauggagccgacaucaaccuaaugcccaucuga

SEQ ID NO: 149975 - RNA, 1410 nt, Artificial Sequence
  derived and/or modified CDS sequence (opt3) from neuraminidase__InfluenzaA__AFG72176
augaaccccaaucagaagaucauuaccauaggcagcgugucccugacaaucgccacuauuugcuuccucaugcaaaucacgauucuugucaccacaguuacucugcacuuuaaacaguacgaguguaacucuccuccaaauaaccaggugauguugugcgaaccgaccaucauagagagaaauaucacagaaauuguauauuuaaccaacacuacaaucgagaaggaaaaaugucccaagcugguggaguacaggaauuggucaaaaccucagugcaagauuaccggguucgcuccauuuaguaaggacaacagcauccggcuauccgcaggaggugauauaugggucacgcgcgagcccuaugugucuugugacccuggcaaaugcuaccaauucgcccucgggcagggaacuacccugaauaaccgacauucgaaugauacaguucacgaccguacuccauauagaacccuucugaugaacgaauugggcgugcccuuucaucucgguacaaagcaggucuguauugcguggucaagcaguuccugccacgaugggaaagccuggcugcauguguguguaaccggacacgacgagaaugcuacggcaucuuucaucuacgauggcaggcugguugacagcauuggcuccuggucaaagaacauccuccggacucaggaaagugagugcguguguaucaaugggacaugcaccgucgugaugacugauggaagcgccucugagcgcgcugacacaaaaauuuuauuuauagaagaggguaagaucgugcacauuuccccucugucaggcagcgcacaacaugucgaagagugcaguuguuauccaagauacccggggguuaggugcgugugucgggauaacuggaagggaucuaaccgccccaucguagacauaaaugugaaagauuacuccauugucagcucguaugugugcucuggccuuguuggugacaccccucgaaagaacgacuccucaaguagcuccuacuguagaaauccaaacaaugaaaaagggucucacggagugaagggcugggccuucgaugacggcaacgaugucuggauggggaggacgaucagcgaggaguugcggucaggauaugaaaccuuuaaagugaucgguggcuggaguacacccaauuccaagcugcagauuaaccgucagguaaucguugaccgcgggaauagaagcggauacucuggcauuuucucaguggaggguaaaaguugcauaaacagguguuuuuaugucgaacuaauccgggggcgaaagcaggagaauaaggugugguggacuagcaacuccauugucguguucugcggcaccucuggaacauacggcacugggucguggccugauggagcugacaucaaucucaugccaaucuga

SEQ ID NO: 149976 - RNA, 1410 nt, Artificial Sequence; identical to SEQ ID NO: 149974
  derived and/or modified CDS sequence (opt3) from neuraminidase__InfluenzaA__AFG72198

SEQ ID NO: 149977 - RNA, 1410 nt, Artificial Sequence; identical to SEQ ID NO: 149974
  derived and/or modified CDS sequence (opt3) from neuraminidase__InfluenzaA__AFG72209

SEQ ID NO: 149978 - RNA, 1410 nt, Artificial Sequence
  derived and/or modified CDS sequence (opt3) from neuraminidase__InfluenzaA__AFG72220
augaaccccaaucagaagaucauuaccauaggcagcgugucccugacaaucgccacuauuugcuuccucaugcaaaucgcuauucuugucacgaccguuacacugcacuuuaaacaguacgaguguaacucuccuccaaauaaccaggugauguugugcgaaccgacuaucauagagagaaauaucaccgaaauuguacauuuaacaaacaccacuaucgagaaggaaauuugucccaaacuggcagaguauaggaauuggucaaagccucagugcaaaaucacaggguucgccccauuuaguaaggacaacagcauacggcuauccgcgggaggugauauuugggugacccgcgagcccuacgucucuugugacccuggcaagugcuaucaauucgcucucgggcagggaacgacucugaauaaccgacacucgaaugauaccgugcaugaccguacaccauacagaacucuucugaugaacgaauugggcguucccuuucaccucgguaccaaacagguguguaucgccuggucaagcaguuccugccaugaugggaaggcauggcugcacgucugugugacaggacacgacgagaaugccaccgcuucuuucauuuaugauggcaggcugguagacagcaucggcuccuggaguaaaaacauccuccggacgcaggaaucagagugcguuuguauuaaugggacuugcacaguggucaugaccgauggaagcgcaucugagcgcgccgacacuaagauauuauuuaucgaagaggguaaaauugugcauaucuccccucugucaggcagcgcucaacacguggaagagugcaguuguuacccaagauauccgggggucaggugcguuugucgggauaacuggaagggaucuaaccgccccauaguggacauuaauguaaaggauuacuccaucgugagcucguacgucugcucuggccuugugggugacacaccucgaaagaacgacuccucaaguagcuccuauuguagaaauccaaacaaugaaaaagggucucauggaguuaaaggcugggccuucgaugacggcaacgauguguggauggggaggaccaucagcgaggaguugcggucaggauacgaaacguuuaaggucauugguggcuggaguaaacccaauuccaagcugcagaucaaccgucaggugauuguagaccgcgggaauagaagcggauauucuggcauauucucaguugaggguaaaaguugcaucaacagguguuuuuacguggaacuaauucgggggcgaaagcaggagaccgaagucugguggacaagcaauuccaucguggucuucugcggcacuucuggaaccuauggcacagggucguggccugauggagcggacaucaaccucaugccaauuuga

SEQ ID NO: 149979 - RNA, 1410 nt, Artificial Sequence; identical to SEQ ID NO: 149974
  derived and/or modified CDS sequence (opt3) from neuraminidase__InfluenzaA__AFG72231

SEQ ID NO: 149980 - RNA, 1410 nt, Artificial Sequence
  derived and/or modified CDS sequence (opt3) from neuraminidase__InfluenzaA__AFG72297
augaaccccaaucagaagaucauuaccauaggcagcgugucccugacaaucgccacuauuugcuuccucaugcaaaucgcuauucuugucacgaccguuacacugcacuuuaaacaguacgaguguaacucuccuccaaauaaccaggugauguugugcgaaccgacuaucauagagagaaauaucaccgaaauuguauauuuaacaaacaccacuaucgagagggaaauuugucccaagcuggcagaguaccggaauuggucaaaaccucagugcaagaucacaggguucgccccauuuaguaaagacaacagcauacgccuauccgcgggaggugauauuugggugacccgagagcccuaugucucuugugacccuggcaagugcuaccaauucgcucucgggcagggaacgacucugaauaaccgucauucgaaugauaccgugcacgaaagaacaccauauaggacucuucugaugaacgaguugggcguucccuuucaucucgguaccaaacagguguguaucgccuggucaagcaguuccugccacgacgggaaggcauggcugcaugucugugugacaggacacgaugaaaaugccaccgcuucuuucauuuacgacggccggcugguagauagcaucggcuccuggucaaagaacauccuccgcacgcaggagagugagugcguuuguauuaaugggacuugcacaguggucaugaccgacggaagcgcaucugaaagagccgauacuaaaauauuauuuaucgaggaagguaagauugugcacaucuccccucugucaggcagcgcucaacauguggaggaaugcaguuguuauccaagguacccggggguccggugcguuugucgcgacaacuggaaaggaucuaaccgacccauaguggauauuaauguaaaggacuacuccaucgugagcucguaugucugcucuggccuugugggugauacaccuagaaagaacgacuccucaaguagcuccuacuguaggaauccaaacaaugagaaagggucucacggaguuaagggcugggccuucgacgauggcaacgacguguggauggggcggaccaucagcgaggaauugcguucaggauaugagacguuuaaagucauugguggcuggaguaagcccaauuccaaacugcagaucaaccgccaggugauuguagauagagggaauaggagcggauacucuggcauauucucaguugaagguaagaguugcaucaaccgguguuuuuauguggagcuaauucgagggcgcaaacaggaaaccgaggucugguggacaagcaauuccaucguggucuucugcggcacuucuggaaccuacggcacagggucguggccugacggagcggauaucaaccucaugccaauuuga

SEQ ID NO: 149981 - RNA, 1410 nt, Artificial Sequence
  derived and/or modified CDS sequence (opt3) from neuraminidase__InfluenzaA__AFG72308
augaaccccaaucagaagaucauuaccauaggcagcgugucccugacaaucgccacuauuugcuuccucaugcaaaucgcuauucuugucacgaccguuacacugcacuuuaaacaguacgaguguaacucuccuccaucaaaucaggugauguugugcgaaccgacuaucauagagagaaacaucaccgaaauuguauauuuaacaaauaccacuaucgagaaggaaauuugucccaaacuggcagaguacaggaacuggaguaagccucagugcaaaaucacaggguucgccccauuuagcaaggacaauuccauacggcuaucugcgggaggugauauuugggugacccgcgagcccuaugucucgugugacccuggcaagugcuaccaauucgcucucgggcagggaacgacucugaacaaucgacauucaaacgauaccgugcacgaccguacaccauauagaacucuucugaugaaugaauugggcguucccuuucaucucgguaccaaacagguguguaucgccuggagcaguuccucuugccacgaugggaaggcauggcugcaugucugugugacaggacacgacgagaacgccaccgcuagcuucauuuacgauggcaggcugguagacuccaucggcucauggaguaaaaauauccuccggacgcaggaaagcgagugcguuuguauuaacgggacuugcacaguggucaugaccgauggaucugcauccgagcgcgccgacacuaagauauuauuuaucgaagaggguaaaauugugcacaucucaccucugagcggcagugcucaacauguggaagagugcucuuguuauccaagauacccgggggucaggugcguuugucgggauaauuggaagggauccaaccgccccauaguggacauuaacguaaaggauuacagcaucgugucgucuuaugucugcuccggccuugugggugacacaccucgaaagaaugacucaaguagcuccucuuacuguagaaacccaaauaacgaaaaagggagccacggaguuaaaggcugggccuucgaugacggcaaugauguguggauggggaggaccaucucagaggaguugcggaguggauaugaaacguuucgugucauugguggcugguccaagcccaacagcaaacugcagaucaaucgccaggugauuguagacagagggaacaggucuggauacucaggcauauucaguguugaggguaagagcugcaucaaucgguguuuuuauguggaacuaauucgagggcgcaaacaggagaccgaagucugguggacauccaacucuaucguggucuucugcggcacuucgggaaccuacggcacagggagcuggccugauggagcggacaucaaucucaugccaauuuga

SEQ ID NO: 149982 - RNA, 1410 nt, Artificial Sequence; identical to SEQ ID NO: 143233
  derived and/or modified CDS sequence (opt3) from neuraminidase__InfluenzaA__AFG72320

SEQ ID NO: 149983 - RNA, 1410 nt, Artificial Sequence
  derived and/or modified CDS sequence (opt3) from neuraminidase__InfluenzaA__AFG72331
augaaccccaaucagaagaucauuaccauaggcagcgugucccugacagucgccacuaucugcuuccucaugcaaauugcuauccuuguuacgaccgugacacugcacuuuaaacaguacgaguguaacucuccuccaaauaaccagguaauguugugcgaaccgacuauuaucgagagaaauauaaccgaaaucguguauuuaacaaacaccacuauugagaaggaaaucugucccaaacuggcagaguacaggaauuggucaaagccucagugcaaaauuacaggguucgccccauuuaguaaggacaacagcauccggcuauccgcgggaggugauauaugggucacccgcgagcccuaugugucuugugacccuggcaagugcuaccaauucgcucucgggcagggaacgacucugaauaaccgacauucgaaugauaccguucacgaccguacaccauauagaacucuucugaugaacgaauugggcgugcccuuucaucucgguaccaaacaggucuguauugccuggucaagcaguuccugccacgaugggaaggcauggcugcauguguguguaacaggacacgacgagaaugccaccgcuucuuucaucuacgauggcaggcugguugacagcauuggcuccuggaguaaaaacauccuccggacgcaggaaucagagugcguguguaucaaugggacuugcacagucgugaugaccgauggaagcgcaucugagcgcgccgacacuaagauuuuauuuauagaagaggguaaaaucgugcacauuuccccucugucaggcagcgcucaacaugucgaagagugcaguuguuauccaagauacccggggguuaggugcgugugucgggauaacuggaagggaucuaaccgccccaucguagacauaaaugugaaggauuacuccauugucagcucguaugugugcucuggccuuguuggugacacaccucgaaagaacgacuccucaaguagcuccuacuguagaaauccaaacaaugaaaaagggucucacggagugaaaggcugggccuucgaugacggcaacgaugucuggauggggaggaccaucagcgaggaguugcggucaggauaugaaacguuuaaggugaucgguggcuggaguaaacccaauuccaagcugcagauuaaccgucagguaaucguugaccgcgggaauagaagcggauacucuggcauuuucucaguggaggguaaaaguugcauaaacagguguuuuuaugucgaacuaauccgggggcgaaagcaggagaccgaagugugguggacaagcaauuccauugucguguucugcggcacuucuggaaccuacggcacagggucguggccugauggagcggacaucaaccucaugccaaucuga

SEQ ID NO: 149984 - RNA, 1410 nt, Artificial Sequence
  derived and/or modified CDS sequence (opt3) from neuraminidase__InfluenzaA__AFG72353
augaaccccaaucagaagaucauuaccauaggcagcgugucccugacaaucgccacuauuugcuuccucaugcaaaucgcuauucuugucacgaccguuacacugcacuuuaaacaguacgaguguaacucuccuccaaauaaccaggugauguugugcgaaccgacuaucauagagagaaauaucaccgaaauuguauauuuaacaaacaccacuaucgagaaggaaauuugucccaaacuggcagaguacaggaauuggucaaagccucagugcaaaaucacaggguucgccccauuuaguaaggacaacagcauacggcuauccgcgggaggugauauuugggugacccgcgagcccuaugucucuugugacucgggcaagugcuaccaauucgcucucgggcagggaacgacucugaauaaccgacauucaaaugauaccgugcacgaccguacaccuuauagaacucuucugaugaacgaauugggcguuccauuucaucucgguaccaaacagguguguaucgccuggagcaguuccucuugccacgaugggaaggcauggcugcaugucugugugacaggacacgacgagaaugccaccgcuagcuucauuuacgauggcaggcugguagacuccaucggcucauggaguaaaaacauccuccggacgcaggaaagcgagugcguuuguauuaaugggacuugcacaguggucaugaccgauggaucugcauccgagcgcgccgacacuaagauauuauuuaucgaagaggguaaaauugugcacaucucaccccugagcggcagugcucaacauguggaagagugcucuuguuauccuagauacccaggggucaggugcguuugucgggauaacuggaagggauccaaccgcccgauaguggacauuaauguaaaggauuacagcaucgugucgucuuaugucugcuccggccuugugggugacacaccccgaaagaacgacucaaguagcuccucuuacuguagaaauccuaacaaugaaaaagggagccacggaguuaaaggcugggccuucgaugacggcaacgauguguggauggggaggaccaucucagaggaguugcggaguggauaugaaacguuuaaggucauugguggcugguccaaaccaaauagcaagcugcagaucaaccgucaggugauuguagaccgcgggaauagaucuggauacucaggcauauucaguguugaggguaaaagcugcaucaacagguguuuuuauguggaacuaauucgggggcgaaagcaggagaccgaagucugguggacauccaauucuaucguggucuucugcggcacuucgggaaccuacggcacagggagcuggcccgauggagcggacaucaaccucaugccuauuuga

SEQ ID NO: 149985 - RNA, 1410 nt, Artificial Sequence; identical to SEQ ID NO: 143233
  derived and/or modified CDS sequence (opt3) from neuraminidase__InfluenzaA__AFG72364

SEQ ID NO: 149986 - RNA, 1410 nt, Artificial Sequence
  derived and/or modified CDS sequence (opt3) from neuraminidase__InfluenzaA__AFG72430
augaaccccaaucagaagaucauuaccauaggcagcgugucccugacaaucacuacgauuugcuuccucaugcaaaucgccauucuugucaucaccguuacacugcacuuuaaacagugugagugcaacucuccuccaaauaaccaggugauguugugugaaccgacuauaaucgagagaaauauuaccgaaaucguauacuuaacaaacaccacuauugagaaggaaaucugccccaaacuggcugaguauaggaauuggucaaagccucaguguaaaauaacaggguucgcaccauuuaguaaggacaacagcauucggcuauccgccggaggugauaucugggugacccgcgagcccuacgucucuugcgacccuggcaaguguuaucaauucgcgcucgggcagggaacgacucugaauaaccgacauucgaaugauaccgugcacgaccguacaccauacagaacucuucugaugaacgaauugggcguucccuuucaucucgguaccaaacaggugugcauugcuuggucaagcaguuccugucacgaugggaaggccuggcugcaugucugcgugacaggacacaaugagaacgcaaccgccucuuucaucuaugacggcaggcugguagauagcaucggcuccuggaguaaaaauauucuccggacgcaggaaucagaguguguuugcauaaacgggacuugcacaguggucaugaccgacggaagcgcuucuggucgcgcagauacuaagaucuuauuuauugaggaaggcaaaaucgugcacauaucccaacugucagggagcgcccagcauguggaggaauguaguugcuacccuagauauccaggagucagguguguuugccgggacaacuggaagggcucuaaucgcccgauuguggauaucaacguaaaggacuacuccaucgugagcucguacgucuguucuggucuugugggggauacaccccggaaaaaugacuccucaaguagcuccaacugcuuggacccuaauaacgaggaaggaggccacggcguuaaggggugggcuuucgaugacggaaaugauguguggauggguagaaccauuucugagaaacugaggagcggcuaugagacguuuaaggucaucgggggauggucaaaaccaaacaguaagcuacagauuaaucgacaggugauaguagaccguggcaaccgcuccgguuacagcgggaucuucucuguugaaggcaaaucauguauuaauagaugcuuuuauguggagcucaucaggggacggaagcaagaaaccgaggucugguggacaaguaacagcaucguggucuucuguggcacuuccgggaccuacggaacagguucuuggcccgauggcgccgacauuaaucugaugccuauauga

SEQ ID NO: 149987 - RNA, 1410 nt, Artificial Sequence; identical to SEQ ID NO: 143233
  derived and/or modified CDS sequence (opt3) from neuraminidase__InfluenzaA__AFG72452

SEQ ID NO: 149988 - RNA, 1410 nt, Artificial Sequence
  derived and/or modified CDS sequence (opt3) from neuraminidase__InfluenzaA__AFG72474
augaaccccaaucagaagaucauuaccauaggcagcgugucccugacaaucgccacuauuugcuuccucaugcaaaucgcuauucuugucacgaccguuacacugcacuuuaaacaguacgaguguaacucuccuccaaauaaccaggugauguugugcgaaccgacuaucauagagagaaauaucaccgaaauuguauauuuaacaaacaccacuaucgagaaggaaauuugucccaaacuggcagaguacaggaauuggucaaagccucagugcgagaucacaggguucgccccauuuaguaaagacaacagcauacggcuauccgcgggaggugauauuugggugacccgcgaacccuaugucucuugugacccuggcaagugcuaccaauucgcucucgggcagggaacgacucugaauaaccgacauucgaaugauaccgugcacgaccguacaccauauagaacucuucugaugaacgaguugggcguucccuuucaucucgguaccaaacagguguguaucgccuggucaagcaguuccugccacgaugggaaggcauggcugcaugucugugugacaggacacgacgaaaaugccaccgcuucuuucauuuacgauggcaggcugguagacagcaucggcuccuggucaaagaacauccuccggacgcaggagagugagugcguuuguauuaaugggacuugcacaguggucaugaccgauggaagcgcaucugaacgcgccgacacuaaaauauuauuuaucgaggaagguaagauugugcacaucuccccucugucaggcagcgcucaacauguggaggaaugcaguuguuauccaagauacccgggggucaggugcguuugucgggauaacuggaaaggaucuaaccgccccauaguggacauuaauguaaaggauuacuccaucgugagcucguaugucugcucuggccuugugggugacacaccucgaaagaacgacuccucaaguagcuccuacuguagaaauccaaacaaugagaaagggucucacggaguuaagggcugggccuucgaugacggcaacgauguguggauggggaggaccaucagcgaggaauugcggucaggauaugagacguuuaaagucauugguggcuggaguaagcccaauuccaaacugcagaucaaccgucaggugauuguagaccgcgggaauagaagcggauacucuggcauauucucaguugaagguaagaguugcaucaacagguguuuuuauguggagcuaauucgggggcgaaaacaggaaaccgaggucugguggacaagcaauuccaucguggucuucugcggcacuucuggaaccuacggcacagggucguggccugauggagcggacaucaaccucaugccaauuuga

SEQ ID NO: 149989 - RNA, 1410 nt, Artificial Sequence
  derived and/or modified CDS sequence (opt3) from neuraminidase__InfluenzaA__AFG72485
augaaccccaaucagaagaucauuaccauaggcagcgugucccugacaaucgccacuauuugcuuccucaugcaaaucgcuauucuugucacgaccguuacacugcacuuuaaacagcaugaguguaacucuccuccaaauaaccaggugauguugugcgaaccgacuaucauagagagaaauaucaccgaaauuguauacuuaacaaacaccacuaucgagaaggaaauuugucccaaacuggcagaguauaggaauuggucaaagccucagugcaaaaucacaggguucgccccauuuaguaaggacaacagcauacggcuauccgcgggaggugauauuugggugacccgcgagcccuacgucucuugugacccuggcaagugcuaucaauucgcucucgggcagggaacgacucugaauaaccgacacucgaaugauaccgugcaugaccguacaccauacagaacucuucugaugaacgaauugggcguucccuuucaccucgguaccaaacagguguguaucgccuggucaagcaguuccugccaugaugggaaggcauggcugcacgucugugugacaggacacgacgagaaugccaccgcuucuuucauuuaugauggcaggcugguagacagcaucggcuccuggaguaaaaacauccuccggacgcaggaaucagagugcguuuguauuaaugggacuugcacaguggucaugaccgauggaagcgcaucugagcgcgccgacacuaagauauuauuuaucgaagaggguaaaauugugcauaucuccccucugucaggcagcgcucaacacguggaagagugcaguuguuacccaagauauccgggggucaggugcguuugucgggauaacuggaagggaucuaaccgccccauaguggacauuaauguaaaggauuacuccaucgugagcucguacgucugcucuggccuugugggugacacaccucgaaagaacgacuccucaaguagcuccuauuguagaaauccaaacaaugaaaaagggucucauggaguuaaaggcugggccuucgaugacggcaacgauguguggauggggaggaccaucagcgaggaguugcggucaggauacgaaacguuuaaggucauugguggcuggaguaaacccaauuccaagcugcagaucaaccgucaggugauuguagaccgcgggaauagaagcggauauucuggcauauucucaguugaggguaaaaguugcaucaacagguguuuuuacguggaacuaauucgggggcgaaagcaggagaccgaagucugguggacaagcaauuccaucguggucuucugcggcacuucuggaaccuauggcacagggucguggccugauggagcggacaucaaccucaugccaauuuga

SEQ ID NO: 149990 - RNA, 1410 nt, Artificial Sequence; identical to SEQ ID NO: 143149
  derived and/or modified CDS sequence (opt3) from neuraminidase__InfluenzaA__AFG72507

SEQ ID NO: 149991 - RNA, 1410 nt, Artificial Sequence
  derived and/or modified CDS sequence (opt3) from neuraminidase__InfluenzaA__AFG72529
augaaccccaaucagaagaucauuaccauaggcagcgugucccugacaaucgccacuauuugcuuccucaugcaaaucgcuauucuugucacgaccguuacacugcacuuuaaacaguacgaguguaacucuccuccaaauaaccaggugauguugugcgaaccgacuaucauagagagaaauaucaccgaaauuguauauuuaacaaacaccacuaucgagaaggaaauuugucccaaacuggcagaguacaggaauuggucaaagccucagugcaaaaucacaggguucgccccauuuaguaaggacaacagcauacggcuauccgcgggaggugauauuugggugacccgcgagcccuaugucucuugugacccuggcaagugcuaccaauucgcucucgggcagggaacgacucugaauaaccgacauucgaaugauaccgugcacgaccguacaccauauagaacucuucugaugaacgaauugggcguucccuuucaucucgguaccaaacagguguguaucgccuggucaagcaguuccugccacgaugggaaggcauggcugcaugucugugugacaggacacgacgagaaugccaccgcuucuuucauuuacgauggcaggcugguagacagcaucggcuccuggaguaaaaagauccuccggacgcaggaaucagagugcguuuguauuaacgggacuugcacaguggucaugaccgauggaagcgcaucugagcgcgccgacacuaaaauauuauuuaucgaagaggguaagauugugcacaucuccccucugucaggcagcgcucaacauguggaagagugcaguuguuauccaagauacccgggggucaggugcguuugucgggauaauuggaagggaucuaaccgccccauaguggacauuaacguaaaagauuacuccaucgugagcucguaugucugcucuggccuugugggugacacaccucgaaagaaugacuccucaaguagcuccuacugucagaacccaaauaacgaaaaugggucucacggaguuaaaggcugggccuucgaugacggcaacgauguguggauggggagaaccaucagcgaggaguugaggucaggauaugaaacguuuaaggucauugguggcuggaguaaacccaauuccaagcugcagaucaaccgucaggugauuguagaccgggggaaucgcagcggauacucuggcauauucucaguugaggguaaaaguugcaucaacagauguuuuuauguggaacuaauuagggggcggaagcaagagaccgaagucugguggacaagcaauuccaucguggucuucugcggcacuucuggaaccuacggcacagggucguggccugauggagcggacaucaaccucaugccaauuuga

SEQ ID NO: 149992 - RNA, 1410 nt, Artificial Sequence
  derived and/or modified CDS sequence (opt3) from neuraminidase__InfluenzaA__AFG72540
augaaccccaaucagaagaucauuaccauaggcagcgugucccugacaaucgccacuauuugcuuccucaugcaaaucgcuauucuugucacgaccguuacacugcacuuuaaacaguacgaguguaacccuccaccgaauaaccaggugauguugugcgaacccacuaucauagagagaaauaucaccgaaauuguauauuuaacaaacaccacuaucaagaaagagauuuguccuaagcuggcagaauacaggaauuggucuaaaccacagugcaagaucacaggguucgcccccuuuucaaaggacaacaguauacggcuaagcgcgggaggugauauuugggugacccgcgagccuuaugucuccugugacccaggcaaaugcuaccaauucgcucucgggcagggaacgacucugaauaaccgacauucuaaugauaccgugcacgaccguacacccuauagaacucuucugaugaacgaguugggcguuccuuuucaucucgguaccaaacagguguguaucgccuggucgucaagcaguugccacgaugggaaggcauggcugcaugucugugugacaggacacgacgaaaaugccaccgcuuccuucauuuacgauggcaggcugguagacucuaucggcagcugguccaagaacauccuccggacgcaggagucagaaugcguuuguauuaaugggacuugcacaguggucaugaccgauggaagugcaagcgagcgcgccgacacuaaaauauuauuuaucgaggaagguaagauugugcacaucucuccacuguccggcucagcucaacauguggaggaaugcagcuguuauccgagauaccccggggucaggugcguuugucgggauaacuggaagggaaguaaccgcccuauaguggacauuaauguaaaagauuacucuaucguguccagcuaugucugcucgggccuugugggugacacaccacgaaagaacgacucuuccucaaguagcuacuguuggaaucccaacaaugagaaagggggacacggcguuaagggcugggccuucgaugacgggaacgauguguggaugggaagaaccaucuccgaagaguugaggucugguuaugagacguuuaaagucauuggcggguggagcaagccuaauucaaaacugcagaucaaccgucaggugauuguagaccggggaaaucgcaguggcuacuccgguauauucagcguugaagggaagucuugcaucaacagauguuuuuauguggagcuaauuaggggccggaagcaggaaaccgaggucugguggacaucaaauaguaucguggucuucugcggaacuagcggcaccuacgggacaggauccuggccagauggugcggacaucaaccucaugcccauuuga

SEQ ID NO: 149993 - RNA, 1410 nt, Artificial Sequence
  derived and/or modified CDS sequence (opt3) from neuraminidase__InfluenzaA__AFG72562
augaaccccaaucagaagaucauuaccauaggcagcgugucccugacaaucgccacuauuugcuuccucaugcaaaucgcuauucuugucacgaccguuacacugcacuuuaaacaguacgaguguaacucuccuccaaauaaccaggugauguugugcgaaccgacuaucauagagagaaauaucaccgaaauuguauauuuaacaaacaccacuaucgagaaggaaauuugucccaaacuggcagaguacaggaauuggucaaagccucagugcaaaaucacaggguucgccccauuuaguaaggacaacagcauacggcuauccgcgggaggugauauuugggugacccgcgagcccuaugucucuugugacccuggcaagugcuaccaauucgcucucgggcagggaacgacucugaauaaccgacauucgaaugauaccgugcacgaccguacaccauauagaacucuucugaugaacgaauugggcguucccuuucaucucgguaccaaacagguguguaucgccuggucaagcaguuccugccacgaugggaaggcauggcugcaugucugugugacaggacacgacgagaaugccaccgcuucuuucauuuacgauggcaggcugguagacagcaucggcuccuggucaaagaacauccuccggacgcaggaaagugagugcguuuguauuaaugggacuugcacaguggucaugaccgauggaagcgcaucugagcgcgccgacacuaagauauuauuuaucgaagaggguaaaauugugcacaucuccccucugucaggcagcgcucaacauguggaagagugcaguuguuauccaagauacccgggggucaggugcguuugucgggauaacuggaagggaucuaaccgccccauaguggacauuaauguaaaggauuacuccaucgugagcucguaugucugcucuggccuugugggugacacaccucggaaaaacgacuccucaaguagcuccuacuguuggaauccaaacaaugaaaaagggggacacggcguuaaaggcugggccuucgaugacgggaacgauguguggaugggaagaaccaucucugaggaguugaggagcgguuaugaaacguuuaaggucauuggcggguggucaaaacccaauaguaagcugcagaucaaccgacaggugauuguagaccguggaaaucgcuccggcuacagcgguauauucucuguugaggggaaaucaugcaucaacagauguuuuuauguggaacuaauuaggggccggaagcaggagaccgaagucugguggacaaguaauagcaucguggucuucugcggaacuuccggcaccuacgggacaggaucuuggccugauggugcggacaucaaccucaugccaauuuga

SEQ ID NO: 149994 - RNA, 1410 nt, Artificial Sequence
  derived and/or modified CDS sequence (opt3) from neuraminidase__InfluenzaA__AFG72584
augaaccccaaucagaagaucauuaccauaggcagcgugucccugacaaucgccacuauuugcuuccucaugcaaaucgcuauucuugucacgaccguuacacugcacuuuaaacaguacgaguguaacucuccuccaaauaaccaggugauguugugcgaaccgacuaucauagagagaaauaucaccgaaauuguauauuuaacaaacaccacuaucgagaaggaagugugucccaaacuggcagaguacaggaauuggucaaagccucagugcaaaauuacaggguucgccccauuuaguaaggacaacagcauccggcuauccgcgggaggugauauaugggucacccgcgagcccuaugugucuugugacccuggcaagugcuaccaauucgcucucgggcagggaacgacucugaauaacaaacauucgaaugauaccguucacgaccgaacaccauaucguacucuucugaugaacgaauugggcgugcccuuucaucucgguaccaagcaggucuguauugccuggucaagcaguuccugccacgaugggaaagcauggcugcauguguguguaacaggacacgacgagaaugccaccgcuucuuucaucuacgauggcagacugguugacagcauuggcuccuggucaaagaacauccucaggacgcaggaaagugagugcguguguaucaaugggacuugcacagucgugaugaccgauggaagcgcaucugagaaagccgacacuaagauuuuauuuauagaagaggguaagaucgugcacauuuccccucugucaggcagcgcucaacaugucgaagagugcaguuguuauccacgguacccggggguucgcugcguguguagagauaacuggaaaggaucuaacaggcccaucguagacauaaaugugaaggauuacuccauugucagcucguaugugugcucuggccuuguuggugacacaccucggaaaaacgacuccucaaguagcuccuacuguuggaauccaaacaaugaaaaagggggacacggcgugaagggcugggccuucgaugacgggaacgaugucuggaugggacgcaccaucucugaggaguugcgaagcgguuaugaaacguuuaaggugaucggcggguggucaaaacccaauaguaagcugcagauuaacagacagguaaucguugacaggggaaaucgguccggcuacagcgguauuuucucuguggaggggaagucaugcauaaaccguuguuuuuaugucgaacuaauccgcggcagaaaacaggagaccgaagugugguggacaaguaauagcauugucguguucugcggaacuuccggcaccuacgggacaggaucuuggccugauggugcggacaucaaccucaugccaaucuga

SEQ ID NO: 149995 - RNA, 1410 nt, Artificial Sequence
  derived and/or modified CDS sequence (opt3) from neuraminidase__InfluenzaA__AFG72606
augaaccccaaucagaagaucauuaccauaggcagcgugucccugacaaucgccacuauuugcuuccucaugcaaaucgcuauucuugucacgaccguuacacugcacuuuaaacaguacgaguguaacucuccuccaaauaaccaggugauguugugcgaaccgacuaucauagagagaaauaucaccgaaauuguauauuuaacaaacaccacuaucgagaaggaaauuugucccaaacuggcagaguacaggaauuggucaaagccucagugcaaaaucacaggguucgccccauuuaguaaggacaacagcauacggcuauccgcgggaggugauauuugggugacccgcgagcccuaugucucuugugacccuggcaagugcuaccaauucgcucucgggcagggaacgacucugaauaaccgacauucgaaugauaccgugcacgaccguacaccauauagaacucuucugaugaacgaauugggcguucccuuucaucucgguaccaaacagguguguaucgccuggucaagcaguuccugccacgaugggaaggcauggcugcaugucugugugacaggacacgacgagaaugccaccgcuucuuucauuuacgauggcaggcugguagacagcaucggcuccuggaguaaaaacauccuccggacgcaggaaucagagugcguuuguauuaaugggacuugcacaguggucaugaccgauggaagcgcaucugagcgcgccgacacuaagauauuauuuaucgaagaggguaaaauugugcacaucuccccucugucaggcagcgcucaacauguggaagagugcaguuguuauccaagauacccgggggucaggugcguuugucgggauaacuggaagggaucuaaccgccccauaguggacauuaauguaaaggaucacuccaucgugagcucguacgucugcucuggccuugugggugacacaccucggaaaaacgacuccucaaguagcuccuauuguuugaauccaaacaaugaagaagggggacauggcguuaagggcugggccuucgaugacgggaacgauguguggaugggaagaaccaucucugagaaacugaggagcgguuacgagacguuuaaggucauuggcggguggucaaaacccaauaguaagcuacagaucaaccgacaggugauuguagaccguggaaaucgcuccggcuauagcgguauauucucuguugaggggaaaucaugcgugaacagauguuuuuacgucgaacucaucaggggccggaagcaggagaccgaagugugguggacaaguaauagcauugucguguucugcggaacuuccggcaccuaugggacaggaucuuggccugauggugcggacaucaaccugaugccaaucuga

SEQ ID NO: 149996 - RNA, 1410 nt, Artificial Sequence
  derived and/or modified CDS sequence (opt3) from neuraminidase__InfluenzaA__AFG72617
augaaccccaaucagaagaucauuaccauaggcagcgugucccugacaaucacuacgauuugcuuccucaugcaaaucgccauucuugucaucaccguuacacugcacuuuaaacagugugagugcaacucuccuccaaauaaccaggugauguugugugaaccgacuauaaucgagagaaauauuaccgaaaucguauacuuaacaaacaccacuauugagaaggaaaucugccccaaacuggcugaguauaggaauuggucaaagccucaguguaaaauaacaggguucgcaccauuuaguaaggacaacagcauucggcuauccgccggaggugauaucugggugacccgcgagcccuacgucucuugcgacccuggcaaguguuaucaauucgcgcucgggcagggaacgacucugaauaaccgacauucgaaugauaccgugcacgaccguacaccauacagaacucuucugaugaacgaauugggcguucccuuucaucucgguaccaaacaggugugcauugcuuggucaagcaguuccugucacgaugggaaggccuggcugcaugucugcgugacaggacacaaugagaacgcaaccgccucuuucaucuaugacggcaggcugguagauagcaucggcuccuggaguaaaaauauucuccggacgcaggaaucagaguguguuugcauaaacgggacuugcacaguggucaugaccgacggaagcgcuucuggucgcgcagauacuaagaucuuauuuauugaggaaggcaaaaucgugcacauauccccucugucagggagcgcccaacauguggaggaauguaguugcuacccaagauauccgggagucagguguguuugccgggacaacuggaagggcucuaaucgccccauuguggauaucaacguaaaggacuacuccaucgugagcucguacgucuguucuggucuugugggggauacaccucggaaaaaugacuccucaaguagcuccuauugcuugaacccaaauaacgaggaaggaggccacggcguuaaggggugggcuuucgacgauggaaaugacguguggauggguagaaccauuucugagaaacugaggagcggcuacgagacguuuaaggucaucgggggauggucaaaacccaacaguaagcuacagauuaaucgacaggugauaguagaucguggcaaccgcuccgguuauagcgggaucuucucuguugaaggcaaaucauguauuaauagaugcuuuuacguggagcucaucaggggacggaagcaggaaaccgaggucugguggacaaguaacagcaucguggucuucuguggcacuuccgggaccuauggaacagguucuuggccugacggcgccgauauuaaucugaugccaauauga

SEQ ID NO: 149997 - RNA, 1410 nt, Artificial Sequence
  derived and/or modified CDS sequence (opt3) from neuraminidase__InfluenzaA__AFG72628
augaaccccaaucagaagaucauuaccauaggcagcgugucccugacaaucgccacuauuugcuuccucaugcaaaucgcuauucuugucacgaccguuacacugcacuuuaaacaguacgaguguaacucuccuccaaauaaccaggugauguugugcgaaccgacuaucauagagagaaauaucaccgaaauuguauauuuaacaaacaccacuaucgagaaggaaauuugucccaaacuggcagaguacaggaauuggucaaagccucagugcaaaaucacaggguucgccccauuuaguaaggacaacagcauacggcuauccgcgggaggugauauuugggugacccgcgagcccuaugucucuugugacccugauaagugcuaccaauucgcucucggccaggggacgacucugaauaaccgacauucgaaugacaccgugcacgaucguacaccauauagaacucuucugaugaacgaauugggaguucccuuucaucucggcaccaaacagguguguaucgccuggucaagcaguuccugccacgacgguaaggcauggcugcaugucugugugacagggcacgaugagaaugccaccgcuucuuucauuuacgacggaaggcugguagauagcaucggcuccuggaguaaaaagauccuccggacgcaggaaucagagugcguuuguauuaacggcacuugcacaguggucaugaccgacgggagcgcaucuggacgcgccgauacuaaaauauuauuuaucgaggaagguaagauugugcacaucuccccucugucaggcagcgcucaacauguggaggaaugcaguuguuauccaagauacucuggggucaggugcguuugucgggacaauuggaagggauccaaccgcccgauaguggauauuaacguaaaagacuacagcaucgugucgucuuaugucugcuccggccuugugggugacacaccccgaaagaaugauucaaguagcuccucucacuguuugaacccuaauaacgaggaagggggacauggcguuaaaggcugggccuucgacgaugggaaugacguguggaugggaagaaccaucagcgagaagcugaggucagguuacgagacguuuaaagucauuggcggguggaguaagccaaacuccaaacuacagaucaaucgucaggugauuguagaucggggaaaccgcagcggcuauucugguauauucucaguugaagggaagaguugcaucaauagauguuuuuacguggagcucauuaggggccggaagcaggaaaccgaggucugguggacaagcaacuccaucguggucuucugcggaacuucuggcaccuaugggacaggaucguggcccgacggugcggauaucaaucugaugccuauuuga

SEQ ID NO: 149998 - RNA, 1410 nt, Artificial Sequence; identical to SEQ ID NO: 143028
  derived and/or modified CDS sequence (opt3) from neuraminidase__InfluenzaA__AFG72639

SEQ ID NO: 149999 - RNA, 1410 nt, Artificial Sequence
  derived and/or modified CDS sequence (opt3) from neuraminidase__InfluenzaA__AFG72650
augaaccccaaucagaagaucauuaccauaggcagcgugucccugacaaucgccacuauuugcuuccucaugcaaaucgcuauucuugucacgaccguuacacugcacuuuaaacaguacgaguguaacucuccuccaaauaaccaggugauguugugcgaaccgacuaucauagagagaaauaucaccgaaauuguauauuuaacaaacaccacuaucgagaaggaaauuugucccaaacuggcagaguacaggaauuggucaaagccucagugcaaaaucacaggguucgccccauuuaguaaggacaacagcauacggcuauccgcgggaggugauauuugggugacccgcgagcccuaugucucuugugacccuggcaagugcuaccaauucgcucucgggcagggaacgacucugaauaaccgacauucgaaugauaccgugcacgaccguacaccauauagaacucuucugaugaacgaauugggcguucccuuucaucucgguaccaaacagguguguaucgccuggucaagcaguuccugccacgaugggaaggcauggcugcaugucugugugacaggacacgacgagaaugccaccgcuucuuucauuuacgauggcaggcugguagacagcaucggcuccuggaguaaaaacauccuccggacgcaggaaucagagugcguuuguauuaaugggacuugcacaguggucaugaccgauggaagcgcaucugagcgcgccgacacuaagauauuauuuaucgaagaggguaaaauugugcacaucuccccucugucaggcagcgcucaacauguggaagagugcaguuguuauccaagauacccgggggucaggugcguuugucgggauaacuggaagggaucuaaccgccccauaguggacauuaauguaaaggauuacuccaucgugagcucguaugucugcucuggccuugugggugacacaccucggaaaaacgacuccucaaguagcuccuacuguuugaauccaaacaaugaagaagggggacacggcguuaagggcugggccuucgaugacgggaacgauguguggaugggaagaaccaucucugagaaacugaggagcgguuaugagacguuuaaggucauuggcggguggucaaaacccaauaguaagcuacagaucaaccgacaggugauuguagaccguggaaaucgcuccggcuacagcgguauauucucuguugaggggaaaucaugcgugaacagauguuuuuaugucgaacucaucaggggccggaagcaggagaccgaagugugguggacaaguaauagcauugucguguucugcggaacuuccggcaccuacgggacaggaucuuggccugauggugcggacaucaaccugaugccaaucuga

SEQ ID NO: 150000 - RNA, 1410 nt, Artificial Sequence; identical to SEQ ID NO: 149997
  derived and/or modified CDS sequence (opt3) from neuraminidase__InfluenzaA__AFG72672

SEQ ID NO: 150001 - RNA, 1407 nt, Artificial Sequence
  derived and/or modified CDS sequence (opt3) from neuraminidase__InfluenzaA__AFG72683
augaaccccaaucagaagaucauuaccauaggcagcgugucccugacaaucgccacuauuugcuuccucaugcaaaucgcuauucuugucaucacgguuacccugcacuuuaaacaguacgaguguaacucuccuccaaauaaccaggugauguugugcgaaccgacaauaaucgagagaaauauuacugaaaucguauauuuaaccaacacaaccauugagaaggaaaucugucccaaacuggcagaguacaggaauuggucaaagccucagugcaaaauaacuggguucgccccauuuaguaaggacaacagcauucggcuauccgcgggaggugauaucugggugacacgcgagcccuaugucucuugugacccuggcaagugcuaccaauucgcucucgggcagggaaccacgcugaauaaccgacauucgaaugaagugcacgaucguacuccauauagaacccuucugaugaacgaguugggcguucccuuucaucucgguacaaaacagguguguauugccuggucaagcaguuccugccacgacgggaaggcauggcugcaugucugugugacuggacacaaugaaaacgccaccgcuucuuucaucuacgauggcaggcugguagacagcaucggcuccuggaguaaaaauauucuccggacacaggagucagagugcguuuguauaaacgggaccugcacgguggucaugacugauggaagcgcaucuggucgcgccgacacaaagaucuuauuuauugaagagggcaaaaucgugcacauauccccucugucagggagcgcucaacauguggaagagugcaguuguuauccaagauacccgggagucaggugcguuugucgggauaacuggaagggcucuaaucgccccauuguggacaucaacguaaaggauuacuccaucgugagcucguaugucugcucuggucuugugggggacaccccucggaaaaaugauuccucaaguagcucccacuguuugaacccaaauaacgaagagggaggccauggcguuaaggggugggccuucgacgacggaaaugauguguggauggguagaacuauuucugagaaacugaggagcggcuacgaaacauuuaaggucaucgggggauggucaaaacccaacaguaagcuacagauuaaucgacaggugauaguagaccguggcaaccgcuccgguuauagcgggaucuucucuguugagggcaaaucaugcauuaauagauguuuuuacguggaacucaucaggggacggaagcaggagaccgaagucugguggacgaguaacagcaucguggucuucugcggcaccuccgggacauauggaacugguucuuggccugauggcgcggacauuaaucugaugccaauauga

SEQ ID NO: 150002 - RNA, 1410 nt, Artificial Sequence
  derived and/or modified CDS sequence (opt3) from neuraminidase__InfluenzaA__AFG72705
augaaccccaaucagaagaucauuaccauaggcagcgugucccugacaaucgccacuauuugcuuccucaugcaaaucgcuauucuugucacgaccguuacacugcacuuuaaacaguacgaguguaacucuccuccaaauaaccaggugauguugugcgaaccgacuaucauagagagaaauaucaccgaaauuguauauuuaacaaacaccacuaucgagaaggaaauuugucccaaacuggcagaguacaggaauuggucaaagccucagugcaaaaucacaggguucgccccauuuaguaaggacaacagcauacggcuauccgcgggaggugauauuugggugacccgcgagcccuaugucucuugugacccugauaagugcuaccaauucgcucucggccaggggacgacucugaauaaccgacauucgaaugacaccgugcacgaucguacaccauauagaacucuucugaugaacgaauugggaguucccuuucaucucggcaccaaacagguguguaucgccuggucaagcaguuccugccacgacgguaaggcauggcugcaugucugugugacagggcacgaugagaaugccaccgcuucuuucauuuacgacggaaggcugguagauagcaucggcuccuggaguaaaaagauccuccggacgcaggaaucagagugcguuuguauuaacggcacuugcacaguggucaugaccgacgggagcgcaucuggacgcgccgauacuaaaauauuauuuaucgaggaagguaagauugugcacaucucccaacugucaggcagcgcucagcauguggaggaaugcaguuguuauccuagauacccaggggucaggugcguuugucgggacaauuggaagggaucuaaccgcccgauaguggauauuaacguaaaagaccacuccaucgugagcucguacgucugcucuggccuugugggugacacaccccgaaagaaugauuccucaaguagcucccauuguuugaacccuaauaacgaggaagggggacacggcguuaaaggcugggccuucgacgaugggaaugacguguggaugggaagaaccaucucugagaagcugaggagcgguuaugagacguuuaaagucauugaaggcuggucaaagccaaacaguaaacuacagaucaaucgucaggugauuguagaucgggggaaccgcuccggauacagcggcauauucucuguugaggguaagucaugcaucaauagauguuuuuauguggaacucauuagggggcggaagcaagagaccgaagucugguggacaaguaacagcaucguggucuucugcggcacuuccggaaccuacggcacagggucuuggcccgacggagcggauaucaaucugaugccuauuuga

SEQ ID NO: 150003 - RNA, 1410 nt, Artificial Sequence
  derived and/or modified CDS sequence (opt3) from neuraminidase__InfluenzaA__AFG72716
augaaccccaaucagaagaucauuaccauaggcagcgugucccugacaaucacuacgauuugcuuccucaugcaaaucgccauucuugucaucaccguuacacugcacuuuaaacagugugagugcaacucuccuccaaauaaccaggugauguugugugaaccgacuauaaucgagagaaauauuaccgaaaucguauacuuaacaaacaccacuauugagaaggaaaucugccccaaacuggcugaguauaggaauuggucaaagccucaguguaaaauaacaggguucgcaccauuuaguaaggacaacagcauucggcuauccgccggaggugauaucugggugacccgcgagcccuacgucucuugcgacccuggcaaguguuaucaauucgcgcucgggcagggaacgacucugaauaaccgacauucgaaugauaccgugcacgaccguacaccauacagaacucuucugaugaacgaauugggcguucccuuucaucucgguaccaaacaggugugcauugcuuggucaagcaguuccugucacgaugggaaggccuggcugcaugucugcgugacaggacacaaugagaacgcaaccgccucuuucaucuaugacggcaggcugguagauagcaucggcuccuggaguaaaaauauucuccggacgcaggaaucagaguguguuugcauaaacgggacuugcacaguggucaugaccgacggaagcgcuucuggucgcgcagauacuaagaucuuauuuauugaggaaggcaaaaucgugcacauauccccucugucagggagcgcccaacauguggaggaauguaguugcuacccaagauauccgggagucagguguguuugccgggacaacuggaagggcucuaaucgccccauuguggauaucaacguaaaggacuacuccaucgugagcucguacgucuguucuggucuugugggggauacaccucggaaaaaugacuccucaaguagcuccuauugcuuggacccaaacaaugaggaaggaggccacggcguuaaggggugggcuuucgaugacggaaacgauguguggauggguagaaccauuucugagaaaagcaggucaggcuacgagacguuuaaggucaucgggggauggaguaaacccaauuccaagcugcagauuaaccgacaggugauaguagaccguggcaaucgcagcgguuauucugggaucuucucaguugaaggcaaaaguuguauuaacagaugcuuuuacguggagcuaaucaggggacggcgacaggaaaccgaggucugguggacaagcaauuccaucguggucuucuguggcacuucugggaccuauggaacagguucguggccugauggcgccgacauuaaccucaugccaauauga

SEQ ID NO: 150004 - RNA, 1410 nt, Artificial Sequence
  derived and/or modified CDS sequence (opt3) from neuraminidase__InfluenzaA__AFG72738
augaaccccaaucagaagaucauuaccauaggcagcgugucccugacaaucacuacgauuugcuuccucaugcaaaucgccauucuugucaucaccguuacacugcacuuuaaacagugugagugcaacucuccuccaaauaaccaggugauguugugugaaccgacuauaaucgagagaaauauuaccgaaaucguauacuuaacaaacaccacuauugagaaggaaaucugccccaaacuggcugaguauaggaauuggucaaagccucaguguaaaauaacaggguucgcaccauuuaguaaggacaacagcauucggcuauccgccggaggugauaucugggugacccgcgagcccuacgucucuugcgacccuggcaaguguuaucaauucgcgcucgggcagggaacgacucugaauaaccgacauucgaaugauaccgugcacgaccguacaccauacagaacucuucugaugaacgaauugggcguucccuuucaucucgguaccaaacaggugugcauugcuuggucaagcaguuccugucacgaugggaaggccuggcugcaugucugcgugacaggacacaaugagaacgcaaccgccucuuucaucuaugacggcaggcugguagauagcaucggcuccuggaguaaaaauauucuccggacgcaggaaucagaguguguuugcauaaacgggacuugcacaguggucaugaccgacggaagcgcuucuggucgcgcagauacuaagaucuuauuuauugaggaaggcaaaaucgugcacauaucccaacugucagggagcgcccagcauguggaggaauguaguugcuacccuagauauccaggagucagguguguuugccgggacaacuggaagggcucuaaucgcccgauuguggauaucaacguaaaggacuacuccaucgugagcucguacgucuguucuggucuugugggggauacaccccggaaaaaugacuccucaaguagcuccuauugcuuggacccuaacaaugaggaaggaggccacggcguuaaggggugggcuuucgaugacggaaacgauguguggauggguagaaccauuucugagaaacugaggagcggcuacgagacguuuaaggucaucgggggauggucaaaaccaaauaguaagcuacagauuaaccgacaggugauaguagaccguggcaaucgcuccgguuauagcgggaucuucucuguugaaggcaaaucauguauuaacagaugcuuuuacguggagcucaucaggggacggaagcaagaaaccgaggucugguggacaaguaauagcaucguggucuucuguggcacuuccgggaccuauggaacagguucuuggcccgauggcgccgacauuaaccugaugccuauauga

SEQ ID NO: 150005 - RNA, 1410 nt, Artificial Sequence; identical to SEQ ID NO: 143233
  derived and/or modified CDS sequence (opt3) from neuraminidase__InfluenzaA__AFG72749

SEQ ID NO: 150006 - RNA, 1410 nt, Artificial Sequence; identical to SEQ ID NO: 142621
  derived and/or modified CDS sequence (opt3) from neuraminidase__InfluenzaA__AFG72760

SEQ ID NO: 150007 - RNA, 1410 nt, Artificial Sequence; identical to SEQ ID NO: 142088
  derived and/or modified CDS sequence (opt3) from neuraminidase__InfluenzaA__AFG72771

SEQ ID NO: 150008 - RNA, 1410 nt, Artificial Sequence
  derived and/or modified CDS sequence (opt3) from neuraminidase__InfluenzaA__AFG72782
augaaccccaaucagaagaucauuaccauaggcagcgugucccugacaaucgccacuauuugcuuccucaugcaaaucgcuauucuugucacgaccguuacacugcacuuuaaacaguacgaguguaacucuuugccuaauaaccaggugauguuaugcgaaccaacuaucauagagagaaauaucaccgaaauuguauaucugacaaacaccacuaucgagaaggaaauuuguccgaaacuagcagaguacaggaauuggucaaagccccagugcaaaaucacaggguucgccccuuuuaguaaggacaacagcauacggcucuccgcgggaggugauauuugggugacccgcgagccauaugucucuugugaccccgauaagugcuaccaauucgcucugggccaggggacgacucuuaauaaccgacauucgaaugacaccgugcacgaucguacaccuuauagaacucuguugaugaacgaacucggaguuccauuucaucugggcaccaaacagguguguaucgccuggucaagcaguuccugccacgacgguaaggcauggcugcaugucugugugacagggcacgaugagaaugccaccgcuucuuucauuuacgacggaaggcucguagauagcaucggcuccuggaguaaaaagaucuuacggacgcaggaaagugagugcguuuguauuaacggcacuugcacaguggucaugaccgacgggagcgcaucuggacgcgccgauacuaaaauacuguuuaucgaggaagguaagauuauccacacaucccaacuuucaggcagcgcucagcauguggaggaaugcaguuguuaucccagauacccuggggugaggugcgucugucgggacaauuggaagggaucuaaccgcccaauaguugauauuaacgugaaagacuacuccaucguaagcucguaugugugcucuggcuuggucggugacaccccgcgaaagaaugauuccucaaguagcucccacugucugaaccccaauaacgaggaagggggacauggcgugaaaggcugggccuucgacgaugggaaugacguuuggaugggaagaacgaucucugagaaguuuaggagcgguuacgagaccuucaaagugauugaaggcuggucaaagccuaacaguaaacuacagaucaaucggcaggucauuguggaucgugacaaccgcuccggguauagcggaauauuuucuguagagggcaagucaugcaucaauagauguuucuacguugaacucauuaggggucggaagcaagagacagaagugugguggacuucaaacagcaucgucguguuuugcgggaccuccggcacauauggaacuggcucuuggccagauggggcggacaucaaucugaugcccauuuga

SEQ ID NO: 150009 - RNA, 1410 nt, Artificial Sequence; identical to SEQ ID NO: 143797
  derived and/or modified CDS sequence (opt3) from neuraminidase__InfluenzaA__AFG72793

SEQ ID NO: 150010 - RNA, 1410 nt, Artificial Sequence; identical to SEQ ID NO: 142332
  derived and/or modified CDS sequence (opt3) from neuraminidase__InfluenzaA__AFG72804

SEQ ID NO: 150011 - RNA, 1410 nt, Artificial Sequence; identical to SEQ ID NO: 143977
  derived and/or modified CDS sequence (opt3) from neuraminidase__InfluenzaA__AFG72826

SEQ ID NO: 150012 - RNA, 1410 nt, Artificial Sequence
  derived and/or modified CDS sequence (opt3) from neuraminidase__InfluenzaA__AFG72837
augaaccccaaucagaagaucauuaccauaggcagcgugucccugacaaucgccacuauuugcuuccucaugcaaaucgcuauucuugucacgaccguuacacugcacuuuaaacaguacgaguguaacucuccuccaaauaaccaggugauguugugcgaaccgacuaucauagagagaaauaucaccgaaauuguauauuuaacaaacaccacuaucgagaaggaaauuugucccaaacuggcagaguacaggaauuggucaaagccucagugcaacaucacaggguucgccccauuuaguaaagacaauagcauacggcuauccgcgggaggugauauuugggugacccgcgagcccuaugucucuugugacccugauaagugcuaccaauucgcucucggccaggggacgacucugaacaauggacauucgaacgacaccgugcacgaacgaacaccauaucguacucuucugaugaaugaguugggcguucccuuucaucucgguaccaaacagguguguaucgccuggucaagcaguuccugccacgaugggaaggcauggcugcaugucugugugacaggagacgaugaaaacgccaccgcuucuuucauuuacaauggcagacugguagacagcaucggcuccuggucaaagaaaauccucaggacgcaggagagugagugcguuuguauuaacgggacuugcacaguggucaugaccgauggaagcgcaucugguaaggccgacacuaaaauauuauuuaucgaagagggcaagauugugcacaucuccacacugucagggagcgcucaacacguggaagagugcaguuguuauccucgguacccaggaguccgcugcguuuguagagauaacuggaagggcucuaauaggccgauaguggacauuaacguaaaagauuacuccaucgugagcucguaugucugcucuggucuugugggggacacgccccggaagaaugacuccuucucaaguagccauuguuuggauccuaacaaugaagagggaggccacggcguuaaagggugggccuuugacgauggaaacgacguguggaugggucgcaccaucuccgagaagcugcgaucuggcuacgaaaccuucaaagucauugagggguggagcaagccaaauucaaaacuacagaucaacagacaggugauuguagaaaggggaaaucggaguggcuauuccgguauauuuagcguugaggggaagucuugcaucaaccguuguuucuacguggaacucauucgcggcagaaaggaggagacagaagucugguggacuucaaauaguaucguggucuuuugcggaaccagcggcacauaugggacuggauccuggcccgauggugcggacaucaaccugaugccuauuuga

SEQ ID NO: 150013 - RNA, 1413 nt, Artificial Sequence
  derived and/or modified CDS sequence (opt3) from neuraminidase__InfluenzaA__AFG72848
augaaccccaaucagaagaucauuaccauaggcagcgugucccugacaaucgccacuauuugcuuccucaugcaaaucgcuauucuugucacgaccguuacacugcacuuuaaacaguacgaguguaacucuccuccaaauaaccaggugauguugugcgaaccgacuaucauagagagaaauaucaccgaaauuguauauuuaacaaacaccacuaucgagaaggaaauuugucccaaaucagcagaguacaggaauuggaguaagccucagugcaacaucacaggguucgccccauuuagcaaagacaauuccauacggcugucugcgggaggugauauuugggugacccgcgagcccuaugucucgugugacccugauaagugcuaccaauucgcucuaggccaggggacgacucucaacaauggacauucaaacgacaccgugcacgaucgaacaccauaucguacucugcuuaugaaugaacugggcguucccuuucauuuggguaccagacagguguguaucgccuggagcaguuccucuugccacgacgggaaggcauggcuccaugucugugugacaggagaugacaaaaacgccaccgcuagcuucauuuacaauggcaggcugguagauuccaucggcucauggaguaagaaauauauccugcggacgcaggagagcgaaugcguuuguauuaacgggacuugcacaguggucaugaccgacggaucugcauccgguaaggccgauacuaaaauacucuuuaucgaggagggcaagauuauccacauaucaacauuaagcgggagugcucaacacguggaagagugcucuuguuacccucgcuacccaggagugagaugcgucuguagggacaacuggaagggcuccaaucggccgauuguugauaucaacgugaaagacuauagcaucguaucgucuuacgugugcuccggucuggucggggacacgccccgcaagaaugauucaaguagcuccucucauugucuugacccuaacaaugaagagggaggccacggcgugaaagggugggccuucgaugacggaaacgauguuuggaugggucgaaccauuagcgaaaaguugagaucaggcuaugagaccuuuaaagugaucgagggguggaguaagccaaauuccaaacugcagauuaacaggcaggucauaguggaacggggaaaucguagcggcuacucugguaucuucucaguagaggggaagaguugcauuaaccgcuguuuuuauguugaacuaaucagaggcaggaaggaggaaacagaggugugguggacuagcaauuccaucgucguguucugcggaaccucuggcacauacgggacuggaucguggcccgacggugcggauauuaaccucaugccuauauga

SEQ ID NO: 150014 - RNA, 1410 nt, Artificial Sequence
  derived and/or modified CDS sequence (opt3) from neuraminidase__InfluenzaA__AFG72859
augaaccccaaucagaagaucauuaccauaggcagcgugucccugacaaucucuacuauuugcuucuuuaugcaaaucgccauucucaucacgaccgucacacuucacuucaaacaguacgaguuuaacucaccuccaaauaaccagguuaugcugugugaaccgacuauaaucgagagaaauauuaccgaaaucguguauuugacaaacaccacuauugagaaggaaaucugccccaaauuagcugaguacaggaauuggaguaagccucaguguaacauaacaggguucgcaccauuuagcaaagacaauuccauucggcugucugccggaggugauaucuggguaacccgcgagcccuaugugucgugcgacccugauaaguguuaccaauucgcgcuaggccaggggacgacucucaacaauguccauucaaacgacauugugcacgaucgaaccccauaucguacacugcuuaugaaugaacugggaguucccuuucauuugggcacuaaacaggugugcaucgcuuggagcaguuccucuugucacgacgguaaggccuggcuccaugucugcgugaccggggaugacgagaacgcaacagccagcuucaucuacaauggaagacugguagauuccauuguuucauggaguaagaaaauacugaggacccaggaaagcgagugugugugcaucaacggcacguguacugucgugaugacagacggcucugcuuccgggaaggcagauaccaaaauucucuuuaucgaggaaggaaagauagugcacacuucaacauuaagcgguagugcccaacacgucgaggaaugcucuugcuauccucgguacccaggcguucgcugugugugcagagacaacuggaagggguccaauaggccgauuguagauaucaacaucaaagacuacagcauugugucgucuuaugucuguuccggacuggugggcgacacgccccggaagaaugauucaaguagcuccucucauugccuugacccuaacaaugaggaaggugggcacggaguuaaaggcugggcuuucgaugacggcaacgauguguggauggggcgcaccaucagcgagaaguugcgaucaggauacgagaccuuuaaagucauugaagguuggaguaauccaaacuccaagcugcagauaaauagacaggugaucguagacaggggcaaccggagcggguauucuggaauuuucucaguugagggcaaaaguuguaucaaucguugcuuuuacguggaacuaauccgcgguagaaagcaggagacagaaguccucuggacuagcaacuccauuguggucuucugugggaccucuggcacauauggaacuggcucguggcccgauggggccgacauaaaucugaugccuaucuga

SEQ ID NO: 150015 - RNA, 1410 nt, Artificial Sequence
  derived and/or modified CDS sequence (opt3) from neuraminidase__InfluenzaA__AFG72870
augaaccccaaucagaagaucauuaccauaggcagcgugucccugacaaucgccacuauuugcuuccucaugcaaaucgcuauucuugucacgaccguuacacugcacuuuaaacaguacgaguguaacucuccuccaaauaaccaggugauguugugcgaaccgacuaucauagagagaaauaucaccgaaauuguauauuuaacaaacaccacuaucgagaaggaaauuugucccaaacuggcagaguacaggaauuggucaaagccucagugcaacaucacaggguucgccccauuuaguaaagacaauagcauacggcuauccgcgggaggugauauuugggugacccgcgagcccuaugucucuugugacccugauaagugcuaccaauucgcucucggccaggggacgacucugaacaauggacauucgaacgacaccgugcacgaucgaacaccauaucguacucuucugaugaaugaauugggcguucccuuucaucucgguaccaaacagguguguaucgccuggucaagcaguuccugccacgacgggaaggcauggcugcaugucugugugacaggagaugacgagaacgccaccgcuucuuucauuuacaauggcagacugguagauagcaucggcuccuggucaaagaaaauccucaggacgcaggaaagugagugcguuuguauuaacgggacuugcacaguggucaugaccgacggaagcacuucugguaaggcagauacaaaaauauuauuuaucgaggaaggcaagauugugcacaucuccacccugucagggagcgcccaacacguggaggaaugcaguuguuauccucgguacccaggaguccgcugcguuuguagagacaacuggaagggcucuaauaggccgauaguggauauuaacguaaaagacuacuccaucgugagcucguaugucugcucuggucuugugggggacacgccccggaagaaugauuccuucucaaguagccauuguuuggacccuaacaaugaggaaggaggccacggcguuaaagggugggcuuuugaugacggaaacgauguguggaugggucgcaccaucuccgagaagcugcgaucuggcuacgagacauucaaagucauugaaggguggagcaagccaaauucaaaacuacagaucaacagacaggugauuguagagaggggaaaucggaguggcuauuccgguauauuuagcguugaaucuaagucaugcaucaaccguuguuucuacguggagcucauucgcgggagaaaggaagagacugaggucugguggaccaguaauagcaucguggucuuuugcggcacauccggaacuuauggcaccgggucuuggcccgacggagccgauaucaaccugaugccuauuuga

SEQ ID NO: 150016 - RNA, 1410 nt, Artificial Sequence
  derived and/or modified CDS sequence (opt3) from neuraminidase__InfluenzaA__AFG72892
augaaccccaaucagaagaucauuaccauaggcagcgugucccugacaaucucuacuauuugcuucuuuaugcaaaucgccauucucaucacgaccgucacacuucacuucaaacaguacgaguuuaacucaccuccaaauaaccagguuaugcugugugaaccgacuauaaucgagagaaauauuaccgaaaucguguauuugacaaacaccacuauugagaaggaaaucugccccaaauuagcugaguacaggaauuggaguaagccucagugugacauaacaggguucgcaccauuuagcaaagauaacuccauucggcugucugccggaggugacaucuggguaacccgcgagcccuaugugucgugcgauccugacaaguguuaccaauucgcgcuaggccaggggacgacucucaauaacguccauucaaaugauaccgugcacgaccgaacaccauaucguacucugcuuaugaacgaacugggaguucccuuucauuugggcaccaaacaggugugcauugcuuggagcaguuccucuugucacgaugguaaggccuggcuccaugucugcgugacaggggacgauaagaaugcaaccgccagcuucaucuacaacggaagacugguagacuccaucguuucauggaguaaagagauucugaggacgcaggaaagcgagugugugugcauaaauggcacuuguacagucgugaugaccgauggcucugcuuccgggaaggcagacacuaaaauccucuuuauugaggaaggaaagaucgugcacacaucaaccuuaagcgguagugcccaacacgucgaggaaugcucuugcuauccucgguacccaggcguucgcugugugugcagagauaacuggaagggguccaacaggccgauaguagacauuaauaucaaagacuacagcaucgugucgucuuaugucuguuccggacuggugggcgauacgccccggaagaacgacucaaguagcuccucucauugccuugauccuaauaacgaggaaggugggcacggaguuaaaggcugggcuuucgacgauggcaaugacguguggauggggcgcaccauuagcgagaaguugcgaucaggauacgagacauuuaaagucaucgaagguuggaguaacccaaauuccaagcugcagauuaacagacaggugauaguagauaggggcaaucggagcggguauucuggaaucuucucaguugagggcaaaaguuguauuaaccguugcuuuuacguggaacuaauccgcgguagaaaggagaagacugaaguccucuggaccagcaauuccaucguggucuucugugggacaucuggcacuuauggaaccggcucguggcccgacggggccgauauuaaccugaugccuauauga

SEQ ID NO: 150017 - RNA, 1410 nt, Artificial Sequence
  derived and/or modified CDS sequence (opt3) from neuraminidase__InfluenzaA__AFG72903
augaaccccaaucagaagaucauuaccauaggcagcgugucccugacaaucucuacuauuugcuucuuuaugcaaaucgccauucucaucacgaccgucacacuucacuucaaacaguacgaguuuaacucaccuccaaauaaccagguuaugcugugugaaccgacuauaaucgagagaaauauuaccgaaaucguguauuugacaaacaccacuauugagaaggaaaucugccccaaauuagcugaguacaggaauuggaguaagccucaguguaacauaacaggguucgcaccauuuagcaaagacaauuccauucggcugucugccggaggugauaucuggguaacccgcgagcccuaugugucgugcgacccugauaaguguuaccaauucgcgcuaggccaggggacgacucucaacaauguccauucaaacgacaccgugcacgaucgaacaccauaucguacucugcuuaugaaugaacugggaguucccuuucauuugggcaccaaacaggugugcauugcuuggagcaguuccucuugucacgacgguaaggccuggcuccaugucugcgugacaggggaugacaagaacgcaaccgccagcuucaucuacaauggaagacugguagauuccaucguuucauggaguaaagagauucugaggacgcaggaaagcgagugugugugcauaaacggcacuuguacagucgugaugaccgacggcucugcuuccgggaaggcagauacuaaaauccucuuuauugaggaaggaaagaucgugcacacaucaaccuuaagcgguagugcccaacacgucgaggaaugcucuugcuauccucgguacccaggcguucgcugugugugcagagacaacuggaagggguccaauaggccgauaguagauauuaacaucaaagacuacagcaucgugucgucuuaugucuguuccggacuggugggcgacacgccccggaagaaagauucaaguagcuccucucauugccuugacccuaauaacgaggaaggugggcacggaguuaagggcugggcuuucgaugacggcaaugauguguggauggggcgcaccauuagcgagaaauugcgaucaggauacgagacauuuaaggucaucgaagguuggaguaacccaaauuccaaacugcagauuaacagacaggugauaguagacaggggcgaucggagcggguauucuggaaucuucucaguugagggcaagaguuguauuaaucguugcuuuuacguggaacuaauccgcgguagaaaggaggaaacugagguccucuggaccagcaacuccaucguggucuucugugggacaucuggcacuuauggaaccggcucguggcccgacggggccgauauuaaucugaugccuauauga

SEQ ID NO: 150018 - RNA, 1410 nt, Artificial Sequence
  derived and/or modified CDS sequence (opt3) from neuraminidase__InfluenzaA__AFG72936
augaaccccaaucagaagaucauuaccauaggcagcgugucccugacaaucucuacuauuugcuucuuuauccaaauugccauccucauaacgaccgucacacuucacuucaaacaguacgaguuuaacucaccuccaaauaaccagguuaugcugugugaaccgacuaucauugagagaaauaucaccgaaauuguguauuugacaaacaccacuaucgagaaggaaauaugccccaaauuagcugaguacaggaauuggaguaagccucagugugacauuacaggguucgcaccauuuagcaaagauaacuccauccggcugucugccggaggugacauuuggguaacccgcgagcccuaugugucgugcgauccugacaaguguuaccaauucgcgcuaggccaggggacgacucucaauaacguccauucaaauaacaucgugcgagaucguaccccauauagaacacugcuuaugaaugaacugggaguucccuuucacuugggcacuaaacaggugugcaucgcuuggagcaguuccucuugucaugacgguaaggccuggcuccacgucugcauuaccggggaugacaagaacgcaacagccagcuucauauacaauggaaggcugguggauuccguaguuucauggaguaaagagauccugcggacccaggaaagcgagugugugugcauuaacggcacguguacugucgugaugacagacggcucugcuuccgggaaggcagauaccaaaauccucuuuauagaggaaggaaagauugugcauacuucaacauuaagcgguagugcccaacacgucgaggaaugcucuugcuauccucgcuacccaggcguuagaugugugugcagggacaacuggaagggguccaaucggccgaucguagauaucaacauuaaagaccacagcaucgugucgucuuacgucuguuccggacuggugggcgacacccccaggaagaaugauucaaguagcuccucucauugccuugacccuaacaaugaggaaggugggcacggaguuaaaggcugggcuuucgaugacggcaacgauguguggauggggcgaacgauuagcgagaagucaagauugggauaugagaccuuuaaagucauagaagguuggaguaaucauaaguccaaacugcagaucaaccgccaggugauuguagaccggggcaaucguagcggguacucuggaaucuucucaguugagggcaagaguuguaucaaccgcugcuuuuauguggaacuaauuagagguaggaaggaggaaacagagguccucuggacuagcaauuccauaguggucuucugugggaccucuggcacauacggaacuggcucguggccagauggggccgaccugaaccuuaugcccaucuga

SEQ ID NO: 150019 - RNA, 1410 nt, Artificial Sequence
  derived and/or modified CDS sequence (opt3) from neuraminidase__InfluenzaA__AFG72958
augaaccccaaucagaagaucauuaccauaggcagcgugucccugacaaucucuacuauuugcuucuuuaugcaaaucgccauucucaucacgaccgucacacuucacuucaaacaguacgaguuuaacucaccuccaaauaaccagguuaugcugugugaaccgacuauaaucgagagaaauauuaccgaaaucguguauuugacaaacaccacuauugagaaggaaaucugccccaaauuagcugaguacaggaauuggaguaagccucagugugacauaacaggguucgcaccauuuagcaaagauaacuccauucggcugucugccggaggugacaucuggguaacccgcgagcccuaugugucgugcgauccugacaaguguuaccaauucgcgcuaggccaggggacgacucucaauaacguccauucaaauaacauugugcgagaucguaccccauauagaacacugcuuaugaaugaacugggaguucccuuucacuugggcacuaaacaggugugcaucgcuuggagcaguuccucuugucaugacgguaaggccuggcuccacgucugcaucaccggggaugacaagaacgcaacagccagcuucauuuacaauggaaggcugguggauuccguaguuucauggaguaaagagauacugcggacccaggaaagcgagugugugugcaucaacggcacguguacugucgugaugacagacggcucugcuuccgggaaggcagauaccaaaauucucuuuaucgaggaaggaaagauagugcauacuucaacauuaagcgguagugcccaacacgucgaggaaugcucuugcuauccucgcuacccaggcguuagaugugugugcagggacaacuggaagggguccaaucggccgauuguagauaucaacaucaaagaccacagcauugugucgucuuacgucuguuccggacuggugggcgacacccccaggaagaaugauucaaguagcuccucucauugccuugacccuaacaaugaggaaggugggcacggaguuaaaggcugggcuuucgaugacggcaacgauguguggauggggcgaacgaucaaugagaccagcagauugggauaugagacauuuaaggucauugaagguuggucaaacccaaaaaguaagcugcagauaaaucgccaggugaucguagaccggggcaaccguuccggguacagcggaauuuucucuguugagggcaaaucauguaucaaucgcugcuuuuauguggaacuaaucagagguaggaaggaggaaacugagguccucuggaccaguaacagcauuguggucuucugugggacauccggcacuuacggaaccggcucuuggcccgauggggccgaccugaaucuuaugccuauauga

SEQ ID NO: 150020 - RNA, 1410 nt, Artificial Sequence; identical to SEQ ID NO: 142151
  derived and/or modified CDS sequence (opt3) from neuraminidase__InfluenzaA__AFG98811

SEQ ID NO: 150021 - RNA, 1410 nt, Artificial Sequence
  derived and/or modified CDS sequence (opt3) from neuraminidase__InfluenzaA__AFG98822
augaaccccaaucagaagaucauuaccauaggcagcgugucccugaucauugccacagucugcuuccucaugcaaaucgcuauucuuguuacuacggugacccugcacuuuaaacagcaugagugugacucuccuucaaguaaccagguaauguugugcgaaccaaucauaaucgagagaaauauuacagaaaucguguacuuaaacaauacuaccauugagaaggaaacauguccgaaacuggucgaguauaggaacuggagcaagccccagugcaaaaucaccggguucgcaccuuuuuccaaggauaauucuauacggcuaucggccggaggugacauuugggugacucgcgagccauacguuucaugugaucccggcaagugcuaucaauucgcgcucgggcagggaacaacccuggacaacaaacacagcaaugauacgauccaugacaggauuccucaccguacucuucugaugaacgaauugggcgugccauuucaucucgguaccagacaggucuguaucgcuuggaguuccucuagcugccacgaugggaaggccuggcugcacguguguguaacaggagacgauaaaaaugcaacugccuccuucaucuacgacggcaggcugguugauucaauuggcaguuggagccagaacauacuccggacccaagagucugaaugcguguguaucaaugggacaugcaccgucgugaugacggacggauccgcuucaggucgcgcagauacuagaauuuuauuuaucgaggagggcaagauagugcauauuagcccccugagugggucugcccagcacgucgaagagugcuccuguuauccuagguacccagacguucggugcaucugucgcgacaacuggaaaggaagcaaucgaccgaucguggauauuaacaugaaggacuauucgaucgauucuuccuacguaugcucaggccuugugggugacacacccagaaacgaugacaggaguagcaaguccaauugucggaacccuaauaacgaacgugggaaucauggagucaaaggcugggcuuucgauaacggcaaugacguguggauggggcgcaccauuucuaaggauuugagaagcggauacgagacuuuuaaaguuauagguggcuggucaacaccaaacaguaagucccagaucaaucgacaggugauugucgacagcgauaaccggucuggguauucaggaaucuucaguguggaaggcaaaagcugcaucaaucgauguuuuuacguagagcugauucgcgguagagagcaagaaaccaggguuugguggacguccaacucuauaguggucuucugcgggaccucgggcacauauggaacuggcagcuggcccgacggggccaauaucaacuuuaugccuauuuga

SEQ ID NO: 150022 - RNA, 1410 nt, Artificial Sequence; identical to SEQ ID NO: 148175
  derived and/or modified CDS sequence (opt3) from neuraminidase__InfluenzaA__AFG98833

SEQ ID NO: 150023 - RNA, 1410 nt, Artificial Sequence
  derived and/or modified CDS sequence (opt3) from neuraminidase__InfluenzaA__AFG98844
augaaccccaaucagaagaucauuaccauaggcagcgugucccugacaaucgccacuauuugcuuccucaugcaaaucgcuauucuugucacgaccguuacacugcacuuuaaacaguacgagugugacucuccugcaaacaaucaggugaugccaugcgaaccgaucauaaucgagagaaacauuacugaaaucguauauuugaccaauacaaccauugagaaggaaaugugucccaaauuaguggaguacaggaacuggucaaagccucagugcaaaaucacuggguucgccccauuuaguaaggauaauagcauacggcuguccgcgggaggugacauuugggucacacgcgagcccuaugugucuugugauccuggcaagugcuaccaauucgcucuagggcagggaaccacgcucaacaaucgacauucgaacgacacuauccacgaucguauuccacauagaacccugcuuaugaaugaacugggcguucccuuucacuuggguacaaggcaaguguguaucgccuggucaagcaguuccugccaugacgggaaagcauggcuccacgucugugugacuggagaugacaagaacgccaccgcuucuuucaucuaugauggccggcugguagacagcauuggcuccuggucacagaauauacugcgcacacaggagagugaaugcguuuguaucaacagaaccugcacgguggucaugacugaugggagcgcaucuggaaaagccgacacaaggauucucuuuaucgaggaggguaagauagugcacauuuccccuuuaucaggcagcgcucagcauguggaagagugcaguuguuacccacgguauccggggguccgcugcaucugucgagauaauuggaaaggaucuaacagacccguuguggacaucaacguaaaggacuacuccauugauagcucguacgugugcucuggccuggucggugacaccccuaggaauaacgaucgguccucaaguagcuauugucguaauccaaacaaugaacgcgggaaccacggagugaagggcugggccuucgacgaugagaaugacguuuggaugggcagaacuaucuccaaagauucuaggagcggguacgaaacauuuaaggugauuggagguuggucaacccccaacaguaaaucccagauaaaucggcaggucaucguggacagcgauaaccgaucuggcuauucagggauuuucaguguagagggaaagagcugcaucaaucgcuguuuuuacguugagcuuaucagaggcagggaacaagagacgcgggugugguggaccuccaacucuauugucguguucugcgguacaucggggacuuauggcaccggaagcuggccugacggcgcggauauaaauuugaugccaaucuga

SEQ ID NO: 150024 - RNA, 1410 nt, Artificial Sequence; identical to SEQ ID NO: 142166
  derived and/or modified CDS sequence (opt3) from neuraminidase__InfluenzaA__AFG98855

SEQ ID NO: 150025 - RNA, 1410 nt, Artificial Sequence; identical to SEQ ID NO: 143020
  derived and/or modified CDS sequence (opt3) from neuraminidase__InfluenzaA__AFG98866

SEQ ID NO: 150026 - RNA, 1410 nt, Artificial Sequence
  derived and/or modified CDS sequence (opt3) from neuraminidase__InfluenzaA__AFG98877
augaaccccaaucagaagaucauuaccauaggcagcgugucccugacaaucgccacuauuugcuuccucaugcaaaucgcuauucuugucacgaccguuacacugcacuuuaaacaguacgagugugacucuccuccaaacaaucaggugaugccgugcgaacccaucauaaucgagagaaacauuacugaaaucguauauuugaccaauacaaccauugagaaggaaaucuguccuaaauuaguggaguacaggaacuggucaaagccacagugcaaaauaacuggguucgcacccuuuaguaaggauaauagcauucggcuguccgccggaggugacaucugggucacacgcgagccuuaugugucuugugauccaggcaagugcuaccaauucgcgcuagggcagggaaccacgcucgacaacaaacauucgaaugauacuauucacgaccgaacaccccaucguacccugcuuaugaacgaacugggcguuccuuuucacuuggguacuagacagguguguaucgcuuggucaagcaguuccugccaugaugggaaggccuggcuccacgucugugugaccggauaugacaaaaaugcaacagccucuuucaucuacgauggcaggcugguagacagcauuggcuccuggucacagaacauacugcggacccaagagagugaaugcguuuguaucaaugggacgugcacuguggucaugacagauggaagcgcuucuggucgcgcagacaccaagauucucuuuaucgaggagggcaaaauagugcacauuuccccauuaucagggagcgcccagcauguggaagagugcaguuguuauccgagauaccccggagucaggugcaucugucgggauaacuggaagggcucuaaucgcccuguuguggacaucaacguaaaggacuacuccauugauagcucguaugugugcucuggucuggucggggacacuccacgaaacaaugauagauccucaaacaguuacuguaggaaucccaacaaugaaaaaggaaaccacggcgugaagggcugggcuuucgacgaugggaaugacguuuggaugggacggacaaucagcgaggauucccguucugguuaugaaaccuuuaaagugauuggcggguggagcacgccuaacucaaaacuucagauaaaucgccaggucaucguggacagugauaacagauccggauacagcggcauuuucucuguagaggguaagucaugcaucaauagguguuuuuauguugaguugauccgggggcgagaacaagagacccgcgugugguggacaaguaacagcauugucguguucugcggcacuuccggaaccuacggcacagggucuuggccagacggagccgauauaaaucugaugcccaucuga

SEQ ID NO: 150027 - RNA, 1410 nt, Artificial Sequence; identical to SEQ ID NO: 142166
  derived and/or modified CDS sequence (opt3) from neuraminidase__InfluenzaA__AFG98888

SEQ ID NO: 150028 - RNA, 1410 nt, Artificial Sequence
  derived and/or modified CDS sequence (opt3) from neuraminidase__InfluenzaA__AFG98899
augaaccccaaucagaagaucauuaccauaggcagcgugucccugaucauugccacaaucugcuuccucaugcaaauugcuauccuugucacuacgguuacccugcacuuuaaacaguacgagugugacucuccugcaaacaaucaggugaugccaugcgaaccgauaaucauugagagaaacaucacagaaauuguauauuugacuaauaccacaaucgagaaggaaauaugucccaaauuaguggaguacaggaacuggucaaagccucagugcaaaauuaccggguucgccccauuuaguaaggauaauagcauccggcuguccgcgggaggugacauuugggucacucgcgagcccuaugugucuugugauccuggcaagugcuaccaauucgcucuagggcagggaacaacccucgacaacaaacauucgaaugauacgauccacgaccgaacuccacaucguacccugcuuaugaacgaacugggcguucccuuucacuuggguacaagacagguguguaucgccuggucaagcaguuccugccaugaugggaaggcauggcuccacgucugugugacuggauaugacaaaaaugccaccgcuucuuucauuuacgauggcaggcugguagacagcauaggcuccuggucacagaacauccugcggacacaagagagugaaugcguuuguauuaaugggaccugcacgguggucaugacugauggaagcgcaucuggucgcgccgacacaaagauccucuuuauagaggagggcaaaauugugcacaucuccccuuuaucagggagcgcucagcauguggaagagugcaguuguuauccaagauacccgggagucaggugcaucugucgggauaacuggaagggcucuaaucgccccguuguggacauuaacguaaaggacuacuccaucgauagcucguaugugugcucuggucuggucggggacaccccucgaaacaaugauagauccucaaacaguuacuguaggaauccaaacaaugaaaaaggaaaccacggcgugaagggcugggccuucgacgaugggaaugacguuuggaugggacggacuauuagcgaggauucccguucugguuaugaaacauuuaaagugauaggcggguggagcacccccaacucaaaacuucagaucaaucgccaggucauuguggacagugauaacagauccggauacagcggcaucuucucuguagaggguaagucaugcaucaauagguguuuuuauguugaguugauucgggggcgagaacaagagacgcgcgugugguggaccaguaacagcauagucguguucugcggcacauccggaacuuacggcaccgggucuuggccugacggagcggauaucaaucugaugccaauuuga

SEQ ID NO: 150029 - RNA, 1410 nt, Artificial Sequence; identical to SEQ ID NO: 142166
  derived and/or modified CDS sequence (opt3) from neuraminidase__InfluenzaA__AFG98910

SEQ ID NO: 150030 - RNA, 1410 nt, Artificial Sequence; identical to SEQ ID NO: 142166
  derived and/or modified CDS sequence (opt3) from neuraminidase__InfluenzaA__AFG98921

SEQ ID NO: 150031 - RNA, 1410 nt, Artificial Sequence
  derived and/or modified CDS sequence (opt3) from neuraminidase__InfluenzaA__AFG98932
augaaccccaaucagaagaucauuaccauaggcagcgugucccugacaaucgccacuauuugcuuccucaugcaaaucgcuauucuugucacgaccguuacacugcacuuuaaacaguacgagugugacucuccugcaaacaaucaggugaugccaugcgaaccgaucauaguagagagaaacaucacugaaauuguguauuugaccaauacaaccaucgagaaggaaauuugucccaaauuagucgaguacaggaaguggucaaaaccucagugcaagaucacuggguucgccccauuuaguaaggauaacagcauacggcuguccgcgggaggugacauuugggugacacgcgagcccuauguuucuugugauccuggcaaaugcuaccaauucgcucuagggcagggaaccacgcucgacaauaagcauucgaacgauacuauccacgaccgaaccccacaucguacacugcuuaugaaugaacugggcgugcccuuucacuuggguacuagacaggucuguauugccuggucaagcaguuccugccaugaugggaaagcauggcuccacguguguguaaccggauaugacaagaacgccacagcuucuuucaucuacgauggcaggcugguugacagcaucggcuccuggucacagaauauucugcggacccaagagagugaaugcguguguauaaacgggacgugcacugucgugaugacagauggaagcgcaucuggucgcgccgacaccaaaauccucuuuauugaggagggcaagaucgugcacauauccccuuuaucagggagcgcucagcaugucgaagagugcaguuguuauccaagauacccgggaguuaggugcauuugucgggauaauuggaagggcucuaaccgccccgugguagacaucaaugugaaagacuacuccaucgauagcucguaugucugcucuggucuggugggggacacuccucgaaacaacgauagauccucaaauaguuacuguaggaacccaaauaacgaaaagggaaaucacggcguuaaaggcugggccuucgacgaugggaacgacguguggaugggacggacaauuagcgaggauucccguucugguuaugaaaccuuuaaggucaucggcggguggagcacgcccaauucaaaacuucagauuaaccgccaggugauaguagacagugauaauagauccggauacagcggcaucuucucuguugaggguaagucaugcauuaacagguguuuuuauguggaguugauccgggggcgagaacaagagacccgcgucugguggacaaguaauagcaucguggucuucugcggcacuuccggaaccuacggcacagggucuuggccugacggagcggauauuaaccugaugccaauauga

SEQ ID NO: 150032 - RNA, 1410 nt, Artificial Sequence
  derived and/or modified CDS sequence (opt3) from neuraminidase__InfluenzaA__AFG98943
augaaccccaaucagaagaucauuaccauaggcagcgugucccugacaaucgccacuauuugcuuccucaugcaaaucgcuauucuugucacgaccguuacacugcacuuuaaacaguacgagugugacucuccugcaaacaaucaggugaugccaugcgaaccgaucauaaucgagagaaacauuacugaaaucguauauuugaccaauacaaccauugagaaggaaaucugucccaaauuaguggaguacaggaacuggucaaagccucagugcaaaauaacuggguucgccccauuuaguaaggauaauagcauucggcuguccgcgggaggugacaucugggucacacgcgagcccuaugugucuugugauccuggcaagugcuaccaauucgcucuagggcagggaaccacgcucgacaacaaacauucgaaugauacuauucacgaccgaaccccacaucguacacugcuuaugaacgaacugggcguucccuuucacuuggguacuagacagguguguaucgccuggucaagcaguuccugccaugaugggaaggcauggcuccacgucugugugaccggauaugacaaaaaugccacagcuucuuucaucuacgauggcaggcugguagacagcauuggcuccuggucacagaacauacugcggacccaagagagugaaugcguuuguaucaaugggacgugcacuguggucaugacagauggaagcgcaucuggucgcgccgacaccaagauucucuuuaucgaggagggcaaaauagugcacauuuccccuuuaucagggagcgcucagcauguggaagagugcaguuguuauccaagauacccgggagucaggugcaucugucgggauaacuggaagggcucuaaucgccccguuguggacaucaacguaaaggacuacuccauugauagcucguaugugugcucuggucuggucggggacacuccucgaaagaacgauagauccucaaauaguuacuguaggaacccaaauaacgaaaaaggaaaucacggcgugaaaggcugggccuucgacgaugggaacgacguuuggaugggacggacaaucagcgaggauucccguucugguuaugaaaccuuuaaggugauuggcggguggagcacgcccaauucaaaacuucagauaaaccgccaggucaucguggacagugauaauagauccggauacagcggcauuuucucuguagaggguaagucaugcaucaacagguguuuuuauguugaguugauccgggggcgagaacaagagacccgcgugugguggacaaguaauagcauugucguguucugcggcacuuccggaaccuacggcacagggucuuggccugacggagcggauauagaccugaugccaaucuga

SEQ ID NO: 150033 - RNA, 1410 nt, Artificial Sequence
  derived and/or modified CDS sequence (opt3) from neuraminidase__InfluenzaA__AFG98965
augaaccccaaucagaagaucauuaccauaggcagcgugucccugacaaucgccacuauuugcuuccucaugcaaaucgcuauucuugucacgaccguuacacugcacuuuaaacaguacgagugugacucuccugcaaacaaucaggugaugccaugcgaaccgacuaucauagagagaaacaucaccgaaauuguauauuugacaaauaucaccauugagaaggaaaucugucccaaauuaguggaguacaggaacuggucaaagccucagugcaaaauaacuggguucgccccauuuaguaaggauaauagcauucggcuguccgcgggaggugacaucugggucacacgcgagcccuaugugucuugugauccuggcaagugcuaccaauucgcucuagggcagggaaccacgcucgacaacaaacauucgaaugauacuauucacgaccgaaccccacaucguacacugcuuaugaacgaacugggcguucccuuucacuuggguacuagacagguguguaucgccuggucaagcaguuccugccaugaugggaaggcauggcuccacgucugugugaccggauaugacaaaaaugccacagcuucuuucaucuacgauggcaggcugguagacagcauuggcuccuggucacagaacauacugcggacccaagagagugaaugcguuuguaucaaugggacgugcacuguggucaugacagauggaagcgcaucuggucgcgccgacaccaagauucucuuuaucgaggagggcaaaauagugcacauuuccccuuuaucagggagcgcucagcauguggaagagugcaguuguuauccaagauacccgggagucaggugcaucugucgggauaacuggaagggcucuaaucgccccguuguggacaucaacguaaaggacuacuccauugauagcucguaugugugcucuggucuggucggggacacuccucgaaacaaugauagauccucaaacaguuacuguaggaauccaaacaaugaaaaaggaaaccacggcgugaagggcugggccuucgacgaugggaaugacguuuggaugggacggacaaucagcgaggauucccguucugguuaugaaaccuuuaaagugauuggcggguggagcacgcccaacucaaaacuucagauaaaucgccaggucaucguggacagugauaacagauccggauacagcggcauuuucucuguagaggguaagucaugcaucaauagguguuuuuauguugaguugauccgggggcgagaacaagagacccgcgugugguggacaaguaacagcauugucguguucugcggcacuuccggaaccuacggcgcggggucuuggccugacggagcagauauaaaucugaugccaaucuga

SEQ ID NO: 150034 - RNA, 1410 nt, Artificial Sequence
  derived and/or modified CDS sequence (opt3) from neuraminidase__InfluenzaA__AFG98976
augaaccccaaucagaagaucauuaccauaggcagcgugucccugacaaucgccacuauuugcuuccucaugcaaaucgcuauucuugucacgaccguuacacugcacuuuaaacaguacgagugugacucuccugcaaacaaucaggugaugccaugcgaaccgaucauaaucgagagaaacauuacugaaaucguauauuuggccaauaccacaauugagaaggaaaucugucccaaauuaguggaguacaggaacuggucaaagccucagugcaaaauaaccggguucgcgccauuuaguaaggauaauagcauucggcuguccgcuggaggugacaucugggucacucgcgagcccuaugugucuugugauccuggcaagugcuaccaauucgcccuagggcagggaacaacccucgacaacaaacauucgaaugauacgauucacgaccgaacuccacaucguacccugcuuaugaacgaacugggcguucccuuucacuuggguacaagacagguguguaucgcauggucaagcaguuccugccaugaugggaaggccuggcuccacgucugugugacuggauaugacaaaaaugcuaccgcaucuuucaucuacgauggcaggcugguagacagcauuggcuccuggucaaagaacauacugcggacacaggagagugaaugcguuuguaucaaugggaccugcacgguggucaugacugauggaagcgccucuggucgcgcugacacaaaaauucucuuuaucgaggagggcaagauagugcacauuuccccuuuaucagggagcgcccaacauguggaagagugcaguuguuauccaagauacccgggagucaggugcaucugucgggauaacuggaagggcucuaaucgccccguuguggacaucaacguaaaagacuacuccauugauagcucguaugugugcucuggucuggucggggacaccccucgaaacaaugauagauccucaaguagcuacuguaggaacccaaauaacgaaaagggaaaucacggcgugaaaggcugggcguucgacgaugggaacgacguuuggaugggacggacuaucuccgaggauucucguagcgguuaugaaacauuuaaggugauuggcggguggucaacccccaauaguaaacuucagauaaaccgccaggucaucguggacuccgauaauagaagcggauacucuggcguauucucaguugaggguaagaguugcauuaacagguguuuuuauguggaguugauccgggggcgagaacuggagacgcgcgucugguggaccagcaauuccaucguggucuucugcggcacaucuggaacuuacggcaccgggucguggccugacggagcagauauuaaccuaaugccaauauga

SEQ ID NO: 150035 - RNA, 1410 nt, Artificial Sequence; identical to SEQ ID NO: 150034
  derived and/or modified CDS sequence (opt3) from neuraminidase__InfluenzaA__AFG98987

SEQ ID NO: 150036 - RNA, 1410 nt, Artificial Sequence
  derived and/or modified CDS sequence (opt3) from neuraminidase__InfluenzaA__AFG98998
augaaccccaaucagaagaucauuaccauaggcagcgugucccugacaaucgccacuauuugcuuccucaugcaaaucgcuauucuugucacgaccguuacacugcacuuuaaacaguacgagugugacucuccugcaaacaaucaggugaugccaugcgaaccgaucauaaucgagagaaacauuacugaaaucguauauuugaccaauacaaccauugagaaggaaaucugucccaaauuaguggaguacaggaacuggucaaagccucagugcaaaauaacuggguucgccccauuuaguaaggauaauagcauucggcuguccgcgggaggugacaucugggucacacgcgagcccuaugugucuugugauccuggcaagugcuaccaauucgcucuagggcagggaaccacgcucgaaaacaaacauucgaaugacacuauucacgaucgaaccccacaucguacacugcuuaugaacgagcugggcguucccuuucacuuggguacuagacagguguguaucgccuggucaagcaguuccugccaugacgggaaggcauggcuccacgucugugugaccggauaugauaaaaaugccacagcuucuuucaucuacgacggcaggcugguagauagcauuggcuccuggucacagaacauacugcggacccaagaaagugagugcguuuguaucaaugggacgugcacuguggucaugacagacggaagcgcaucuggucgcgccgauaccaagauucucuuuaucgaggaaggcaaaauagugcacauuuccccuuuaucagggagcgcucagcauguggaggaaugcaguuguuauccaagauacccgggagucaggugcaucugucgggacaacuggaagggcucuaaucgccccguuguggauaucaacguaaaggacuacuccauugacagcucguaugugugcucuggucuggucggggauacuccucgaaagaacgacagauccucaaguagcuacuguaggaauccaaacaaugagaaaggaaaccacggcgugaaaggcugggccuucgaugacgggaaugauguuuggaugggacggacaaucuccgaagacucucguagcgguuaugagaccuuuaaggugauuggcggguggucaacgcccaacaguaaacuucagauaaaucgccaggucaucguggauuccgcgaacagaagcggauacucuggcauuuucucaguagaggguaagaguugcaucaauagguguuuuuauguugaauugauccgggggcgagagcaagaaacccgcgugugguggacaagcaacuccauugucguguucugcggcacuucuggaaccuacggcacagggucguggccugacggagcagauauaaaucugaugccaaucuga

SEQ ID NO: 150037 - RNA, 1410 nt, Artificial Sequence; identical to SEQ ID NO: 150034
  derived and/or modified CDS sequence (opt3) from neuraminidase__InfluenzaA__AFG99009

SEQ ID NO: 150038 - RNA, 1410 nt, Artificial Sequence
  derived and/or modified CDS sequence (opt3) from neuraminidase__InfluenzaA__AFG99020
augaaccccaaucagaagaucauuaccauaggcagcgugucccugacaaucgccacuauuugcuuccucaugcaaaucgcuauucuugucacgaccguuacacugcacuuuaaacaguacgagugugacucuccugcaaacaaucaggugaugccaugcgaaccgaucauaaucgagagaaacauuacugaaaucguauauuugaccaauacaaccauugagaaggaaaucugucccaaauuaguggaguacaggaacuggucaaagccucagugcaaaauaacuggguucgccccauuuaguaaggauaauagcauucggcuguccgcgggaggugacaucugggucacacgcgagcccuaugugucuugugauccuggcaagugcuaccaauucgcucuagggcagggaaccacgcucgacaacaaacauucgaaugauacuauucacgaccgaaccccacaucguacacugcuuaugaacgaacugggcguucccuuucacuuggguacuagacagguguguaucgccuggucaagcaguuccugccaugaugggaaggcauggcuccacgucugugugaccggauaugacaaaaaugccacagcuucuuucaucuacgauggcaggcugguagacagcauuggcuccuggucacagaacauacugcggacccaagagagugaaugcguuuguaucaaugggacgugcacuguggucaugacagauggaagcgcaucuggucgcgccgacaccaagauucucuuuaucgaggagggcaaaauagugcacacuuccccuuuaucagggagcgcucagcauguggaagagugcaguuguuauccaagauacccgggagucaggugcauuugucgggauaacuggaagggcucuaaucgccccguuguggacaucaacguaaaggacuacuccaucgauagcucguaugugugcucuggucuggucggggacacaccucgaaacaaugauagauccucaaguagcuacuguaggaacccaaauaacgaaaaaggaacccacggcgugaagggcugggccuucgacgaugggaaugacguuuggaugggacggacgauuuccgaggauucucguagcgguuaugaaaccuuuaaagugaucggcggguggucaacacccaacaguaaacuucagauuaaucgccaggucauaguggacuccgauaacagaagcggauacucuggcaucuucucaguagaggguaagaguugcauuaauagguguuuuuauguugaguugauccgggggcgagaacaagagacucgcgugugguggaccagcaacuccaucgucguguucugcggcacaucuggaacuuacggcaccgggucguggccugacggagcggauauuaauauaaugccaaucuga

SEQ ID NO: 150039 - RNA, 1410 nt, Artificial Sequence
  derived and/or modified CDS sequence (opt3) from neuraminidase__InfluenzaA__AFG99031
augaaccccaaucagaagaucauuaccauaggcagcgugucccugacaaucgccacuauuugcuuccucaugcaaaucgcuauucuugucacgaccguuacacugcacuuuaaacaguacgagugugacucuccugcaaacaaucaggugaugccaugcgaaccgaucauaaucgagagaaacauuacugaaaucguauauuugaccaauacaaccauugagaaggaaaucugucccaaauuaguggaguacaggaacuggucaaagccucagugcaaaauaacuggguucgccccauuuaguaaggauaauagcauucggcuguccgcgggaggugacaucugggucacacgcgagcccuaugugucuugugauccuggcaagugcuaccaauucgcucuagggcagggaaccacgcucgacaacaaacauucgaaugauacuauucacgaccgaaccccacaucguacacugcuuaugaacgaacugggcguucccuuucacuuggguacuagacagguguguaucgccuggucaagcaguuccugccaugaugggaaggcauggcuccacgucugugugaccggauaugacaaaaaugccacagcuucuuucaucuacgauggcaggcugguagacagcauuggcuccuggucacagaacauacugcggacccaagagagugaaugcguuuguaucaaugggacgugcacuguggucaugacagauggaagcgcaucuggucgcgccgacaccaagauucucuuuaucgaggagggcaaaauagugcacacuuccccuuuaucagggagcgcucagcauguggaagagugcaguuguuauccaagauacccgggagucaggugcauuugucgggauaacuggcgcggcucuaaucgacccguuguggacaucaacguaaaggacuacuccaucgauagcucguaugugugcucuggucuggucggggacacaccuagaaacaaugauagguccucaaguagcuacugucggaacccaaauaacgaaaagggaacccacggcgugaaaggcugggccuucgacgaugggaaugacguuuggaugggacguacgauuuccgaggauucucgcagcgguuaugaaaccuuuaaggugaucggcggguggucaacacccaacaguaaacuucagauuaauagacaggucauaguggacuccgauaacaggagcggauacucuggcaucuucucaguagaggguaagaguugcauuaaucgguguuuuuauguugaguuggugcgagggcgcgaacaagagacuagagucugguggaccagcaacuccaucguggucuucugcggcacaucuggaacuuacggcaccgggucguggccugacggagcggauaucaaucugaugccaauuuga

SEQ ID NO: 150040 - RNA, 1410 nt, Artificial Sequence; identical to SEQ ID NO: 142624
  derived and/or modified CDS sequence (opt3) from neuraminidase__InfluenzaA__AFG99042

SEQ ID NO: 150041 - RNA, 1410 nt, Artificial Sequence
  derived and/or modified CDS sequence (opt3) from neuraminidase__InfluenzaA__AFG99053
augaaccccaaucagaagaucauuaccauaggcagcgugucccugacaaucgccacuauuugcuuccucaugcaaaucgcuauucuugucacgaccguuacacugcacuuuaaacaguacgagugugacucuccugcaaacaaucaggugaugccaugcgaaccgaucauaaucgagagaaacauuacugaaaucguauauuugaccaauacaaccauugagaaggaaaucugucccaaauuaguggaguacaggaacuggucaaagccucagugcaaaauaacuggguucgccccauuuaguaaggauaauagcauucggcuguccgcgggaggugacaucugggucacacgcgagcccuaugugucuugugauccuggcaagugcuaccaauucgcucuagggcagggaaccacgcucgacaacaaacauucgaaugauacuauucacgaccgaaccccacaucguacacugcuuaugaacgaacugggcguucccuuucacuuggguacuagacagguguguaucgccuggucaagcaguuccugccaugaugggaaggcauggcuccacgucugugugaccggauaugacaaaaaugccacagcuucuuucaucuacgauggcaggcugguagacagcauuggcuccuggucacagaacauacugcggacccaagagagugaaugcguuuguaucaaugggacgugcacuguggucaugacagauggaagcgcaucuggucgcgccgacaccaagauucucuuuaucgaggagggcaaaauagugcacacuuccucauuaagcgggagugcucagcauguggaagagugcucuuguuauccuagauacccaggagucaggugcauuugucgggauaacuggaagggcuccaaucgcccgguuguggacaucaacguaaaggacuacagcaucgauucgucuuaugugugcuccggucuggucggggacacaccccgaaacaaugauagaucaaguagcuccuacuguaggaacccuaauaacgaaaaaggaacccacggcgugaagggcugggccuucgacgaugggaaugacguuuggaugggacggacgauuucugaggauagccguucagguuaugaaaccuuuaaagugaucggcggguggaguauuccaaacuccaaacuucagauaaaucgccaggucaucguggacagcgauaacagaucuggauacucaggcauuuucaguguagaggguaagagcugcaucaauagguguuuuuauguugaguugauccgggggcgagaacaagagacacgcgugugguggacuuccaacucuauugucguguucugcggcaccucgggaacauacggcacugggagcuggcccgacggagcggauauaaaucugaugccuaucuga

SEQ ID NO: 150042 - RNA, 1410 nt, Artificial Sequence
  derived and/or modified CDS sequence (opt3) from neuraminidase__InfluenzaA__AFG99064
augaaccccaaucagaagaucauuaccauaggcagcgugucccugacaaucgccacugucugcuuccucaugcaaauugcuauccuuguuacgaccgugacacugcacuuuaaacaguacgagugugacucuccuccaaacaaucagguaaugccgugcgaacccauuaucauagagagaaacgugacugaaaucgucuauuugaccaauacaaccauugagaaggaaaucuguccuaaauuaguggaguacaggaacuggucaaagccacagugcaaaauuacuggguucgcacccuuuaguaaggauaauagcauccggcuguccgccggaggugacauauggguuacacgcgagccuuaugugucuugugauccaucgaagugcuaccaauucgcgcuaggccaggggaccacgcucgacaacaaacauucaaaugauacuauucacgaccgaacaccccaucguacccugcuuaugaacgaacugggagucccuuuucacuugggcacuagacagguguguaucgcuuggagcaguuccucuugccaugaugguaaggccuggcuccacguauguauuaccggguaugacaaaaaugcaacagccagcuucaucuacgauggaaggcugguugacuccaucggcucauggaguaagaacauucugcggacccaggagagcgaaugcguguguauaaauggcacgugcacugucgugaugacagaugggucugcuuccgagcgcgcagacaccaaaauccucuuuauugaggaaggaaagaucgugcacauaucaccauuaagcgguagugcccaacaugucgaggaaugcucuuguuauccgagauaccccggcguuaggugcauuugucgggauaacuggaagggguccaaucgcccugugguagacaucaacgugaaagacuacagcaucgucucgucuuaugugugcuccggacugguuggcgauacuccacgaaagaacgacagaucaaguagcuccuacuguaggaaucccaacaaugagaaagguaaccacggggugaagggaugggcuuucgaugacggcaaugaugucuggaugggccggacaauuucugaagagagccguucaggguaugagaccuuuaaagugaucggagguuggaguacgccuaacuccaaacuucagauuaaucgccagguaauaguugacagcgauaacagaucuggcuacucagggaucuucaguguggaaggaaagagcugcauuaauagguguuuuuaugucgaguugauccggggccgagaacaggagacccgcgugugguggacauccaacucuaucgucguguucugcgguacuucggggaccuacggcacaggaagcuggccagacggcgccgauauuaaucugaugcccauauga

SEQ ID NO: 150043 - RNA, 1410 nt, Artificial Sequence
  derived and/or modified CDS sequence (opt3) from neuraminidase__InfluenzaA__AFG99086
augaaccccaaucagaagaucauuaccauaggcagcgugucccugacaaucgccacuauuugcuuccucaugcaaaucgcuauucuugucacgaccguuacacugcacuuuaaacaguacgagugugacucuccugcaaacaaucaggugaugccaugcgaaccgaucauaaucgagagaaacguaacugaaauuguguauuugaccaauacaaccaucgagaaggaaauuugucccaaauuagucgaguacaggaacuggucaaagccucagugcaaaaucacuggguucgccccauuuaguaaggauaauagcauacggcuguccgcgggaggugacauuugggugacacgcgagcccuauguuucuugugauccuggcaagugcuaccaauucgcucuagggcagggaaccacgcucgacaacaaacauucgaaugauacuauccacgaccgaaccccauaucguacacugcuuaugaacgaacugggcgugcccuuucauuuggguacuagacaggucuguauugccuggucaagcaguuccugccacgaugggaaggcauggcuccauguguguguaaccggauacgacaaaaaugccacagcuucuuucaucuaugauggcaggcugguugacagcaucggcuccuggucaaagaacauucugcggacccaggagagugaaugcguguguauaaaugggacgugcacugucgugaugacagauggaagcgcaucugagcgcgccgacaccaaaauccucuuuauugaggaagguaagaucgugcacauauccccuuuaucaggcagcgcucaacacgucgaggaaugcaguuguuacccaagauacccggggguuaggugcauuugucgggauaacuggaagggaucuaaucgccccgugguagacaucaacgugaaagacuauuccaucgucagcucguacgugugcucuggccugguuggugauacuccucgaaagaacgacagauccucaaguagcuauuguaggaauccaaacaaugagaaagggaaccauggagugaagggcugggccuucgaugacggcaaugaugucuggauggggcggacaauuuccgaagagucucguagcggauacgagaccuuuaaagugaucgguggcuggucaacgcccaacaguaaacuucagauuaaucgccagguaauaguugacuccgauaacagaagcggguauucuggaaucuucucaguggaaggcaagaguugcauuaauagguguuuuuacgucgaguugauccggggucgagaacaggagacccgcgugugguggacaagcaacuccaucgucguguucugcgggacuucuggcaccuauggaacaggcucguggccugacggggcggauauuaaucugaugccaauauga

SEQ ID NO: 150044 - RNA, 1410 nt, Artificial Sequence
  derived and/or modified CDS sequence (opt3) from neuraminidase__InfluenzaA__AFG99097
augaaccccaaucagaagaucauuaccauaggcagcgugucccugacaaucgccacuauuugcuuccucaugcaaaucgcuauucuugucacgaccguuacacugcacuuuaaacaguacgagugugacucuccugcaaacaaucaggugaugccaugcgaaccgaucauaaucgagagaaacguaacugaaauuguguauuugaccaauacaaccaucgagaaggaaauuugucccaaauuagucgaguacaggaacuggucaaagccucagugcaaaaucacuggguucgccccauuuaguaaggauaauagcauacggcuguccgcgggaggugacauuugggugacacgcgagcccuauguuucuugugauccuggcaagugcuaccaauucgcucuagggcagggaaccacgcucgacaacaaacauucgaaugauacuauccacgaccgaaccccauaucguacacugcuuaugaacgaacugggcgugcccuuucauuuggguacuagacaggucuguauugccuggucaagcaguuccugccacgaugggaaggcauggcuccauguguguguaaccggauacgacaaaaaugccacagcuucuuucaucuaugauggcaggcugguugacagcaucggcuccuggucaaagaacauucugcggacccaggagagugaaugcguguguauaaaugggacgugcacugucgugaugacagauggaagcgcaucugagcgcgccgacaccaaaauccucuuuauugaggaagguaagaucgugcacauauccccuuuaucaggcagcgcucaacacgucgaggaaugcaguuguuacccaagauacccggggguuaggugcauuugucgggauaacuggaagggaucuaaucgccccgugguagacaucaacgugaaagacuauuccaucgucagcucguacgugugcucuggccugguuggugauacuccucgaaagaacgacagauccucaaguagcuauuguaggaauccaaacaaugagaaagggaaccauggagugaagggcugggccuucgaugacggcaaugaugucuggauggggcggacaauuuccgaagagucucgucuuggauacgagaccuuuaaagugaucgguggcuggagcacgcccaacucaaaguugcagauuaaucgccagguaauaguugacagugauaacagauccggguauagcggaaucuucucuguggaaggcaaaucaugcauuaauagguguuuuuacgucgagcugauccggggucgagaacaggagacccgcgugugguggacaaguaacagcaucgucguguucugcgggacuuccggcaccuauggaacaggcucuuggccugacggggcggauauuaaucuaaugccaauauga

SEQ ID NO: 150045 - RNA, 1410 nt, Artificial Sequence
  derived and/or modified CDS sequence (opt3) from neuraminidase__InfluenzaA__AFG99119
augaaccccaaucagaagaucauuaccauaggcagcgugucccugacaaucgccacuauuugcuuccucaugcaaaucgcuauucuugucacgaccguuacacugcacuuuaaacaguacgaguguucuucaccuccaaacaaucaggugaugccgugcgaacccaucauaaucgagagaaacauuacugaaaucguauauuugaccaauacaaccauugagaaggaaaucuguccuaaauuaguggaguacaggaacuggaguaagccacagugcaaaauaacuggguucgcacccuuuagcaaggacaauuccauucggcugucugccggaggugauaucugggucacacgcgagccuuaugugucgugugacccaggcaagugcuaccaauucgcgcuagggcagggaaccacgcucgauaacaaacauucaaaugacacuauucacgaucgaacccccuaucguacacugcuuaugaacgaacugggcguuccuuuucauuuggguacuagacagguguguaucgcuuggagcaguuccucuugccacgacgggaaggccuggcuccaugucugugugaccggacacgauaaaaaugcaacagccagcuucaucuacgacggcaggcugguagauuccauuggcucauggaguaagaacauacugcggacccaggagagcgaaugcguuuguaucaaugggacgugcacuguggucaugacagacggaucugcuuccgagcgcgcagauaccaaaauucucuuuaucgaggaagguaagauagugcacauuucaccauuaagcggcagugcccaacauguggaggaaugcucuuguuauccgagauaccccggggucaggugcguuugucgggacaacuggaagggauccaaucgcccuaucguggauaucaacguaaaagacuacagcauugugucgucuuaugucugcuccggccuggugggugacacuccacgaaagaacgauagaucaaguagcuccuacuguaggaaucccaacaaugagaaagggaaccacggaguuaagggcugggcuuucgacgauggcaaugacguguggauggggcggacaaucucugaagagagccguucaggauaugagaccuuuaaagucauugguggcuggaguacgccuaacuccaaacuucagauaaaucgccaggugaucguagauagcgacaacagaucuggguacucaggaauuuucaguguugaaggcaagagcugcaucaauagguguuuuuauguggaguugauccggggucgagaacaggagacccgcgucugguggacauccaacucuauuguggucuucugcgggacuucgggcaccuacggaacaggcagcuggccagauggggccgacauaaaucugaugcccaucuga

SEQ ID NO: 150046 - RNA, 1410 nt, Artificial Sequence
  derived and/or modified CDS sequence (opt3) from neuraminidase__InfluenzaA__AFG99130
augaaccccaaucagaagaucauuaccauaggcagcgugucccugacaaucgccacuauuugcuuccucaugcaaaucgcuauucuugucacgaccguuacacugcacuuuaaacaguacgaguguucuucaccuccaaacaaucaggugaugccgugcgggcccaucauaaucgaaagaaacauuacugagaucguauauuugaccaauacaaccauugaaaaggagaucuguccuaaauuaguggaauacaggaacuggaguaagccacagugcaaaauaacuggauucgcacccuuuagcaaggacaauuccauucggcugucugccgguggcgauaucugggucacacgcgagccuuaugugucgugugacccagggaagugcuaccaauucgcgcuaggacagggcaccacgcucgauaacaaacauucaaaugacacuauucacgaucgaacccccuaucguacacugcuuaugaacgagcuggguguuccuuuucauuuggggacuagacagguguguaucgcuuggagcaguuccucuugccacgacggaaaggccuggcuccaugucugugugaccggccacgauaaaaaugcaacagccagcuucaucuacgacggcaggcugguagauuccauugggucauggaguaagaacauacugcggacccaggaaagcgagugcguuuguaucaauggaacgugcacuguggucaugacagacgguucugcuuccgaacgcgcagauaccaaaauucucuuuaucgaggagggcaagauagugcacauuucaccauuaagcgggagugcccaacauguggaagagugcucuuguuauccgagauaccccggagucaggugcguuugucgggacaacuggaagggcuccaaucgcccugugguagauaucaacgugaaagacuacagcaucgucucgucuuaugugugcuccggucugguuggggacacuccacgaaagaacgauagaucaaguagcuccuacuguaggaaucccaacaaugaaaaaggaaaccacggcgugaagggcugggcuuucgacgaugggaaugacgucuggaugggacggacaauuucugaggaaagccguucagguuaugagaccuuuaaagugaucggcggguggaguacgccuaacuccaaacuucagaccaaucgccagguaauuguugauagcgacaacagaucuggauacucaggcauauucaguguggaggguaagagcugcaucaauagguguuuuuaugucgaauugauucgggggcgagagcaggaaacacgcgugugguggacuuccaacucuaucgucguguucugcggcaccucgggaacauacggcacugggagcuggccagauggagccgacaucaaucugaugcccauuuga

SEQ ID NO: 150047 - RNA, 1410 nt, Artificial Sequence
  derived and/or modified CDS sequence (opt3) from neuraminidase__InfluenzaA__AFG99141
augaaccccaaucagaagaucauuaccauaggcagcgugucccugacaaucgccacuauuugcuuccucaugcaaaucgcuauucuugucacgaccguuacacugcacuuuaaacaguacgaguguucuucaccuccaaacaaucaggugaugccgugcgaacccaucauaaucgagagaaacauuacugaaaucguauauuugaccaauacaaccauugagaaggaaaucuguccuaaauuaguggaguacaggaacuggaguaagccacagugcaaaauaacuggguucgcacccuuuagcaaggacaauuccauucggcugucugccggaggugauaucugggucacacgcgagccuuaugugucgugugacccaggcaagugcuaccaauucgcgcuagggcagggaaccacgcucgauaacaaacauucaaaugacacuauucacgaucgaacccccuaucguacacugcuuaugaacgaacugggcguuccuuuucauuuggguacuagacagguguguaucgcuuggagcaguuccucuugccacgacgggaaggccuggcuccaugucugugugaccggacacgauaaaaaugcaacagccagcuucaucuacgacggcaggcugguagauuccauuggcucauggaguaagaacauacugcggacccaggagagcgaaugcguuuguaucaaugggacgugcacuguggucaugacagacggaucugcuuccgagcgcgcagagaccaaaauucucuuuaucgaagaggguaagauagugcacauuucaccauuaagcggcagugcccaacauguggaagagugcucuuguuauccgagauaccccggggucaggugcguuugucgggauaacuggaagggauccaaucgcccugugguagacaucaacgugaaagauuacagcaucgucucgucuuaugugugcuccggccugguuggugacacuccacgaaagaacgacagaucaaguagcuccuacuguaggaaucccaacaaugaaaaagggaaccacggagugaagggcugggcuuucgaugacggcaaugaugucuggauggggcggacaauuucugaggagagccguucaggauaugaaaccuuuaaagugaucgguggcuggaguacgccuaacuccaaacuucagauuaaucgccagguaauaguugacagcgauaacagaucuggguacucaggaaucuucaguguggagggcaagagcugcauuaauagguguuuuuaugucgaauugauccggggucgagagcaggaaacccgcgugugguggacauccaacucuaucgucguguucugcgggacuucgggcaccuacggaacaggcagcuggccagacggggccgauauuaaucugaugcccauauga

SEQ ID NO: 150048 - RNA, 1410 nt, Artificial Sequence
  derived and/or modified CDS sequence (opt3) from neuraminidase__InfluenzaA__AFG99152
augaaccccaaucagaagaucaugaccauuggcagcgugucccugacaauagccacuaucugcuuccucaugcaaauugcuauccuugucacgaccguuacacugcacuuuaaacauuacgaguucucuucaccuccaaacaaucaggugaugccgugugaacccauuaucauagagagaaacaucacugaaauuguauauuugaccaauacaaccaucgagaaggaagugugcccuaaauuagucgaguacaggaacuggaguaagccacaguguaaaauuacuggguuugcacccuucagcaaggacaauuccauccggcugucugccggaggugauauaugggugacacgcgagccuuauguuucgugcgacccaggcaaguguuaccaguuugcgcuagggcaaggaaccacgcucaacaauaaacacucaaacgauacuauucaugaccgaacccccuaucguacacugcuuaugaaugaacugggcgugccuuuccacuuggguacuagacaggucugcaucgcuuggagcaguuccucuugucaugaugggaaggccuggcuccacgugugcguaaccggacacgacaaaaacgcaacagccagcuuuauuuacgauggcaggcugguugacuccaucggcucauggaguaagaauauccugcggacccaggagagcgaaugugugugcauuaacgggacguguacugucgugaugacagauggaucugcuuccggucgcgcagacaccaaaauacucuucaucgaggagggcaagauugugcauaucucaccauuaagcgggagugcccagcacgucgaagagugcucuugcuauccgagauaccccggaguuaggugugugugccgggauaauuggaagggcuccaaccgcccuauaguagacauuaacgugaaagauuacagcaucgucucgucuuauguguguuccggucugguuggggacacuccacgaaagaaugacagaucaaguagcuccuacugcaggaaccccaauaacgaaaaaggaaaucauggcgugaagggcugggcuuuugaugacgggaacgaugucuggaugggacggacaaucggugaggaacuucguucuggcuaugagaccuucaaagugauugggggauggagcacgccuaauucaaaguugcaaaucaaccgccagguaauuguugacagugauaauagauccggcuacagcgguauauuuucuguggaggggaaaucauguaucaacaggugcuucuaugucgaacugauucggggccgagagcaggaaacccgcgugcuauggacaaguaauagcaucgucguguuuuguggaacuuccggcaccuacgggacaggaucuuggccagacggugccgauaucaaccucaugcccauuuga

SEQ ID NO: 150049 - RNA, 1410 nt, Artificial Sequence; identical to SEQ ID NO: 147043
  derived and/or modified CDS sequence (opt3) from neuraminidase__InfluenzaA__AFG99163

SEQ ID NO: 150050 - RNA, 1410 nt, Artificial Sequence
  derived and/or modified CDS sequence (opt3) from neuraminidase__InfluenzaA__AFG99174
augaaccccagccagaagaucauuaccauaggcuccgugucucugacaaucgccacuauuugcuuccucaugcaaaucgcuauucuugucacgaccguuacacugcacuuuaaacaguacgaguguucaaguccuccaaauaaccaggugaugccgugcgaacccaucauaaucgagagaaauauuacugaaaucguauauuugaccaacacaaccauugagaaggaaaucuguccuaaauuaauggaguacaggaauuggagcaagccacagugcaaaauaacuggguucgcacccuuuuccaaggacaacucuauucggcugucggccggaggugauaucugggugacacgcgagccuuaugucucaugugacccaggcaagugcuaccaauucgcgcuagggcagggaaccacgcucgauaauaaacauagcaacgacacuauucacgaucgaacccccuaucguacacugcuuaugaaugaacugggcgugccuuuucauuuggguacuagacagguuuguaucgcuuggaguuccucuagcugccacgacgggaaggccuggcuccaugugugugucaccggacacgauaaaaacgcaacagccuccuucaucuacgacggcaggcugguggauucaauuggcaguuggagcaagaauauacugcggacccaggagucugaaugcguauguaucaacgggacgugcacuguugugaugacagacggauccgcuucagagcgcgcagagaccaaaauucucuuuaucgaagaggguaagauaguccacauuagcccauuaaguggcucugcccaacauguggaagagugcuccuguuauccgagauaccccggggugaggugcgucugucgggauaauuggaagggaagcaaccgcccuguuguggacaucaauguaaaagauuacucgaucgugucuuccuaugucugcucaggccuggugggugacacuccacgaaagaacgacagaaguagcuccucuuacuguaggaaccccaauaacgaaaaagggaaucacggaguuaagggcugggcuuucgaugacggcaacgauguguggauggggcggacaauuagcgaggagucacguaguggauaugaaaccuuuaaagucaucgguggcugguccacgccuaauagcaaacuucagauuaaccgccaggugauaguagacucugauaauagaucaggguacaguggaaucuucagcguugagggcaaguccugcauuaacagguguuuuuauguggaauugauccggggucgagagcaggaaacccgcgucugguggacaucuaauucgaucguggucuucugcgggacuagcggcaccuacggaacaggcuccuggccagacggggccgauauuaaccugaugcccauauga

SEQ ID NO: 150051 - RNA, 1410 nt, Artificial Sequence
  derived and/or modified CDS sequence (opt3) from neuraminidase__InfluenzaA__AFG99185
augaaccccaaucagaagaucauuaccauaggcagcgugucccugacaaucgccacuauuugcuuccucaugcaaaucgcuauucuugucacgaccguuacacugcacuuuaaacaguacgaguguucuucaccuccaaacaaucaggugaugccgugcgaacccaucauaaucgagagaaacauuacugaaaucguauauuugaccaauacaaccauugagaaggaaaucuguccuaaauuaguggaguacaggaacuggaguaagccacagugcaaaauaacuggguucgcacccuuuagcaaggacaauuccauucggcugucugccggaggugauaucugggucacacgcgagccuuaugugucgugugacccaggcaagugcuaccaauucgcgcuagggcagggaaccacgcucaacaauaaacauucaaacgauacuauucacgaccgaacccccuaucguacacugcuuaugaaugaacugggcguuccuuuucauuuggguacuaaacagguguguaucgcuuggagcaguuccucuugccacgaugggaaggccuggcuccaugucugugugaccggacacgacaagaacgcaacagccagcuucaucuacgauggcagacugguagacuccauuggcucauggaguaaaaauauacugaggacccaggagagcgaaugcguuuguaucaacgggacgugcacuguggucaugacagauggaucugcuuccgagcgggcagacaccaagauucucuuuaucgaggaagguaagauagugcacauuucaccauuaagcggcagugcccaacauguggaggaaugcucuuguuauccgcgcuaccccggggucagaugcguuuguagggauaauuggaaaggauccaaccggccuaucguggacaucaacguaaaggauuacagcauugugucgucuuaugucugcuccggccuggugggugacacuccacgcaaaaaugaccgaucaaguagcuccuacuguagaaaccccaauaacgagaaggggaaucacggaguuaaaggcugggcuuucgaugacggcaacgauguguggauggggaggacaaucggagaggaacuucggucugguuaugagaccuuuaaggucauuggcggguggagcacgccuaauucaaaauugcagauaaaccgucaggugaucguagacaguaagaaucgcuccggauacagcggcauuuucucuguugaagguaagucaugcaucaacagauguuuuuauguggagcugaucagggggcgggaacaggagacccgagucugguggacaaguaauagcauuguggucuucugcggcacuuccggaaccuacggcacagggucuuggccagauggagccgacauaaaccuaaugcccaucuga

SEQ ID NO: 150052 - RNA, 1410 nt, Artificial Sequence
  derived and/or modified CDS sequence (opt3) from neuraminidase__InfluenzaA__AFG99196
augaaccccaaucagaagaucauuaccauaggcagcgugucccugacaaucgccacuauuugcuuccucacgcaaaucgcuauucuugucaccacaguuacucugcacuuuaaacaguacgaguguucuucaaguccuaacaaucaggugaugccaugcgaaccgaucauaaucgagagaaacauuaccgaaaucguauauuugacaaauaccacuauugagaaggaaaucugucccaaauuaguggaguacaggaacuggagcaagccucagugcaaaauaacaggguucgcaccauuuuccaaggacaauucuauucggcugucggccggaggugauaucugggucacccgcgagcccuaugugucaugugacccuggcaagugcuaccaauucgcgcuagggcagggaacgacucucaacaauaaacauagcaacgauaccauucacgaccgaacaccauaucguacucugcuuaugaaugaacugggcguucccuuucauuuggguaccaaacagguguguaucgcuuggaguuccucuagcugccacgaugggaaggccuggcuccaugucuguaucacaggacacgacaagaacgcaaccgccuccuucauuuacgauggcagacugguggacucaauaggcaguuggagcaaaaauauccugaggacgcaggagucugaaugcguauguauuaacgggacuugcacaguugugaugaccgauggauccgcuucagagcgggcagacacuaagauccucuuuauagaggaagguaagauuguccacaucagcccuuuaaguggcucugcccaacauguggaggaaugcuccuguuauccacgcuacccgggggugagaugcgucuguagggauaauuggaaaggaagcaaccggcccaucguugacauuaacgugaaggauuacucgaucguaucuuccuaugugugcucaggccuggucggugacacaccucgcaaaaaugaccgaaguagcuccucuuacuguagaaacccaaauaacgagaaggggaaucacggagugaaaggcugggcuuucgaugacggcaacgauguuuggauggggaggaccauuggagaggaacuucggagcgguuaugagacguuuaaggugauaggcggguggucaacccccaauaguaaauugcagaucaaccgucaggucauuguggacuccggaaaucgcagcggcuacucugguaucuucucaguagaagggaagaguugcaucaacagauguuuuuauguugagcugauuaggggccgggaacaggagacacgagugugguggacuagcaauuccauagucguguucugcggaaccucuggcacauacgggacuggaucguggccugauggugccgacaucaaccuaaugccaauuuga

SEQ ID NO: 150053 - RNA, 1410 nt, Artificial Sequence
  derived and/or modified CDS sequence (opt3) from neuraminidase__InfluenzaA__AFG99207
augaaccccaaucagaagaucauuaccauaggcagcgugucccugacaaucgccacuauuugcuuccucaugcaaaucgcuauucuugucacgaccguuacacugcacuuuaaaccuuacgaguguucuucaccaccgaacaaucaggugaugcccugcgaaccuaucauaaucgagagaaacauuacugaaaucguauauuugaccaauacaaccauugagaaggaaaucuguccaaaauuaguggaguacaggaacuggaguaagccccagugcaaaauaacuggguucgcaccuuuuagcaaggacaauuccauucggcugucugccggaggugauaucugggucacacgcgagccauaugugucgugugaccccggcaagugcuaccaguucgcgcuagggcaaggaaccacgcucaacaauaaacauucaaacgauacuauucacgaccgaaccccuuaucguacacugcuuaugaaugaacugggcguuccauuucauuuggguacuaaacagguguguaucgcuuggagcaguuccucuugccacgaugggaaggccuggcuccaugucugugugaccggacacgacaagaacgcaacagccagcuucaucuacgauggcagacugguagacuccauuggcucauggaguaaaaauauacugaggacccaggagagcgaaugcguuuguaucaacgggacgugcacuguggucaugacagauggaucugcuuccgagcgggcagacaccaagauucucuuuaucgaggaagguaagauagugcacauuucaccguuaagcggcagugcccagcauguggaggaaugcucuuguuauccccgcuacccuggggucagaugcguuuguagggauaauuggaaaggauccaaccggccaaucguggacaucaacguaaaggauuacagcauugugucgucuuaugucugcuccggccuggugggugacacuccccgcaaaaaugaccgaucaaguagcuccuacuguagaaacccuaauaacgagaaggggaaucacggaguuaaaggcugggcuuucgaugacggcaacgauguguggauggggaggacaaucggagaggaacuucggucugguuaugagaccuuuaaggucauuggcggguggagcacgccaaauucaaaauugcaaauaaaccgucaggugaucguagacaguaagucccgcagcggauacucuggcauuuucucaguugaagguaagaguugcaucaauagauguuuuuauguggagcugaucagggggcgggaacaggagacccgagucugguggacaagcaacuccauuguggucuucugcggcacuucuggaaccuacggcacagggucguggcccgauggagccgacauaaaucuaaugccgaucuga

SEQ ID NO: 150054 - RNA, 1410 nt, Artificial Sequence; identical to SEQ ID NO: 142862
  derived and/or modified CDS sequence (opt3) from neuraminidase__InfluenzaA__AFG99218

SEQ ID NO: 150055 - RNA, 1410 nt, Artificial Sequence
  derived and/or modified CDS sequence (opt3) from neuraminidase__InfluenzaA__AFG99229
augaaccccaaucagaagaucauuaccauaggcagcgugucccugacaaucgccacuauuugcuuccucaugcaaaucgcuauucuugucacgaccguuacacugcacuuuaaacaguacgaguguucuucaccuccaaacaaucaggugaugccgugcgaacccaucauaaucgagagaaacauuacuaagaucguauauuugaccaauacaaccauugaaaaagagaucuguccuaaguuaguggaauacaggaacuggaguaaaccacagugcaagauaacuggguucgcacccuuuagcaaggacaauuccauucggcugucugccggaggugauaucugggucacacgcgagccuuaugugucgugugacccaggcaaaugcuaccaauucgcgcuagggcagggaaccacgcucaacaauaagcauucaaacgauacuauucacgaccgaacccccuaucguacacugcuuaugaaugagcugggcguuccuuuucauuuggguacuaaacagguguguaucgcuuggagcaguuccucuugccacgaugggaaggccuggcuccaugucugugugaccggacacgacaaaaacgcaacagccagcuucaucuacgauggcagacugguagacuccauuggcucauggaguaagaauauacugaggacccaggaaagcgagugcguuuguaucaacgggacgugcacuguggucaugacagauggaucugcuuccgaacgggcagacaccaagauucucuuuaucgaggaggguaaaauagugcacauuucaccauuaagcggcagugcccaacauguggaagagugcucuuguuauccgcgcuaccccggggucagaugcguuuguagggauaauuggaagggauccaaccggccuaucguggacaucaacguaaaagauuacagcauugugucgucuuaugucugcuccggccuggugggugacacuccacgcaagaaugaccgaucaaguagcuccuacuguagaaaccccaauaacgaaaaagggaaucacggaguuaagggcugggcuuucgaugacggcaacgauguguggauggggaggacaaucggagaggaacuucggucugguuaugagaccuuuaaagucauuggcggguggagcacgccuaauucaaaguugcagauaaaccgucaggugaucguagacaguaagaaucgcuccggauacagcggcauuuucucuguugaggguaaaucaugcaucaacagauguuuuuauguggaacugaucagggggcgggagcaggaaacccgagucugguggacaaguaauagcauuguggucuucugcggcacuuccggaaccuacggcacagggucuuggccagauggagccgacauaaaccuaaugcccaucuga

SEQ ID NO: 150056 - RNA, 1410 nt, Artificial Sequence
  derived and/or modified CDS sequence (opt3) from neuraminidase__InfluenzaA__AFG99240
augaaccccaaucagaagaucauuaccauaggcagcgugucccugacaaucgccacuauuugcuuccucaugcaaaucgcuauucuugucacgaccguuacacugcacuuuaaacaguacgaguguucuucaccuccaaguaaccaggugaugccgugcgaacccaucauaaucgagagaaauauuacugaaaucguauauuugaccaacacaaccauugagaaggaaaucuguccuaaaccaguggaguacaggaauuggagcaagccccagugcaaaauaacuggguucgcaccuuuuuccaaggacaacucuauucgguuaucggccggaggugauaucugggucacacgcgagccauaugugucaugugaccccggcaagugcuaccaauucgcgcuggggcagggaaccacgcuaaauaacaaacauagcaaugauacuauucacgaccgaaccccuuaucguacacuccugaugaacgaacuuggcguuccauuucaucuggguacuaaacagguguguaucgcuuggaguuccucuagcugccacgaugggaaggccugguugcaugucugugugaccggacacgacaagaaugcaacagccuccuucaucuacgauggcagacucguagacucaauuggcaguuggagcaaaaacauacugaggacccaggagucugaaugcguuuguaucaaugggacgugcacuguggucaugacagauggauccgcuucagagcgggcagacaccaagauucuguuuaucgaggaagguaagauagugcacauuagcccgcucaguggcucugcccaacauguggaggaaugcuccuguuauccccgcuacccuggggucagaugcguuuguagggauaacuggaaaggaagcaaucggccaaucguggacaucaacguaaaggauuacucgauugugucuuccuaugucugcucaggcuuagugggugacacuccccgcaaaaacgaccgauucaguagcuccuacuguagaaauccuaacaaugagaaggggaaccacggaguuaaaggcugggcuuuugaugacggcaaugauguguggauggggaggacaaucggagaggaacugcggucugguuaugagaccuucaaggucauuggcggguggagcacgccaaacucaaaacuucagauaaaucgucaggugaucguagacaguaagaaccgcuccggauacagcggcaucuuuucuguugaagguaagucaugcauuaauagauguuucuauguggaguugaucagggggcgggaacaggagacccgagucugguggacaaguaacagcauuguggucuuuugcggcacuuccggaaccuacggcacagggucuuggcccgauggagccgacauaaaucugaugccgaucuga

SEQ ID NO: 150057 - RNA, 1410 nt, Artificial Sequence; identical to SEQ ID NO: 142861
  derived and/or modified CDS sequence (opt3) from neuraminidase__InfluenzaA__AFG99251

SEQ ID NO: 150058 - RNA, 1410 nt, Artificial Sequence
  derived and/or modified CDS sequence (opt3) from neuraminidase__InfluenzaA__AFG99273
augaaccccaaucagaagaucauuaccauaggcagcgugucccugacaaucgccacuaugugcuuccucaugcaaauugcuauccuugucacgaccguuacacugcacuuuaaacaguacgaguguucuucaccuccaaacaaucaggugaugccgugcgaacccacuauuaucgagagaaacauaaccgaaaucguauauuugacaaauaccacuauugagaaggaaaucuguccuaaauuaguggaguacaggaacuggaguaagccacagugcaaaauuacaggguucgcacccuuuagcaaggacaauuccauccggcugucugccggaggugauauaugggucacccgcgagccuuaugugucgugugacccaggcaagugcuaccaauucgcgcuagggcagggaacgacucucaacaaucgacauucaaacgauaccguucacgaccguacacccuauagaacucugcuuaugaaugaacugggcgugccuuuucauuuggguaccaaacaggucuguauugcuuggagcaguuccucuugccacgaugggaaggccuggcuccauguguguguaacaggacacgacaaaaacgcaaccgccagcuucaucuacgauggcaggcugguugacuccauuggcucauggaguaagaauauccugcggacgcaggagagcgaaugcguguguaucaacgggacuugcacagucgugaugaccgauggaucugcuuccgagcgcgcagacacuaaaauucucuuuauagaggaagguaagaucgugcacauuucaccauuaagcggcagugcccaacaugucgaggaaugcucuuguuauccgagauaccccgggguuaggugcgugugucgggauaauuggaagggauccaaccgcccuaucguagacauaaacgugaaagauuacagcauugucucgucuuaugugugcuccggccugguuggugacacaccacgaaagaaugacagaucaaguagcuccuacuguaggaaccccaauaacgagaaagggucucacggagugaagggcugggcuuucgaugacggcaaugaugucuggauggggcggaccaucggagaggaacuucguagcgguuaugagacguuuaaagugaucggcggguggucaaccccuaacaguaaguugcagauuaaucgccagguaaucguugacuccggaaacagaagcggcuacucugguauuuucucaguggaagggaaaaguugcauaaauagguguuuuuaugucgagcugauccggggccgagaacaggagacacgcgugugguggacuagcaacuccauugucguguucugcggaaccucuggcacauacgggacuggaucguggccagauggugccgacaucaaucuaaugcccaucuga

SEQ ID NO: 150059 - RNA, 1410 nt, Artificial Sequence
  derived and/or modified CDS sequence (opt3) from neuraminidase__InfluenzaA__AFG99284
augaaccccaaucagaagaucauuaccauaggcagcgugucccugacaaucgccacuauuugcuuccucaugcaaaucgcuauucuugucacgaccguuacacugcacuuuaaacaguacgaguguucuucaccuccaaguaaccaggugaugccgugcgaacccaucauaaucgagagaaauauuacuaagaucguauauuugaccaacacaaccauugaaaaagagaucuguccuaaguuaguggaauacaggaauuggagcaaaccacagugcaagauaacuggguucgcacccuuuuccaaggacaacucuauucggcugucggccggaggugauaucugggucacacgcgagccuuaugugucaugugacccaagcaaaugcuaccaauucgcgcuaggccaggggaccacgcucaauaacaagcauaguaaugauacuauucacgaccgaacccccuaucguacacugcuuaugaacgagcugggaguuccuuuucauuugggcacuaaacagguguguaucgcuugguccucuagcuccugccacgaugguaaggccuggcuccaugucugugugaccgggcacgacgauaaugcaacagccucauucaucuacgacggaagacugguagauaguauuggcagcuggucuaaaaacauacugaggacccaggaauccgagugcguuuguaucaauggcacgugcacuguggucaugacagacgggucagcuagcgaacgggcagauaccaagauucucuuuaucgaggagggaaagauagugcacauuaguccauuaucugguuccgcccaacauguggaagagugcagcuguuauccgcgcuaccccggcgucagaugcguuuguagggacaacuggaaagggucgaaucggccuaucguggauaucaacguaaaggacuacucuauuguguccucauaugucugcaguggacuggugggcgacacuccacgcaaaaacgaucgaagcuccucuagcuacuguagaaaucccaacaaugaaaaggguucacacgggguuaaaggaugggcuuucgacgauggcaacgacguguggaugggcaggacaaucggggaggaacuucggaguggauaugagaccuuuaaggucauugguggcugguccacgccuaauagcaaauugcagauaaaccgucaggugaucguagauucuaagaaucgcucaggguacaguggaauuuucagcguugagggcaaguccugcaucaacagauguuuuuauguggaacugaucaggggucgggagcaggaaacccgagucugguggacaucuaauucgauuguggucuucugcgggacuagcggcaccuacggaacaggcuccuggccagacggggccgauauaaaccuaaugcccaucuga

SEQ ID NO: 150060 - RNA, 1410 nt, Artificial Sequence
  derived and/or modified CDS sequence (opt3) from neuraminidase__InfluenzaA__AFG99295
augaaccccaaucagaagaucauuaccauaggcagcgugucccugacaaucgccacuauuugcuuccucaugcaaaucgcuauucuugucacgaccguuacacugcacuuuaaacaguacgaguguucuucaccuccaaacaaucaggugaugccgugcgaacccacuaucauagagagaaacaucaccgaaauuguauauuugacaaauaccacuaucgagaaggaaauuuguccuaaauuaguggaguacaggaacuggaguaagccacagugcaaaaucacaggguucgcacccuuuagcaaggacaauuccauacggcugucugccggaggugauauuugggucacccgcgagccuuaugugucgugugacccagauaagugcuaccaauucgcgcuaggccaggggacgacucucaacaaucgacauucaaacgacaccguucacgaucguacacccuauagaacucugcuuaugaaugaacugggagugccuuuucauuugggcaccaaacaggucuguaucgcuuggagcaguuccucuugccacgacgguaaggccuggcuccauguguguguaacagggcacgauaaaaacgcaaccgccagcuucauuuacaauggaaggcugguugacuccaucggcucauggaguaagaacauccugcggacgcaggagagcgaaugcguguguauuaauggcacuugcacagucgugaugaccgaugggucugcuuccgagcgcgcagacacuaaaauacucuuuaucgaggaaggaaagauugugcacaucucaccauuaagcgguagugcccaacaugucgaggaaugcucuuguuauccgagauaccccggcguuaggugcgugugucgggauaacuggaagggguccaaccgcccuauaguagacauuaaugugaaagauuacagcaucaucucgucuuaugucugcuccggacuggugggcgacacaccacgaaagaacgacagaucaaguagcuccuacugucagaaucccaacaaugagaaagguucucacgggguuaagggaugggcuuucgaugacggcaacgauguguggaugggcaggaccauuggggaggaacuucggagcggauaugagacguuuaaagucaucgguggcuggucaaccccuaauaguaaguugcagauuaaccgucaggugauaguagacuccgggaaucgcagcggauacucuggcaucuucucaguugaagguaaaaguugcauuaacagauguuuuuauguggagcugaucagggggcggaagcaagaaacacgagucugguggacuagcaauuccaucguggucuucugcggcaccucuggaacauacggcacugggucguggccagauggagccgacauuaaccuaaugcccauauga

SEQ ID NO: 150061 - RNA, 1410 nt, Artificial Sequence
  derived and/or modified CDS sequence (opt3) from neuraminidase__InfluenzaA__AFG99317
augaaccccaaucagaagaucauuaccauaggcagcgugucccugacaaucgccacuauuugcuuccucaugcaaaucgcuauucuugucacgaccguuacacugcacuuuaaacaguacgaguguucuucaccuccaaacaaucaggugaugccgugcgaacccacuaucauagagagaaacaucaccgaaauuguauauuugacaaauaccacuaucgagaaggaaauuuguccuaaauuaguggaguacaggaacuggaguaagccacagugcaauaucacaggguucgcacccuuuagcaaagacaacuccauacggcugucugccggaggugauauuugggucacccgcgagccuuaugugucgugugacccaggcaagugcuaccaauucgcgcuagggcagggaacgacucucaauaaccgacauucaaaugauaccguucacgaccguacacccuauagaacucugcuuaugaacgaacugggcgugccuuuucauuuggguaccaagcaggucuguaucgcuuggagcaguuccucuugccacgaugggaaagccuggcuccauguguguguaacaggacacgacgagaaugcaaccgccagcuucauuuacgauggcaggcugguugacuccaucggcucauggaguaagaacauccugcggacgcaggaaagcgagugcguguguauuaaugggacuugcacagucgugaugaccgauggaucugcuuccgagcgcgcagacacuaaaauacucuuuaucgaagaggguaagauugugcacaucucaccauuaagcggcagugcccaacaugucgaagagugcucuuguuauccgagauaccccgggguuaggugcgugugucgggauaacuggaaaggauccaaccgcccuauaguagacauuaaugugaaggauuacagcaucgucucgucuuaugugugcuccggccugguuggugacacaccacgaaagaacgacagaucaaguagcuccuacuguaggaaucccaacaaugaaaaagggucucacggagugaagggcugggcuuucgaugacggcaacgaugucuggauggggcggaccaucgacgaggagcuucguagcggauaugaaacguuuaaagugauugguggcuggucaaccccuaauaguaaguugcagaucaaccgccagguaauuguugauuccgggaauagaagcggauacucuggcauauucucaguggaggguaaaaguugcaucaacagguguuuuuaugucgaacugauucgggggcgaaagcaggagacacgcgugugguggacuagcaauuccaucgucguguucugcggcaccucuggaacauacggcacugggucguggccagacggagccgauaucaaccuaaugcccauuuga

SEQ ID NO: 150062 - RNA, 1410 nt, Artificial Sequence
  derived and/or modified CDS sequence (opt3) from neuraminidase__InfluenzaA__AFG99328
augaaccccaaucagaagaucauuaccauaggcagcgugucccugacacucgccacuaucugcuuccuuaugcaaauugcuauccuggucacgaccguuacauugcacuuuaaacaguacgaguguucuucaccuccaaacaaucaggugaugccgugcgaacccacuauuaucgagagaaacauaaccgaaaucguauauuuaacaaauaccacuauugagaaggaaaucuguccuaaacugguggaguacaggaacuggaguaagccacagugcaaaauuacaggguucgcacccuuuagcaaggacaauuccauccggcuaucugccggaggugauauaugggucacccgcgagccuuaugugucgugugacccaucaaagugcuaccaauucgcgcucggccaggggacgacucugaacaaucgacauagcaacgauaccguucacgaccguacacccuauagaacucuucugaugaaugaauugggagugccuuuucaucucggcaccaggcaggucuguauggcuuggaguuccucuagcugccacgaugguaaagccuggcugcauguguguguaacagggcacgacgagaacgcaaccgccuccuucauuuacgauggacggcugguugacucaaucggcaguuggagcaagaaugugcuccgcacgcaggaaucugagugcgucuguauuaacggcacuugcacaguggugaugaccgauggguccgcuucagagagagcagacacuaaaaucuuauuuaucgaagagggaaagauuguccacauaagcccacugagugguaaugcccaacauguugaagagugcucuuguuauccgagguaccccggcgugcggugcguaugucgcgauaacuggaaaggguccaaccgaccuaucguggacauuaaugucaaggauuacagcaucgugucgucuuauguuugcuccggacuugugggcgacacaccaagaaagaacgacaggucaaguagcuccuacugucggaaucccaacaaugaaaaagguucucacggggucaagggaugggcuuucgaugacggcaacgauguguggaugggccguaccauaggggaggaguugcgcagcggauaugaaacguuuaaaguaauugguggcuggucaaccccuaauaguaagcugcagaucaacagacagguuaucguggacuccgggaauaggagcggauacucuggcauuuucucagucgaggguaaaaguugcaucaaccgguguuuuuauguggaacuaauucgagggcgcaagcaggagacaagagucugguggacuagcaauuccauagugguuuucugcggcaccucuggaacauacggcacugggucguggccagauggagccgacaucaaccucaugcccauuuga

SEQ ID NO: 150063 - RNA, 1410 nt, Artificial Sequence
  derived and/or modified CDS sequence (opt3) from neuraminidase__InfluenzaA__AFG99350
augaaccccaaucagaagaucauuaccauaggcagcgugucccugacacucgccacuaucugcuuccuuaugcaaauugcuauccuggucacgaccguuacauugcacuuuaaacaguacgaguguucuucaccuccaaacaaucaggugaugccgugcgaacccacuauuaucgagagaaacauaaccgaaaucguauauuuaacaaauaccacuauugagaaggaaaucuguccuaaacugguggaguacaggaacuggaguaagccacagugcaaaauuacaggguucgcacccuuuagcaaggacaauuccauccggcuaucugccggaggugauauaugggucacccgcgagccuuaugugucgugugacccaucaaagugcuaccaauucgcgcucggccaggggacgacucugaacaaucgacauagcaacgauaccguucacgaccguacacccuauagaacucuucugaugaaugaauugggagugccuuuucaucucggcaccaggcaggucuguauggcuuggaguuccucuagcugccacgaugguaaagccuggcugcauguguguguaacagggcacgacgagaacgcaaccgccuccuucauuuacgauggacggcugguugacucaaucggcaguuggagcaagaauauucuccgcacgcaggaaucugagugcguguguaucaacggcacuugcacagucgugaugaccgauggguccgcuucagagagagcagacacuaaaaucuuauuuauugaagagggaaagauagugcacaucagcccacugagugguucugcccaacaugucgaagagugcuccuguuauccgagguaccccggcguucggugcgugugucgcgauaauuggaaagggagcaaccgaccuauuguagacaucaacgugaaggauuacucgauagucucuuccuaugugugcucaggacuuguuggcgacacaccaagaaagaaugacaggaguagcuccucuuacugucggaaccccaauaacgaaaaagguagccacggggugaagggaugggcuuucgaugacggcaaugaugucuggaugggccguaccauuggggaggaguugcgcucaggauaugaaacguuuaaagugaucgguggcuggaguaccccuaacuccaagcugcagaucaauagacagguaauuguugacagcgggaacaggucuggauacucaggcaucuucaguguggaggguaaaagcugcauuaaucgguguuuuuaugucgaacuaauacgagggcgcaagcaggagacaagagugugguggacuuccaacucuaucgucguguucugcggcaccucgggaacauacggcacugggagcuggccagauggagccgacauuaaucucaugcccaucuga

SEQ ID NO: 150064 - RNA, 1410 nt, Artificial Sequence
  derived and/or modified CDS sequence (opt3) from neuraminidase__InfluenzaA__AFG99361
augaaccccaaucagaagaucauuaccauaggcagcgugucccugacaaucgccacuauuugcuuccucaugcaaaucgcuauucuugucacgaccguuacacugcacuuuaaacaguacgaguguaacucuccuccaaauaaccaggugauguugugcgaaccgacuaucauagagagaaauaucaccgaaauuguauauuuaacaaacaccacuaucgagaaggaaaaaugucccaagcuggcagaguacaggaauuggucaaaaccucagugcaagauuacaggguucgccccauuuaguaaggacaacagcauccggcuauccgcgggaggugauauaugggugacccgcgagcccuaugucucuugugacccuggcaaaugcuaccaauucgcucucgggcagggaacgacucugaauaaccgacauucgaaugauaccgugcacgaccguacaccauauagaacucuucugaugaacgaauugggcguucccuuucaucucgguaccaaacagguguguauugccuggucaagcaguuccugccacgaugggaaggcauggcugcaugucugugugacaggacacgacgagaaugccaccgcuucuuucaucuacgauggcaggcugguagacagcauuggcuccuggucaaagaacauccuccggacgcaggaaagugagugcguuuguaucaaugggacuugcacaguggucaugaccgauggaagcgcaucugagcgcgccgacacuaaaauuuuauuuauagaagaggguaagaucgugcacauuuccccucugucaggcagcgcucaacauguggaagagugcaguuguuauccaagauacccgggggucaggugcguuugucgggauaacuggaagggaucuaaccgccccaucguggacauaaauguaaaagauuacuccauugugagcucguaugucugcucuggccuugugggugacacaccucgaaagaacgacuccucaaguagcuccuacuguagaaauccaaacaaugaaaaagggucucacggaguuaagggcugggccuucgaugacggcaacgauguguggauggggaggaccaucagcgaggaguugcggucaggauaugaaacguuuaaagucaucgguggcuggaguaagcccaauuccaaacugcagauuaaccgucaggugaucguagaccgcgggaauagaagcggauacucuggcauuuucucaguugaggguaagaguugcauaaacagguguuuuuauguggaacuaauccgggggcgaaagcaggagaccgaagucugguggacaagcaauuccauuguggucuucugcggcacuucuggaaccuacggcacagggucguggccugauggagcggacaucaaccucaugccaaucuga

SEQ ID NO: 150065 - RNA, 1410 nt, Artificial Sequence
  derived and/or modified CDS sequence (opt3) from neuraminidase__InfluenzaA__AFG99383
augaaccccaaucagaagaucauuaccauaggcagcgugucccugacaaucgccacuauuugcuuccucaugcaaaucgcuauucuugucacgaccguuacacugcacuuuaaacaguacgaguguucuucaccuccaaacaaucaggugaugccgugcgaacccacuaucauagagagaaacaucaccgaaauuguauauuugacaaauaccacuaucgagaaggaaauuuguccuaaauuaguggaguacaggaacuggaguaagccacagugcaaaaucacaggguucgcacccuuuagcaaggacaauuccauacggcugucugccggaggugauauuugggucacccgcgagccuuaugugucgugugacccaggcaagugcuaccaauucgcgcuagggcagggaacgacucucaacaaucgacauucaaacgauaccguucacgaccguacacccuauagaacucugcuuaugaaugaacugggcgugccuuuucauuuggguaccaaacaggucuguaucgcuuggagcaguuccucuugccacgaugggaaggccuggcuccauguguguguaacaggacacgacgagaacgcaaccgccagcuucauuuacgauggcaggcugguugacuccaucggcucauggaguaaaaauauccugcggacgcaggaaagcgagugcguguguauuaacgggacuugcacagucgugaugaccgauggaucugcuuccgagcgcgcagacacuaagauacucuuuaucgaagaggguaaaauugugcacaucucaccauuaagcggcagugcccaacaugucgaagagugcucuuguuauccgagauaccccgggguuaggugcgugugucgggauaauuggaagggauccaaccgcccuauaguagacauuaacgugaaggauuacagcaucgucucgucuuaugugugcuccggccugguuggugacacaccacgaaagaaugacucaaguagcuccucuuacuguagaaaccccaauaacgaaaaggggagccacggagugaaaggcugggcuuucgaugacggcaaugaugucuggauggggaggaccaucggagaggagcuucggucagguuaugaaacguuuaaggugauuggcggguggaguaccccuaacuccaaauugcagaucaaucgucagguaauuguugacagcggaaaccgcucuggcuacucagguauauucaguguggaggggaaaagcugcaucaauagauguuuuuaugucgaacugauuaggggccggaaacaggagacaaaggugugguggacuuccaacucuaucgucguguucugcggaaccucgggcacauacgggacuggaagcuggccagauggugccgacaucaaucuaaugcccauuuga

SEQ ID NO: 150066 - RNA, 1410 nt, Artificial Sequence; identical to SEQ ID NO: 150065
  derived and/or modified CDS sequence (opt3) from neuraminidase__InfluenzaA__AFG99394

SEQ ID NO: 150067 - RNA, 1410 nt, Artificial Sequence
  derived and/or modified CDS sequence (opt3) from neuraminidase__InfluenzaA__AFG99405
augaaccccaaucagaagaucauuaccauaggcagcgugucccugacaaucgccacuauuugcuuccucaugcaaaucgcuauucuugucacgaccguuacacugcacuuuaaacaguacgaguguucuucaccuccaaacaaucaggugaugccgugcgaacccacuaucauagagagaaacaucaccgaaauuguauauuugacaaauaccacuaucgagaaggaaauuuguccuaaauuaguggaguacaggaacuggaguaagccacagugcaaaaucacaggguucgcacccuuuagcaaggacaauuccauacggcugucugccggaggugauauuugggucacccgcgagccuuaugugucgugugacccaggcaagugcuaccaauucgcgcuagggcagggaacgacucucaacaaucgacauucaaacgauaccguucacgaccguacacccuauagaacucugcuuaugaaugaacugggcgugccuuuucauuuggguaccaaacaggucuguaucgcuuggagcaguuccucuugccacgaugggaaggccuggcuccauguguguguaacaggacacgacaaaaacgcaaccgccagcuucauuuacgauggcaggcugguugacuccaucggcucauggaguaagaauauccugcggacgcaggagagcgaaugcguguguauuaacgggacuugcacagucgugaugaccgauggaucugcuuccgagcgcgcagacacuaaaauacucuuuaucgaggaagguaagauugugcacaucucaccauuaagcggcagugcccaacaugucgaggaaugcucuuguuauccgagauaccccgggguuaggugcgugugucgggauaauuggaagggauccaaccgcccuauaguagacauuaacgugaaagauuacagcaucaucucgucuuaugucugcuccggccuggugggugacacaccacgaaagaaugacagaucaaguagcuccuacuguaggaaccccaauaacgagaaagggucucacggaguuaagggcugggcuuucgaugacggcaaugauguguggauggggcggaccauuggagaggaacuucguagcgguuaugagacguuuaaagucaucggcggguggucaaccccuaacaguaaguugcagauuaaucgccaggugauaguagacuccggaaacagaagcggcuacucugguaucuucucaguugaagggaaaaguugcauuaauagguguuuuuauguggagcugauccggggccgagaacaggagacacgcgucugguggacuagcaacuccaucguggucuucugcggaaccucuggcacauacgggacuggaucguggccagauggugccgacauuaaucuaaugcccauauga

SEQ ID NO: 150068 - RNA, 1410 nt, Artificial Sequence
  derived and/or modified CDS sequence (opt3) from neuraminidase__InfluenzaA__AFG99416
augaaccccaaucagaagaucauuaccauaggcagcgugucccugacaaucgccacuauuugcuuccucaugcaaaucgcuauucuugucacgaccguuacacugcacuuuaaacaguacgaguguucuucaccuccaaacaaucaggugaugccgugcgaacccacuaucauagagagaaacaucaccgaaauuguauauuugacaaauaccacuaucgagaaggaaauuuguccuaaauuaguggaguacaggaacuggaguaagccacagugcaaaaucacaggguucgcacccuuuagcaaggacaauuccauacggcugucugccggaggugauauuugggucacccgcgagccuuaugugucgugugacccaggcaagugcuaccaauucgcgcuagggcagggaacgacucucaacaaucgacauucaaacgauaccguucacgaccguacacccuauagaacucugcuuaugaaugaacugggcgugccuuuucauuuggguaccaaacaggucuguaucgcuuggagcaguuccucuugccacgaugggaaggccuggcuccauguguguguaacaggacacgacgagaacgcaaccgccagcuucauuuacgauggcaggcugguugacuccaucggcucauggaguaaaaauauccugcggacgcaggaaagcgagugcguguguauuaacgggacuugcacagucgugaugaccgauggaucugcuuccgagcgcgcagacacuaagauacucuuuaucgaagaggguaaaauuauccacauaucaccauuaagcggcagugcccaacauguggaagagugcucuuguuauccgagauaccccggggucaggugcguuugucgggauaauuggaagggauccaaccgcccuauuguggacaucaacguaaaggauuacagcaucgugucgucuuaugucugcuccggccuggugggugacacaccacgaaagaaugacucaaguagcuccucuuacuguagaaaccccaauaacgaaaaagggagccacggaguuaaaggcugggcuuucgaugacggcaaugauguguggauggggaggaccauuggagaggagcuucggucagguuaugaaacguuuaaggucaucggcggguggaguaccccuaacuccaaauugcagauuaaucgucaggugauaguagacggaggcaaccgcagcgguuacucugggaucuucucaguugagggcaagaguugcauuaauagauguuuuuauguggaacugaucaggggacggaaacaggagacaaaggucugguggacuagcaacuccaucguggucuucugcggcaccucugggacauacggaacugguucguggccagauggcgccgacauuaaucuaaugcccauauga

SEQ ID NO: 150069 - RNA, 1410 nt, Artificial Sequence
  derived and/or modified CDS sequence (opt3) from neuraminidase__InfluenzaA__AFG99427
augaaccccaaucagaagaucauuaccauaggcagcgugucccugacaaucgccacuauuugcuuccucaugcaaaucgcuauucuugucacgaccguuacacugcacuuuaaacaguacgaguguucuucaccuccaaacaaucaggugaugccgugcgaacccacuaucauagagagaaacaucaccgaaauuguauauuugacaaauaccacuaucgagaaggaaguguguccuaaauuagucgaguacaggaacuggaguaagccacagugcaaaauuacaggguucgcacccuuuagcaaggacaauuccauccggcugucugccggaggugauauaugggugacccgcgagccuuauguuucgugugacccaggcaagugcuaccaauucgcgcuagggcagggaacgacucucaacaaucgacauucaaacgauaccgugcacgaccguacacccuauagaacucugcuuaugaaugaacugggcgucccuuuucauuuggguaccaaacagguguguauugcuuggagcaguuccucuugccacgaugggaaggccuggcuccauguauguguuacaggacacgacgagaacgcaaccgccagcuucaucuacgauggcaggcugguggacuccauuggcucauggaguaaaaauauccugcggacgcaggaaagcgagugcgucuguaucaacgggacuugcacaguggugaugaccgauggaucugcuuccgagcgcgcagacacuaagauucucuuuauagaagaggguaaaaucauucacaucucaccauuaagcggcagugcccaacaugucgaagagugcucuuguuauccgagauaccccgggguuaggugcgugugucgggauaauuggaagggauccaaccgcccuauaguagacauuaacgugaaggauuacagcaucgucucgucuuaugugugcuccggccugguuggugacacaccacgaaagaaugacucaaguagcuccucuuacuguagaaaccccaauaacgaaaaggggagccacggagugaaaggcugggcuuucgaugacggcaaugaugucuggauggggaggaccaucggagaggagcuucggucagguuaugaaacguuuaaggugauuggcggguggaguaccccuaacuccaaauugcagaucaaucgucagguaauuguugacagcggaaaccgcucuggcuacucagguauauucaguguggaggggaaaagcugcaucaauagauguuuuuaugucgaacugauuaggggccggaaacaggagacaaaggugugguggacuuccaacucuaucgucguguucugcggaaccucgggcacauacgggacuggaagcuggccagauggugccgacaucaaucuaaugcccauuuga

SEQ ID NO: 150070 - RNA, 1410 nt, Artificial Sequence
  derived and/or modified CDS sequence (opt3) from neuraminidase__InfluenzaA__AFG99438
augaaccccaaucagaagaucauuaccauaggcagcgugucccugacaaucgccacuauuugcuuccucaugcaaaucgcuauucuugucacgaccguuacacugcacuuuagacaguacgaguguucuucaccuccaaacaaucaggugaugccgugcgaacccacuaucauagagaggaacaucaccgaaauuguauauuugacaaauaccacuaucgagaaagaaauuuguccuaaguuaguggaguaccggaacuggaguaaaccacagugcaagaucacaggguucgcacccuuuagcaaagacaauuccauacgccugucugccggaggugauauuugggucacccgagagccuuaugugucgugugacccaggcaagugcuaccaauucgcgcuagggcagggaacgacucucaacaaucgucauucaaacgauaccguucacgacagaacacccuauaggacucugcuuaugaaugaacugggcgugccuuuucauuuggguaccaagcaggucuguauggcuuggagcaguuccucuugccacgaugggaaagccuggcuccauguguguguaacaggacacgacgagaacgcaaccgccagcuucaucuacgauggccggcugguugacuccauuggcucauggaguaagaauauccugcgcacgcaggaaagcgagugcguguguaucaacgggacuugcacagucgugaugaccgauggaucugcuuccgagagagcagacacuaaaauucucuuuauagaagaggguaagaucgugcacauuucaccauuaagcggcagugcccaacaugucgaagagugcucuuguuauccgagguaccccgggguucggugcgugugucgcgauaauuggaaaggauccaaccgaccuaucguagacauaaacgugaaggauuacagcauugucucgucuuaugugugcuccggccugguuggugacacaccaagaaagaaugacaggucaaguagcuccuacugucggaaccccaauaacgaaaaagggucucacggagugaagggcugggcuuucgaugacggcaaugaugucuggauggggcguaccaucggagaggagcuucgcagcgguuaugaaacguuuaaagugaucggcggguggucaaccccuaacaguaaguugcagauuaauagacagguaaucguugacuccggaaacaggagcggcuacucugguauuuucucaguggaggggaaaaguugcauaaaucgguguuuuuaugucgaacugauccgaggccgcaagcaggagacaagagugugguggacuagcaacuccauugucguguucugcggaaccucuggcacauacgggacuggaucguggccagauggugccgacaucaaucuaaugcccaucuga

SEQ ID NO: 150071 - RNA, 1410 nt, Artificial Sequence
  derived and/or modified CDS sequence (opt3) from neuraminidase__InfluenzaA__AFG99449
augaaccccaaucagaagaucauuaccauaggcagcgugucccugacaaucgccacuauuugcuuccucaugcaaaucgcuauucuugucacgaccguuacacugcacuuuagacaguacgaguguucuucaccuccaaacaaucaggugaugccgugcgaacccacuaucauagagaggaacaucaccgaaauuguauauuugacaaauaccacuaucgagaaagaaauuuguccuaaguuaguggaguaccggaacuggaguaaaccacagugcaagaucacaggguucgcacccuuuagcaaagacaauuccauacgccugucugccggaggugauauuugggucacccgagagccuuaugugucgugugacccaggcaagugcuaccaauucgcgcuagggcagggaacgacucucaacaaucgucauucaaacgauaccguucacgacagaacacccuauaggacucugcuuaugaaugaacugggcgugccuuuucauuuggguaccaagcaggucuguauggcuuggagcaguuccucuugccacgaugggaaagccuggcuccauguguguguaacaggacacgacgagaacgcaaccgccagcuucaucuacgauggccggcugguugacuccauuggcucauggaguaagaauauccugcgcacgcaggaaagcgagugcguguguaucaacgggacuugcacagucgugaugaccgauggaucugcuuccgagagagcagacacuaaaauucucuuuauagaagaggguaagaucgugcacauuucaccauuaagcggcagugcccaacaugucgaagagugcucuuguuauccgagguaccccgggguucggugcgugugucgcgauaauuggaaaggauccaaccgaccuaucguagacauaaacgugaaggauuacagcauugucucgucuuaugugugcuccggccugguuggugacacaccaagaaagaaugacaggucaaguagcuccuacugucggaaccccaauaacgaaaaagggucucacggagugaagggcugggcuuucgaugacggcaaugaugucuggauggggcguaccaucggagaggagcuucgcagcgguuaugaaacguuuaaagugaucggcggguggucaaccccuaacaguaaguugcagauuaauagacagguaaucguugacuccggaaacaggagcggcuacucugguauuuucucaguggaggggaaaaauugcauaaaccgguguuuuuaugucgaacugauccgaggccgcaagcaggagacaagagugugguggaccaguaauagcauugucguguucugcggaacuuccggcacauacgggacuggaucuuggccagauggugccgacaucaaccuaaugcccaucuga

SEQ ID NO: 150072 - RNA, 1410 nt, Artificial Sequence
  derived and/or modified CDS sequence (opt3) from neuraminidase__InfluenzaA__AFG99471
augaaccccaaucagaagaucauuaccauaggcagcgugucccugauccucgccacaauuugcuuccuuaugcaaaucgcuauucuggucacuacgguuaccuugcacuuuaaacaguacgaguguucuucaccuccaaacaaucaggugaugccgugcgaacccacaaucauagagagaaacaucacugaaauuguauauuuaaccaauacaaccaucgagaaggaaauuuguccuaaacugguggaguacaggaacuggaguaagccacagugcaaaaucacuggguucgcacccuuuagcaaggacaauuccauacggcuaucugccggaggugauauuugggucacacgcgagccuuaugugucgugugacccaggcaagugcuaccaauucgcgcucgggcagggaaccacgcugaacaaucgacauucaaacgauacuguucacgaccguaaucccuauagaacccuucugaugaacgaauugggcgugccuuuucaucucgguacaaggcaggucuguauggcuuggagcaguuccucuugccacgaugggaaagccuggcugcauguguguguaacuggacacgacgagaaugcaaccgccagcuucaucuacgauggccggcugguugacuccauuggcucauggaguaagaacauccuccgcacacaggaaagcgagugcguguguaucaaugggaccugcacggucgugaugacugauggaucugcuuccgagagagcagacacaaaaauuuuauuuauagaagaggguaagaucgugcacauuucaccacugagcggcagugcccaacaugucgaagagugcucuuguuauccgagguaccccgggguucggugcgugugucgcgauaacuggaaaggauccaaccgaccuaucguagacauaaaugugaaggauuacagcauugucucgucuuaugugugcuccggccuuguuggugacaccccaagaaagaacgacaggucaaguagcuccuacugucggaaucccaacaaugaaaaagggucucacggagugaagggcugggcuuucgaugacggcaacgaugucuggauggggcguacuaucggagaggaguugcgcagcgguuaugaaacauuuaaagugaucggcggguggucaaccccuaauaguaagcugcagauuaacagacagguaaucguugacuccggaaauaggagcggcuacucugguauuuucucaguggaggggaaaaguugcauaaaccgguguuuuuaugucgaacuaauccgaggccgcaagcaggagacgagagugugguggaccagcaauuccauugucguguucugcggaacaucuggcacuuacgggaccggaucguggccagauggugccgacaucaaccucaugcccaucuga

SEQ ID NO: 150073 - RNA, 1410 nt, Artificial Sequence
  derived and/or modified CDS sequence (opt3) from neuraminidase__InfluenzaA__AFG99482
augaaccccaaucagaagaucauuaccauaggcagcgugucccugacaaucgccacuauuugcuuccucaugcaaaucgcuauucuugucacgaccguuacacugcacuuuaaacaguacgaguguaacucuccuccaaauaaccaggugaugccgugcgaacccacuaucauagagagaaauaucaccgaaauuguauauuugacaaacaccacuaucgagaaggaaauuuguccuaaauuaguggaguacaggaauuggucaaagccacagugcaaaaucacaggguucgcacccuuuaguaaggacaacagcauacggcuguccgccggaggugauauuugggucacccgcgagccuuaugugucuugugacccaggcaagugcuaccaauucgcgcuagggcagggaacgacucucaauaaccgacauucgaaugauaccguucacgaccguacacccuauagaacucugcuuaugaacgaacugggcgugccuuuucauuuggguaccaaacaggucuguaucgcuuggucaagcaguuccugccacgaugggaaggccuggcuccauguguguguaacaggacacgacgagaaugcaaccgccucuuucauuuacgauggcaggcugguugacagcaucggcuccuggaguaaaaacauccugcggacgcaggaaucagagugcguguguauuaaugggacuugcacagucgugaugaccgauggaagcgcuucuggucgcgcagacacuaagauacucuuuaucgaggaaggcaaaauugugcacaucuccccauuaucagggagcgcccaacaugucgaggaaugcaguuguuauccgagauaccccggaguuaggugcgugugucgggauaacuggaagggcucuaaccgcccuauaguagacauuaaugugaaggauuacuccaucgucagcucguaugugugcucuggucugguuggggacacaccacgaaagaacgacuccucaaguagcuccuacuguagaaaucccaacaaugagaaaggaucucacggcgugaaaggcugggcuuucgaugacgggaacgaugucuggaugggaaggaccaucggugaggaacuucggagcggcuaugagacguuuaaggugauugggggauggucaaccccuaauaguaaauugcagaucaaccgucagguaauuguugaccgcggcaauagauccgguuacagcgggauauucucuguggaaggcaagaacugcaucaauagguguuuuuaugucgagcugauucggggacgaaaacaggaaacaaaggugugguggacuucaaacaguaucgucguguucugcggcaccagcgggacauacggaacugguuccuggccagauggcgccgacaucaaucuaaugucuauuuga

SEQ ID NO: 150074 - RNA, 1410 nt, Artificial Sequence
  derived and/or modified CDS sequence (opt3) from neuraminidase__InfluenzaA__AFG99493
augaaccccaaucagaagaucauuaccauaggcagcgugucccugacaaucgccacuauuugcuuccucaugcaaaucgcuauucuugucacgaccguuacacugcacuuuaaacaguacgaguguaacucuccuccaaauaaccaggugaugccgugcgaacccacuaucauagagagaaauaucaccgaaauuguauauuugacaaacaccacuaucgagaaggaaauuuguccuaaauuaguggaguacaggaauuggucaaagccacagugcaaaaucacaggguucgcacccuuuaguaaggacaacagcauacggcuguccgccggaggugauauuugggucacccgcgagccuuaugugucuugugacccaggcaagugcuaccaauucgcgcuagggcagggaacgacucucaauaaccgacauucgaaugauaccguucacgaccguacacccuauagaacucugcuuaugaacgaacugggcgugccuuuucauuuggguaccaaacaggucuguaucgcuuggucaagcaguuccugccacgaugggaaggccuggcuccauguguguguaacaggacacgacgagaaugcaaccgccucuuucauuuacgauggcaggcugguugacagcaucggcuccuggaguaaaaacauccugcggacgcaggaaagugagugcguguguauuaaugggacuugcacagucgugaugaccgauggaagcgcuucuggucgcgcagacacuaagauacucuuuaucgaggaaggcaaaauugugcacaucuccccauuaucagggagcgcccaacaugucgaggaaugcaguuguuauccgagauaccccggaguuaggugcgugugucgggauaacuggaagggcucuaaccgcccuauaguagacauuaaugugaaggauuacuccaucgucagcucguaugugugcucuggucugguuggggacacaccacgaaagaacgacuccucaaguagcuccuacuguagaaaucccaacaaugagaaaggaucucacggcgugaaaggcugggcuuucgaugacgggaacgaugucuggaugggaaggaccaucggugaggaacuucggagcggcuaugagacguuuaaggugauugggggauggucaaccccuaauaguaaauugcagaucaaccgucagguaauuguugaccgcggcaauagauccgguuacagcgggauauucucuguggaaggcaagucaugcaucaacagguguuuuuaugucgagcugauucggggacgaaaacaggaaacaaaggugugguggacuucaaauagcaucgucguguucugcggcaccuccgggacauacggaacugguucuuggccagauggcgccgacaucaaccuaaugcccauuuga

SEQ ID NO: 150075 - RNA, 1410 nt, Artificial Sequence
  derived and/or modified CDS sequence (opt3) from neuraminidase__InfluenzaA__AFG99504
augaaccccaaucagaagaucauuaccauaggcagcgugucccugacaaucgccacuauuugcuuccucaugcaaaucgcuauucuugucacgaccguuacacugcacuuuaaacaguacgaguguucuucaccuccaaacaaucaggugaugccgugcgaacccacuaucauagagagaaacaucaccgaaauuguauauuugacaaauaccacuaucgagaaggaaauuuguccuaaauuaguggaguacaggaacuggaguaagccacagugcaaaaucacaggguucgcacccuuuagcaaggacaauuccauacggcugucugccggaggugauauuugggucacccgcgagccuuaugugucgugugacccaggcaagugcuaccaauucgcgcuagggcagggaacgacucucaacaaucgacauucaaacgauaccguucacgaccguacacccuauagaacucugcuuaugaaugaacugggcgugccuuuucauuuggguaccaaacaggucuguaucgcuuggagcaguuccucuugccacgaugggaaggccuggcuccauguguguguaacaggacacgacgagaacgcaaccgccagcuucauuuacgauggcaggcugguugacuccaucggcucauggaguaaaaauauccugcggacgcaggaaagcgagugcguguguauuaacgggacuugcacagucgugaugaccgauggaucugcuuccgagcgcgcagacacuaagauacucuuuaucgaagaggguaaaauugugcacaucucaccauuaagcggcagugcccaacaugucgaagagugcucuuguuauccgagauaccccgggguuaggugcgugugucgggauaauuggaagggauccaaccgcccuauaguagacauuaacgugaaggauuacagcaucgucucgucuuaugugugcuccggccugguuggugacacaccacgaaagaaugacagaucaaguagcuccuacuguaggaaccccaauaacgaaaaagggucucacggagugaaaggcugggcuuucgaugacggcaaugaugucuggauggggcggaccaucggagaggagcuucguagcgguuaugaaacguuuaaggugauuggcggguggucaaccccuaacaguaaauugcagaucaaucgccagguaauuguugacuccggaaacagaagcggcuacucugguauauucucaguggaggggaagaguugcaucaauagguguuuuuaugucgaacugauucggggccgaaaacaggagacacgcgugugguggacuagcaacuccaucgucguguucugcggaaccucuggcacauacgggacuggaucguggccagauggugccgacaucaaucuaaugcccauuuga

SEQ ID NO: 150076 - RNA, 1410 nt, Artificial Sequence
  derived and/or modified CDS sequence (opt3) from neuraminidase__InfluenzaA__AFG99515
augaaccccaaucagaagaucauuaccauaggcagcgugucccugacaaucgccacuauuugcuuccucaugcaaaucgcuauucuugucacgaccguuacacugcacuuuaaacaguacgaguguaacucuccuccaaauaaccaggugauguugugcgaaccgacuaucauagagagaaauaucaccgaaauuguauauuuaacaaacaccacuaucgagaaggaaauuugucccaaacuggcagaguacaggaauuggucaaagccucagugcaaaaucacaggguucgccccauuuaguaaggacaacagcauacggcuauccgcgggaggugauauuugggugacccgcgagcccuaugucucuugugacccuggcaagugcuaccaauucgcucucgggcagggaacgacucugaauaaccgacauucgaaugauaccgugcacgaccguacaccauauagaacucuucugaugaacgaauugggcguucccuuucaucucgguaccaaacagguguguaucgccuggucaagcaguuccugccacgaugggaaggcauggcugcaugucugugugacaggacacgacgagaaugccaccgcuucuuucauuuacgauggcaggcugguagacagcaucggcuccuggaguaaaaacauccuccggacgcaggaaagugagugcguuuguauuaaugggacuugcacaguggucaugaccgauggaagcgcaucugagcgcgccgacacuaagauauuauuuaucgaagaggguaaaauugugcacaucuccccucugucaggcagcgcucaacauguggaagagugcaguuguuauccaagauacccgggggucaggugcguuugucgggauaacuggaagggaucuaaccgccccauaguggacauuaauguaaaggauuacuccaucgugagcucguaugucugcucuggccuugugggugacacaccucgaaagaacgacuccucaaguagcuccuacuguagaaauccaaacaaugaaaaagggucucacggaguuaaaggcugggccuucgaugacggcaacgauguguggauggggaggaccaucggagaggaguugcggagcgguuaugaaacguuuaaggucauuggcggguggucaacccccaauaguaaacugcagaucaaccgucaggugauuguagaccgcggaaauagauccggcuacagcgguauauucucuguugaggggaagucaugcaucaacagguguuuuuauguggaacuaauucggggccgaaaacaggagacagaagucugguggacuucaaauagcaucguggucuucugcggaaccuccggcacauacgggacuggaucuuggccugauggugcggacaucaaccucaugccaauuuga

SEQ ID NO: 150077 - RNA, 1410 nt, Artificial Sequence
  derived and/or modified CDS sequence (opt3) from neuraminidase__InfluenzaA__AFG99526
augaaccccaaucagaagaucauuaccauaggcagcgugucccugacacucgccacuaucugcuuccuuaugcaaauugcuauccuggucacgaccguuacauugcacuuuaaacaguacgaguguucuucaccuccaaacaaucaggugaugccgugcgaacccacuauuaucgagagaaacauaaccgaaaucguauauuuaacaaauaccacuauugagaaggaaguguguccuaaacuggucgaguacaggaacuggaguaagccacagugcaaaaucacaggguucgcacccuuuagcaaggacaauuccauucggcuaucugccggaggugauaucugggugacccgcgagccuuauguuucgugugacccaggcaagugcuaccaauucgcgcucgggcagggaacgacucugaacaaucgacauucaaacgauaccgugcacgaccguacacccuauagaacucuucugaugaaugaauugggcgucccuuuucaucucgguaccaggcaaguguguauggcuuggagcaguuccucuugccacgaugggaaagccuggcugcauguauguguuacaggacacgacgagaacgcaaccgccagcuucauauacgauggccggcugguggacuccauuggcucauggaguaagaauauccuccgcacgcaggaaagcgagugcgucuguauuaacgggacuugcacaguggugaugaccgauggaucugcuuccgguagagcagacacuaaaaucuuauuuaucgaggaaggcaagauuguccacauaucaccacugagcgggagugcccagcauguugaggaaugcucuuguuauccgagguaccccggagugcggugcguaugucgcgauaauuggaaaggcuccaaccgaccuaucguggacauuaacgucaaggauuacagcaucgugucgucuuauguuugcuccggucuugugggggacacaccaagaaagaaugacaggucaaguagcuccuacugucggaaccccaauaacgagaaaggaucucacggcgucaagggcugggcuuucgaugacgggaaugauguguggaugggacguaccauaggugaagaguugcgcagcggcuaugagacguuuaaaguaauugggggauggucaaccccuaacaguaagcugcagaucaauagacagguuaucguggacuccggcaacaggagcgguuacucugggauuuucucagucgaaggcaaaaguugcaucaaucgguguuuuuauguggagcuaauucgaggacgcaagcaggaaacaagagucugguggacuagcaacuccauagugguuuucugcggcaccucugggacauacggaacugguucguggccagauggcgccgacaucaaucucaugcccauuuga

SEQ ID NO: 150078 - RNA, 1410 nt, Artificial Sequence; identical to SEQ ID NO: 149974
  derived and/or modified CDS sequence (opt3) from neuraminidase__InfluenzaA__AFG99537

SEQ ID NO: 150079 - RNA, 1410 nt, Artificial Sequence; identical to SEQ ID NO: 149974
  derived and/or modified CDS sequence (opt3) from neuraminidase__InfluenzaA__AFG99548

SEQ ID NO: 150080 - RNA, 1410 nt, Artificial Sequence; identical to SEQ ID NO: 149974
  derived and/or modified CDS sequence (opt3) from neuraminidase__InfluenzaA__AFG99559

SEQ ID NO: 150081 - RNA, 1410 nt, Artificial Sequence; identical to SEQ ID NO: 149974
  derived and/or modified CDS sequence (opt3) from neuraminidase__InfluenzaA__AFG99570

SEQ ID NO: 150082 - RNA, 1410 nt, Artificial Sequence; identical to SEQ ID NO: 149974
  derived and/or modified CDS sequence (opt3) from neuraminidase__InfluenzaA__AFG99581

SEQ ID NO: 150083 - RNA, 1410 nt, Artificial Sequence
  derived and/or modified CDS sequence (opt3) from neuraminidase__InfluenzaA__AFG99592
augaaccccaaucagaagaucauuaccauaggcagcgugucccugacaaucgccacuacgugcuuccucaugcaaauugcuauccuugucaccacaguuacucugcacuuuaaacaguacgaguguaacucuccuccaaauaaccaggugaugccgugcgaacccaccauuaucgagagaaauauaacagaaaucguauauuugaccaacacuacaauugagaaggaaaucuguccuaaauuaguggaguacaggaauuggucaaagccacagugcaaaauuaccggguucgcacccuuuaguaaggacaacagcauccggcuguccgccggaggugauauaugggucacgcgcgagccuuaugugucuugugacccaggcaagugcuaccaauucgcgcuagggcagggaacuacccucaauaaccgacauucgaaugauacaguucacgaccguacucccuauagaacccugcuuaugaacgaacugggcgugccuuuucauuuggguacaaaacaggucuguauugcuuggucaagcaguuccugccacgaugggaaggccuggcuccauguguguguaaccggacacgacgagaaugcaacggccucuuucaucuacgauggcaggcugguugacagcauuguguccuggaguaaaaacauccugcggacucaggaaucagagugcgucuguaucaauggcacaugcaccguggugaugacugaugggagcgcuucugagcgcgcagacacaaagauucucuuuauagaagagggaaaaaucguccacauuuccccauuaucagguagcgcccaacauguugaagagugcaguuguuauccgagauaccccggcgugaggugcguaugucgggauaacuggaaggggucuaaccgcccuaucguggacauaaaugucaaggauuacuccauugugagcucguauguuugcucuggacuggugggcgacaccccacgaaagaacgacuccucaaguagcuccuacuguagaaaucccaacaaugaaaaagguucucacggggucaaaggaugggcuuucgaugacggcaacgauguguggaugggcaggacgaucggggaggagcuucggagcggauaugaaaccuuuaagguaaucgguggcuggucaacaccuaauaguaaauugcagacuaaccgucagguuauuguggaccgcgggaauagauccggauacagcggcaucuucucugucgaggguaagucaugcauuaacagguguuuuuauguggaacugauacgggggcgaaaacaggagaccaaggucugguggacaaguaauagcaucgugguuuucugcggcacuuccggaaccuacggcacagggucuuggccagauggagccgacauuaaccuaaugcccaucuga

SEQ ID NO: 150084 - RNA, 1410 nt, Artificial Sequence; identical to SEQ ID NO: 149974
  derived and/or modified CDS sequence (opt3) from neuraminidase__InfluenzaA__AFG99603

SEQ ID NO: 150085 - RNA, 1410 nt, Artificial Sequence; identical to SEQ ID NO: 149974
  derived and/or modified CDS sequence (opt3) from neuraminidase__InfluenzaA__AFG99614

SEQ ID NO: 150086 - RNA, 1410 nt, Artificial Sequence; identical to SEQ ID NO: 149974
  derived and/or modified CDS sequence (opt3) from neuraminidase__InfluenzaA__AFG99625

SEQ ID NO: 150087 - RNA, 1410 nt, Artificial Sequence
  derived and/or modified CDS sequence (opt3) from neuraminidase__InfluenzaA__AFG99636
augaaccccaaucagaagaucauuaccauaggcagcgugucccugacaaucgccacuauuugcuuccucaugcaaaucgcuauucuugucacgaccguuacacugcacuuuaaacaguacgaguguaacucuccuccaaauaaccaggugauguugugcgaaccgacuaucauagagagaaauaucaccgaaauuguauauuuaacaaacaccacuaucgagaaggaaauuugucccaaacuggcagaguacaggaauuggucaaagccucagugcaaaaucacaggguucgccccauuuaguaaggacaacagcauacggcuauccgcgggaggugauauuugggugacccgcgagcccuaugucucuugugacccuggcaagugcuaccaauucgcucucgggcagggaacgacucugaauaaccgacauucgaaugauaccgugcacgaccguacaccauauagaacucuucugaugaacgaauugggcguucccuuucaucucgguaccaaacagguguguaucgccuggucaagcaguuccugccacgaugggaaggcauggcugcaugucugugugacaggacacgacgagaaugccaccgcuucuuucauuuacgauggcaggcugguagacagcaucguuuccuggaguaaaaacauccuccggacgcaggaaucagagugcguguguauuaauggcacuugcacagucgugaugaccgaugggagcgcaucugagcgcgccgacacuaagauauuauuuaucgaagagggaaaaauugugcacaucuccccucugucagguagcgcucaacaugucgaagagugcaguuguuauccaagauacccgggcguuaggugcgugugucgggauaacuggaaggggucuaaccgccccauaguagacauuaaugugaaggauuacuccaucgucagcucguaugugugcucuggacuuguuggcgacacaccucgaaagaacgacuccucaaguagcuccuacuguagaaauccaaacaaugaaaaagguucucacggggugaaaggaugggccuucgaugacggcaacgaugucuggaugggcaggaccaucggggaggacuugcggagcggauaugagacguuuaaggugauugguggcuggucaacccccaauaguaaacugcagacaaaccgucagguaaucguugaucgcgggaauagauccggauacagcggcauuuucucuguggaagguaagucaugcauaaacagguguuuuuaugucgagcuaauccgggggcgaaaacaggaaacuaaggugugguggaccaguaauagcauugucguguucugcggcacauccggaacuuacggcaccgggucuuggccugacggagcggauaucaaccucaugccaaucuga

SEQ ID NO: 150088 - RNA, 1410 nt, Artificial Sequence
  derived and/or modified CDS sequence (opt3) from neuraminidase__InfluenzaA__AFG99658
augaaccccaaucagaagaucauuaccauaggcagcgugucccugacaaucgccacuauuugcuuccucaugcaaaucacgauucuugucaccacaguuacucugcacuuuaaacaguacgaguguaacucuccuccaaauaaccaggugauguugugcgaaccgaccaucauagagagaaauaucacagaaauuguauauuuaaccaacacuacaaucgagaaggaaauuugucccaaacugguggaguacaggaauuggucaaagccucagugcaaaaucaccggguucgcuccauuuaguaaggacaacagcauacggcuauccgcaggaggugauauuugggucacgcgcgagcccuaugugucuugugacccuggcaagugcuaccaauucgcccucgggcagggaacuacccugaauaaccgacauucgaaugauacaguucacgaccguacuccauauagaacccuucugaugaacgaauugggcgugcccuuucaucucgguacaaaacaggucuguaucgcguggucaagcaguuccugccacgaugggaaggcuuggcugcauguguguguaaccggacacgacgagaaugccacggcaucuuucauuuacgauggcaggcugguugacagcaucuccucauggaguaaaaacauccuccggacucaggaaagcgagugcguguguauuaauggcacaugcaccgucgugaugacugaugggucugccuccgagcgcgcugacacaaagauauuauuuaucgaagagggaaaaauugugcacaucucaccucugagcgguagugcacaacaugucgaagagugcucuuguuauccaagauacccgggcguuaggugcgugugucgggauaacuggaagggguccaaccgccccauaguagacauuaaugugaaggauuacagcaucgucucgucuuaugugugcuccggacuuguuggcgacaccccucgaaagaacgacucaaguagcuccucuuacuguagaaauccaaacaaugaaaaagguagccacggggugaaaggaugggccuucgaugacggcaacgaugucuggaugggcaggacgaucucagaggaguugcggaguggguaugaaaccuuuaaggugauuggagguugguccacacccaauagcaaacugcagaucaaccgucagguaauuguugaccgcggcaauagaucuggguacucaggaauauucaguguggagggcaagagcugcaucaacagguguuuuuaugucgaacuaauucggggucgaaaacaggagaauaaggugugguggacuuccaacucuaucgucguguucugcgggaccucgggcacauacggaacuggcagcuggccugauggggcugacaucaaucucaugccaauuuga

SEQ ID NO: 150089 - RNA, 1410 nt, Artificial Sequence
  derived and/or modified CDS sequence (opt3) from neuraminidase__InfluenzaA__AFG99680
augaaccccaaucagaagaucauuaccauaggcagcgugucccugacaaucgccacuauuugcuuccucaugcaaaucgcuauucuugucacgaccguuacacugcacuuuaaacaguacgaguguucuucaccuccaaacaaucaggugaucuugugccagccgacuauaaucgaaagaaacauuaccgagaucguauauuuaacaaauaccacuauugaaaaggagaucugucccaaacugguggaauacaggaacuggaguaagccucaaugcaaaauaacaggguucgcaccauuuagcaaggacaauuccauucggcuaucugccggaggugauaucugggucacccgcgagcccuaugugucgugugacccuucaaagugcuaccaguucgcgcucggccaggggacgacucugaacaaucgacauagcaacgauaccguucacgaccguacaccauauagaacucuucugaugaaugaguugggagugcccuuucaucucggcaccaaacaggucuguauugcuuggaguuccucuagcugccacgaugguaaggccuggcugcauguguguguaacagggcacgacgaaaacgcaaccgccuccuucaucuacgauggaaggcugguugacucaaucggcaguuggagcaaaaauauucuccggacgcaagagucugaaugcguguguauaaacggcacuugcacagucgugaugaccgauggguccgcuucagagcgcgcagacacuaagaucuuauuuauugaggaaggaaaagugguccacaucagcccucugagugguucugcccagcauguugaggaaugcuccuguuauccaagauacccgggcgugaggugcguaugucgggauaauuggaaggggagcaaccgccccauaguggacauuaacgucaaggauuacucgaucgugucuuccuauguuugcucaggacuugugggcgacacaccucgaaagaaugacaguagcuccucuagcuacuguagaaacccaaauaacgagaaagguucacacggggucaaaggaugggcuuucgaugacggcaaugauguguggaugggcaggaccaucagugaagaguugcgguccggguaugagacguuuaagguaauuggagguuggagcacccccaacucuaaacugcagaucaaucgucagguuauuguggacucaggcaaccgcaguggguacagcggaauauucuccgucgaaggcaagucuugcaucaauagauguuuuuauguggagcuaauuaggggucggaaacaagaaacaaaggucugguggacuucgaacagcaucgugguuuucugcgggaccuccggcacauacggaacuggcucauggccugauggggccgacaucaaucucaugccaauuuga

SEQ ID NO: 150090 - RNA, 1410 nt, Artificial Sequence
  derived and/or modified CDS sequence (opt3) from neuraminidase__InfluenzaA__AFG99691
augaaccccaaucagaagaucauuaccauaggcagcgugucccugacaaucgccacuauuugcuuccucaugcaaaucgcuauucuugucacgaccguuacacugcacuuuaaacaguacgaguguaacucuccuccaaauaaccaggugaugccgugcgaacccacuaucauagagagaaauaccacagaaaucguauauuugaccaacacuacaauugagaaggaaaucuguccuaaauuaguggaguacaggaauuggucaaagccacagugcaaaauuaccggguucgcacccuuuaguaaggacaacagcauccggcuguccgccggaggugauauaugggucacgcgcgagccuuaugugucuugugacccaggcaagugcuaccaauucgcgcuagggcagggaacuacccucaauaaccgacauucgaaugauacaguucacgaccguacucccuauagaacccugcuuaugaacgaacugggcgugccuuuucauuuggguacaaaacaggucuguauugcuuggucaagcaguuccugccacgaugggaaggccuggcuccauguguguguaaccggacacgacgagaaugcaacggccucuuucaucuacgauggcaggcugguugacagcauuguguccuggaguaaaaacauccugcggacucaggaaucagagugcgucuguaucaauggcacaugcaccguggugaugacugaugggagcgcuucugagcgcgcagacacaaagauucucuuuauagaagagggaaaaaucguccacauuuccccauuaucagguagcgcccaacauguugaagagugcaguuguuauccgagauaccccggcgugaggugcguaugucgggauaacuggaaggggucuaaccgcccuaucguggacauaaaugucaaggauuacuccauugugagcucguauguuugcucuggacuggugggcgacaccccacgaaagaacgacuccucaaguagcuccuacuguagaaaucccaacaaugaaaaagguucucacggggucaaaggaugggcuuucgaugacggcaacgauguguggaugggcaggacgaucggggaggagcuucggagcggauaugaaaccuuuaagguaaucgguggcuggucaacaccuaauaguaaauugcagacuaaccgucagguuauuguggaccgcgggaauagauccggauacagcggcaucuucucugucgaggguaagucaugcauuaacagguguuuuuauguggaacugauacgggggcgaaaacaggagaccaaggucugguggacaaguaauagcaucgugguuuucugcggcacuuccggaaccuacggcacagggucuuggccagauggagccgacauuaaccuaaugcccaucuga

SEQ ID NO: 150091 - RNA, 1410 nt, Artificial Sequence; identical to SEQ ID NO: 149974
  derived and/or modified CDS sequence (opt3) from neuraminidase__InfluenzaA__AFG99704

SEQ ID NO: 150092 - RNA, 1410 nt, Artificial Sequence; identical to SEQ ID NO: 149974
  derived and/or modified CDS sequence (opt3) from neuraminidase__InfluenzaA__AFG99715

SEQ ID NO: 150093 - RNA, 1410 nt, Artificial Sequence; identical to SEQ ID NO: 149974
  derived and/or modified CDS sequence (opt3) from neuraminidase__InfluenzaA__AFG99726

SEQ ID NO: 150094 - RNA, 1410 nt, Artificial Sequence
  derived and/or modified CDS sequence (opt3) from neuraminidase__InfluenzaA__AFG99737
augaaccccaaucagaagaucauuaccauaggcagcgugucccugacaaucgccacuauuugcuuccucaugcaaaucacgauucuugucaccacaguuacucugcacuuuaaacaguacgaguguaacucuccuccaaauaaccaggugauguugugcgaaccgaccaucauagagagaaauaucacagaaauuguauauuuaaccaacacuacaaucgagaaggaaauuugucccaaacugguggaguacaggaauuggucaaagccucagugcaaaaucaccggguucgcuccauuuaguaaggacaacagcauacggcuauccgcaggaggugauauuugggucacgcgcgagcccuaugugucuugugacccuggcaagugcuaccaauucgcccucgggcagggaacuacccugaauaaccgacauucgaaugauacaguucacgaccguacuccauauagaacccuucugaugaacgaauugggcgugcccuuucaucucgguacaaaacaggucuguaucgcguggucaagcaguuccugccacgaugggaaggcuuggcugcauguguguguaaccggacacgacgagaaugccacggcaucuuucauuuacgauggcaggcugguugacagcaucggcuccuggaguaaaaacauccuccggacucaggaaucagagugcguguguauuaaugggacaugcaccgucgugaugacugauggaagcgccucugagcgcgcugacacaaagauauuauuuaucgaagaggguaaaauugugcacaucuccccucugucaggcagcgcacaacaugucgaagagugcaguuguuauccaagauacccggggguuaggugcgugugucgggauaacuggaagggaucuaaccgccccauaguagacauuaaugugaaggauuacuccaucgucagcucguaugugugcucuggccuuguuggugacaccccucgaaagaacgacuccucaaguagcuccuacuguagaaauccaaacaaugaaaaagggucucacggagugaaaggcugggccuucgaugacggcaacgaugucuggauggggaggacgaucagcgaggaguugcggucaggauaugaaaccuuuaaggugauugguggcuggaguacacccaauuccaaacugcagaucaaccgucagguaauuguugaccgcgggaauagaagcggauacucuggcauauucucaguggaggguaagaguugcaucaacagguguuuuuaugucgaacuaauucgggggcgaaaacaggagaauaaggugugguggacuagcaacuccaucgucguguucugcggcaccucuggaacauacggcacugggucguggccugauggagcugacaucaaucucaugccaauuuga

SEQ ID NO: 150095 - RNA, 1410 nt, Artificial Sequence
  derived and/or modified CDS sequence (opt3) from neuraminidase__InfluenzaA__AFG99748
augaaccccaaucagaagaucauuaccauaggcagcgugucccugacaaucgccacuauuugcuuccucaugcaaaucgcuauucuugucacgaccguuacacugcacuuuaaacaguacgacuguaacucuccuccaaauaaccaggcaauguugugcgagccgacuaucauagaaagaaauaucaccgagauuguguauuuaacaaacaccacuaucgaaaaggagauuugucccaaacuggccgaauacaggaauuggucaaagccucagugcaaaaucacaggguucgcgccauuuaguaaggauaacagcauacggcuauccgcuggaggugacauuuggguaacccgcgagcccuaugugucuugugauccuggcaagugcuaccaauucgcccucgggcagggaacgacucugaauaaccgacauucgaaugacaccguccacgaucguacaccauauagaacucuucugaugaacgaguugggcgugcccuuucaucucgguaccaaacagguuuguaucgcauggucaagcaguuccugccacgacgggaaggccuggcugcaugugugugucacaggacacgaugaaaaugcuaccgcaucuuucauuuacgacggcaggcugguggauagcaucggcuccuggaguaaaaacauccuccggacgcaggagucagaaugcguauguauuaaugggacuugcacaguugugaugaccgacggaagcgccucugagcgcgcugauacuaagauauuauuuaucgaggaagguaaaauuguccacaucuccccucugucaggcagcgcccaacauguggaggaaugcaguuguuauccaagauacccgggggugaggugcgucugucgggacaacuggaagggaucuaaccgccccauaguugauauuaaugugaaggacuacuccaucguaagcucguaugugugcucuggccuugucggugacacaccucgaaagaacgauuccucaaguagcuccuacuguagaaauccaaacaaugagaaagggucucacggagugaaaggcugggcguucgacgauggcaacgacguuuggauggggaggaccaucggagaagaguugcggagcgguuaugagacguuuaaggugauuggcggguggucaacccccaauaguaaacugcagaucaaccgucaggucauuguggaucgcggaaauagauccggcuacagcgguauauucucuguagaagggaagucaugcacaaacagguguuuuuauguugagcuaauccggggccgaaaacaggaaacugaggugugguggaccaguaauagcauugucguguucugcggaacauccggcacuuacgggaccggaucuuggccugacggugcagauaucaaccucaugccaaucuga

SEQ ID NO: 150096 - RNA, 1410 nt, Artificial Sequence; identical to SEQ ID NO: 149974
  derived and/or modified CDS sequence (opt3) from neuraminidase__InfluenzaA__AFG99759

SEQ ID NO: 150097 - RNA, 1410 nt, Artificial Sequence
  derived and/or modified CDS sequence (opt3) from neuraminidase__InfluenzaA__AFG99770
augaaccccaaucagaagaucauuaccauaggcagcgugucccugacaaucgccacuauuugcuuccucaugcaaaucgcuauucuugucacgaccguuacacugcacuuuaaacaguacgaguguaacucuccuccaaauaaccagaucauguugugcgaaccgacuauaaucgagagaaauauuaccgaaaucguguauuuaacaaacaccacuauugagagggaaaucugucccaagcugguagaguaccggaauuggucaaaaccucagugcaagauaacaggguucgcaccauuuaguaaagacaacagcauucgccuauccgccggaggugauaucugggugacccgagagcccuaugucucuugugacccuggcaagugcuaccaauucgcgcucgggcagggaacgacucugaauaaccgucauucgaaugauaccgugcacgacagaacaccauauaggacucuucugaugaacgaauugggcguucccuuucaucucgguaccaaacagguguguauugcuuggucaagcaguuccugccacgaugggaaggccuggcugcaugucugugugacaggacacgacgagaaugcaaccgccucuuucaucuacgauggccggcugguagacagcaucggcuccuggucaaagaacauucuccgcacgcaggaaagugagugcguuuguauaaaugggacuugcacaguggucaugaccgauggaagcgcuucugagagagcagacacuaaaaucuuauuuauugaagaggguaagaucgugcacauauccccucugucaggcagcgcccaacauguggaagagugcaguuguuauccaagguacccggggguccggugcguuugucgcgauaacuggaaaggaucuaaccgacccauuguggacaucaauguaaaggauuacuccaucgugagcucguaugucugcucuggccuugugggugacacaccuagaaagaacgacuccucaaguagcuccuacuguaggaauccaaacaaugaaaaagggucucacggaguuaagggcugggcuuucgaugacggcaacgauguguggauggggcggaccauuggagaggaguugcguagcgguuaugaaacguuuaaagucaucggcggguggucaacccccaauaguaagcugcagauuaaccgccaggugauaguagacagaggaaauagguccggcuacagcgguaucuucucuguugaggggaaaucaugcauuaaccgguguuuuuauguggaacuaauccgaggccgcaagcaggagacagaagucugguggaccaguaauagcaucguggucuucugcggaacuuccggcacauacgggacuggaucuuggccugauggugccgacauuaaccucaugccaauauga

SEQ ID NO: 150098 - RNA, 1410 nt, Artificial Sequence
  derived and/or modified CDS sequence (opt3) from neuraminidase__InfluenzaA__AFG99781
augaaccccaaucagaagaucauuaccauaggcagcgugucccugacaaucgccacuauuugcuuccucaugcaaaucgcuauucuugucacgaccguuacacugcacuuuaaacaguacgaguguucuucaccuccaaacaaucaggugauguugugccagccgacuaucauagaaagaaacaucaccgagauuguauauuuaacaaauaccacuaucgaaaaggagauuugucccaaacugguggaauacaggaacuggaguaagccucaaugcaaaaucacaggguucgcaccauuuagcaaggacaauuccauacggcuaucugccggaggugauauuugggucacccgcgagcccuaugugucgugugacccuggcaagugcuaccaguucgcgcucgggcagggaacgacucugaacaaucgacauucaaacgauaccguucacgaccguacaccauauagaacucuucugaugaaugaguugggcgugcccuuucaucucgguaccaaacaggucuguaucgcuuggagcaguuccucuugccacgaugggaaggccuggcugcauguguguguaacaggacacgacgaaaacgcaaccgccagcuucauuuacgauggcaggcugguugacuccaucggcucauggaguaaaaauauccuccggacgcaagagagcgaaugcguguguauuaacgggacuugcacagucgugaugaccgauggaucugcuuccaagcgcgcagacacuaaaauauuauuuaucgaggaggguaagauugugcacaucucaccucugagcggcagugcccagcaugucgaagagugcucuuguuauccaagauacccggggguuaggugcgugugucgggauaauuggaagggauccaaccgccccauaguagacauuaacgugaaagauuacagcaucgucucgucuuaugugugcuccggccuuguuggugacacaccucgaaagaaugacucaaguagcuccucuuacuguagaaacccaaauaacgaaaaagggagccacggagugaagggcugggcuuucgaugacggcaaugaugucuggauggggaggaccaucucagaggaauugcggaguggauaugagacguuuaaagugauugguggcugguccacccccaacagcaagcugcagacaaaucgucagguaaucguugacucugggaaccgcucaggauacaguggcauuuucagcguggaggguaaauccugcauaaauagauguuuuuaugucgaacuaaucagggggcggaagcaagagacuaaggugugguggaccucuaacucgauugucguguucugcggcacaagcggaacuuacggcaccggguccuggccugauggagccgacaucaaucucaugccaaucuga

SEQ ID NO: 150099 - RNA, 1410 nt, Artificial Sequence; identical to SEQ ID NO: 149974
  derived and/or modified CDS sequence (opt3) from neuraminidase__InfluenzaA__AFG99792

SEQ ID NO: 150100 - RNA, 1410 nt, Artificial Sequence; identical to SEQ ID NO: 150094
  derived and/or modified CDS sequence (opt3) from neuraminidase__InfluenzaA__AFG99803

SEQ ID NO: 150101 - RNA, 1410 nt, Artificial Sequence; identical to SEQ ID NO: 149974
  derived and/or modified CDS sequence (opt3) from neuraminidase__InfluenzaA__AFG99825

SEQ ID NO: 150102 - RNA, 1410 nt, Artificial Sequence; identical to SEQ ID NO: 149974
  derived and/or modified CDS sequence (opt3) from neuraminidase__InfluenzaA__AFG99836

SEQ ID NO: 150103 - RNA, 1410 nt, Artificial Sequence; identical to SEQ ID NO: 149974
  derived and/or modified CDS sequence (opt3) from neuraminidase__InfluenzaA__AFG99847

SEQ ID NO: 150104 - RNA, 1410 nt, Artificial Sequence; identical to SEQ ID NO: 149974
  derived and/or modified CDS sequence (opt3) from neuraminidase__InfluenzaA__AFG99858

SEQ ID NO: 150105 - RNA, 1410 nt, Artificial Sequence; identical to SEQ ID NO: 149974
  derived and/or modified CDS sequence (opt3) from neuraminidase__InfluenzaA__AFG99869

SEQ ID NO: 150106 - RNA, 1410 nt, Artificial Sequence; identical to SEQ ID NO: 149974
  derived and/or modified CDS sequence (opt3) from neuraminidase__InfluenzaA__AFG99880

SEQ ID NO: 150107 - RNA, 1410 nt, Artificial Sequence
  derived and/or modified CDS sequence (opt3) from neuraminidase__InfluenzaA__AFG99891
augaaccccaaucagaagaucauuaccauaggcagcgugucccugacaaucgccacuauuugcuuccucaugcaaaucgcuauucuugucacgaccguuacacugcacuuuaaacaguacgaguguaacucuccuccaaauaaccaggugauguugugcgaaccgacuaucauagagagaaauaucaccgaaauuguauauuucacaaacaccacuaucgagaaggaaauuugucccaaauuagcagaguacaggaauuggucaaagccucagugcaaaaucacaggguuugccccauucaguaaggacaacagcauacggcuguccgcgggaggugauauuugggugacccgcgagcccuaugucucuugugacccuggcaagugcuaccaauuugcucuagggcagggaacgacucucaauaaccgacauucgaaugauaccgugcacgaccguacaccauauagaacucugcuuaugaacgaacugggcguucccuuccauuuggguaccaaacagguguguaucgccuggucaagcaguuccugccacgaugggaaggcauggcuccaugucugugugacaggacacgacgagaaugccaccgcuucuuuuauuuacgauggcaggcugguagacagcaucggcuccuggaguaaaaacauccugcggacgcaggaaucagagugcguuuguauuaaugggacuugcacaguggucaugaccgauggaagcgcaucugagcgcgccgacacuaagauacucuucaucgaagaggguaaaauugugcacaucuccucauuaagcggcagugcucaacauguggaagagugcucuuguuauccuagauacccaggggucaggugcguuugucgggauaacuggaagggauccaaccgcccgauaguggacauuaauguaaaggauuacagcaucgugucgucuuaugucugcuccggccuggugggugacacaccccgaaagaacgacucaaguagcuccucuuacuguagaaauccuaacaaugaaaaagggagccacggaguuaaaggcugggccuuugaugacggcaacgauguguggauggggaggaccaucggagaggagcuucggucagguuaugaaacguuccgugucauuggcggguggaguaccccaaauuccaaguugcagaucaaccgccaggugauuguagacagaggaaauaggagcggcuacucugguauauuuucaguugaggggaaaaguugcaucaaccgguguuucuauguggaacugauucgaggccgcaagcaggagacagaagucugguggacuagcaauuccaucguggucuuuugcggaaccucuggcacauacgggacuggaucguggcccgauggugcggacaucaaccuaaugccuauuuga

SEQ ID NO: 150108 - RNA, 1410 nt, Artificial Sequence; identical to SEQ ID NO: 149974
  derived and/or modified CDS sequence (opt3) from neuraminidase__InfluenzaA__AFG99902

SEQ ID NO: 150109 - RNA, 1410 nt, Artificial Sequence; identical to SEQ ID NO: 149974
  derived and/or modified CDS sequence (opt3) from neuraminidase__InfluenzaA__AFG99913

SEQ ID NO: 150110 - RNA, 1410 nt, Artificial Sequence; identical to SEQ ID NO: 149974
  derived and/or modified CDS sequence (opt3) from neuraminidase__InfluenzaA__AFG99924

SEQ ID NO: 150111 - RNA, 1410 nt, Artificial Sequence
  derived and/or modified CDS sequence (opt3) from neuraminidase__InfluenzaA__AFG99935
augaaccccaaucagaagaucauuaccauaggcagcgugucccugacaaucgccacuauuugcuuccucaugcaaaucgcuauucuugucacgaccguuacacugcacuuuaaacaguacgaguguaacucuccuccaaauaaccaggugauguugugcgaaccgacuaucguagagagaaauauaaccgaaaucguguauuuaacaaacaccacuauugagaaggaaaucugucccaaacuggcagaguacaggaauuggucaaagccucagugcaaaauuacaggguucgccccauuuaguaaggacaacagcauccggcuauccgcgggaggugauauaugggucacccgcgagcccuaugugucuugugacccuucgaagugcuaccaauucgcucucggccaggggacgacucugaauaaccgacauucaaaugauaccguucacgaccguacaccauauagaacucuucugaugaacgaauugggagugcccuuucaucucggcaccaaacaggucuguauugccuggagcaguuccucuugccacgaugguaaggcauggcugcauguguguguaacagggcacgacgagaaugccaccgcuagcuucaucuacgauggaaggcugguugacuccauuggcucauggaguaaaaacauccuccggacgcaggaaagcgagugcguguguaucaauggcacuugcacagucgugaugaccgaugggucugcauccgagcgcgccgacacuaagauuuuauuuauagaagagggaaaaaucgugcacauuucaccucugagcgguagugcucaacaugucgaagagugcucuuguuauccaagauacccgggcguuaggugcgugugucgggauaacuggaagggguccaaccgccccaucguagacauaaauaugaaggauuacagcauugugucgucuuaugucugcuccggacuugugggcgacacaccucgaaacaaugacucaaguagcuccucuuacuguagaaacccaaauaacgaaaaagguagccacgggguuaagggaugggccuucgaugacggcaaugauguguggaugggcaggaccaucggggaggaguugcggucaggauaugaaacguuuaaagucaucgguggcuggaguacccccaacuccaagcugcagauuaaucgucaggugaucguagaccgcgggaacagaagcggauacucuggcauuuucucaguugaggguaaaaguugcauaaauagguguuuuuauguggaacuaauccgggggcgaaagcaggagacagaagucugguggacuagcaacuccauuguggucuucugcggcaccucuggaacauacggcacugggucguggccugauggagcggacaucaaucucaugccaaucuga

SEQ ID NO: 150112 - RNA, 1410 nt, Artificial Sequence; identical to SEQ ID NO: 149974
  derived and/or modified CDS sequence (opt3) from neuraminidase__InfluenzaA__AFG99946

SEQ ID NO: 150113 - RNA, 1410 nt, Artificial Sequence
  derived and/or modified CDS sequence (opt3) from neuraminidase__InfluenzaA__AFG99957
augaaccccaaucagaagaucauuaccauaggcagcgugucccugacaaucgccacuauuugcuuccucaugcaaaucgcuauucuugucacgaccguuacacugcacuuuaaacaguacgaguguaacucuccuccaaauaaccaggcaauguugugcgaaccgacuaucauagagagaaauaucaccgaaauuguguauuuaacaaacaccacuaucgagaaggaaauuugucccaaacuggccgaguacaggaauuggucaaagccucagugcaaaaucacaggguucgcgccauuuaguaaggacaacagcauacggcuauccgcuggaggugauauuuggguaacccgcgagcccuaugugucuugugacccuggcaagugcuaccaauucgcccucgggcagggaacgacucugaauaaccgacauucgaaugauaccguccacgaccguacaccauauagaacucuucugaugaacgaauugggcgugcccuuucaucucgguaccaaacagguuuguaucgcauggucaagcaguuccugccacgaugggaaggccuggcugcaugugugugucacaggacacgacgagaaugcuaccgcaucuuucauuuacgauggcaggcugguggacagcaucggcuccuggaguaaaaacauccuccggacgcaggaaucagagugcguauguauuaaugggacuugcacaguugugaugaccgauggaagcgccucugagcgcgcugacacuaagauauuauuuaucgaagaggguaaaauuguccacaucuccccucugucaggcagcgcccaacauguggaagagugcaguuguuauccaagauacccgggggugaggugcgucugucgggauaacuggaagggaucuaaccgccccauaguugacauuaaugugaaggauuacuccaucguaagcucguaugugugcucuggccuugucggugacacaccucgaaagaacgacuccucaaguagcuccuacuguagaaauccaaacaaugaaaaagggucucacggagugaaaggcugggcguucgaugacggcaacgauguuuggauggggaggaccaucggagaggaguugcggagcgguuaugaaacguuuaaggugauuggcggguggucaacccccaauaguaaacugcagaucaaccgucaggucauuguggaccgcggaaauagauccggcuacagcgguauauucucuguagaggggaagucaugcacaaacagguguuuuuauguugaacuaauccggggccgaaaacaggagacugaagugugguggaccaguaauagcauugucguguucugcggaacauccggcacuuacgggaccggaucuuggccugauggugcagacaucaaccucaugccaaucuga

SEQ ID NO: 150114 - RNA, 1410 nt, Artificial Sequence; identical to SEQ ID NO: 149974
  derived and/or modified CDS sequence (opt3) from neuraminidase__InfluenzaA__AFG99968

SEQ ID NO: 150115 - RNA, 1410 nt, Artificial Sequence
  derived and/or modified CDS sequence (opt3) from neuraminidase__InfluenzaA__AFG99979
augaaccccaaucagaagaucauuaccauaggcagcgugucccugacaaucgccacuauuugcuuccucaugcaaaucgcuauucuugucacgaccguuacacugcacuuuaaacaguacgaguguaacucuccuccaaauaaccaggugaugccgugcgaacccacuaucauagagagaaauaucaccgaaauuguauauuugacaaacaccacuaucgagaaggaaauuuguccuaaauuaguggaguacaggaauuggucaaagccacagugcaaaaucacaggguucgcacccuuuaguaaggacaacagcauacggcuguccgccggaggugauauuugggucacccgcgagccuuaugugucuugugacccaggcaagugcuaccaauucgcgcuagggcagggaacgacucucaauaaccgacauucgaaugauaccguucacgaccguacacccuauagaacucugcuuaugaacgaacugggcgugccuuuucauuuggguaccaaacaggucuguaucgcuuggucaagcaguuccugccacgaugggaaggccuggcuccauguguguguaacaggacacgacgagaaugcaaccgccucuuucauuuacgauggcaggcugguugacagcaucguguccuggaguaaaaacauccugcggacgcaggaaucagagugcgucuguauuaauggcacuugcacaguggugaugaccgaugggagcgcuucugagcgcgcagacacuaagauacucuuuaucgaagagggaaaaauuguccacaucuccccauuaucagguagcgcccaacauguugaagagugcaguuguuauccgagauaccccggcgugaggugcguaugucgggauaacuggaaggggucuaaccgcccuauaguggacauuaaugucaaggauuacuccaucgugagcucguauguuugcucuggacuggugggcgacacaccacgaaagaacgacuccucaaguagcuccuacugucuuaaucccaacaaugaaaaagguucucacggggucaaaggaugggcuuucgaugacggcaacgauguguggaugggcagaaccaucggggaggaguugaggagcggauaugaaacguuuaagguaauugguggcuggucaaccccuaauaguaaacugcagacaaaccggcagguuaucguggaccgugggaaucgcuccggauacagcggcauuuucucugucgagucaaagaguugcauaaacagauguuuuuauguggaacuaaucaggggucggaaacaggagacuaaggucugguggaccagcaauuccauugugguuuucugcgggacaucuggcacuuacggaaccggcucguggccagauggggccgacaucaaccucaugcccaucuga

SEQ ID NO: 150116 - RNA, 1410 nt, Artificial Sequence
  derived and/or modified CDS sequence (opt3) from neuraminidase__InfluenzaA__AFG99990
augaaccccaaucagaagaucauuaccauaggcagcgugucccugacaaucgccacuauuugcuuccucaugcaaaucgcuauucuugucacgaccguuacacugcacuuuaaacaguacgaguguaacucuccuccaaauaaccaggcaauguugugcgaaccgaagaucauagagagaaauaucacugaaauuguguauuuaaccaacacaaccaucgagaaagaaauuugucccaagcuggccgaguacaggaauuggucaaaaccucagugcaagaucacuggguucgcgccauuuaguaaggacaacagcauacggcuauccgcuggaggugauauuuggguaacacgcgagcccuaugugucuugugacccuggcaaaugcuaccaauucgcccucgggcagggaaccacgcugaauaaccgacauucgaaugauacuguccacgaccguaccccauauagaacacuucugaugaacgaauugggcgugcccuuucaucucgguacuaagcagguuuguaucgcauggucaagcaguuccugccacgaugggaaagccuggcugcaugugugugucaccggacacgacgagaaugcuacagcaucuuucauuuacgauggcaggcugguggacagcaucggcuccuggucaaagaacauccuccggacccaggaaagugagugcguauguauuaaugggacgugcacuguugugaugacagauggaagcgccucugagcgcgcugacaccaaaauauuauuuaucgaagaggguaagauuguccacaucuccccucugucaggcagcgcccaacauguggaagagugcaguuguuauccaagauacccgggggugaggugcgucugucgggauaacuggaagggaucuaaccgccccauaguugacauuaaugugaaagauuacuccaucguaagcucguaugugugcucuggccuugucggugacacuccucgaaagaacgacuccucaaguagcuccuacuguagaaauccaaacaaugaaaaagggucucacggagugaagggcugggcguucgaugacggcaacgauguuuggauggggaggacaaucagcgaggaguugcggucaggauaugaaaccuuuaaagugauugguggcuggaguaagcccaauuccaaacugcagaucaaccgucaggucauuguggaccgcgggaauagaagcggauacucuggcauauucucaguagaggguaagaguugcaucaacagguguuuuuauguugaacuaauucgggggcgaaagcaggagacggaagugugguggaccagcaauuccaucgucguguucugcggcacaucuggaacuuacggcaccgggucguggccugauggagcagacaucaaccucaugccaauuuga

SEQ ID NO: 150117 - RNA, 1410 nt, Artificial Sequence
  derived and/or modified CDS sequence (opt3) from neuraminidase__InfluenzaA__AFH00002
augaaccccaaucagaagaucauuaccauaggcagcgugucccugacaaucgccacuauuugcuuccucaugcaaaucgcuauucuugucacgaccguuacacugcacuuuaaacaguacgaguguucuucaccuccaaacaaucaggugaucccgugccagcccacuauaaucgaaagaaacauuaccgagaucguauauuugacaaauaccacuauugaaaaggagaucuguccuaaauuaguggaauacaggaacuggaguaagccacaaugcaaaauaacaggguucgcacccuuuagcaaggacaauuccauucggcugucugccggaggugauaucugggucacccgcgagccuuaugugucgugugacccaggcaagugcuaccaguucgcgcuagggcagggaacgacucucaacaaucgacauucaaacgauaccguucacgaccguacacccuauagaacucugcuuaugaaugagcugggcgugccuuuucauuuggguaccaaacaggucuguauugcuuggagcaguuccucuugccacgaugggaaggccuggcuccauguguguguaacaggacacgacgaaaacgcaaccgccagcuucaucuacgauggcaggcugguugacuccaucggcucauggaguaaaaauauucugcggacgcaagagagcgaaugcguguguauaaacgggacuugcgcugucgugaugacagauggaucugcauccgagcgcgccgacaccaagauccucuuuauugaggaagguaaagugguccacaucucaccauuaagcggcagugcucagcauguugaggaaugcucuuguuauccgagauaccccggggugaggugcguaugucgggauaauuggaagggauccaaccgcccuauaguggacauuaacgucaagaauuacagcaucgugucgucuuauguuugcuccggccuggugggugauacuccacgaaagaacgacucaaguagcuccucuuacuguagaaaucccaacaaugagaaagggagccacggagucaaaggcugggccuucgacgauggcaacgacguguggauggggaggacaaucucagaggaacuucggaguggauaugagaccuuuaagguaauugguggcugguccacgccuaauagcaaauugcagaucaaccgucagguuauuguggauucugggaaucgcucaggauacaguggcauauucagcgucgaagguaaguccugcaucaacagauguuuuuauguggagcugauuagggggcggaaacaagaaaccaaggucugguggacaucuaauucgaucgugguuuucugcggcacuagcggaaccuacggcacaggguccuggccagacggagcggauaucaaccuaaugcccauuuga

SEQ ID NO: 150118 - RNA, 1410 nt, Artificial Sequence; identical to SEQ ID NO: 143233
  derived and/or modified CDS sequence (opt3) from neuraminidase__InfluenzaA__AFH00013

SEQ ID NO: 150119 - RNA, 1410 nt, Artificial Sequence
  derived and/or modified CDS sequence (opt3) from neuraminidase__InfluenzaA__AFH00024
augaaccccaaucagaagaucauuaccauaggcagcgugucccugacaaucgccacuauuugcuuccucaugcaaaucacgauucuugucaccacaguuacucugcacuuuaaacaguacgaguguaacucuccuccaaauaaccaggugauguugugcgaaccgaccaucauagagagaaauaucacagaaauuguauauuuaaccaacacuacaaucgagaaggaaauuugucccaaacugguggaguacaggaauuggucaaagccucagugcaaaaucaccggguucgcuccauuuaguaaggacaacagcauacggcuauccgcaggaggugauauuugggucacgcgcgagcccuaugugucuugugacccuggcaagugcuaccaauucgcccucgggcagggaacuacccugaauaaccgacauucgaaugauacaguucacgaccguacuccauauagaacccuucugaugaacgaauugggcgugcccuuucaucucgguacaaaacaggucuguaucgcguggucaagcaguuccugccacgaugggaaggcuuggcugcauguguguguaaccggacacgacgagaaugccacggcaucuuucauuuacgauggcaggcugguugacagcaucggcuccuggaguaaaaacauccuccggacucaggaaucagagugcguguguauuaaugggacaugcaccgucgugaugacugauggaagcgccucugagcgcgcugacacaaagauauuauuuaucgaagaggguagaauugugcacaucuccccucugucaggcagcgcacaacaugucgaagagugcaguuguuauccaagguacccggggguucggugcgugugucgcgauaacuggaaaggaucuaaccgacccauaguagacauuaaugugaaggauuacuccaucgucagcucguaugugugcucuggccuuguuggugacaccccuagaaagaacgacuccucaaguagcuccuacuguaggaauccaaacaaugaaaaagggucucacggagugaagggcugggccuucgaugacggcaacgaugucuggauggggcggacgaucagcgaggaguugcguucaggauaugaaaccuuuaaagugauugguggcuggaguacacccaauuccaagcugcagaucaaccgccagguaauuguugacagagggaauaggagcggauacucuggcauauucucaguggaggguaaaaguugcaucaaccgguguuuuuaugucgaacuaauucgagggcgcaagcaggagaauaaagugugguggacuagcaacuccaucgucguguucugcggcaccucuggaacauacggcacugggucguggccugauggagcugacaucaaucucaugccaauuuga

SEQ ID NO: 150120 - RNA, 1410 nt, Artificial Sequence; identical to SEQ ID NO: 143233
  derived and/or modified CDS sequence (opt3) from neuraminidase__InfluenzaA__AFH00035

SEQ ID NO: 150121 - RNA, 1410 nt, Artificial Sequence; identical to SEQ ID NO: 143233
  derived and/or modified CDS sequence (opt3) from neuraminidase__InfluenzaA__AFH00046

SEQ ID NO: 150122 - RNA, 1410 nt, Artificial Sequence
  derived and/or modified CDS sequence (opt3) from neuraminidase__InfluenzaA__AFH00057
augaaccccaaucagaagaucauuaccauaggcagcgugucccugacaaucgccacuauuugcuuccucaugcaaaucgcuauucuugucacgaccguuacacugcacuuuaaacaguacgaguguaacucuccuccaaauaaccaggugauguugugcgaaccgacuaucauagagagaaauaucaccgaaauuguauauuuaacaaacaccacuaucgagaaggaaauuugucccaaacuggcagaguacaggaauuggucaaagccucagugcaaaaucacaggguucgccccauuuaguaaggacaacagcauacggcuauccgcgggaggugauauuugggugacccgcgagcccuaugucucuugugacccuggcaagugcuaccaauucgcucucgggcagggaacgacucugaauaaccgacauucgaaugauaccgugcacgaccguacaccauauagaacucuucugaugaacgaauugggcguucccuuucaucucgguaccaaacagguguguaucgccuggucaagcaguuccugccacgaugggaaggcauggcugcaugucugugugacaggacacgacgagaaugccaccgcuucuuucauuuacgauggcaggcugguagacagcaucggcuccuggaguaaaaacguucuccggacgcaggaaucagagugcguguguaucaaugggacuugcacagucgugaugaccgauggaagcgcaucugagcgcgccgacacuaagauuuuauuuauagaagaggguaaaaucgugcacauuuccccucugucaggcagcgcucaacaugucgaagagugcaguuguuauccaagauacccggggguuaggugcgugugucgggauaacuggaagggaucuaaccgccccaucguagacauaaaugugaaggauuacuccauugucagcucguaugugugcucuggccuuguuggugacacaccucgaaagaacgacuccucaaguagcuccuacuguagaaauccaaacaaugaaaaagggucucacggagugaaaggcugggccuucgaugacggcaacgaugucuggauggggaggaccaucagcgaggaguugcggucaggauaugaaacguuuaaggugaucgguggcuggaguaaucccaacuccaaacugcagauuaaucgucagguaaucguugaccgcgggaacagaagcggauacucuggcauuuucucaguggaggguaagaguugcauaaauagguguuuuuaugucgaacuaauccgggggcgaaaacaggagaccgaagugugguggacaagcaacuccauugucguguucugcggcacuucuggaaccuacggcacagggucguggccugauggagcggacaucaaucucaugccaaucuga

SEQ ID NO: 150123 - RNA, 1410 nt, Artificial Sequence; identical to SEQ ID NO: 143233
  derived and/or modified CDS sequence (opt3) from neuraminidase__InfluenzaA__AFH00068

SEQ ID NO: 150124 - RNA, 1410 nt, Artificial Sequence
  derived and/or modified CDS sequence (opt3) from neuraminidase__InfluenzaA__AFH00079
augaaccccaaucagaagaucauuaccauaggcagcgugucccugacaaucgccacuauuugcuuccucaugcaaaucgcuauucuugucacgaccguuacacugcacuuuaaacaguacgaguguaacucuccuccaaauaaccaggugauguugugcgaaccgacuaucauagagagaaauaucaccgaaauuguauauuuaacaaacaccacuaucgagaaggaaauuugucccaaacuggcagaguacaggaauuggucaaagccucagugcaaaaucacaggguucgccccauuuaguaaggacaacagcauacggcuauccgcgggaggugauauuugggugacccgcgagcccuaugucucuugugacccuggcaagugcuaccaauucgcucucgggcagggaacgacucugaauaaccgacauucgaaugauaccgugcacgaccguacaccauauagaacucuucugaugaacgaauugggcguucccuuucaucucgguaccaaacagguguguaucgccuggucaagcaguuccugccacgaugggaaggcauggcugcaugucugugugacaggacacgacgagaaugccaccgcuucuuucauuuacgauggcaggcugguagacagcaucggcuccuggaguaaaaacauccuccggacgcaggaaucagagugcguuuguauuaaugggacuugcacaguggucaugaccgauggaagcgcaucugagcgcgccgacacuaagauauuauuuaucgaagaggguaaaauugugcacaucuccccucugucaggcagcgcucaacauguggaagagugcaguuguuauccaagauacccgggggucaggugcguuugucgggauaacuggaagggaucuaaccgccccauaguggacauuaauguaaaggauuacuccaucgugagcucguaugucugcucuggccuugugggugacacaccucgaaagaacgacuccucaaguagcuccuacuguagaaauccaaacaaugaaaaagggucucacggaguuaaaggcugggccuucgaugacggcaacgauguguggauggggaggaccaucagcgaggaguugcggucaggauaugaaacguuuaaggucauugaggguuggaguaaacccaauuccaagcugcagaucaaccgucaggugauuguagaccgcggcaauagaagcggguacucuggaauauucucaguugaaggcaaaaguugcaucaacagguguuuuuauguggagcuaauucggggucgaaagcaggaaaccgaggucugguggacaagcaauuccaucguggucuucugcgggacuucuggcaccuacggaacaggcucguggccugauggggcggacaucaaccucaugccaauuuga

SEQ ID NO: 150125 - RNA, 1410 nt, Artificial Sequence
  derived and/or modified CDS sequence (opt3) from neuraminidase__InfluenzaA__AFH00090
augaaccccaaucagaagaucauuaccauaggcagcgugucccugacaaucgccacuauuugcuuccucaugcaaaucgcuauucuugucacgaccguuacacugcacuuuaaacaguacgaguguaacucuccuccaaauaaccaggugauguugugcgaaccgacuaucauagagagaaauaucaccgaaauuguauauuuaacaaacaccacuaucgagaaggaaauuugucccaaacuggcagaguacaggaauuggucaaagccucagugcaaaaucacaggguucgccccauuuaguaaggacaacagcauacggcuauccgcgggaggugauauuugggugacccgcgagcccuaugucucuugugacccuggcaagugcuaccaauucgcucucgggcagggaacgacucugaauaaccgacauucgaaugauaccgugcacgaccguacaccauauagaacucuucugaugaacgaauugggcguucccuuucaucucgguaccaaacagguguguaucgccuggucaagcaguuccugccacgaugggaaggcauggcugcaugucugugugacaggacacgacgagaaugccaccgcuucuuucauuuacgauggcaggcugguagacagcaucggcuccuggaguaaaaacauccuccggacgcaggaaucagagugcguuuguauuaaugggacuugcacaguggucaugaccgauggaagcgcaucugagcgcgccgacacuaagauauuauuuaucgaagaggguaaaauugugcacaucuccccucugucaggcagcgcucaacauguggaagagugcaguuguuauccaagauacccgggggucaggugcguuugucgggauaacuggaagggaucuaaccgccccauaguggacauuaauguaaaggauuacuccaucgugagcucguaugucugcucuggccuugugggugacacaccucggaaaaacgacuccucaaguagcuccuacuguuggaauccaaacaaugaaaaggggucucacggaguuaaaggcugggccuucgaugacggcaacgauguguggauggggagaaccaucagcgaggaguugaggucaggauaugaaacguuuaaggucauugguggcuggaguaaacccaauuccaagcugcagaucaaccgacaggugauuguagaccgugggaaucgcagcggauacucuggcauauucucaguugaggguaaaaguugcaucaacagauguuuuuauguggaacuaauuagggggcggaagcaggagaccgaagucugguggacaagcaauuccaucguggucuucugcggcacuucuggaaccuacggcacagggucguggccugauggagcggacaucaaccucaugccaauuuga

SEQ ID NO: 150126 - RNA, 1410 nt, Artificial Sequence
  derived and/or modified CDS sequence (opt3) from neuraminidase__InfluenzaA__AFH00101
augaaccccaaucagaagaucauuaccauaggcagcgugucccugacaaucgccacuauuugcuuccucaugcaaaucgcuauucuugucacgaccguuacacugcacuuuaaacaguacgaguguaacucuccuccaaauaaccaggugauguugugcgaaccgacuaucauagagagaaauaucaccgaaauuguauauuuaacaaacaccacuaucgagaaggaaauuugucccaaacuggcagaguacaggaauuggucaaagccucagugcaaaaucacaggguucgccccauuuaguaaggacaacagcauacggcuauccgcgggaggugauauuugggugacccgcgagcccuaugucucuugugacccuggcaagugcuaccaauucgcucucgggcagggaacgacucugaauaaccgacauucgaaugauaccgugcacgaccguacaccauauagaacucuucugaugaacgaauugggcguucccuuucaucucgguaccaaacagguguguaucgccuggucaagcaguuccugccacgaugggaaggcauggcugcaugucugugugacaggacacgacgagaaugccaccgcuucuuucauuuacgauggcaggcugguagacagcaucggcuccuggaguaaaaagauccuccggacgcaggaaucagagugcguuuguauuaacgggacuugcacaguggucaugaccgauggaagcgcaucugagcgcgccgacacuaaaauauuauuuaucgaagaggguaagauugugcacaucuccccucugucaggcagcgcucaacauguggaagagugcaguuguuauccaagauacccgggggucaggugcguuugucgggauaauuggaagggaucuaaccgccccauaguggacauuaacguaaaagauuacuccaucgugagcucguaugucugcucuggccuugugggugacacaccucgaaagaaugacuccucaaguagcuccuacuguagaaacccaaauaacgaaaaagggucucacggaguuaagggcugggccuucgaugacggcaaugauguguggauggggaggaccaucagcgaggaguugcggucaggauaugaaacguuuaaagucauugguggcuggaguaagcccaacuccaaacugcagaucaaucgucaggugauuguagaccgcgggaacagaagcggauacucuggcauauucucaguugaggguaagaguugcaucaauagguguuuuuauguggaacuaauucgggggcgaaagcaggagaccgaagucugguggacaagcaacuccaucguggucuucugcggcacuucuggaaccuacggcacagggucguggccugauggagcggacaucaaucucaugccaauuuga

SEQ ID NO: 150127 - RNA, 1410 nt, Artificial Sequence; identical to SEQ ID NO: 143149
  derived and/or modified CDS sequence (opt3) from neuraminidase__InfluenzaA__AFH00112

SEQ ID NO: 150128 - RNA, 1410 nt, Artificial Sequence; identical to SEQ ID NO: 143149
  derived and/or modified CDS sequence (opt3) from neuraminidase__InfluenzaA__AFH00123

SEQ ID NO: 150129 - RNA, 1410 nt, Artificial Sequence
  derived and/or modified CDS sequence (opt3) from neuraminidase__InfluenzaA__AFH00156
augaaccccaaucagaagaucauuaccauaggcagcgugucccugacaaucgccacuauuugcuuccucaugcaaaucgcuauucuugucacgaccguuacacugcacuuuaaacaguacgaguguaacucuccuccaaauaaccaggugauguugugcgaaccgacuaucauagagagaaauaucaccgaaauuguauauuuaacaaacaccacuaucgagaaggaaauuugucccaaacuggcagaguacaggaauuggucaaagccucagugcaaaaucacaggguucgccccauuuaguaaggacaacagcauacggcuauccgcgggaggugauauuugggugacccgcgagcccuaugucucuugugacccuggcaagugcuaccaauucgcucucgggcagggaacgacucugaauaaccgacauucgaaugauaccgugcacgaccguacaccauauagaacucuucugaugaacgaauugggcguucccuuucaucucgguaccaaacagguguguaucgccuggucaagcaguuccugccacgaugggaaggcauggcugcaugucugugugacaggacacgacgagaaugccaccgcuucuuucauuuacgauggcaggcugguagacagcaucggcuccuggaguaaaaacauccuccggacgcaggaaucagagugcguuuguauuaaugggacuugcacaguggucaugaccgauggaagcgcaucugagcgcgccgacacuaagauauuauuuaucgaagaggguaaaauugugcacaucuccccucugucaggcagcgcucaacauguggaagagugcaguuguuauccaagauacccgggggucaggugcguuugucgggauaacuggaagggaucuaaccgccccauaauugacaucaaugugaaggauuacuccaucguaagcucguaugugugcucuggccuugucggugacacaccucgaaagaacgacuccucaaguagcuccuacuguagaaauccaaacaaugaaaaagggucucacggagugaaaggcugggccuucgaugacggcaacgauguuuggauggggaggaccauuagcgaggaguugcggucaggauaugaaacguuuaaggugaucgguggcuggaguaaacccaauuccaagcugcagauuaaccgucaggucauaguggaccgcgggaauagaagcggauacucuggcaucuucucaguagaggguaaaaguugcauuaacagguguuuuuauguugaacuaauccgggggcgaaagcaggagaccgaagugugguggacaagcaauuccaucgucguguucugcggcacuucuggaaccuacggcacagggucguggccugauggagcggacauuaaccucaugccaauauga

SEQ ID NO: 150130 - RNA, 1410 nt, Artificial Sequence
  derived and/or modified CDS sequence (opt3) from neuraminidase__InfluenzaA__AFH00167
augaaccccaaucagaagaucauuaccauaggcagcgugucccugacaaucgccacuaugugcuuccucaugcaaauugcuauccuugucacgaccguuacacugcacuuuaaacaguacgaguguaacucuccuccaaauaaccaggugauguugugcgaaccgacuauuaucgagagaaauauaaccgaaaucguauauuuaacaaacaccacuauugagaaggaaaucugucccaaacuggcagaguacaggaauuggucaaagccucagugcaaaauuacaggguucgccccauuuaguaaggacaacagcauccggcuauccgcgggaggugauauaugggugacccgcgagcccuaugucucuugugacccuggcaagugcuaccaauucgcucucgggcagggaacgacucugaauaaccgacauucgaaugauaccgugcacgaccguacaccauauagaacucuucugaugaacgaauugggcguucccuuucaucucgguaccaaacagguguguauugccuggucaagcaguuccugccacgaugggaaggcauggcugcaugucugugugacaggacacgacgagaaugccaccgcuucuuucaucuacgauggcaggcugguagacagcauuggcuccuggaguaaaaacauccuccggacgcaggaaucagagugcguuuguaucaaugggacuugcacaguggucaugaccgauggaagcgcaucugagcgcgccgacacuaagauuuuauuuauagaagaggguaaaaucgugcacauuuccccucugucaggcagcgcucaacauguggaagagugcaguuguuauccaagauacccgggggucaggugcguuugucgggauaacuggaagggaucuaaccgccccaucguggacauaaauguaaaggauuacuccauugugagcucguaugucugcucuggccuugugggugacacaccucgaaagaacgacuccucaaguagcuccuacuguagaaauccaaacaaugaaaaagggucucacggaguuaaaggcugggccuucgaugacggcaacgauguguggauggggaggaccaucagcgaggaguugcggucaggauaugaaacguuuaaggucaucgguggcuggaguaaacccaauuccaagcugcagauuaaccgucaggugaucguagaccgcgggaauagaagcggauacucuggcauuuucucaguugaggguaaaaguugcauaaacagguguuuuuauguggaacuaauccgggggcgaaagcaggagaccgaagucugguggacaagcaauuccauuguggucuucugcggcacuucuggaaccuacggcacagggucguggccugauggagcggacaucaaccucaugccaaucuga

SEQ ID NO: 150131 - RNA, 1410 nt, Artificial Sequence; identical to SEQ ID NO: 150129
  derived and/or modified CDS sequence (opt3) from neuraminidase__InfluenzaA__AFH00178

SEQ ID NO: 150132 - RNA, 1410 nt, Artificial Sequence
  derived and/or modified CDS sequence (opt3) from neuraminidase__InfluenzaA__AFH00189
augaaccccaaucagaagaucauuaccauaggcagcgugucccugacaaucgccacuauuugcuuccucaugcaaaucgcuauucuugucacgaccguuacacugcacuuuaaacaguacgaguauaacucuccuccaaauaaccaggugauguugugugaaccgaagaucauagagagaaauaucacugaaauuguauacuuaaccaacacaaccaucgagaaagaaauuugccccaagcuggcagaguauaggaauuggucaaaaccucaguguaagaucacuggguucgccccauuuaguaaggacaacagcauacggcuauccgcgggaggugauauuugggugacacgcgagcccuacgucucuugcgacccuggcaaauguuaucaauucgcucucgggcagggaaccacgcugaauaaccgacauucgaaugauacugugcacgaccguaccccauacagaacacuucugaugaacgaauugggcguucccuuucaucucgguacuaaacaggugugcaucgccuggucaagcaguuccugucacgaugggaaggcauggcugcaugucugcgugaccggacacgacgagaaugccacagcuucuuucauuuaugauggcaggcugguagacagcaucggcuccuggucaaagaacauccuccggacccaggaaagugaguguguuugcauuaaugggacguguacuguggucaugacagauggaagcgcaucugagcgcgccgacaccaaaauauuauuuaucgaagaggguaagauugugcacaucuccccucugucaggcagcgcucaacauguggaagagugcaguugcuacccaagauacccgggggucagguguguuugccgggauaacuggaagggaucuaaccgccccauaguggacauuaauguaaaagauuauuccaucgugagcucguacgucuguucuggccuugugggugacacuccucgaaagaacgacuccucaaguagcuccuauugcagaaauccaaacaaugaaaaagggucucacggaguuaagggcugggccuucgaugacggcaacgauguguggauggggaggacaaucagcgaggaguugcggucaggauacgaaaccuuuaaagucauugguggcuggaguaagcccaauuccaaacugcagaucaaccgucaggugauuguagaccgcgggaauagaagcggauauucuggcauauucucaguugaggguaagaguuguaucaacaggugcuuuuacguggaacuaauucgggggcgaaagcaggagacggaagucugguggaccagcaauuccaucguggucuucuguggcacaucuggaacuuauggcaccgggucguggccugauggagcggacaucaaccucaugccaauuuga

SEQ ID NO: 150133 - RNA, 1410 nt, Artificial Sequence; identical to SEQ ID NO: 143233
  derived and/or modified CDS sequence (opt3) from neuraminidase__InfluenzaA__AFH00200

SEQ ID NO: 150134 - RNA, 1410 nt, Artificial Sequence; identical to SEQ ID NO: 150130
  derived and/or modified CDS sequence (opt3) from neuraminidase__InfluenzaA__AFH00211

SEQ ID NO: 150135 - RNA, 1410 nt, Artificial Sequence
  derived and/or modified CDS sequence (opt3) from neuraminidase__InfluenzaA__AFH00222
augaaccccaaucagaagaucauuaccauaggcagcgugucccugacaaucgccacuauuugcuuccucaugcaaaucgcuauucuugucacgaccguuacacugcacuuuaaacaguacgaguguaacucuccuccaaauaaccaggugauguugugcgaaccgacuaucauagagagaaauaucaccgaaauuguauauuuaacaaacaccacuaucgagaaggaaauuugucccaaacuggcagaguacaggaauuggucaaagccucagugcaaaaucacaggguucgccccauuuaguaaggacaacagcauacggcuauccgcgggaggugauauuugggugacccgcgagcccuaugucucuugugacccuggcaagugcuaccaauucgcucucgggcagggaacgacucugaauaaccgacauucgaauaacaccgugcacgaucguacaccauauagaacucuucugaugaaugaauugggcguucccuuucaucucgguaccaaacagguguguaucgccuggucaagcaguuccugccacgacgggaaggcauggcugcaugucugugugacaggacacgaugagaacgccaccgcuucuuucauuuacgacggcaggcugguagauagcaucggcuccuggaguaaaaauauccuccggacgcaggaaucagagugcguuuguauuaacgggacuugcacaguggucaugaccgacggaagcgcaucugagcgcgccgauacuaagauauuauuuaucgaagaggguaaaauugugcacaucuccccucugucaggcagcgcucaacauguggaagagugcaguuguuauccaagauacccgggggucaggugcguuugucgggacaacuggaagggaucuaaucgccccauaguggauauuaacguaaaggacuacuccaucgugagcucguaugucugcucuggccuugugggugauacaccucgaaagaaugacuccucaaguagcuccuacuguagaaacccaaauaacgaaaaagggucucacggaguuaaaggcugggccuucgacgauggcaaugacguguggauggggaggaccaucagcgaggaguugcggucaggauaugaaacguuuaaggucauugguggcuggaguaaacccaacuccaagcugcagaucaaucgucaggugauuguagaucgcgggaacagaagcggauacucuggcauauucucaguugaggguaaaaguugcaucaauagguguuuuuauguggaacuaauucgggggcgaaagcaggagaccgaagucugguggacaagcaacuccaucguggucuucugcggcacuucuggaaccuacggcacagggucguggccugacggagcggauaucaaucucaugccaauuuga

SEQ ID NO: 150136 - RNA, 1410 nt, Artificial Sequence; identical to SEQ ID NO: 143149
  derived and/or modified CDS sequence (opt3) from neuraminidase__InfluenzaA__AFH00233

SEQ ID NO: 150137 - RNA, 1410 nt, Artificial Sequence
  derived and/or modified CDS sequence (opt3) from neuraminidase__InfluenzaA__AFH00244
augaaccccaaucagaagaucauuaccauaggcagcgugucccugacaaucgccacuauuugcuuccucaugcaaaucgcuauucuugucacgaccguuacacuguacuuuaaacaguaugaguguaacucuccuccaucaaaucaggugauguugugcgaaccgacuaucguagagagaaacauaaccgaaaucguguacuuaacaaauaccacuauugagaaggaaaucugucccaaacuggcagaguauaggaacuggaguaagccucagugcaaaauuacaggguucgccccauuuagcaaggacaauuccauccggcuaucugcgggaggugauauaugggucacccgcgagcccuacgugucgugugacccuggcaagugcuaucaauucgcucucgggcagggaacgacucugaacaaucgacacucaaacgauaccguucaugaccguacaccauacagaacucuucugaugaaugaauugggcgugcccuuucaccucgguaccaaacaggucuguauugccuggagcaguuccucuugccaugaugggaaggcauggcugcacguguguguaacaggacaugacgagaacgccaccgcuagcuucaucuaugauggcaggcugguugacuccauuggcucauggaguaaaaauauccuccggacgcaggaaagcgagugcguguguaucaacgggacuugcacagucgugaugaccgauggaucugcauccgagcgcgccgacacuaagauuuuauuuauagaagaggguaaaaucgugcacauuucaccucugagcggcagugcuaagcacgucgaagagugcucuuguuacccaagauacccggggguuaggugcgugugucgggauaauuggaagggauccaaccgccccaucguagacauaaacgugaaagauuauagcauugucucgucuuacgugugcuccggccuuguuggugacacaccucgaaagaaugacucaaguagcuccucuuauuguagaaacccaaauaacgaaaaagggagccauggagugaagggcugggccuucgaugacggcaaugaugucuggauggggaggaccaucucagaggaguugcggaguggauacgaaacguuuaaagugaucgguggcugguccaagcccaacagcaaacugcaaauuaaucgucagguaaucguugaccgcgggaacagaucuggauauucaggcauuuucaguguggaggguaagagcugcauaaauagguguuuuuacgucgaacuaauccgggggcgaaagcaggagaccgaagugugguggacauccaacucuauugucguguucugcggcacuucgggaaccuauggcacagggagcuggccugauggagcggacaucaaucucaugccaaucuga

SEQ ID NO: 150138 - RNA, 1410 nt, Artificial Sequence; identical to SEQ ID NO: 143233
  derived and/or modified CDS sequence (opt3) from neuraminidase__InfluenzaA__AFH00255

SEQ ID NO: 150139 - RNA, 1410 nt, Artificial Sequence; identical to SEQ ID NO: 143233
  derived and/or modified CDS sequence (opt3) from neuraminidase__InfluenzaA__AFH00266

SEQ ID NO: 150140 - RNA, 1410 nt, Artificial Sequence
  derived and/or modified CDS sequence (opt3) from neuraminidase__InfluenzaA__AFH00277
augaaccccaaucagaagaucauuaccauaggcagcgugucccugacaaucgccacuauuugcuuccucaugcaaaucgcuauucuugucacgaccguuacacugcacuuuaaacaguacgaguguaacucuccuccaucaaaucaggugauguugugcgaaccgacuaucauagagagaaacaucaccgaaauuguauauuuaacaaauaccacuaucgagaaggaaauuugucccaaacuggcagaguacaggaacuggaguaagccucagugcaaaaucacaggguucgccccauuuagcaaggacaauuccauacggcuaucugcgggaggugauauuugggugacccgcgagcccuaugucucgugugacccuggcaagugcuaccaauucgcucucgggcagggaacgacucugaacaaucgacauucaaacgauaccgugcacgaccguacaccauauagaacucuucugaugaaugaauugggcguucccuuucaucucgguaccaaacagguguguaucgccuggagcaguuccucuugccacgaugggaaggcauggcugcaugucugugugacaggacacgacgagaacgccaccgcuagcuucauuuacgauggcaggcugguagacuccaucggcucauggaguaaaaauauccuccggacgcaggaaagcgagugcguuuguauuaacgggacuugcacaguggucaugaccgauggaucugcauccgagcgcgccgacacuaagauauuauuuaucgaagaggguaaaauugugcacaucucaccucugagcggcagugcucaacauguggaagagugcucuuguuauccaagauacccgggggucaggugcguuugucgggauaauuggaagggauccaaccgccccauaguggacauuaacguaaaggauuacagcaucgugucgucuuaugucugcuccggccuugugggugacacaccucgaaagaaugacucaaguagcuccucuuacuguagaaaaccaaacaaugaaaaagggagccacggauugaagggcugggccuucgaugacggcaacgauguuuggauggggaggaccaucucagaggagcugcggaguggauaugaaacguuuaaagugauugguggcugguccaagcccaauagcaaacuacagaucaaccgucaggucauuguggaccgcgggaauagaucuggauacucaggcauauucaguguagaggguaagagcugcaucaacagguguuuuuauguugaacucauucgggggcgaaagcaggagaccgaagugugguggacauccaauucuaucgucguguucugcggcacuucgggaaccuacggcacagggagcuggccugauggagcggacaucaaccugaugccaauuuga

SEQ ID NO: 150141 - RNA, 1410 nt, Artificial Sequence; identical to SEQ ID NO: 143233
  derived and/or modified CDS sequence (opt3) from neuraminidase__InfluenzaA__AFH00288

SEQ ID NO: 150142 - RNA, 1410 nt, Artificial Sequence; identical to SEQ ID NO: 150065
  derived and/or modified CDS sequence (opt3) from neuraminidase__InfluenzaA__AFH00299

SEQ ID NO: 150143 - RNA, 1410 nt, Artificial Sequence
  derived and/or modified CDS sequence (opt3) from neuraminidase__InfluenzaA__AFH00310
augaaccccaaucagaagaucauuaccauaggcagcgugucccugacaaucgccacuauuugcuuccucaugcaaaucgcuauucuugucacgaccguuacacugcacuuuaaacaguacgaguguucuucaaguccuaacaaucaggugaucccaugccagccgacuauaaucgaaagaaacauuaccgagaucguauauuugacaaauaccacuauugaaaaggagaucugucccaaauuaguggaauacaggaacuggagcaagccucaaugcaaaauaacaggguucgcaccauuuuccaaggacaauucuauucggcugucggccggaggugauaucugggucacccgcgagcccuaugugucaugugacccuggcaagugcuaccaguucgcgcuagggcagggaacgacucucaacaaucgacauagcaacgauaccguucacgaccguacaccauauagaacucugcuuaugaaugagcugggcgugcccuuucauuuggguaccaaacaggucuguauugcuuggaguuccucuagcugccacgaugggaaggccuggcuccauguguguguaacaggacacgacgaaaacgcaaccgccuccuucaucuacgauggcaggcugguugacucaaucggcaguuggagcaaaaauauucugcggacgcaagagucugaaugcguguguauaaacgggacuugcacagucgugaugaccgauggauccgcuucagagaaggcagacacuaaaauccucuuuauugaggaagguaaggugguccacaucagcccuuuaaguggcucugcccagcauguugaggaaugcuccuguuauccacgcuacccgggggugagaugcguauguagggauaauuggaagggaagcaaccggcccauaguggacauuaacgucaaaaauuacucgaucgugucuuccuauguuugcucaggccuggugggugauacaccucgcaagaacgacaguagcuccucuagcuacugucgaaauccaaacaaugagaaagggucacacggagucaagggcugggcuuucgacgauggcaacgacguguggauggggagaaccaucagugaggaacuuagguccggauaugagacguuuaaaguaauugguggcuggagcacccccaauucuaaguugcagaucaaccggcagguuauuguggauucagggaaucguaguggauacagcggcauauucuccgucgaagguaaaucuugcaucaaccgcuguuuuuauguggagcugauuagagggaggaagcaagaaacaaaggucugguggacuucgaauagccuagugguuuucugcggcaccuccggaacauacggcacugggucauggccugacggagccgauaucaaccucaugccaaucuga

SEQ ID NO: 150144 - RNA, 1410 nt, Artificial Sequence; identical to SEQ ID NO: 150143
  derived and/or modified CDS sequence (opt3) from neuraminidase__InfluenzaA__AFH00321

SEQ ID NO: 150145 - RNA, 1410 nt, Artificial Sequence
  derived and/or modified CDS sequence (opt3) from neuraminidase__InfluenzaA__AFH00332
augaaccccaaucagaagaucauuaccauaggcagcgugucccugacaaucgccacuauuugcuuccucaugcaaaucgcuauucuugucacgaccguuacacugcacuuuaaacaguacgaguguaacucuccuccaaauaaccaggugauguugugcgaaccgacuaucauagagagaaauaucaccgaaauuguauauuuaacaaacaccacuaucgagaaggaaauuugucccaaacuggcagaguacaggaauuggucaaagccucagugcaaaaucacaggguucgccccauuuaguaaggacaacagcauacggcuauccgcgggaggugauauuugggugacccgcgagcccuaugucucuugugacccuggcaagugcuaccaauucgcucucgggcagggaacgacucugaauaaccgacauucgaaugauaccgugcacgaccguacaccauauagaacucuucugaugaacgaauugggcguucccuuucaucucgguaccaaacagguguguaucgccuggucaagcaguuccugccacgaugggaaggcauggcugcaugucugugugacaggacacgacgagaaugccaccgcuucuuucauuuacgauggcaggcugguagacagcaucggcuccuggaguaaaaacauccuccggacgcaggaaucagagugcguuuguauuaaugggacuugcacaguggucaugaccgauggaagcgcaucugagcgcgccgacacuaagauauuauuuaucgaagaggguaaaauugugcacaucuccccucugucaggcagcgcucaacauguggaagagugcaguuguuauccaagauacccgggggucaggugcguuugucgggauaacuggaagggaucuaaccgccccauaguggacauuaauguaaaggauuacuccaucgugagcucguaugucugcucuggccuugugggugacacaccucggaaaaacgacuccucaaguagcucccacuguuugaauccaaacaaugaagaagggggacauggcguuaagggcugggccuucgaugacgggaacgauguguggaugggaagaaccaucucugagaaacugaggagcgguuacgagacguuuaaggucauuggcggguggucaaaacccaauaguaagcuacagaucaaccgacaggugauuguagaccguggaaaucgcuccggcuauagcgguauauucucuguugaggggaaaggcugcaucaacagauguuuuuacguggaacucauuaggggacggaagcaggagaccgaagucugguggacaucaaauaguaucguggucuucugcggcacuagcgggaccuauggaacagguuccuggccugauggcgcggacaucaaccugaugccaauuuga

SEQ ID NO: 150146 - RNA, 1410 nt, Artificial Sequence
  derived and/or modified CDS sequence (opt3) from neuraminidase__InfluenzaA__AFH00343
augaaccccaaucagaagaucauuaccauaggcagcgugucccugacaaucgccacuauuugcuuccucaugcaaaucgcuauucuugucacgaccguuacacugcacuuuaaacaguacgaguguaacucuccuccaucaaaucaggcaauguugugcgaaccgacuaucauagagagaaacaucaccgaaauuguguauuuaacaaauaccacuaucgagaaggaaauuugucccaaacuggccgaguacaggaacuggaguaagccucagugcaaaaucacaggguucgcgccauuuagcaaggacaauuccauacggcuaucugcuggaggugauauuuggguaacccgcgagcccuaugugucgugugacccuggcaagugcuaccaauucgcccucgggcagggaacgacucugaacaaucgacauucaaacgauaccguccacgaccguacaccauauagaacucuucugaugaaugaauugggcgugcccuuucaucucgguaccaaacagguuuguaucgcauggagcaguuccucuugccacgaugggaaggccuggcugcaugugugugucacaggacacgacgagaacgcuaccgccagcuucauuuacgauggcaggcugguggacuccaucggcucauggaguaaaaauauccuccggacgcaggaaagcgagugcguauguauuaacgggacuugcacaguugugaugaccgauggaucugcauccgagcgcgcugacacuaagauauuauuuaucgaagaggguaaaauuguccacaucucaccucugagcggcagugcccaacauguggaagagugcucuuguuauccaagauacccgggggugaggugcgucugucgggauaauuggaagggauccaaccgccccauaguugacauuaacgugaaggauuacagcaucguaucgucuuaugugugcuccggccuugucggugacacaccucgaaagaaugacucaaguagcuccucuuacuguagaaacccaaauaacgaaaaagggagccacggagugaaaggcugggcguucgaugacggcaaugauguuuggauggggaggaccaucucagaggaguugcggaguggauaugaaacguuuaaggugauugguggcugguccaaacccaacagcaagcugcagaucaaucgucaggucauuguggaccgcgggaacagaucuggauacucaggcauauucaguguagaggguaaaagcugcaucaauagguguuuuuauguugaacuaauucgggggcgaaagcaggagaccgaagugugguggacauccaacucuaucgucguguucugcggcacuucgggaaccuacggcacagggagcuggccugauggagcagacaucaaucucaugccaauuuga

SEQ ID NO: 150147 - RNA, 1410 nt, Artificial Sequence
  derived and/or modified CDS sequence (opt3) from neuraminidase__InfluenzaA__AFH00354
augaaccccaaucagaagaucauuaccauaggcagcgugucccugacaaucgccacuauuugcuuccucaugcaaaucgcuauucuugucacgaccguuacacugcacuuuaaacaguacgaguguaacucuccuccaaauaaccaggugauguugugcgaaccgacuaucauagagagaaauaucaccaagauuguauauuuaacaaacaccacuaucgaaaaagagauuugucccaagcuggcagaauacaggaauuggucaaaaccucagugcaagaucacaggguucgccccauuuaguaaggacaacagcauacggcuauccgcgggaggugauauuugggugacccgcgagcccuaugucucuugugacccuggcaaaugcuaccaauucgcucucgggcagggaacgacucugaauaaccgacauucgaaugauaccgugcacgaccguacaccauauagaacucuucugaugaacgaguugggcguucccuuucaucucgguaccaaacagguguguaucgccuggucaagcaguuccugccacgaugggaaggcauggcugcaugucugugugacaggacacgacgaaaaugccaccgcuucuuucauuuacgauggcaggcugguagacagcaucggcuccuggucaaagaacauccuccggacgcaggagagugaaugcguuuguauuaaugggacuugcacaguggucaugaccgauggaagcgcaucugagcgcgccgacacuaaaauauuauuuaucgaggaagguaagauugugcacaucuccccucugucaggcagcgcucaacauguggaggaaugcaguuguuauccaagauacccgggggucaggugcguuugucgggauaacuggaagggaucuaaccgccccauaguggacauuaauguaaaagauuacuccaucgugagcucguaugucugcucuggccuugugggugacacaccucgaaagaacgacuccucaaguagcuccuacuguuugaauccaaacaaugaggaagggggacacggcguuaaaggcugggccuucgaugacgggaacgauguguggaugggaagaaccaucucugagaagcugaggagcgguuaugagacguuuaaagucauuggcggguggucaaagcccaauaguaaacuacagaucaaccgucaggugauuguagaccggggaaaucgcuccggcuacagcgguauauucucuguugaagggaagucaugcgugaacagauguuuuuaugucgagcucaucaggggccggaagcaggaaaccgaggugugguggacaaguaauagcauugucguguucugcggaacuuccggcaccuacgggacaggaucuuggccugauggugcggacaucaaccugaugccaaucuga

SEQ ID NO: 150148 - RNA, 1410 nt, Artificial Sequence; identical to SEQ ID NO: 143028
  derived and/or modified CDS sequence (opt3) from neuraminidase__InfluenzaA__AFH00365

SEQ ID NO: 150149 - RNA, 1410 nt, Artificial Sequence
  derived and/or modified CDS sequence (opt3) from neuraminidase__InfluenzaA__AFH00376
augaaccccaaucagaagaucauuaccauaggcagcgugucccugacaaucgccacuauuugcuuccucaugcaaaucgcuauucuugucacgaccguuacacugcacuuuaaacagugugagugcaacucuccuccaaauaaccaggugauguugugugaaccgacuaucauagagagaaauaucaccgaaauuguauacuuaacaaacaccacuaucgagaaggaaauuugccccaaacuggcagaguauaggaauuggucaaagccucaguguaaaaucacaggguucgccccauuuaguaaggacaacagcauacggcuauccgcgggaggugauauuugggugacccgcgagcccuacgucucuugcgacccuggcaaguguuaucaauucgcucucgggcagggaacgacucugaauaaccgacauucgaaugauaccgugcacgaccguacaccauacagaacucuucugaugaacgaauugggcguucccuuucaucucgguaccaaacaggugugcaucgccuggucaagcaguuccugucacgaugggaaggcauggcugcaugucugcgugacaggacacgacgagaaugccaccgcuucuuucauuuaugauggcaggcugguagacagcaucggcuccuggaguaaaaacauccuccggacgcaggaaucagaguguguuugcauuaaugggacuugcacaguggucaugaccgauggaagcgcaucuggucgcgccgacacuaagauauuauuuaucgaggaaggcaaaauugugcacaucuccccucugucagggagcgcucaacauguggaggaauguaguugcuacccaagauauccgggagucagguguguuugccgggauaacuggaagggcucuaaccgccccauaguggacauuaauguaaaggauuacuccaucgugagcucguacgucuguucuggucuugugggggacacaccucggaaaaacgacuccucaaguagcuccuauugcuugaauccaaacaaugaggaaggaggccacggcguuaaggggugggccuucgaugacggaaacgauguguggauggguagaaccaucucugagaaacugaggagcggcuacgagacguuuaaggucauugggggauggucaaaacccaauaguaagcuacagaucaaccgacaggugauuguagaccguggcaaucgcuccgguuauagcgggauauucucuguugaaggcaaaucauguaucaacagaugcuuuuacguggagcucauuaggggacggaagcaggaaaccgaggucugguggacaaguaauagcaucguggucuucuguggcacuuccgggaccuauggaacagguucuuggccugauggcgcggacaucaaccugaugccaauuuga

SEQ ID NO: 150150 - RNA, 1410 nt, Artificial Sequence
  derived and/or modified CDS sequence (opt3) from neuraminidase__InfluenzaA__AFH00387
augaaccccaaucagaagaucauuaccauaggcagcgugucccugacaaucgccacuauuugcuuccucaugcaaaucgcuauucuugucacgaccguuacacugcacuuuaaacaguacgaguguaacucuccuccaaauaaccaggugauguugugcgaaccgacuaucauagagagaaauaucaccgaaauuguauauuuaacaaacaccacuaucgagaaggaaauuugucccaaacuggcagaguacaggaauuggucaaagccucagugcaaaaucacaggguucgccccauuuaguaaggacaacagcauacggcuauccgcgggaggugauauuugggugacccgcgagcccuaugucucuugugacccugauaagugcuaccaauucgcucucggccaggggacgacucugaauaaccgacauucgaaugacaccgugcacgaucguacaccauauagaacucuucugaugaacgaauugggaguucccuuucaucucggcaccaaacagguguguaucgccuggucaagcaguuccugccacgacgguaaggcauggcugcaugucugugugacagggcacgaugagaaugccaccgcuucuuucauuuacgacggaaggcugguagauagcaucuccucauggaguaaaaacauccuccggacgcaggaaagcgagugcguuuguauuaauggcacuugcacaguggucaugaccgacggcucugcauccgagcgcgccgauacuaagauauuauuuaucgaagaggggaaaauugugcacaucucaccucugagcggaagugcucaacauguggaagagugcucuuguuauccaagauacccgggugucaggugcguuugucgggacaacuggaagggcuccaaccgccccauaguggauauuaauguaaaggacuacagcaucgugucgucuuaugucugcuccgggcuugugggagacacaccucggaaaaacgauucaaguagcuccucuuacuguuugaauccaaacaaugaagagggcggucacgggguuaagggaugggccuucgacgauggcaacgacguguggaugggcagaaccaucagcgagaaacugaggucaggguaugaaacguuuaaggucauuggagguuggaguaaacccaauuccaagcuacagaucaaccgacaggugauuguagaucguggcaaucgcagcggguacucuggaauauucucaguugagggcaaaaguugcgugaacagauguuuuuaugucgaacucaucaggggucggaagcaggagaccgaagugugguggacaagcaauuccauugucguguucugcgggacuucuggcaccuacggaacaggcucguggccugacggggcggauaucaaccugaugccaaucuga

SEQ ID NO: 150151 - RNA, 1410 nt, Artificial Sequence
  derived and/or modified CDS sequence (opt3) from neuraminidase__InfluenzaA__AFH00398
augaaccccaaucagaagaucauuaccauaggcagcgugucccugacaaucgccacuauuugcuuccucaugcaaaucgcuauucuugucacgaccguuacacugcacuuuaaacaguacgaguguaacucuccuccaaauaaccaggugauguugugcgaaccgacuaucauagagagaaauaucaccgaaauuguauauuuaacaaacaccacuaucgagaaggaaauuugucccaaacuggcagaguacaggaauuggucaaagccucagugcaaaaucacaggguucgccccauuuaguaaggacaacagcauacggcuauccgcgggaggugauauuugggugacccgcgagcccuaugucucuugugacccuggcaagugcuaccaauucgcucucgggcagggaacgacucugaauaaccgacauucgaaugauaccgugcacgaccguacaccauauagaacucuucugaugaacgaauugggcguucccuuucaucucgguaccaaacagguguguaucgccuggucaagcaguuccugccacgaugggaaggcauggcugcaugucugugugacaggacacgacgagaaugccaccgcuucuuucauuuacgauggcaggcugguagacagcaucggcuccuggaguaaaaacauccuccggacgcaggaaucagagugcguuuguauuaaugggacuugcacaguggucaugaccgauggaagcgcaucugagcgcgccgacacuaagauauuauuuaucgaagaggguaaaauugugcacaucuccccucugucaggcagcgcucaacauguggaagagugcaguuguuauccaagauacccgggggucaggugcguuugucgggauaacuggaagggaucuaaccgccccauaguggacauuaauguaaaggauuacuccaucgugagcucguaugucugcucuggccuugugggugacacaccucggaaaaacgacuccucaaguagcuccuacuguuugaauccaaacaaugaagaagggggacacggcguuaagggcugggccuucgaugacgggaacgauguguggaugggaagaaccaucucugagaaacugaggagcgguuaugagacguuuaaggucauuggcggguggucaaaacccaauaguaagcuacagaucaaccgacaggugauuguagaccguggaaaucgcuccggcuacagcgguauauucucuguugaggggaaaucaugcgugaacagauguuuuuaugucgaacucaucaggggccggaagcaggagaccgaagugugguggacaaguaauagcauugucguguucugcggaacuuccggcaccuacggggcgggaucuuggccugauggugcagacaucaaccugaugccaaucuga

SEQ ID NO: 150152 - RNA, 1410 nt, Artificial Sequence
  derived and/or modified CDS sequence (opt3) from neuraminidase__InfluenzaA__AFH00409
augaaccccaaucagaagaucauuaccauaggcagcgugucccugacaaucgccacuauuugcuuccucaugcaaaucgcuauucuugucacgaccguuacacugcacuuuaaacaguacgaguguaacucuccuccaaauaaccaggugauguugugcgaaccgacuaucauagagagaaauaucaccgaaauuguauauuuaacaaacaccacuaucgagaaggaaauuugucccaaacuggcagaguacaggaauuggucaaagccucagugcaaaaucacaggguucgccccauuuaguaaggacaacagcauacggcuauccgcgggaggugauauuugggugacccgcgagcccuaugucucuugugacccuggcaagugcuaccaauucgcucucgggcagggaacgacucugaauaaccgacauucgaaugauaccgugcacgaccguacaccauauagaacucuucugaugaacgaauugggcguucccuuucaucucgguaccaaacagguguguaucgccuggucaagcaguuccugccacgaugggaaggcauggcugcaugucugugugacaggacacaaugagaacgccaccgcuucuuucauuuacgacggcaggcugguagauagcaucggcuccuggaguaaaaauauccuccggacgcaggaaucagagugcguuuguauuaacgggacuugcacaguggucaugaccgacggaagcgcaucuggucgcgccgauacuaagauauuauuuaucgaggaaggcaaaauugugcacaucuccccucugucagggagcgcucaacauguggaggaaugcaguuguuauccaagauacccgggagucaggugcguuugucgggacaacuggaagggcucuaaucgccccauaguggauauuaacguaaaggacuacuccaucgugagcucguaugucugcucuggucuugugggggauacaccucggaaaaaugacuccucaaguagcuccuacuguuugaacccaaauaacgaggaaggaggccacggcguuaaggggugggccuucgacgauggaaaugacguguggauggguagaaccaucucugagaaacugaggagcggcuaugagacguuuaaggucauugggggauggucaaaacccaacaguaagcuacagaucaaucgacaggugauuguagaucguggcaaccgcuccgguuacagcgggauauucucuguugaaggcaaaucaugcaucaauagauguuuuuauguggagcucauuaggggacggaagcaggaaaccgaggucugguggacaaguaacagcaucguggucuucugcggcacuuccgggaccuacggaacagguucuuggccugacggcgcggauaucaaucugaugccaauuuga

SEQ ID NO: 150153 - RNA, 1410 nt, Artificial Sequence; identical to SEQ ID NO: 143028
  derived and/or modified CDS sequence (opt3) from neuraminidase__InfluenzaA__AFH00420

SEQ ID NO: 150154 - RNA, 1410 nt, Artificial Sequence; identical to SEQ ID NO: 143161
  derived and/or modified CDS sequence (opt3) from neuraminidase__InfluenzaA__AFH00431

SEQ ID NO: 150155 - RNA, 1410 nt, Artificial Sequence
  derived and/or modified CDS sequence (opt3) from neuraminidase__InfluenzaA__AFH00442
augaaccccaaucagaagaucauuaccauaggcagcgugucccugacaaucgccacuauuugcuuccucaugcaaaucgcuauucuugucaucacgguuacccugcacuuuaaacaguacgaguguaacucuccuccaaauaaccaggugauguugugcgaaccgacaauaaucgagagaaauauuacugaaaucguauauuuaaccaacacaaccauugagaaggaaaucugucccaaacuggcagaguacaggaauuggucaaagccucagugcaaaauaacuggguucgccccauuuaguaaggacaacagcauucggcuauccgcgggaggugauaucugggugacacgcgagcccuaugucucuugugacccuggcaagugcuaccaauucgcucucgggcagggaaccacgcugaauaaccgacauucgaaugauacugugcacgaccguaccccauauagaacacuucugaugaacgaauugggcguucccuuucaucucgguacuaaacagguguguauugccuggucaagcaguuccugccacgaugggaaggcauggcugcaugucugugugaccggacacaaugagaacgccacagcuucuuucaucuacgacggcaggcugguagauagcaucggcuccuggaguaaaaauauucuccggacccaggaaucagagugcguuuguauaaacgggacgugcacuguggucaugacagacggaagcgcaucuggucgcgccgauaccaagaucuuauuuauugaggaaggcaaaaucgugcacauauccccucugucagggagcgcucaacauguggaggaaugcaguuguuauccaagauacccgggagucaggugcguuugucgggacaacuggaagggcucuaaucgccccauuguggauaucaacguaaaggacuacuccaucgugagcucguaugucugcucuggucuugugggggauacuccucggaaaaaugacuccucaaguagcucccacuguuugaacccaaauaacgaggaaggaggccauggcguuaaggggugggccuucgacgauggaaaugacguguggauggguagaacaauuucugagaaacugaggagcggcuacgagaccuuuaaggucaucgggggauggucaaaacccaacaguaagcuacagauuaaucgacaggugauaguagaucguggcaaccgcuccgguuauagcgggaucuucucuguugaaggcaaaucaugcauuaauagauguuuuuacguggagcucaucaggggacggaagcaggaaacggaggucugguggaccaguaacagcaucguggucuucugcggcacauccgggacuuauggaaccgguucuuggccugacggcgcggauauuaaucugaugccaauauga

SEQ ID NO: 150156 - RNA, 1410 nt, Artificial Sequence
  derived and/or modified CDS sequence (opt3) from neuraminidase__InfluenzaA__AFH00453
augaaccccaaucagaagaucauuaccauaggcagcgugucccugacaaucgccacuauuugcuuccucaugcaaaucgcuauucuugucacgaccguuacacugcacuuuaaacaguacgaguguaacucuccuccaaauaaccaggugauguugugcgaaccgacuaucauagagagaaauaucaccgaaguaguguauuuaacaaacaccacuauugagaaggaaaucugucccaaacuggcagaguacaggaauuggucaaagccucagugcaaaauuacaggguucgccccauuuaguaaggacaacagcauccggcuauccgcgggaggugauauaugggucacccgcgagcccuaugugucuugugacccugauaagugcuaccaauucgcucucggccaggggacgacucugaauaaccgacauucgaaugacauuguucacgaucguaccccauauagaacacuucugaugaacgaauugggagugcccuuucaucucggcacuaaacaggucuguaucgccuggucaagcaguuccugccacgacgguaaggcauggcugcauguguguguaaccgggcacgaugagaaugccacagcuucuuucauuuacgacggaaggcugguugauagcaucggcuccuggaguaaaaagauccuccggacccaggaaucagagugcguguguauuaacggcacgugcacugucgugaugacagacgggagcgcaucuggacgcgccgauaccaaaauauuauuuaucgaggaagguaagauugugcacaucuccccucugucaggcagcgcucaacaugucgaggaaugcaguuguuauccaagauacccggggguuaggugcgugugucgggacaauuggaagggaucuaaccgccccauaguagauauuaacgugaaagacuacuccaucgucagcucguaugugugcucuggccuuguuggugacacuccucgaaagaaugauuccucaaguagcucccacuguuugaacccaaauaacgaggaagggggacauggcgugaaaggcugggccuucgacgaugggaaugacgucuggaugggaagaacaaucucugagaagcugaggagcgguuacgagaccuuuaaagugauuggcggguggucaaagcccaacaguaaacuacagaucaaucggcagguaauuguugaucguggaaaccgcuccggcuauagcgguauauucucuguggaagggaagucaugcaucaauagauguuuuuacgucgagcucauuaggggccggaagcaggaaacggaggugugguggaccaguaacagcaucgucguguucugcggaacauccggcacuuaugggaccggaucuuggccugacggugcggauaucaaucugaugccaauuuga

SEQ ID NO: 150157 - RNA, 1410 nt, Artificial Sequence
  derived and/or modified CDS sequence (opt3) from neuraminidase__InfluenzaA__AFH00464
augaaccccaaucagaagaucauuaccauaggcagcgugucccugacaaucgccacuauuugcuuccucaugcaaaucgcuauucuugucacgaccguuacacugcacuuuaaacaguacgaguguaacucuccuccaaauaaccaggugauguugugcgaaccgacuaucauagagagaaauaucaccgaaauuguauauuuaacaaacaccacuaucgagaaggaaauuugucccaaacuggcagaguacaggaauuggucaaagccucagugcaaaaucacaggguucgccccauuuaguaaggacaacagcauacggcuauccgcgggaggugauauuugggugacccgcgagcccuaugucucuugugacccuggcaagugcuaccaauucgcucucgggcagggaacgacucugaaaaaucgacauucgaacgauaccgugcacgaccguacaccauauagaacucuucugaugaaugaauugggcguucccuuucaucucgguaccaaacagguguguaucgccuggucaagcaguuccugccacgaugggaaggcauggcugcaugucugugugacaggacacgacgagaacgccaccgcuucuuucauuuacggcggcaggcugguagauagcaucggguccuggucaaagaaaauccuccggacgcaggaaagugagugcguuuguauuaauggaacuugcacaguggucaugaccgacgguagcgcaucuggccgcgccgauacuaagauauuauuuaucgaggaagggaagauugugcacaucuccccucugucaggaagcgcucaacauguggaggaaugcaguuguuauccaagauacccgggcgucaggugcguuugucgggacaacuggaaagguucuaaucgccccauaguggauauuaacguaaaggacuacuccaucgugagcucguaugucugcucugggcuugugggagauacaccucggaaaaacgacuccucaaguagcuccuacuguuugaauccaaacaaugaggaaggcggccacgggguuaagggaugggccuucgacgaugguaacgacguguggaugggcagaaccaucucugagaaacugaggagcggguaugagacguuuaaggucauuggaggcuggucaaaacccaauaguaagcuacagaucaaccgacaggugauuguagaucgugguaaucgcuccggguacagcggcauauucucuguugaaggaaagucaugcaucaacagauguuuuuauguggagcucauuaggggccggaaacaggaaaccgaggucugguggacaaguaauagcaucguggucuucugcgggacuuccggaaccuacgguacaggcucuuggccugacggggcggauaucaaccugaugccaauuuga

SEQ ID NO: 150158 - RNA, 1410 nt, Artificial Sequence
  derived and/or modified CDS sequence (opt3) from neuraminidase__InfluenzaA__AFH00475
augaaccccaaucagaagaucauuaccauaggcagcgugucccugacaaucgccacuauuugcuuccucaugcaaaucgcuauucuugucacgaccguuacacugcacuuuaaacaguacgaguguaacucuccuccaaauaaccaggugauguugugcgaaccgacuaucauagagagaaauaucaccgaaauuguauauuuaacaaacaccacuaucgagaaggaaauuugucccaaacuggcagaguacaggaauuggucaaagccucagugcaaaaucacaggguucgccccauuuaguaaggacaacagcauacggcuauccgcgggaggugauauuugggugacccgcgagcccuaugucucuuguaauccugacaagugcuaccaauucgcucucggccaggggacgacucugaacaaucgacauucgaacgauaccgugcacgaccguacaccauauagaacucuucugaugaaugaauugggaguucccuuucaucucggcaccaaacagguguguaucgccuggucaagcaguuccugccacgaugguaaggcauggcugcaugucugugugacagggcacgacgagaacgccaccgcuucuuucauuuacgauggaaggcugguagacagcaucggcuccuggaguaaaaagauccuccggacgcaggaaucagagugcguuuguauuaauggcacuugcacaguggucaugaccgaugggagcgcaucuggacgcgccgacacuaaaauauuauuuaucgaggaagguaagauugugcacaucuccccucugucaggcagcgcucaacauguggaggaaugcaguuguuauccaagauacccgggggucaggugcguuugucgggauaacuggaagggaucuaaccgccccauaguggacauuaauguaaaagauuacuccaucgugagcucguaugucugcucuggccuugugggugacacaccucgaaagaacgacuccucaaguagcucccacuguuugaauccaaacaaugaggaagggggacauggcguuaaaggcugggccuucgaugacgggaacgauguguggaugggaagaaccaucucugagaagcugaggagcgguuacgagacguuuaaagucauugaaggcuggucaaagcccaauaguaaacuacagaucaaccgucaggugauuguagaccgggggaaucgcuccggauauagcggcauauucucuguugaggguaagucaugcaucaacagauguuuuuacguggaacucauuagggggcggaagcaggagaccgaagucugguggacaaguaauagcaucguggucuucugcggcacuuccggaaccuauggcacagggucuuggccugauggagcggacaucaaccugaugccaauuuga

SEQ ID NO: 150159 - RNA, 1410 nt, Artificial Sequence
  derived and/or modified CDS sequence (opt3) from neuraminidase__InfluenzaA__AFH00486
augaaccccaaucagaagaucauuaccauaggcagcgugucccugacaaucgccacuauuugcuuccucaugcaaaucgcuauucuugucacgaccguuacacugcacuuuaaacaguacgaguguaacucuccuccaaauaaccaggugauguugugcgaaccgacuaucauagagagaaauaucaccgaaauuguauauuuaacaaacaccacuaucgagaaggaaauuugucccaaacuggcagaguacaggaauuggucaaagccucagugcaaaaucacaggguucgccccauuuaguaaggacaacagcauacggcuauccgcgggaggugauauuugggugacccgcgagcccuaugucucuugugacccugauaagugcuaccaauucgcucucggccaggggacgacucugaauaaccgacauucgaaugacaccgugcacgaucguacaccauauagaacucuucugaugaacgaauugggaguucccuuucaucucggcaccaaacagguguguaucgccuggucaagcaguuccugccacgacgguaaggcauggcugcaugucugugugacagggcacgaugagaaugccaccgcuucuuucauuuacgacggaaggcugguagauagcaucggcuccuggaguaaaaagauccuccggacgcaggaaucagagugcguuuguauuaacggcacuugcacaguggucaugaccgacgggagcgcaucuggacgcgccgauacuaaaauauuauuuaucgaggaagguaagauugugcacaucuccccucugcuuggcucagcucaacauguggaggaaugcagcuguuauccaagauacccgggggucaggugcguuugucgggacaauuggaagggaaguaaccgccccauaguggauauuaacguaaaagacuacucuaucguguccagcuaugucugcucgggcuuggugggugacacaccucgaaagaaugauucuuccucaaguagccacugucugaacccaaauaacgaggaagggggacauggcguuaaaggcugggccuucgacgaugggaaugacguguggaugggaagaaccaucuccgagaagcuaaggucugguuacgagacguuuaaagucauugaaggcuggagcaagcccaacucaaaacuccagaucaaucgucaggugauuguagaucgggggaaccgcaguggauauuccggcauauucagcguugaggguaagucuugcaucaauagauguuuuuacguggaacugauuagggggcggaagcaggagaccgaagucugguggacaucaaacaguaucguggucuucugcggcacuagcggaaccuauggcacaggguccuggccugacggagcggauaucaaucuuaugccaauuuga

SEQ ID NO: 150160 - RNA, 1410 nt, Artificial Sequence
  derived and/or modified CDS sequence (opt3) from neuraminidase__InfluenzaA__AFH00497
augaaccccaaucagaagaucauuaccauaggcagcgugucccugacaaucgccacuauuugcuuccucaugcaaaucgcuauucuugucacgaccguuacacugcacuuuaaacaguacgaguguaacucuccuccaaauaaccaggugauguugugcgaaccgacuaucauagagagaaauaucaccgaaauuguauauuuaacaaacaccacuaucaagaaagagauuugucccaagcuggcagaauacaggaauuggucaaaaccucagugcaagaucacaggguucgccccauuuaguaaggacaacagcauacggcuauccgcgggaggugauauuugggugacccgcgagcccuaugucucuugugacccuggcaaaugcuaccaauucgcucucgggcagggaacgacucugaauaaccgacauucgaaugauaccgugcacgaccguacaccauauagaacucuucugaugaacgaguugggcguucccuuucaucucgguaccaaacagguguguaucgccuggucaagcaguuccugccacgaugggaaggcauggcugcaugucugugugacaggacacgacgaaaaugccaccgcuucuuucauuuacgauggcaggcugguagacagcaucggcuccuggucaaagaacauccuccggacgcaggagagugaaugcguuuguauuaaugggacuugcacaguggucaugaccgauggaagcgcaucugagcgcgccgacacuaaaauauuauuuaucgaggaagguaagauugugcacaucuccccucugucaggcagcgcucaacauguggaggaaugcaguuguuauccaagauacccgggggucaggugcguuugucgggauaacuggaagggaucuaaccgccccauaguggacauuaauguaaaagauuacuccaucgugagcucguaugucugcucuggccuugugggugacacaccucgaaagaacgacuccucaaguagcuccuacuguuggaauccaaacaaugagaaagggggacacggcguuaagggcugggccuucgaugacgggaacgauguguggaugggaagaaccaucucugaagaguugaggagcgguuaugagacguuuaaagucauuggcggguggucaaagcccaauaguaaacugcagaucaaccgucaggugauuguagaccggggaaaucgcuccggcuacagcgguauauucucuguugaagggaagucaugcaucaacagauguuuuuauguggagcuaauuaggggccggaagcaggaaaccgaggucugguggacaaguaauagcaucguggucuucugcggaacuuccggcaccuacgggacaggaucuuggccugauggugcggacaucaaccucaugccaauuuga

SEQ ID NO: 150161 - RNA, 1410 nt, Artificial Sequence
  derived and/or modified CDS sequence (opt3) from neuraminidase__InfluenzaA__AFH00508
augaaccccaaucagaagaucauuaccauaggcagcgugucccugacaaucgccacuauuugcuuccucaugcaaaucgcuauucuugucaucacgguuacccugcacuuuaaacaguacgaguguaacucuccuccaaauaaccaggugauguugugcgaaccgacaauaaucgagagaaauauuacugaaaucguauauuuaaccaacacaaccauugagaaggaaaucugucccaaacuggcagaguacaggaauuggucaaagccucagugcaaaauaacuggguucgccccauuuaguaaggacaacagcauucggcuauccgcgggaggugauaucugggugacacgcgagcccuaugucucuugugacccuggcaagugcuaccaauucgcucucgggcagggaaccacgcugaauaaccgacauucgaaugauacugugcacgaccguaccccauauagaacacuucugaugaacgaauugggcguucccuuucaucucgguacuaaacagguguguauugccuggucaagcaguuccugccacgaugggaaggcauggcugcaugucugugugaccggacacaaugagaacgccacagcuucuuucaucuacgacggcaggcugguagauagcaucggcuccuggaguaaaaauauucuccggacccaggaaucagagugcguuuguauaaacgggacgugcacuguggucaugacagacggaagcgcaucuggucgcgccgauaccaagaucuuauuuauugaggaaggcaaaaucgugcacauauccccucugucagggagcgcucaacauguggaggaaugcaguuguuauccaagauacccgggagucaggugcguuugucgggacaacuggaagggcucuaaucgccccauuguggauaucaacguaaaggacuacuccaucgugagcucguaugucugcucuggucuugugggggauacuccucgaaagaaugacuccucaaguagcucccacuguuugaacccaaauaacgaggaaggaggccauggcguuaaagggugggccuucgacgauggaaaugacguguggauggguagaacaauuucugagaaacugaggagcggcuacgagaccuuucgggucaucgggggauggucaaagcccaacaguaaacuacagauuaaucgucaggugauaguagaucgcggcaacagauccgguuauagcgggaucuucucuguugaaggcaagucaugcauuaauagguguuuuuacguggagcucauccggggacgaaaacaggaaacggaggucugguggaccaguaacagcaucguggucuucugcggcacauccgggacuuauggaaccgguucuuggccugacggcgcggauauuaaucugaugccaauauga

SEQ ID NO: 150162 - RNA, 1410 nt, Artificial Sequence
  derived and/or modified CDS sequence (opt3) from neuraminidase__InfluenzaA__AFH00519
augaaccccaaucagaagaucauuaccauaggcagcgugucccugacaaucgccacuaugugcuuccucaugcagauugcuauccuugucacgaccguuacacugcacuuuaaacaguacgaguguaacucuccuccaaauaaccaggugauguugugcgaaccgacuauuaucgagagaaauauaaccgaaaucguauauuuaacaaacaccacuauugagaaggaaaucugucccaaacuggcagaguacaggaauuggucaaagccucagugcaaaauuacaggguucgccccauuuaguaaggacaacagcauccggcuauccgcgggaggugauauaugggugacccgcgagcccuaugucucuugugacccuggcaagugcuaccaauucgcucucgggcagggaacgacucugaauaacggccauucgaaugauaccgugcacgaccgaacaccauaucguacucuucugaugaacgaauuggguguucccuuucaucucgggaccaaacagguguguauugccuggucaagcaguuccugccacgauggaaaggcauggcugcaugucugugugacaggccacgacgagaaugccaccgcuucuuucaucuacgauggcagacugguagacagcauuggguccuggaguaaaaacauccucaggacgcaggaaucagagugcguuuguaucaauggaacuugcacaguggucaugaccgaugguagcgcaucuggccgggccgacacuaagauuuuauuuauagaggaagggaaaaucgugcacauuuccccucugucaggaagcgcucaacauguggaggaaugcaguuguuauccacgcuacccgggcgucagaugcguuuguagggauaacuggaaggguucuaaccggcccaucguggacauaaauguaaaggauuacuccauugugagcucguaugucugcucugggcuugugggagacacaccucgcaaaaacgacuccucaaguagcucccacuguuugaauccaaacaaugaggaaggcggccaugggguuaagggaugggccuucgaugacgguaacgauguguggaugggccgaaccaucucugagaaacugagaagcggguacgagacguuuaaggucaucggaggcuggucaaaacccaauaguaagcuacagauuaacaggcaagugaucguagaccgggguaaucguuccggguauagcggcauuuucucuguugaaggaaaaucaugcauaaaccgcuguuuuuacguggagcucaucagaggcaggaagcaggaaaccgaggucugguggacaaguaauagcauuguggucuucugcgggacuuccggaaccuaugguacaggcucuuggccugauggggcggacaucaaccugaugccaaucuga

SEQ ID NO: 150163 - RNA, 1410 nt, Artificial Sequence; identical to SEQ ID NO: 142621
  derived and/or modified CDS sequence (opt3) from neuraminidase__InfluenzaA__AFH00530

SEQ ID NO: 150164 - RNA, 1410 nt, Artificial Sequence; identical to SEQ ID NO: 142621
  derived and/or modified CDS sequence (opt3) from neuraminidase__InfluenzaA__AFH00541

SEQ ID NO: 150165 - RNA, 1410 nt, Artificial Sequence
  derived and/or modified CDS sequence (opt3) from neuraminidase__InfluenzaA__AFH00552
augaaccccaaucagaagaucauuaccauaggcagcgugucccugacaaucgccacuauuugcuuccucaugcaaaucgcuauucuugucacgaccguuacacugcacuuuaaacaguacgaguguaacucuuugccuaauaaccaggugauguuaugcgaaccaacuaucauagagagaaauaucaccgaaauuguauaucugacaaacaccacuaucgagaaggaaauuuguccgaaacuagcagaguacaggaauuggucaaagccccagugcaaaaucacaggguucgccccuuuuaguaaggacaacagcauacggcucuccgcgggaggugauauuugggugacccgcgagccauaugucucuugugaccccgauaagugcuaccaauucgcucugggccaggggacgacucuuaauaaccgacauucgaaugacaccgugcacgaucguacaccuuauagaacucuguugaugaacgaacucggaguuccauuucaucugggcaccaaacagguguguaucgccuggucaagcaguuccugccacgacgguaaggcauggcugcaugucugugugacagggcacgaugagaaugccaccgcuucuuucauuuacgacggaaggcucguagauagcaucggcuccuggaguaaaaagaucuuacggacgcaggaaagugagugcguuuguauuaacggcacuugcacaguggucaugaccgacgggagcgcaucuggacgcgccgauacuaaaauacuguuuaucgaggaagguaagauuauccacauaucccaacuuucaggcagcacacagcauguggaggaaugcaguuguuaucccagauacccuggggugaggugcgucugucgggacaauuggaagggaucuaaccgcccaauuguugauaucaacgugaaagacuacuccaucguaagcucguaugugugcucuggcuuggucggugacaccccgcgaaagaaugauuccucaaguagcucccacugucugaaccccaauaacgaggaagggggacauggcgugaaaggcugggcuuucgacgaugggaaugacguuuggaugggaagaacgauuucugagaaguuuaggagcgguuacgagaccuucaaagugaucgaaggcuggucaaagccuaacaguaaacuacagauuaaucggcaggucauaguggaucgugacaaccgcuccggguauagcggaaucuuuucuguagagggcaagucaugcauuaauagauguuucuacguugaacucaucaggggucggaagcaagagacagaagugugguggacuucaaacagcaucgucguguuuugcgggaccuccggcacauauggaacuggcucuuggccagauggggccgacauuaaucugaugcccauauga

SEQ ID NO: 150166 - RNA, 1410 nt, Artificial Sequence
  derived and/or modified CDS sequence (opt3) from neuraminidase__InfluenzaA__AFH00563
augaaccccaaucagaagaucauuaccauaggcagcgugucccugacaaucgccacuauuugcuuccucaugcaaaucgcuauucuugucacgaccguuacacugcacuuuaaacaguacgaguguaacucuccuccaaauaaccaggugauguugugcgaaccgacuaucauagagagaaauaucaccgaaauuguauauuuaacaaacaccacuaucgagaaggaaauuugucccaaacuggcagaguacaggaauuggucaaagccucagugcaacaucacaggguucgccccauuuaguaaagacaauagcauacggcuauccgcgggaggugauauuugggugacccgcgagcccuaugucucuugugacccugauaagugcuaccaauucgcucucggccaggggacgacucugaacaauggacauucgaacgacaccgugcacgaacgaacaccauaucguacucuucugaugaaugaguugggcguucccuuucaucucgguaccaaacagguguguaucgccuggucaagcaguuccugccacgaugggaaggcauggcugcaugucugugugacaggagacgaugaaaacgccaccgcuucuuucauuuacaauggcagacugguagacagcaucggcuccuggucaaagaaaauccucaggacgcaggagagugagugcguuuguauuaacgggacuugcacaguggucaugaccgauggaagcgcaucugguaaggccgacacuaaaauauuauuuaucgaagagggcaagauugugcacacauccccucugucagggagcgcucaacacguggaagagugcaguuguuauccacgguacccgggaguccgcugcguuuguagagauaacuggaagggcucuaauaggcccaucguggacauaaacguaaaagauuacuccauugugagcucguaugucugcucuggucuugugggggacaccccucggaagaaugacuccucaaguagcucccauuguuuggauccaaacaaugaagagggaggccacggcguuaaagggugggccuucgacgauggaaacgacguguggaugggucgcacgaucucugagaagcugcgaagcggcuacgaaaccuuuaaagucaucgagggguggucaaagcccaauaguaaacuacagauuaacagacaggugaucguagauaggggaaaucgguccggcuauagcgguauuuucucuguugaagggaagucaugcauaaaccguuguuuuuacguggagcucauccgcggcagaaagcaggaaacagagguccuguggaccaguaauagcauuguggucuucugcggaacuuccggcacauaugggacuggaucuuggccugacggugcggauaucaaccuuaugccaaucuga

SEQ ID NO: 150167 - RNA, 1410 nt, Artificial Sequence
  derived and/or modified CDS sequence (opt3) from neuraminidase__InfluenzaA__AFH00574
augaaccccaaucagaagaucauuaccauaggcagcgugucccugacaaucgccacuauuugcuuccucaugcaaaucgcuauucuugucacgaccguuacacugcacuuuaaacaguacgaguguaacucuccuccaaauaaccaggugauguugugcgaaccgaagaucauagagagaaauaucacugaaauuguauauuuaaacaauaccacaaucgagaaagaaauuugucccaagcuggcagaguacaggaacuggucaaaaccucagugcaauaucaccggguucgccccauuuaguaaggacaacagcauacggcuauccgcgggaggugauauuugggugacucgcgagcccuaugucucuugugacccugauaagugcuaccaauucgcucucggccaggggacaacccugaauaacggacauucgaaugacacggugcacgaucgaacuccauaucguacccuucugaugaacgaauugggcguucccuuucaucucgguacaaaacagguguguaucgccuggucaagcaguuccugccacgacgggaaggcauggcugcaugucugugugacuggagaugacgagaaugccaccgcuucuuucauuuacaacggcagacugguagauagcaucggcuccuggaguaaaaagauccucaggacacaggaaucagagugcguuuguauuaacgggaccugcacgguggucaugacugacggaagcgcaucugguaaagccgauacaaagauauuauuuaucgaggaaggcaagauugugcacaccucccugcuuucagggagcgcucaacacguggaggaaugcaguuguuauccucgguacccaggaguccgcugcguuuguagagacaauuggaaaggcucuaacaggccgaucguggauauaaauguaaaggacuacuccauugugagcucguaugucugcucugguuuggugggggacacuccccggaaaaacgauuccucaaguagcucccauugucuggacccuaauaacgaggaaggaggccacggcguuaaggggugggccuucgaugacggaaaugauguguggaugggucgcacaaucucugagaaacuacgaagcggcuacgagaccuuuaaggucaucgaaggguggucaaaaccaaacaguaagcuccagauuaauagacaggugaucguagacaggggaaaccgguccggcuauagcgguauuuucucuguugaggggaagucaugcauaaaucguuguuuuuacguggaacugauccgcggcagaaaacaggagacggaaguccuuuggaccaguaacagcauuguggucuucugcggaacauccggcacuuaugggaccggaucuuggcccgauggugcggacaucaaucugaugccuaucuga

SEQ ID NO: 150168 - RNA, 1410 nt, Artificial Sequence
  derived and/or modified CDS sequence (opt3) from neuraminidase__InfluenzaA__AFH00585
augaaccccaaucagaagaucauuaccauaggcagcgugucccugacaaucgccacuauuugcuuccucaugcagaucgcuauucuugucacgaccguuacacugcacuuuaaacaguacgaguguaacucuccuccaaauaaccaggugauguugugcgaaccgacuaucauagagagaaauaucaccgaaauuguauauuuaacaaacaccacuaucaagaaagagauuugucccaagcuggcagaauacaggaauuggucaaaaccucagugcaacaucacaggguucgccccauuuaguaaggacaauagcauacggcuauccgcgggaggugauauuugggugacccgcgagcccuaugucucuugugacccugauaagugcuaccaauucgcucucggccaggggacgacucugaacaaucgacauucgaacgacaaagugcacgaucguaccccauauagaacacuucugaugaaugaguugggaguucccuuucaucucggcacuaaacagguguguaucgccuggucaagcaguuccugccacgacgguaaggcauggcugcaugucugugugaccggggaugacgaaaacgccacagcuucuuucauuuacaauggaaggcugguagauagcaucggcuccuggucaaagaaaauccuccggacccaggagagugaaugcguuuguauuaacggcacgugcacuguggucaugacagacgggagcgcaucuggaaaggccgauaccaagauauuauuuaucaaagaggguaagauugugcacacuuccucacugagcggcagugcucaacacguggaggaaugcucuuguuauccucgcuacccaggggucagaugcguuuguagggacaacuggaaaggauccaaucggccgaucguggauauaaacguaaaggacuacagcauugugucgucuuaugucugcuccggccuugugggugacacaccccgcaaaaaugauucaaguagcuccucucauuguuuggacccuaacaaugaggaagggggacacggcguuaagggcugggccuucgaugacgggaacgauguguggaugggacgaaccaucagcgagaaacugagaucagguuacgaaacguuuaaggucaucgagggcuggaguaaggcaaauuccaaacuacagauuaacaggcaagugaucguagaccgggggaaucguagcggauauucuggcauuuucucaguugagaguaagagcugcauaaaccgcuguuuuuacguggaacucaucagagguaggaaacaggagaccgaaguccuguggacauccaauucuauuguggucuucugcgggacuucgggcaccuauggaacaggcagcuggccagauggggcggacaucaaccuuaugcccaucuga

SEQ ID NO: 150169 - RNA, 1410 nt, Artificial Sequence; identical to SEQ ID NO: 142756
  derived and/or modified CDS sequence (opt3) from neuraminidase__InfluenzaA__AFH00596

SEQ ID NO: 150170 - RNA, 1410 nt, Artificial Sequence
  derived and/or modified CDS sequence (opt3) from neuraminidase__InfluenzaA__AFH00607
augaaccccaaucagaagaucauuaccauaggcuucguguuuuucacaaucgccacuauuugcuuucugaugcagaucgcuauucucgucacgaccguuacacuucacuucaaacaguacgaguguaacccuccaccgaauaaccaggugaugcugugcgaacccacuaucauagagagaaauaucaccgaaauuguauauuugacaaacaccacuaucgagaaggaaauuuguccuaaauuagcagaguacaggaauuggagcaagccacagugcaacaucacaggguuugcccccuucuccaaagacaauucuauacggcugucagcgggaggugauauuugggugacccgcgagccuuaugucaguugugacccagauaagugcuaccaauuugcucuaggccaggggacgacucucaacaauggacauagcaacgacaccgugcacgaucgaacacccuaucguacucugcuuaugaaugaacugggcguuccuuuccauuuggguaccagacagguguguaucgccugguccucuucgucaugccacgacgggaaggcauggcuccaugucugugugacaggagaugacgagaacgccaccgcuagcuuuauuuacaauggcaggcugguagauaguaucggcuccuggucuaaaaagauccugcggacgcaggaaagcgagugcguuuguauuaacgggacuugcacaguggucaugaccgacggauccgcaucagguaaagccgauacuaagauacucuucaucgaggaaggcaaaauugugcacaucaguacauuaagcgggucugcucaacacguggaggaaugcuccuguuauccacgcuacccgggagucagaugcguuuguagggacaacuggaagggcucaaaucggcccauaguggauauuaacguaaaggacuacagcaucgugaguucuuaugucugcuccggucuggugggggacaccccucgcaaaaaugauagcuuuucgucuucccauugucuugacccaaacaaugaggaaggaggccacggcguuaaggggugggccuucgaugacggaaacgauguguggaugggucgaacgaucucagagaaauugagaaguggcuacgagaccuuuaaggucauugaaggguggagcaaacccaauuccaagcugcagacaaacaggcaagugaucguagagcggggaaaucguucuggcuauagcgguauuuucucaguugaagggaaaaguugcauaaaccgcuguuucuacguggagcuaaucagaggcaggaaggaagagacugaggucugguggaccuccaauagcauuguggucuuuugcggaacaucuggcacuuaugggaccggaucauggccugacggugcggauaucaaccucaugccaaucuga

SEQ ID NO: 150171 - RNA, 1410 nt, Artificial Sequence; identical to SEQ ID NO: 143977
  derived and/or modified CDS sequence (opt3) from neuraminidase__InfluenzaA__AFH00618

SEQ ID NO: 150172 - RNA, 1410 nt, Artificial Sequence
  derived and/or modified CDS sequence (opt3) from neuraminidase__InfluenzaA__AFH00629
augaaccccaaucagaagaucauuaccauaggcagcgugucccugacaaucgccacuauuugcuuccucaugcaaaucacgauucuugucaccacaguuacucugcacuuuaaacaguacgaguguaacucuccuccaaauaaccaggugauguugugcgaaccgaccaucauagagagaaauaucacagaaauuguauauuuaaccaacacuacaaucgagaaggggauuugucccaaacuggcugaauacaggaauuggucaaagccucagugcaacaucaccggauucgcaccauuuaguaaagacaauagcauacggcuauccgccgguggcgauauuugggugacgcgcgagcccuaugucucuugugacccugauaagugcuaccaauucgcgcucgggcagggaacuacccugaacaauggccauucgaacgacacagugcacgaucgaacuccauaucguacccuucugaugaaugaguuggguguucccuuucaucucgggacaagacagguguguaucgcuuggucaagcaguuccugccacgacggaaaggccuggcugcaugucugugugaccggcgaugacaaaaacgcaacggccucuuucauuuacaauggcaggcugguagauagcaucggguccuggucaaagaaaauccuccggacucaggaaagugagugcguuuguauuaacggaacaugcaccguggucaugacugacgguagcgcuucuggcaaggcagauacaaaaauauuauuuaucgaagaggggaagauuauccacauauccacccugcuuggaucagcccaacacguggaggaaugcagcuguuauccucgcuacccaggcgugagaugcgucuguagggacaacuggaaggguaguaaucggccgauuguugauaucaacgugaaagacuacucuaucguauccagcuaugugugcucgggguuggucggagacacgccccgcaagaaugauucuuccucaaguagccauugucuggacccuaacaaugaggaaggcggccacggggugaaaggaugggcuuucgaugacgguaacgauguuuggaugggccgaaccauuuccgagaagcuaagaucuggguacgaaacauuuaaagugaucgagggauggagcaagccaaauucaaaacuccagauuaacaggcaggucauaguggagcggggcaaucguagugguuauuccgggaucuucagcguagaaggcaagucuugcauuaaccgcuguuuuuacguugagcugaucagaggaaggaaggaagagacugaagugugguggaccucaaauaguaucgucguguucugcggcacaagcgggacuuauggaaccgguuccuggcccgacggcgccgauauuaaccuuaugccuauauga

SEQ ID NO: 150173 - RNA, 1410 nt, Artificial Sequence; identical to SEQ ID NO: 142375
  derived and/or modified CDS sequence (opt3) from neuraminidase__InfluenzaA__AFH00640

SEQ ID NO: 150174 - RNA, 1410 nt, Artificial Sequence; identical to SEQ ID NO: 144504
  derived and/or modified CDS sequence (opt3) from neuraminidase__InfluenzaA__AFH00651

SEQ ID NO: 150175 - RNA, 1410 nt, Artificial Sequence; identical to SEQ ID NO: 142375
  derived and/or modified CDS sequence (opt3) from neuraminidase__InfluenzaA__AFH00662

SEQ ID NO: 150176 - RNA, 1410 nt, Artificial Sequence
  derived and/or modified CDS sequence (opt3) from neuraminidase__InfluenzaA__AFH00673
augaaccccaaucagaagaucauuaccauaggcagcgugucccugacaaucucuacuauuugcuucuuuaugcaaaucgccauucucaucacgaccgucacacuucacuucaaacaguacgaguuuucaaguccuccaaacaaucagguuaugcugugugaaccgacuauaaucgagagaaacauuaccgaaaucguguauuugacaaauaccacuauugagaaggaaacaugccccaaauuagcugaguacaggaacuggagcaagccucagugugacaucaccggguucgcaccauuuuccaaagauaauucuauacggcugucggccggaggugacauuuggguaacgcgcgagcccuaugugucaugcgauccugacaaguguuaccaauucgcgcuaggccaggggacuacccucaacaauguccauagcaacgauacagugcacgaccgaacuccauaucguacccugcuuaugaaugaacugggaguucccuuucauuugggcacaaaacaggugugcaucgcuuggaguuccucuagcugucacgaugguaaggccuggcuccaugucugcgugaccggggacgauaagaacgcaacggccuccuucauuuacaauggaagacugguagacucaaucguuaguuggagcaaagagauccugaggacucaggaaucugagugugugugcauuaacggcacauguaccgucgugaugacugauggcuccgcuucagggaaggcagacacaaaaauacucuuuaucgaggaaggaaagauugugcacaccagcacguuaagugguucugcccaacacgucgaggaaugcuccugcuauccucgguacccaggcguucgcugugugugcagagauaauuggaaggggagcaacaggccgaucguagacauaaacauuaaagacuacucgaucgugucucgguaugucuguuccggacuggugggcgauacaccccgcaagaaugacucaaguagcuccucucauugccuugauccuaacaaugaggaaggugggcacggaguuaaaggcugggcuuucgacgauggcaacgacguguggauggggcgaaccaucagcgucaagucaagaaguggauacgagacuuuuaaagugauugaggguugguccaauccaaacagcaaguugcagaucaauaggcagguaauuguugaucggggcaaccguucuggguauucaggaauauucaguguggaaggcaaaagcuguaucaaucgcugcuuuuacgucgagcugauuagagguaggaaggaagagaccgaagugcuauggacauccaacucuaucgucguguucugugggacuucgggcaccuauggaacaggcagcuggcccgacggggccgauaucaaucucaugccuauuuga

SEQ ID NO: 150177 - RNA, 1410 nt, Artificial Sequence
  derived and/or modified CDS sequence (opt3) from neuraminidase__InfluenzaA__AFH00684
augaaccccaaucagaagaucauuaccauaggcagcgugucccugacaaucucuacuauuugcuucuuuaugcaaaucgccauucucaucacgaccgucacacuucacuucaaacaguacgaguuuaacucaccuccaaauaaccagguuaugcugugugaaccgacuauaaucgagagaaauauuaccgaaaucguguauuugacaaacaccacuauugagaaggaaaucugccccaaauuagcugaguacaggaauuggaguaagccucagugugacauaacaggguucgcaccauuuagcaaagauaacuccauucggcugucugccggaggugacaucuggguaacccgcgagcccuaugugucgugcgauccugacaaguguuaccaauucgcgcuaggccaggggacgacucucaauaacguccauucaaauaacaccgugcgagaacguacaccauauagaacucugcuuaugaaugagcugggaguucccuuucacuugggcaccaaacaggugugcauugcuuggagcaguuccucuugucaugaugguaaggccuggcuccacgucugcaucacaggggacgauaagaacgcaaccgccagcuucaucuacaauggaaggcugguggacuccauuguaucauggaguaaagaaauacugcggacgcaggagagcgaguguguuugcaucaacggcacuuguacaguggucaugaccgauggcucugcuuccgggaaggcagacacuaaaauucucuuuaucgaagagggaaagauagugcauacaucaaccuuaagcgguagugcccaacacguggaagagugcucuugcuauccucgcuacccaggcgucagauguguuugcagggauaacuggaagggguccaaucggccgauuguggacaucaacaucaaagaucacagcauuguaucgucuuacguguguuccggacuggucggcgacacgccccgcaagaaugacucaaguagcuccucucauugccuugauccuaacaaugaagagggugggcacggagugaaaggcugggcuuucgacgauggcaacgacguuuggauggggcgaaccaucagcgagaagucaagauugggauaugaaacauuuaaagugauugaggguuggaguaauccaaaguccaaacugcagauaaacaggcaggucaucguggaucggggcaaucguagcggguacucuggaauuuucucaguagaaggcaagaguuguaucaaccgcugcuuuuauguugagcuaaucagagguaggaaggaagagacugaggugcucuggaccagcaauuccauugucguguucugugggacaucuggcacuuacggaaccggcucguggcccgacggggccgauauaaaccugaugccuaucuga

SEQ ID NO: 150178 - RNA, 1410 nt, Artificial Sequence
  derived and/or modified CDS sequence (opt3) from neuraminidase__InfluenzaA__AFH00695
augaaccccaaucagaagaucauuaccauaggcagcgugucccugacaaucucuacuauuugcuucuuuaugcaaaucgccauucucaucacgaccgucacacuucacuucaaacaguacgaguuuaacucaccuccaaauaaccagguuaugcugugugaaccgacuauaaucgagagaaauauuaccgaaaucguguauuugacaaacaccacuauugagaaggaaaucugccccaaauuagcugaguacaggaauuggaguaagccucagugugacauaacaggguucgcaccauuuagcaaagauaacuccauucggcugucugccggaggugacaucuggguaacccgcgagcccuaugugucgugcgauccugacaaguguuaccaauucgcgcuaggccaggggacgacucucaauaacguccauucaaaugauaccgugcgagaacguacaccauauagaacucugcuuaugaacgagcugggaguucccuuucacuugggcaccaaacaggugugcauugcuuggagcaguuccucuugucaugacgguaaggccuggcuccacgucugcaucacaggggaugacaagaaugcaaccgccagcuucaucuacaacggaaggcugguggauuccauuguaucauggaguaaagaaauacugcggacgcaggagagcgaguguguuugcaucaauggcacuuguacaguggucaugaccgacggcucugcuuccgggaaggcagauacuaaaauucucuuuaucgaagagggaaagauagugcauacaucaaccuuaagcgguagugcccaacacguggaagagugcucuugcuauccucgcuacccaggcgucagauguguuugcagggacaacuggaagggguccaaccggccgauuguggauaucaauaucaaagaccacagcauuguaucgucuuacguguguuccggacuggucggcgacacgccccgcaagaacgauucaaguagcuccucucauugccuugacccuaauaacgaagagggugggcacggagugaaaggcugggcuuucgaugacggcaaugauguuuggauggggcgaaccaucagcgagaagucaagauugggauaugaaacauuuaaagugauugaggguuggaguaacccaaaguccaaacugcagauaaauaggcaggucaucguggaccggggcaaccguagcggguacucuggaauuuucucaguagaaggcaagaguuguaucaaucgcugcuuuuauguugagcuaaucagagguaggaaggaagagacugaggugcucuggaccagcaacuccauugucguguucugugggacaucuggcacuuacggaaccggcucguggcccgauggggccgacauaaaucugaugccuaucuga

SEQ ID NO: 150179 - RNA, 1410 nt, Artificial Sequence
  derived and/or modified CDS sequence (opt3) from neuraminidase__InfluenzaA__AFH00706
augaaccccaaucagaagaucauuaccauaggcagcgugucccugacaaucucuacuauuugcuucuuuaugcagaucgccauucucaucacgaccgucacacuucacuucaaacaguacgaguuuaacucaccuccaaauaaccagguuaugcugugugaaccgacuauaaucgagagaaauauuaccgaaaucguguauuugacaaacaccacuauugagaaggaaaucugccccaaauuagcugaguacaggaauuggaguaagccucagugugacauaacaggguucgcaccauuuagcaaagauaacuccauucggcugucugccggaggugacaucuggguaacccgcgagcccuaugugucgugcgauccuaauaaguguuaccaauucgcgcuaggccaggggacgacucucaacaauguccauucaaacaauaccgugcgagaccguacaccauauagaacucugcuuaugaacgaacugggaguucccuuucacuugggcaccaaacaggugugcauugcuuggagcaguuccucuugucaugaugguaaggccuggcuccacgucugcaucacaggggacgauaagaaugcaaccgccagcuucaucuacaacggaaggcugguggacuccguaguuucauggaguaaagagauucugcggacgcaggaaagcgagugugugugcauaaacggcacuuguacagucgugaugaccgauggcucugcuuccgggaaggcagacacuaaaauccucuuuauugaggaaggaaagaucgugcauacaucaaccuuaagcgguagugcccaacacgucgaggaaugcucuugcuauccucgcuacccaggcguuagaugugugugcagggauaauuggaagggguccaaccggccgauaguagacauuaauaugaaagaucacagcaucgugucgucuuacgucuguuccggacuggugggcgacacgccccgcaagaacgacucaaguagcuccucucauugcuucgauccuaauaacgaggaaggugggcacggaguuaaaggcugggcuuuugacgauggcaaugacguguggauggggcgaaccaucagcgagaagucaagacuuggauaugagacauucaaagucauugaagguuggaguaacccaaaguccaaauugcagaucaauaggcaagugauuguagaucggggcgaccguagcggguacucuggaauauuuucaguugagggcaagaguuguaucaaccgcugcuucuauguggaacugauuagagguagcaaggaggaaacugagguccuauggaccuccaauucuaucguggucuucugugggacaucgggcacuuacggaaccggcagcuggcccgauggggccgacaucaaccucaugccuauuuga

SEQ ID NO: 150180 - RNA, 1410 nt, Artificial Sequence
  derived and/or modified CDS sequence (opt3) from neuraminidase__InfluenzaA__AFH00728
augaaccccaaucagaagaucauuaccauaggcagcgugucccugacaaucgccacuauuugcuuccucaugcaaaucgcuauucuugucacgaccguuacacugcacuuuaaacaguacgaguguucuucaccuccaaacaaucaggugaugccgugcgaacccaucauaaucgagagaaacauuacugaaaucguauauuugaccaauacaaccauugagaaggaaaucuguccuaaauuaguggaguacaggaacuggaguaagccacagugcaaaauaacuggguucgcacccuuuagcaaggacaauuccauucggcugucugccggaggugauaucugggucacacgcgagccuuaugugucgugugacccaggcaagugcuaccaauucgcgcuagggcagggaaccacgcucaacaauaaacauucaaacgauacuauucacgaccgaacccccuaucguacacugcuuaugaaugaacugggcguuccuuuucauuuggguacuagacagguguguaucgcuuggagcaguuccucuugccacgaugggaaggccuggcuccaugucugugugaccggacacgacaaaaacgcaacagccagcuucaucuacaauggcaggcugguagauuccauuggcucauggaguaagaacauacugcggacccaggagagcgaaugcguuuguaucaaugggacgugcacuguggucaugacagacggaucugcuuccgagcgcgcagauaccaaaauucucuuuaucgaggaagguaagauagugcacauuucaccauuaagcggcagugcccaacauguggaggaaugcucuuguuauccgagauaccccggggucaggugcguuugucgggacaacuggaagggauccaaccgcccuaucguggauaucaauguaaaagacuacagcauugugucgucuuaugucugcuccggccuggugggugauacuccacgaaagaacgacagaucaaguagcuccuacuguaggaaucccaacaaugagaaagggaaccacggaguuaagggcugggcuuucgacgauggcaaugacguguggauggggcggacaaucggagaggaacuucguucugguuaugagaccuuuaaagucauuggcggguggagcacgccuaacucaaaguugcagauaaaucgccaggugaucguagauagugacaacagauccggauacagcggcauuuucucuguugaagguaaaucaugcaucaauagguguuuuuauguggagcugauccgggggcgagaacaggagacccgcguccuauggacaaguaacagcauuguggucuucugcggcacuuccggaaccuacggcacagggucuuggccagauggagccgacauaaaucucaugcccaucuga

SEQ ID NO: 150181 - RNA, 1410 nt, Artificial Sequence
  derived and/or modified CDS sequence (opt3) from neuraminidase__InfluenzaA__AFH00739
augaaccccaaucagaagaucauuaccauaggcagcgugucccugacaaucgccacuauuugcuuccucaugcaaaucgcuauucuugucacgaccguuacacugcacuuuaaacaguacgaguguucuucaccuccaaacaaucaggugaugccgugcgaacccacuaucauagagagaaacaucaccgaaauuguauauuugacaaauaccacuaucgagaaggaaauuuguccuaaauuaguggaguacaggaacuggaguaagccacagugcaaaaucacaggguucgcacccuuuagcaaggacaauuccauacggcugucugccggaggugauauuugggucacccgcgagccuuaugugucgugugacccaggcaagugcuaccaauucgcgcuagggcagggaacgacucucaacaaucgacauucaaacgauaccguucacgaccguacacccuauagaacucugcuuaugaaugaacugggcgugccuuuucauuuggguaccaaacaggucuguaucgcuuggagcaguuccucuugccacgaugggaaggccuggcuccauguguguguaacaggacacgacaaaaacgcaaccgccagcuucauuuacgauggcaggcugguugacuccaucggcucauggaguaagaauauccugcggacgcaggagagcgaaugcguguguauuaacgggacuugcacagucgugaugaccgauggaucugcuuccgagcgcgcagacacuaaaauacucuuuaucgaggaagguaagauugugcacaucucaccauuaagcggcagugcccaacaugucgaggaaugcucuuguuauccgagauaccccgggguuaggugcgugugucgggauaauuggaagggauccaaccgcccuauaguagacauuaacgugaaagauuacagcaucgucucgucuuaugugugcuccggccugguuggugacacaccacgaaagaaugacagaucaaguagcuccuacuguaggaaccccaauaacgagaaagggucucacggagugaagggcugggcuuucgaugacggcaaugaugucuggauggggcggaccaucggagaggaacuucguagcgguuaugagacguuuaaagugauuggcggguggucaaccccuaacaguaaguugcagaucaaucgccagguaauuguugacuccggaaacagaagcggcuacucugguauauucucaguggaagggaaaaguugcaucaauagguguuuuuaugucgagcugauucggggccgaggacaggaaacacgcgugugguggacuagcaacuccaucgucguguucugcggcaccucugggacauacggaacugguucguggccagauggcgccgacaucaaucuaaugcccauuuga

SEQ ID NO: 150182 - RNA, 1410 nt, Artificial Sequence
  derived and/or modified CDS sequence (opt3) from neuraminidase__InfluenzaA__AFH00750
augaaccccaaucagaagaucauuaccauaggcagcgugucccugacaaucgccacuauuugcuuccucaugcaaaucgcuauucuugucacgaccguuacacugcacuuuaaacaguacgaguguucuucaccuccaaacaaucaggugaugccgugcgaacccacuaucauagagagaaacaucaccgaaauuguauauuugacaaauaccacuaucgagaaggaaauuuguccuaaauuaguggaguacaggaacuggaguaagccacagugcaaaaucacaggguucgcacccuuuagcaaggacaauuccauacggcugucugccggaggugauauuugggucacccgcgagccuuaugugucgugugacccaggcaagugcuaccaauucgcgcuagggcagggaacgacucucaacaaucgacauucaaacgauaccguucacgaccguacacccuauagaacucugcuuaugaaugaacugggcgugccuuuucauuuggguaccaaacaggucuguaucgcuuggagcaguuccucuugccacgaugggaaggccuggcuccauguguguguaacaggacacgacaaaaacgcaaccgccagcuucauuuacgauggcaggcugguugacuccaucggcucauggaguaagaauauccugcggacgcaggagagcgaaugcguguguauuaacgggacuugcacagucgugaugaccgauggaucugcuuccgagcgcgcauauacuaaaauacucuuuaucaaggaggguaagauugugcacaucucaccauuaagcggcagugcccaacaugucgaagagugcucuuguuacccgagauaccccgggguuaggugcgugugucgggacaauuggaaaggauccaaccgcccuauaguagauauuaacgugaaggacuauagcaucgucucgucuuacgugugcuccggccugguuggugauacaccacgaaagaaugacagaucaaguagcuccuauuguaggaaccccaauaacgaaaaagggucucacggagugaaaggcugggcuuucgacgauggcaaugacgucuggauggggcggaccaucggagaggaacuucguagcgguuacgagacguuuaaggugauuggcggguggucaaccccuaacaguaaauugcagaucaaucgccagguaauuguugaguccggaaacagaagcggcuauucugguauauucucaguggaagggaagaguugcaucaauagguguuuuuacgucgagcugauucggggccgagaacaggagacacgcgugugguggacuagcaacuccaucgucguguucugcggaaccucuggcacauaugggacuggaucguggccagauggugccgacaucaaucuaaugcccauuuga

SEQ ID NO: 150183 - RNA, 1410 nt, Artificial Sequence
  derived and/or modified CDS sequence (opt3) from neuraminidase__InfluenzaA__AFH00761
augaaccccaaucagaagaucauuaccauaggcagcgugucccugacaaucgccacuauuugcuuccucaugcaaaucgcuauucuugucacgaccguuacacugcacuuuaaacaguacgaguguaacucuccuccaaauaaccaggugaugccgugcgaacccacuaucauagagagaaauaucaccgaaauuguauauuugacaaacaccacuaucgagaaggaaauuuguccuaaauuaguggaguacaggaauuggucaaagccacagugcaaaaucacaggguucgcacccuuuaguaaggacaacagcauacggcuguccgccggaggugauauuugggucacccgcgagccuuaugugucuugugacccaggcaagugcuaccaauucgcgcuagggcagggaacgacucucaauaaccgacauucgaaugauaccguucacgaccguacacccuauagaacucugcuuaugaacgaacugggcgugccuuuucauuuggguaccaaacaggucuguaucgcuuggucaagcaguuccugccacgaugggaaggccuggcuccauguguguguaacaggacacgacgagaaugcaaccgccucuuucauuuacgauggcaggcugguugacagcaucggcuccuggaguaaaaacauccugcggacgcaggaaagugagugcguguguauuaaugggacuugcacagucgugaugaccgauggaagcgcuucugagcgcgcagacacuaagauacucuuuaucgaagaggguaaaauugugcacaucuccccauuaucaggcagcgcccaacaugucgaagagugcaguuguuauccgagauaccccgggguuaggugcgugugucgggauaacuggaagggaucuaaccgcccuauaguagacauuaaugugaaggauuacuccaucgucagcucguaugugugcucuggccugguuggugacacaccacgaaagaacgacuccucaaguagcuccuacuguagaaaucccaacaaugaaaaagggucucacggagugaaaggcugggcuuucgaugacggcgaugacgucuggauggggaggaccaucggagaggagcuucggagcgguuaugaaacguuuaaggugauuggcggguggucaaccccuaacaguaaauugcagaucaaucgucagguaauuguugaucgcggaaacagauccggcuacagcgguauauucucuguggaggggaagucaugcaucaauagguguuuuuaugucgaacugauucggggccgaaaacaggagacaaaggugugguggacuucaaacagcaucgucguguucugcggaaccuccggcacauacgggacuggaucuuggccagacggugccgauaucaaucuaaugcccauuuga

SEQ ID NO: 150184 - RNA, 1410 nt, Artificial Sequence
  derived and/or modified CDS sequence (opt3) from neuraminidase__InfluenzaA__AFH00783
augaaccccaaucagaagaucauuaccauaggcagcgugucccugacaaucgccacuauuugcuuccucaugcaaaucgcuauucuugucacgaccguuacacugcacuuuaaacaguacgaguguaacucuccuccaaauaaccaggugauguugugcgaaccgacuaucauagagagaaauaucaccgaaauuguauauuuaacaaacaccacuaucgagaaggaaauuugucccaaacuggcagaguacaggaauuggucaaagccucagugcaaaaucacaggguucgccccauuuaguaaggacaacagcauacggcuauccgcgggaggugauauuugggugacccgcgagcccuaugucucuugugacccugauaagugcuaccaauucgcucucggccgagggacgacucugaauaaccgucauucgaaugacaccgugcacgauagaacaccauauaggacucuucugaugaacgaauugggaguucccuuucaucucggcaccaaacagguguguaucgccuggucaagcaguuccugccacgacgguaaggcauggcugcaugucugugugacagggcacgaugagaaugccaccgcuucuuucauuuacgacggacggcugguagauagcaucggcuccuggaguaaaaagauccuccgcacgcaggaaucagagugcguuuguauuaacggcacuugcacaguggucaugaccgacgggagcgcaucugguagagccgauacuaaaauauuauuuaucgaggaaggaaagauugugcacaucuccccucugucaggcagcgcucagcauguggaggaaugcaguuguuauccaagguacucugggguccggugcguuugucgcgacaauuggaagggauccaaccgaccgauaguggauauuaacguaaaagacuacagcaucgugucgucuuaugucugcuccggccuugugggugacacacccagaaagaaugauucaaguagcuccucucacuguuugaacccuaauaacgaggaagggggacauggcguuaaaggcugggccuucgacgaugggaaugacguguggaugggaaggaccaucagcgagaaguuucggucagguuacgagacguucaaagucauuggcggguggaguaagccaaacuccaaacugcaaaucaaucgucaggugauuguagaucgcggaaacagaagcggcuauucugguauauuuucaguugaagggaagaguugcaucaauagguguuucuacguggagcuaauucggggccgaaagcaggaaaccgaggucugguggacaagcaacuccaucguggucuuuugcggaacuucuggcaccuaugggacaggaucguggcccgacggugcggauaucaaucucaugccuauuuga

SEQ ID NO: 150185 - RNA, 1410 nt, Artificial Sequence
  derived and/or modified CDS sequence (opt3) from neuraminidase__InfluenzaA__AFH00794
augaaccccaaucagaagaucauuaccauaggcagcgugucccugacaaucgccacuauuugcuuccucaugcaaaucgcuauucuugucacgaccguuacacugcacuuuaaacaguacgaguguaacucuccuccaaauaaccaggugauguugugcgaaccgacuaucauagagagaaauaucaccgaaauuguauauuuaacaaacaccacuaucgagaaggaaauuugucccaaacuggcagaguacaggaauuggucaaagccucagugcaaaaucacaggguucgccccauuuaguaaggacaacagcauacggcuagcggcuggaggugauauuugggugacccgcgagcccuaugucuccugugacccugauaagugcuaccaauucgcccucggccaggggacgacucugaauaaccgacauucuaaugacaccgugcacgaucguacaccauauagaacucuucugaugaacgaauugggaguucccuuucaucucggcaccaaacagguguguaucgcauggucgucaagcaguugccacgacgguaaggccuggcugcaugucugugugacagggcacgaugagaaugcuaccgcauccuucauuuacgacggaaggcugguagauucuaucggcagcugguccaaaaagauccuccggacgcaggaaucagagugcguuuguauuaacggcacuugcacaguggucaugaccgacgggagugccagcgagcgcgcugauacuaaaauauuauuuaucgaagagggaaagauugugcacaucucucaacuguccgguucagcccagcauguggaagagugcagcuguuauccuagauacccaggcgucaggugcguuugucgggacaauuggaaggggaguaaccgcccgauaguggauauuaacguaaaagacuacucuaucguguccagcuaugucugcucgggacuugugggcgacacaccccgaaagaaugauucuuccucaaguagccacuguuugaacccuaauaacgaagagggugggcauggaguuaaaggcugggcguucgacgauggcgacgauguguggauggggagaaccaucuccgagaagcugaggucuggauacgaaacguuuaaagucauugaggguuggagcaagccaaauucaaaacuacagaccaaccgucaggugaucguagaccggggcaaucgcaguggguauuccggaauuuucagcguugaaggcaagucuugcauaaacagauguuuuuacguggagcucaucaggggucggaagcaagaaacagaggucugguggacuucaaauaguauuguggucuucugcgggaccagcggcacauauggaacuggcuccuggcccgauggggcagacaucaaccugaugccuaucuga

SEQ ID NO: 150186 - RNA, 1410 nt, Artificial Sequence; identical to SEQ ID NO: 143536
  derived and/or modified CDS sequence (opt3) from neuraminidase__InfluenzaA__AFH00805

SEQ ID NO: 150187 - RNA, 1410 nt, Artificial Sequence; identical to SEQ ID NO: 147566
  derived and/or modified CDS sequence (opt3) from neuraminidase__InfluenzaA__AFH00816

SEQ ID NO: 150188 - RNA, 1410 nt, Artificial Sequence
  derived and/or modified CDS sequence (opt3) from neuraminidase__InfluenzaA__AFH00827
augaaccccaaucagaagaucauuaccauaggcagcgugucccugacaaucucuacuacgugcuucuuuaugcagauugccauccucauuaccacagucacucuucacuucaaacaguacgaguuuaacucaccuccaaauaaccagguuaugcugugugaaccgaccaucauagagagaaauaugacagaaaucguguauuugaccaacacuacaauugagaaggaaaucugccccaaaccugcugaguacaggaauuggaguaagccacagugugacauuaccggguucgcacccuuuagcaaagauaacuccauccgguuaucugccggaggugacauauggguaacgcgcgagccuuaugugucgugcgauccagacaaguguuaccaauucgcgcugggccaggggacuacccuaaauaacguccauucaaauaacacagugcgagaucguacucccuauagaacccuccugaugaaugaacuuggaguuccuuuucaccugggcacaaaacaggugugcauugcuuggagcaguuccucuugucaugacgguaaggccugguugcacgucugcaucaccggggaugacaagaacgcaacggccagcuucauuuacaauggaaggcucguggauuccguaguuucauggaguaaagagauccugcggacucaggaaagcgagugugugugcaucaacggcacauguaccgucgugaugacugacggcucugcuuccgggaaggcagauacaaaaauucuguuuauagaggaaggaaagaucgugcauaccucaacgcucagcgguagugcccaacacgucgaggaaugcucuugcuauccacgcuacccgggcguuagaugugugugcagggacaacuggaagggguccaaucggcccauuguagauaucaacauaaaagaccacagcauugugucgucuuacgucuguuccggauuagugggcgacaccccucgcaagaaugauucaaguagcuccucucauugccuggacccaaacaaugaggaaggugggcacggaguuaaaggcugggcuuucgaugacggcaacgauguguggauggggcgaacaaucaaugagacuagcagacuuggauaugagaccuuuaaggucaucgaagguuggucaaaccccaaaaguaaguugcagauuaauaggcaagugaucguagaccggggcgaucguuccggguacagcggaauuuucucuguugagggcaaaucauguauaaaccgcugcuuuuauguggaacugaucagagguaggaaggaggaaacagagguccuauggaccaguaauagcauuguggucuucugugggacuuccggcacauacggaaccggcucuuggccugacggggccgaucucaaccugaugccacuuuga

SEQ ID NO: 150189 - RNA, 1410 nt, Artificial Sequence; identical to SEQ ID NO: 143977
  derived and/or modified CDS sequence (opt3) from neuraminidase__InfluenzaA__AFH01410

SEQ ID NO: 150190 - RNA, 1410 nt, Artificial Sequence
  derived and/or modified CDS sequence (opt3) from neuraminidase__InfluenzaA__AFH34942
augaaccccaaucagaagaucauuaccauaggcagcgugucccugacaaucucuacuauuugcuucuuuaugcaaaucgccauucucaucacgaccgucacacuucacuucaaacaguacgaguuuaacucaccuccaaauaaccagguuaugcugugugaaccgaagauaaucgagagaaauauuacugaaaucguguauuugaccaacacaaccauugagaaagaaaucugccccaagccugcugaguacaggaauuggaguaaaccacagugugacauaacuggguucgcacccuuuagcaaggauaacuccauucgguuaucugccggaggugacaucuggguaacacgcgagccuuaugugucgugcgauccagacaaguguuaccaauucgcgcugggccaggggaccacgcuaaauaacguccauucaaauaacacugugcgaaaucguacccccuauagaacacuccugaugaacgaacuuggaguuccuuuucaccugggcacuaaacaggugugcauugcuuggagcaguuccucuugucaugaugguaaggccugguugcacgucugcaucaccggggacgauaaaaaugcaacagccagcuucaucuacaacggaaagcucguggacuccguaguuucauggaguaaagagauucugaggacccaggaaagcgagugugugugcauaaacggcacguguacugucgugaugacagauggcucugcuuccgggaaggcagacaccaagauccuguuuauugaggaaggaaaaaucgugcauacuucaacacucagcgguagugcccaacacgucgaggaaugcucuugcuauccacgguacccgggcguucgcugugugugcagagauaauuggaagggguccaacaggcccauaguagacauuaauaucaaagaucacagcaucgugucgucuuacgucuguuccggauuagugggcgacaccccucggaagaacgacucaaguagcuccucucauugccuggauccaaauaacgaggaaggugggcacggaguuaaaggcugggcuuucgacgauggcaaugacguguggauggggcgcacgauuaacgagaccagccgacuuggauaugagacauuuaaggucaucgaagguuggucaaaucccaaaaguaaguugcagauuaacagacaggugauaguagauaggggcgaccgguccggguacagcggaaucuucucuguugagggcaagucauguauuaaucguugcuuuuauguggaacugauccgcgguagaaaagaggaaacugagguccuauggaccaguaacagcaucguggucuucugugggacauccggcacuuacggaaccggcucuuggccugauggggccgaccucaaucugaugccaauuuga

SEQ ID NO: 150191 - RNA, 1410 nt, Artificial Sequence
  derived and/or modified CDS sequence (opt3) from neuraminidase__InfluenzaA__AFH34956
augaaccccaaucagaagaucauuaccauaggcagcgugucccugacaaucucuacuauuugcuucuuuaugcagaucgccauucucaucacgaccgucacacuucacuucaaacaguacgaguuuaacucaccuccaaauaaccagguuaugcugugugaaccgacuauaaucgagagaaauauuaccgaaaucguguauuugacaaacaccacuauugagaaggaaaucugccccaaaccugcugaguacaggaauuggaguaagccacagugugacauaacaggguucgcacccuuuagcaaagauaacuccauucgguuaucugccggaggugacaucuggguaacccgcgagccuuaugugucgugcgauccagacaaguguuaccaauucgcgcugggccaggggacgacucuaaauaacguccauucaaauaacaccgugcgaggacguacacccuauagaacucuccugaugaaugaacuuggcguuccuuuucaccuggguaccaaacaggugugcauugcuuggagcaguuccucuugucaugaugggaaggccugguugcacgucugcaucacaggagacgauaagaacgcaaccgccagcuucaucuacaauggcaggcucguggacuccguaguuucauggaguaaagagauucugcggacgcaggaaagcgagugugugugcauaaacggcacuuguacagucgugaugaccgaugggucugcuuccggaaaggcagacacuaaaauccuguuuauugaggaagguaagaucgugcauacaucaacccucagcggcagugcccaacacgucgaggaaugcucuugcuauccacgcuacccggggguuagaugugugugcagggauaacuggaagggauccaaucggcccauaguagacauuaacaucaaagaucacagcaucgugucgucuuacgucuguuccggcuuagugggugacacgccucgcaagaaugacucaaguagcuccucucauugccuggauccaaacaaugaggaagggggacacggcguuaaaggcugggcuuucgacgaugggaacgacguguggaugggacgaaccauuaaugagacaagcagacuugguuaugagacuuuuaaggucaucgaaggcuggucaaaccccaaaaguaaguugcagauuaauaggcaagugauaguagaucguggggaccgguccggauacagcggcaucuucucuguugaggguaaaucauguauuaaccgcugcuuuuauguggaacugaucagagggaggaaggaggaaaaugagguccuauggaccaguaacagcaucguggucuucuguggcacauccggaacuuacggcaccgggucuuggccugauggagccgaccucaaucugaugccaauuuga

SEQ ID NO: 150192 - RNA, 1410 nt, Artificial Sequence
  derived and/or modified CDS sequence (opt3) from neuraminidase__InfluenzaA__AFH34963
augaaccccaaucagaagaucauuaccauaggcagcgugucccugacaaucucuacuauuugcuucuuuaugcagaucgccauucucaucacgaccgucacacuucacuucaaacaguacgaguuuaacucaccuccaaauaaccagguuaugcugugugaaccgacuauaaucgagagaaauauuaccgaaaucguguauuugacaaacaccacuauugagaaggaaaucugccccaaaccugcugaguacaggaauuggaguaagccacagugugacauaacaggguucgcacccuuuagcaaagauaacuccauucgguuaucugccggaggugacaucuggguaacccgcgagccuuaugugucgugcgauccagacaaguguuaccaauucgcgcugggccaggggacgacucuaaauaacguccauucaaauaacauugugcgagaucguacccccuauagaacacuccugaugaaugaacuuggaguuccuuuucaccugggcacuaaacaggugugcaucgcuuggagcaguuccucuugucaugacgguaaggccugguugcacgucugcaucaccggggaugacaagaacgcaacagccagcuucauuuacaauggaaggcucguggauuccguaguuucauggaguaaagagauacugcggacccaggaaagcgagugugugugcaucaacggcacguguacugucgugaugacagacggcucugcuuccgggaaggcagauaccaaaauucuguuuaucgaggaaggaaagauagugcauacuucaacacucagcgguagugcccaacacgucgaggaaugcucuugcuauccacgcuacccgggcguuagaugugugugcagggacaacuggaagggguccaaucggcccauuguagauaucaacaucaaagaccacagcauugugucgucuuacgucuguuccggauuagugggcgacaccccucgcaagaaugauucaaguagcuccucucauugccuggacccaaacaaugaggaaggugggcacggaguuaaaggcugggcuuucgaugacggcaacgauguguggauggggcgaacgaucaaugagaccagcagacuuggauaugagacauuuaaggucauugaagguuggucaaaccccaaaaguaaguugcagauaaauaggcaagugaucguagaccggggcgaucguuccggguacagcggaauuuucucuguugagggcaaaucauguaucaaccgcugcuuuuauguggaacugaucagagguaggaaggaggaaaaugagguccuauggaccaguaacagcauuguggucuucugugggacuuccggcacauacggaacuggcucuuggccugacggggccgaucucaaucugaugccaauauga

SEQ ID NO: 150193 - RNA, 1410 nt, Artificial Sequence
  derived and/or modified CDS sequence (opt3) from neuraminidase__InfluenzaA__AFH34970
augaaccccaaucagaagaucauuaccauaggcagcgugucccugacaaucucuacuauuugcuucuuuaugcagaucgccauucucaucacgaccgucacacuucacuucaaacaguacgaguuuaacucaccuccaaauaaccagguuaugcuguaugaaccgacuauaaucgagagaaauauuaccgaaaucguguacuugacaaacaccacuauugagaaggaaaucugucccaaaccugcugaguauaggaauuggaguaagccacagugcgacauaacaggguucgcacccuuuagcaaagauaacuccauucgguuaucugccggaggugacaucuggguaacccgcgagccuuacgugucgugugauccagacaagugcuaucaauucgcgcugggccaggggacgacucuaaauaacguccauucaaauaacaccgugcgagaucguacacccuacagaacucuccugaugaaugaacuuggaguuccuuuucaccugggcaccaaacagguguguauugcuuggagcaguuccucuugccaugacgguaaggccugguugcacgucuguaucacaggggaugacaagaacgcaaccgccagcuucaucuauaauggaaggcucguggauuccguaguuucauggaguaaagagauucugcggacgcaggaaagcgagugcguguguauaaacggcacuugcacagucgugaugaccgacggcucugcuuccgggaaggcagauacuaaaauccuguuuauugaggaaggaaagaucgugcauacaucaacccucagcgguagugcccaacacgucgaggaauguucuugcuacccacgcuacccgggcguuagaugcguguguagggacaacuggaagggguccaaucggcccauaguagauauuaacaucaaagaccacagcaucgugucgucuuaugucugcuccggauuagugggcgacacgccucgcaagaaugauucaaguagcuccucucauugucuggacccaaacaaugaggaaggugggcacggaguuaaaggcugggcuuucgaugacggcaacgauguguggauggggcgaaccauuaaugagacaagcagacuuggauacgagacuuuuaaggucaucgaagguuggucaaaccccaaaaguaaguugcagauuaauaggcaagugauaguagaccggggcgaucguuccggguauagcggaaucuucucuguugagggcaaaucaugcauuaaccgcuguuuuuacguggaacugaucagagguaggaaggaggaaaaugagguccuauggaccaguaacagcaucguggucuucugcgggacauccggcacuuauggaaccggcucuuggccugacggggccgaucucaaucugaugccaauuuga

SEQ ID NO: 150194 - RNA, 1410 nt, Artificial Sequence
  derived and/or modified CDS sequence (opt3) from neuraminidase__InfluenzaA__AFH34977
augaaccccaaucagaagaucauuaccauaggcagcgugucccugacaaucucuacuauuugcuucuuuaugcagaucgccauucucaucacgaccgucacacuucacuucaaacaguacgaguuuaacucaccuccaaauaaccagguuaugcugugugaaccgacuauaaucgagagaaauauuaccgaaaucguguauuugacaaacaccacuauugagaaggaaaucugccccaaaccugcugaguacaggaauuggaguaagccacagugugggauaacaggauucgcacccuuuagcaaagacaacuccauucgguuaucugccgguggcgauaucuggguaacccgcgagccuuaugugucgugcgacccagauaaguguuaccaauucgcgcuggggcagggaacgacucuaaauaacguccauucaaauaacaccgugcgagaccguacacccuauagaacucuccugaugaaugaacuuggcguuccuuuucaccuggguaccaaacaggugugcauugcuuggagcaguuccucuugucaugaugggaaggccugguugcacgucugcaucacaggagacgauaagaacgcaaccgccagcuucaucuacaauggcaggcucguggacuccguaguuucauggaguaaagagauucugcggacgcaggaaagcgagugugugugcauaaacggcacuuguacagucgugaugaccgaugggucugcuuccggaaaggcagacacuaaaauccuguuuauugaggaagguaagaucgugcauacaucaacccucagcggcagugcccaacacgucgaggaaugcucuugcuauccacgcuacccggggguuagaugugugugcagggauaacuggaagggauccaaucggcccauaguagacauuaacaucaaagaucacagcaucgugucgucuuacgucuguuccggcuuagugggugacacgccucgcaagaaugacucaaguagcuccucucauugccuggauccaaacaaugaggaagggggacacggcguuaaaggcugggcuuucgacgaugggaacgacguguggaugggacgaaccauuaaugagacaagcagacuugguuaugagacuuuuaaggucaucgaaggcuggucaaaccccaaaaguaaguugcagauuaauaggcaagugauaguagaucguggggaccgguccggauacagcggcaucuucucuguugaggguaaaucauguauuaaccgcugcuuuuauguggaacugaucagagggaggaaggaggaaaccgagguccuauggacaaguaauagcaucguggucuucuguggcacuuccggaaccuacggcacagggucuuggccugauggagccgaccucaaccugaugccaauuuga

SEQ ID NO: 150195 - RNA, 1410 nt, Artificial Sequence
  derived and/or modified CDS sequence (opt3) from neuraminidase__InfluenzaA__AFH74468
augaaccccaaucagaagaucauuaccauaggcagcgugucccugacaaucucuacuauuugcuucuuuaugcaaacggccauccucauuaccacagucacucuucacuucaaacagugugaguuuaacucaccuccaaauaaccagguuaugcugugcgaaccgaccaucauagagagaaauaucacagaaauuguguacuugaccaacacuacaaucgagaaggaaauuugucccaaauuagcugaguauaggaauuggaguaagccucagugcgacaucaccggguucgcaccauuuagcaaagauaacuccauacggcugucugccggaggugacauuuggguaacgcgcgagcccuacgugucgugugauccugacaagugcuaucaauucgcgcuaggccaggggacuacccucaauaacguccauucaaauaacacagugcgagaucguacuccauacagaacccugcuuaugaaugaacugggaguucccuuucacuugggcacaaaacagguguguaucgcuuggagcaguuccucuugccaugacgguaaggccuggcuccacgucuguauuaccggggaugacaagaacgcaacggccagcuucaucuauaauggaaggcugguggauuccguaguuucauggaguaaagagauccugcggacucaggaaagcgagugcguguguauuaacggcacaugcaccgucgugaugacugacggcucugcuuccgggaaggcagauacaaaaauacucuuuaucgaggaaggacgcauugugcauaccucaacguuaagcgguagugcccaacacgucgaggaaugcucuuguuacccuagauauccaggcguuaggugcgugugucgggacaacuggaagggguccaaucgcccgaucguagauauaaacauuaaggaccacagcaucgugucgucuuacgucugcuccggacuggugggcgacacaccccggaaaaaugauucaaguagcuccucucauugucuugacccuaacaaugaggaaggugauaacgggguuaagggaugggcuuucgacgauggcaaugacguguggaugggcagaaccaucagcgagaaaucaagguugggguacgagacuuuuaaggucauugaaggauggaguaacccaaaauccaagcugcagaucaaucgacaggugauuguagaucgugguaaccgcagcggcuauucugggauauucucaguugagggaaaaaguugcaucaauagauguuuuuacguggaacuaauuaggggccggaaggaggaaaccgagguccucuggacaagcaacuccaucguggucuucugcgguacuucugggaccuauggcacaggaucguggcccgacggcgccgauaucaaucugaugccuauuuga

SEQ ID NO: 150196 - RNA, 1410 nt, Artificial Sequence; identical to SEQ ID NO: 146699
  derived and/or modified CDS sequence (opt3) from neuraminidase__InfluenzaA__AFH74469

SEQ ID NO: 150197 - RNA, 1410 nt, Artificial Sequence; identical to SEQ ID NO: 144647
  derived and/or modified CDS sequence (opt3) from neuraminidase__InfluenzaA__AFH74480

SEQ ID NO: 150198 - RNA, 1410 nt, Artificial Sequence; identical to SEQ ID NO: 144647
  derived and/or modified CDS sequence (opt3) from neuraminidase__InfluenzaA__AFH74491

SEQ ID NO: 150199 - RNA, 1410 nt, Artificial Sequence; identical to SEQ ID NO: 149690
  derived and/or modified CDS sequence (opt3) from neuraminidase__InfluenzaA__AFH74502

SEQ ID NO: 150200 - RNA, 1410 nt, Artificial Sequence
  derived and/or modified CDS sequence (opt3) from neuraminidase__InfluenzaA__AFH74513
augaaccccaaucagaagaucauuaccauaggcagcgugucccugacaaucucuacuauuugcuucuuuaugcaaaucgccauucucaucacgaccgucacacuucacuucaaacaguacgaguuuaacucaccuccaaauaaccagguuaugcugugugaaccgacuauaaucgagagaaauauuaccgaaaucguguauuugacaaacaccacuauugagaaggaaacaugccccaaauuagcugaguacaggaauuggaguaagccucagugugacaucaccggguucgcaccauuuagcaaagauaacuccauacggcugucugccggaggugacauuuggguaacgcgcgagcccuaugugucgugcgauccugacaaguguuaccaauucgcgcuaggccaggggacuacccucaauaacguccauucaaauaacacagugcgagaucguacuccauauagaacccugcuuaugaaugaacugggaguucccuuucacuugggcacaaaacaggugugcaucgcuuggagcaguuccucuugucaugacgguaaggccuggcuccacgucugcauuaccggggaugacaagaacgcaacggccagcuucaucuacaauggaaggcugguggauuccguaguuucauggaguaaagagauccugcggacucaggaaagcgagugugugugcauuaacggcacauguaccgucgugaugacugacggcucugcuuccgggaaggcagauacaaaaauacucuuuaucgaggaaggaaagauugugcauaccucaacguuaagcgguagugcccaacacgucgaggaaugcucuugcuauccucgcuacccaggcguuagaugugugugcagggacaacuggaagggguccaaucggccgaucguagauauaaacauuaaagaccacagcaucgugucgucuuacgucuguuccggacuggugggcgacacccccaggaagaaugauucaaguagcuccucucauugccuugacccuaacaaugaggaaggugggcacggaguuaaaggcugggcuuucgaugacggcaacgauguguggauggggcgaacaaucagcgagaagucaagauugggauaugagacuuuuaaagucauugaagguuggaguaauccaaaguccaaacugcagaucaaccgccaggugauuguagaccggggcaaucguagcggguacucuggaauauucucaguugagggcaagaguuguaucaaccgcugcuuuuauguggaacuaauuagagguaggaaggaggaaaccgagguccucuggacaagcaauuccaucguggucuucugugggacuucuggcaccuacggaacaggcucguggcccgauggggccgacaucaaccugaugccuguguga

SEQ ID NO: 150201 - RNA, 1410 nt, Artificial Sequence
  derived and/or modified CDS sequence (opt3) from neuraminidase__InfluenzaA__AFH74524
augaaccccaaucagaagaucauuaccauaggcagcgugucccugacaaucucuacuauuugcuucuuuaugcagaucgccauucucaucacgaccgucacacuucacuucaaacaguacgaguuuaacucaccuccaaauaaccagguuaugcugugugaaccgacuauaaucgagagaaauauuaccgaaaucguguauuugacaaacaccacuauugagaaggaaaucugccccaaauuagcugaguacaggaauuggaguaagccucagugugacauaacaggguucgcaccauuuagcaaagauaacuccauucggcugucugccggaggugacaucuggguaacccgcgagcccuaugugucgugcgauccugacaaguguuaccaauucgcgcuaggccaggggacgacuauuaauaacguccauucaaauaacaccgugcgagaucguacaccauauagaacucuccugaugaaugaacuuggaguucccuuucaccugggcaccaaacaggugugcaucgcuuggagcaguuccucuugucaugacgguaaggccugguugcacgucugcaucacaggggaugacaagaacgcaaccgccagcuucauuuacaauggaaggcucguggauuccguaguuucauggaguaaagagauacugcggacgcaggaaagcgagugugugugcaucaacggcacuuguacagucgugaugaccgacggcucugcuuccgggaaggcagauacuaaaauucuguuuaucgaggaaggaaagauagugcauacaucaacccucagcgguagugcccaacacgucgaggaaugcucuugcuauccucgcuacccaggcguuagaugugugugcagggacaacuggaagggguccaaucggccgauuguagauaucaacaugaaagaccacagcaucgugucgucuuacgucuguuccggauuagugggcgacacgccccgcaagaaugauucaaguagcuccucucauugccuggacccuaacaaugaggaaggugggcacggaguuaaaggcugggcuuucgaugacggcaacgauguguggauggggcgaaccauuagcgagaagucaagacuuggauaugagacauuuaaagucaucgaagguuggaguaauccaaaguccaaauugcagauuaacaggcaagugauaguagaccggggcaaucguagcggguacucuggaaucuucucaguugagggcaagaguuguauuaaccgcugcuuuuauguggaacugaucagagguaggaaggaggaaacugagguccuauggaccagcaauuccguggucguguucugugggacaucuggcacuuacggaaccggcucguggcccgauggggccgacaucaaccucaugccuauuuga

SEQ ID NO: 150202 - RNA, 1410 nt, Artificial Sequence; identical to SEQ ID NO: 144647
  derived and/or modified CDS sequence (opt3) from neuraminidase__InfluenzaA__AFH74535

SEQ ID NO: 150203 - RNA, 1410 nt, Artificial Sequence; identical to SEQ ID NO: 149683
  derived and/or modified CDS sequence (opt3) from neuraminidase__InfluenzaA__AFH74546

SEQ ID NO: 150204 - RNA, 1410 nt, Artificial Sequence; identical to SEQ ID NO: 149683
  derived and/or modified CDS sequence (opt3) from neuraminidase__InfluenzaA__AFH74557

SEQ ID NO: 150205 - RNA, 1410 nt, Artificial Sequence; identical to SEQ ID NO: 149683
  derived and/or modified CDS sequence (opt3) from neuraminidase__InfluenzaA__AFH74568

SEQ ID NO: 150206 - RNA, 1410 nt, Artificial Sequence; identical to SEQ ID NO: 149686
  derived and/or modified CDS sequence (opt3) from neuraminidase__InfluenzaA__AFH74579

SEQ ID NO: 150207 - RNA, 1410 nt, Artificial Sequence
  derived and/or modified CDS sequence (opt3) from neuraminidase__InfluenzaA__AFH74590
augaaccccaaucagaagaucauuaccauaggcagcgugucccugacaaucucuacuauuugcuucuuuaugcagaucgccauucucaucacgaccgucacacuucacuucaaacaguacgaguuuaacucaccuccaaauaaccagguuaugcugugugaaccgacuauaaucgagagaaauauuaccgaaaucguguauuugacaaacaccacuauugagaaggaaaucugccccaaauuagcugaguacaggaauuggaguaagccucagugugacauaacaggguucgcaccauuuagcaaagauaacuccauucggcugucugccggaggugacaucuggguaacccgcgagcccuaugugucgugcgauccugacaaguguuaccaauucgcgcuaggccaggggacgacucucaauaacguccauucaaauaacaccgugcgagaucguacaccauauagaacucugcuuaugaaugaacugggaguucccuuucacuugggcaccaaacaggugugcauugcuuggagcaguuccucuugucaugacgguaaggccuggcuccacgucugcaucacaggggaugacaagaacgcaaccgccagcuucaucuacaauggaaggcugguggauuccguaguuucauggaguaaagagauucugcggacgcaggaaagcgagugugugugcauaaacggcacuuguacagucgugaugaccgacggcucugcuuccgggaaggcagauacuaaaauccucuuuauugaggaaggaaagaucgugcauacaucaaccuuaagcgguagugcccaacacgucgaggaaugcucuugcuauccucgcuacccaggcguuagaugugugugcagggacaacuggaagggguccaaucggccgauaguagauauuaacaucaaagaccacagcaucgugucgucuuacgucuguuccggacuggugggcgacacgccccgcaagaaugauucaaguagcuccucucauugccuugacccuaacaaugaggaaggugggcacggaguuaaaggcugggcuuucgaugacggcaacgauguguggauggggcgaaccauuagcgagaagucaagauugggauaugagacauuuaaagucaucgaagguuggaguaauccaaaguccaaacugcagauuaacaggcaagugauaguagaccggggcaaucguagcggguacucuggaaucuucucaguugagggcaagaguuguauuaaccgcugcuuuuauguggaacuaaucagagguaggaaggaggaaacugagguccucuggaccagcaauuccaucguggucuucugugggacaucuggcacuuacggaaccggcucguggcccgauggggccgacauuaaccugaugagcguguga

SEQ ID NO: 150208 - RNA, 1410 nt, Artificial Sequence; identical to SEQ ID NO: 149683
  derived and/or modified CDS sequence (opt3) from neuraminidase__InfluenzaA__AFH74601

SEQ ID NO: 150209 - RNA, 1410 nt, Artificial Sequence
  derived and/or modified CDS sequence (opt3) from neuraminidase__InfluenzaA__AFH74612
augaaccccaaucagaagaucauuaccauaggcagcgugucccugacaaucucuacuauuugcuucuuuaugcaaacggccauccucauuaccacagucacucuucacuucaaacagugugaguuuaacucaccuccaaauaaccagguuaugcugugcgaaccgaccaucauagagagaaauaucacagaaauuguguacuugaccaacacuacaaucgagaaggaaauuugucccaaauuagcugaguauaggaauuggaguaagccucagugcgacaucaccggguucgcaccauuuagcaaagauaacuccauacggcugucugccggaggugacauuuggguaacgcgcgagcccuacgugucgugugauccugacaagugcuaucaauucgcgcuaggccaggggacuacccucucaaauguccauagcaacaauacagugcgagaucguacuccauacagaacccugcuuaugaacgaacugggaguucccuuucacuugggcacaaaacagguguguaucgcuuggaguuccucuagcugccaugacgguaaggccuggcuccacgucuguauuaccggggaugacaagaaugcaacggccuccuucaucuauaacggaaggcugguggauucaguaguuaguuggagcaaagagauccugcggacucaggaaucugagugcguguguauuaauggcacaugcaccgucgugaugacugacggcuccgcuucagggaaggcagauacaaaaauacucuuuaucgaggaaggaaagauugugcauaccagcacguuaagugguucugcccaacacgucgaggaaugcuccuguuacccucgcuauccaggcguuagaugcguguguagggacaacuggaaggggagcaaccggccgaucguagauauaaauauuaaagaccacucgaucgugucuuccuacgucugcucaggacuggugggcgacacccccaggaagaacgauaguagcuccucuagccauugucuugacccuaauaacgaggaaggugggcacggaguuaaaggcugggcuuucgaugacggcaaugauguguggauggggcgaacaaucucagagaagaguagauugggauacgagacuuuuaaagucauugaagguugguccaacccaaagagcaaacugcagaucaaucgccaggugauuguagaccggggcaaccguucuggguauucaggaauauucaguguugagggcaagagcugcaucaaucgcuguuuuuacguggaacuaauuagagguaggaaggaggaaaccgagguccucuggacauccaacucuaucguggucuucugcgggacuucgggcaccuauggaacaggcagcuggcccgauggggccgacaucaaucugaugccuauuuga

SEQ ID NO: 150210 - RNA, 1410 nt, Artificial Sequence; identical to SEQ ID NO: 149683
  derived and/or modified CDS sequence (opt3) from neuraminidase__InfluenzaA__AFH74623

SEQ ID NO: 150211 - RNA, 1410 nt, Artificial Sequence; identical to SEQ ID NO: 149683
  derived and/or modified CDS sequence (opt3) from neuraminidase__InfluenzaA__AFH74634

SEQ ID NO: 150212 - RNA, 1410 nt, Artificial Sequence; identical to SEQ ID NO: 149690
  derived and/or modified CDS sequence (opt3) from neuraminidase__InfluenzaA__AFH74645

SEQ ID NO: 150213 - RNA, 1410 nt, Artificial Sequence; identical to SEQ ID NO: 149690
  derived and/or modified CDS sequence (opt3) from neuraminidase__InfluenzaA__AFH74656

SEQ ID NO: 150214 - RNA, 1410 nt, Artificial Sequence; identical to SEQ ID NO: 149690
  derived and/or modified CDS sequence (opt3) from neuraminidase__InfluenzaA__AFH74667

SEQ ID NO: 150215 - RNA, 1410 nt, Artificial Sequence; identical to SEQ ID NO: 149690
  derived and/or modified CDS sequence (opt3) from neuraminidase__InfluenzaA__AFH74678

SEQ ID NO: 150216 - RNA, 1410 nt, Artificial Sequence; identical to SEQ ID NO: 144647
  derived and/or modified CDS sequence (opt3) from neuraminidase__InfluenzaA__AFH74689

SEQ ID NO: 150217 - RNA, 1410 nt, Artificial Sequence; identical to SEQ ID NO: 144647
  derived and/or modified CDS sequence (opt3) from neuraminidase__InfluenzaA__AFH74700

SEQ ID NO: 150218 - RNA, 1410 nt, Artificial Sequence
  derived and/or modified CDS sequence (opt3) from neuraminidase__InfluenzaA__AFH74711
augaaccccaaucagaagaucauuaccauaggcagcgugucccugacaaucucuacuauuugcuucuuuaugcagaucgccauucucaucacgaccgucacacuucacuucaaacaguacgaguuuaacucaccuccaaauaaccagguuaugcugugugaaccgacuauaaucgagagaaauauuaccgaaaucguguauuugacaaacaccacuauugagaaggaaaucugccccaaauuagcugaguacaggaauuggaguaagccucagugugacauaacaggguucgcaccauuuagcaaagauaacuccauucggcugucugccggaggugacaucuggguaacccgcgagcccuaugugucgugcgauccugacaaguguuaccaauucgcgcuaggccaggggacgacucucaauaacguccauucaaauaacaccgugcgagaucguacaccauauagaacucugcuuaugaaugaacugggaguucccuuucacuugggcaccaaacaggugugcauugcuuggagcaguuccucuugucaugacgguaaggccuggcuccacgucugcaucacaggggaugacaagaacgcaaccgccagcuucaucuacaauggaaggcugguggauuccguaguuucauggaguaaagagauucugcggacgcaggaaagcgagugugugugcauaaacggcacuuguacagucgugaugaccgacggcucugcuuccgggaaggcagauacuaaaauccucuuuauugaggaaggaaagaucgugcauacaucaaccuuaagcgguagugcccaacacgucgaggaaugcucuugcuauccucgcuacccauguguuagaugcguguguagggacaacuggaagggcuccaaucggccgauaguagauauuaacaucaaagaccacagcaucgugucgucuuacgucugcuccgggcuggugggagacacgccccgcaagaaugauucaaguagcuccucucauugucuugacccuaacaaugaggaaggcggucacgggguuaaaggaugggcuuucgaugacggcaacgauguguggaugggccgaaccauuagcgagaagucaagauugggguaugagacauuuaaagucaucgaaggauggaguaauccaaaguccaaacugcagauuaacaggcaagugauaguagaccgggguaaucguagcggcuacucugggaucuucucaguugagggaaagaguugcauuaaccgcuguuuuuauguggaacuaaucagaggcaggaaggaggaaacugagguccucuggaccagcaauuccaucguggucuucugcgguacaucugggacuuacggcaccggaucguggcccgauggcgccgacauuaaccugaugccuguguga

SEQ ID NO: 150219 - RNA, 1410 nt, Artificial Sequence; identical to SEQ ID NO: 149683
  derived and/or modified CDS sequence (opt3) from neuraminidase__InfluenzaA__AFH74722

SEQ ID NO: 150220 - RNA, 1410 nt, Artificial Sequence; identical to SEQ ID NO: 149683
  derived and/or modified CDS sequence (opt3) from neuraminidase__InfluenzaA__AFH74733

SEQ ID NO: 150221 - RNA, 1410 nt, Artificial Sequence
  derived and/or modified CDS sequence (opt3) from neuraminidase__InfluenzaA__AFH74744
augaaccccaaucagaagaucauuaccauaggcagcgugucccugacaaucucuacuauuugcuucuuuaugcagaucgccauucucaucacgaccgucacacuucacuucaaacaguacgaguuuaacucaccuccaaauaaccagguuaugcugugugaaccgacuauaaucgagagaaauauuaccgaaaucguguauuugacaaacaccacuauugagaaggaaaucugccccaaauuagcugaguacaggaauuggaguaagccucagugugacauaacaggguucgcaccauuuagcaaagauaacuccauucggcugucugccggaggugacaucuggguaacccgcgagcccuaugugucgugcgauccugacaaguguuaccaauucgcgcuaggccaggggacgacucucaauaacguccauucaaauaacaccgugcgagaucguacaccauauagaacucugcuuaugaaugaacugggaguucccuuucacuugggcaccaaacaggugugcauugcuuggagcaguuccucuugucaugacgguaaggccuggcuccacgucugcaucacaggggaugacaagaacgcaaccgccagcuucaucuacaauggaaggcugguggauuccguaguuucauggaguaaagagauucugcggacgcaggaaagcgagugugugugcauaaacggcacuuguacagucgugaugaccgacggcucugcuuccgggaaggcagauacuaaaauccucuuuauugaggaaggaaagaucgugcauacaucaaccuuaagcgguagugcccaacacgucgaggaaugcucuugcuauccucgcuacccaggcguuagaugugugugcagggacaacuggaagggguccaaucggccgauaguagauauuaacaucaaagaccacagcaucgugucgaauuacgucuguucuggacuggugggcgacacgccccgcaagaacgauuccucaaguagcucccauugccuugacccuaauaacgaggaaggugggcacggaguuaaaggcugggcuuucgaugacggcaaugauguguggauggggcgaaccauuucugaaaagagcagauugggauaugagacauuuaaagucaucgaggguuggucaaacccaaagaguaaacugcagauuaauaggcaagugauaguagaccggggcaaccguuccggguacagcggaaucuucucuguugagggcaagucauguauuaaucgcugcuuuuauguggaacuaaucagagguaggaaggaggaaacugagguccucuggaccaguaacagcaucguggucuucugugggacauccggcacuuacggaaccggcucuuggcccgauggggccgacauuaaucugaugccuguguga

SEQ ID NO: 150222 - RNA, 1410 nt, Artificial Sequence; identical to SEQ ID NO: 149683
  derived and/or modified CDS sequence (opt3) from neuraminidase__InfluenzaA__AFH74755

SEQ ID NO: 150223 - RNA, 1410 nt, Artificial Sequence; identical to SEQ ID NO: 149683
  derived and/or modified CDS sequence (opt3) from neuraminidase__InfluenzaA__AFH74766

SEQ ID NO: 150224 - RNA, 1410 nt, Artificial Sequence; identical to SEQ ID NO: 149683
  derived and/or modified CDS sequence (opt3) from neuraminidase__InfluenzaA__AFH74777

SEQ ID NO: 150225 - RNA, 1410 nt, Artificial Sequence; identical to SEQ ID NO: 144647
  derived and/or modified CDS sequence (opt3) from neuraminidase__InfluenzaA__AFH74788

SEQ ID NO: 150226 - RNA, 1410 nt, Artificial Sequence
  derived and/or modified CDS sequence (opt3) from neuraminidase__InfluenzaA__AFH74799
augaaccccaaucagaagaucauuaccauaggcagcgugucccugacaaucucuacuauuugcuucuuuaugcagaucgccauucucaucacgaccgucacacuucacuucaaacaguacgaguuuaacucaccuccaaauaaccagguuaugcugugugaaccgacuauaaucgagagaaauauuaccgaaaucguguauuugacaaacaccacuauugagaaggaaaucugccccaaauuagcugaguacaggaauuggaguaagccucagugugacauaacaggguucgcaccauuuagcaaagauaacuccauucggcugucugccggaggugacaucuggguaacccgcgagcccuaugugucgugcggcccugauaaguguuaccaauucgcgcuagggcagggaacgacucucaauaacguccauucaaauaacaccgugcgagaccguacaccauauagaacucugcuuaugaaugaacugggcguucccuuucacuuggguaccaaacaggugugcauugcuuggagcaguuccucuugucaugaugggaaggccuggcuccacgucugcaucacaggagacgauaagaacgcaaccgccagcuucaucuacaauggcaggcugguggacuccguaguuucauggaguaaagagauucugcggacgcaggaaagcgagugugugugcauaaacggcacuuguacagucgugaugaccgaugggucugcuuccggaaaggcagacacuaaaauccucuuuauugaggaagguaagaucgugcauacaucaaccuuaagcggcagugcccaacacgucgaggaaugcucuugcuauccucgcuacccagggguuagaugugugugcagggauaacuggaagggauccaaucggccgauaguagacauuaacaucaaagaucacagcaucgugucgucuuacgucuguuccggccuggugggugacacgccccgcaagaaugacucaaguagcuccucucauugccuugauccuaacaaugaggaagggggacacggcguuaaaggcugggcuuucgacgaugggaacgacguguggaugggacgaaccauuagcgagaagucaagauuggguuaugagacauuuaaagucaucgaaggcuggaguaauccaaaguccaaacugcagauuaacaggcaagugauaguagaucgggggaaucguagcggauacucuggcaucuucucaguugaggguaagaguuguauuaaccgcugcuuuuauguggaacuaaucagagggaggaaggaggaaacugagguccucuggaccagcaauuccaucguggucuucuguggcacaucuggaacuuacggcaccgggucguggcccgacggagccgauauuaaccugaugccuguguga

SEQ ID NO: 150227 - RNA, 1410 nt, Artificial Sequence; identical to SEQ ID NO: 149703
  derived and/or modified CDS sequence (opt3) from neuraminidase__InfluenzaA__AFH74810

SEQ ID NO: 150228 - RNA, 1410 nt, Artificial Sequence; identical to SEQ ID NO: 149703
  derived and/or modified CDS sequence (opt3) from neuraminidase__InfluenzaA__AFH74821

SEQ ID NO: 150229 - RNA, 1410 nt, Artificial Sequence; identical to SEQ ID NO: 149703
  derived and/or modified CDS sequence (opt3) from neuraminidase__InfluenzaA__AFH74832

SEQ ID NO: 150230 - RNA, 1410 nt, Artificial Sequence; identical to SEQ ID NO: 149703
  derived and/or modified CDS sequence (opt3) from neuraminidase__InfluenzaA__AFH74843

SEQ ID NO: 150231 - RNA, 1410 nt, Artificial Sequence; identical to SEQ ID NO: 149683
  derived and/or modified CDS sequence (opt3) from neuraminidase__InfluenzaA__AFH74854

SEQ ID NO: 150232 - RNA, 1410 nt, Artificial Sequence; identical to SEQ ID NO: 149683
  derived and/or modified CDS sequence (opt3) from neuraminidase__InfluenzaA__AFH74865

SEQ ID NO: 150233 - RNA, 1410 nt, Artificial Sequence; identical to SEQ ID NO: 149683
  derived and/or modified CDS sequence (opt3) from neuraminidase__InfluenzaA__AFH74876

SEQ ID NO: 150234 - RNA, 1410 nt, Artificial Sequence; identical to SEQ ID NO: 149683
  derived and/or modified CDS sequence (opt3) from neuraminidase__InfluenzaA__AFH74887

SEQ ID NO: 150235 - RNA, 1410 nt, Artificial Sequence; identical to SEQ ID NO: 149683
  derived and/or modified CDS sequence (opt3) from neuraminidase__InfluenzaA__AFH74898

SEQ ID NO: 150236 - RNA, 1410 nt, Artificial Sequence; identical to SEQ ID NO: 149683
  derived and/or modified CDS sequence (opt3) from neuraminidase__InfluenzaA__AFH74909

SEQ ID NO: 150237 - RNA, 1410 nt, Artificial Sequence
  derived and/or modified CDS sequence (opt3) from neuraminidase__InfluenzaA__AFH74920
augaaccccaaucagaagaucauuaccauaggcagcgugucccugacaaucucuacuauuugcuucuuuaugcaaacggccauccucauuaccacagucacucuucacuucaaacagugugaguuuaacucaccuccaaauaaccagguuaugcugugcgaaccgaccaucauagagagaaauaucacagaaauuguguacuugaccaacacuacaaucgagaaggaaauuugucccaaauuagcugaguauaggaauuggaguaagccucagugcgacaucaccggguucgcaccauuuagcaaagauaacuccauacggcugucugccggaggugacauuuggguaacgcgcgagcccuacgugucgugugauccugacaagugcuaucaauucgcgcuaggccaggggacuacccucaauaacguccauucaaauaacacagugcgagaucguacuccauacagaacccugcuuaugaaugaacugggaguucccuuucacuugggcacaaaacagguguguaucgcuuggagcaguuccucuugccaugacgguaaggccuggcuccacgucuguauuaccggggaugacaagaacgcaacggccagcuucaucuauaauggaaggcugguggauuccguaguuucauggaguaaagagauccugcggacucaggaaagcgagugcguguguauuaacggcacaugcaccgucgugaugacugacggcucugcuuccgggaaggcagauacaaaaauacucuuuaucgaggaaggaaagauugugcauaccucaacguuaagcgguagugcccaacacgucgaggaaugcucuuguuacccucgcuauccaggcguuagaugcguguguagggacaacuggaagggguccaaucggccgaucguagauauaaacauuaaagaccacagcaucgugucgucuuacgucugcuccggacuggugggcgacacccccaggaagaaugauucaaguagcuccucucauugucuugacccuaacaaugaggaaggugaucacgggguuaaaggaugggcuuucgacgauggcaacgacguguggaugggccgaacaaucagcgagaagucaagauugggguacgagacuuuuaaagucauugaaggauggaguaauccaaaguccaaacugcagaucaaccgccaggugauuguagaucgggguaaucguagcggcuauucugggauauucucaguugagggaaagaguugcaucaaccgcuguuuuuacguggaacuaauuagaggcaggaaggaggaaaccgagguccucuggacaagcaauuccaucguggucuucugcgguacuucugggaccuauggcacaggaucguggcccgacggcgccgauaucaaccugaugccuauuuga

SEQ ID NO: 150238 - RNA, 1410 nt, Artificial Sequence; identical to SEQ ID NO: 144647
  derived and/or modified CDS sequence (opt3) from neuraminidase__InfluenzaA__AFH74931

SEQ ID NO: 150239 - RNA, 1410 nt, Artificial Sequence; identical to SEQ ID NO: 144647
  derived and/or modified CDS sequence (opt3) from neuraminidase__InfluenzaA__AFH74942

SEQ ID NO: 150240 - RNA, 1410 nt, Artificial Sequence; identical to SEQ ID NO: 149683
  derived and/or modified CDS sequence (opt3) from neuraminidase__InfluenzaA__AFH74953
